United States Patent Application Publication US 2024/0263153 A1 - sequence listing, part 5

SEQ ID NO: 11548 - protein, 522 aa, Unknown
  Description of Unknown: Integrase A116 sequence
  PF07508,SSF53041,PS51737,cd00338,PTHR30461:SF3,PF00239, PS51736,SM00857,G3DSA:3.40.50.1390,PTHR30461
MMTCVFVVCLVNHRGLSGVRYKPMRALVVIRLSRVTDATTSPERQLESCQQLCAQRGWDVVGVAEDLDVSGAVDPFDRKRRPNLARWLAFEEQPFDVIVAYRVDRLTRSIRHLQQLVHWAEDHKKLVVSATEAHFDTTTPFAAVVIALMGTVAQMELEAIKERNRSAAHFNIRAGKYRGSLPPWGYLPTRVDGERRLVPDPVQRERILEVYHRVVDNHEPLHLVAHDLNRRGVLSPKDYFAKLQGREPQGREWSATALKRSLISEAMLGYATLNGKTVRDDDGAPLVRAEPILTREQLEALRAELVKTDRAKPAVSTPSLLLRVLFCAVCGEPAYKFDAGRKIPRYRCRSFGFAQRCGNGTVPIAEWDAFCEEQVLDLLGDSERLEKVWVAGSDSAVELAEVNAELVDLTSLIGSPAYRVGSPQREALDARIAALAARQEELEGLEARPSGWEWRETGQRFGDWWREQDTSAKNTWLRSMNVRLTFDVRGGLTRTIDFGDLQEYEQHLRLGSVVEQLHAGMS

SEQ ID NO: 11549 - protein, 522 aa, Unknown
  Description of Unknown: Integrase A117 sequence
  PF07508,SSF53041,PS51737,cd00338,PTHR30461:SF3, PF00239,PS51736,SM00857,G3DSA:3.40.50.1390,PTHR30461
MMTCVFVVCLVNHRGLSGVRYKPMRALVVIRLSRVTDATTSPERQLESCQQLCAQRGWDVVGVAEDLDVSGAVDPFDRKRRPNLARWLSFEEQPFDVLVAYRVDRLTRSIRHLQQLVHWAEDHKKLIVSATEAHFDTTSPFAAVVIALMGTVAQMELEAIKERNRSAAHFNIRAGKYRGSLPPWGYMPARVDGEWRLLVDPVQRERILEVYHRVVDNHEPLHLVAHDLNQRGILSPKDYFAQLQGREPQGRAWSATALKRSLISEAMLGYTTLNGKTVRDDDGAPLVRAEPILTREQLEALRAELVKTDRTKPAVSAPSLLLRVLFCAVCGEPAYKFDAGRKIPRYRCRSFGFAQRCGNGTIPIAEWDAFCEEQVLDLLGDAERLEKVWVAGSDSAVELAEVNAELVDLTSLIGSPAYRAGSPQREALDARIAALAARQEELEGLEARPSGWEWRETGQRFGDWWREQDTAAKNTWLRSMNVRLTFDVRGGLTRTIDFGDLQEYEQHLRLGSVVEQLHTGMS

SEQ ID NO: 11550 - protein, 521 aa, Unknown
  Description of Unknown: Integrase A118 sequence
  PF07508,G3DSA:1.10.10.2600,SSF53041,PF13408,PS51737,cd00338, PTHR30461:SF3,PF00239,PS51736,SM00857,G3DSA:3.40.50.1390, PTHR30461
MKNVITIEANAPRNSELASISLPKKRRVAGYARVSTDHEDQTTSYESQMRYYAEYISTRSDWEFVKMYSDEGISGTNTKLRVGFKSMIEDALAGKIDLIITKSVSRFARNTVDSLTTVRKLKEVGVEIYFEKENIWTLDSKGELLITIMSSLAQEESRSISENVTWGLRKQFAEGKVHFPYTNVMGFEKGENGEIVVNQEEAKTVRYIFQQALLGKTPYSIAKDLTQQGILSPSGKNHWSSVTIKRMLRNEKYKGDALLQKTYTIDFLSKKKNINKGELPQYYVENNHEAIVDKETFDAVQASLDRKEKGKGSTTLFSSKLVCGDCGHYFGSKVWHSTSKYRRVIYQCNEKYKGEKKCTTPHVTEDEIKDWFVTAINKVISNKDEIIQNLEMLLDVGESSDLERRLVELETEVEVVTQMVSNLVKENAIMPQDQDTYQKKYSNLVERHDALVSEIESIEKQLLEAASHQKDLKEFLKTLNQQSELISEFDELLWETMVDEIKIFCDQTVAIKFKNGIEVVE

SEQ ID NO: 11551 - protein, 521 aa, Unknown
  Description of Unknown: Integrase A119 sequence
  PF07508,SSF53041,PS51737,cd00338,PTHR30461:SF3, PF00239,PS51736,SM00857,G3DSA:3.40.50.1390,PTHR30461
MRVLGRIRLSRATDESTSVERQREIIAQWASLHGHQIVGWAEDQDVSGTVDPFKAPALGPWFKEDKRGEWDILCCWKLDRLTRSAIRLSAVIGWCLDHDKTIVSCGEEYLDISTPVGRLIAGVIGFLAEGEREAISERTLASQKKLRETGRWGGGKIFYGYKAAERQDAAGWELVPDEHASKVLYGIIEKVLAGQSTESVARELNEAGEMAPLDYQRHRAGKPTKGGMWSNAHIRQQLRSKALLGHMTHNGKTVRDEDGLPILKGPPLIDQDKFDQLQGVLENRSFTVSQRSTNASPLLSVAFCGMTVEDGVCGKPLHIRQHRRNGKLYRYYQCTGGADGHVKTHTEANIIKADELEEKFENWFLAVYGDERVKEQVFIPASDQSAEKAELVRAAQDIAPLYAAAASGTMKSLYLSQLESFDRRIAELDKMPTESARYEWREQTKTYGEVWETSTTEERRQLLMKRKVRAEVAVPKGDGRYRSSGQAMIHMFALDIDMEAFEARAAEERRKYGIPDDEVAL

SEQ ID NO: 11552 - protein, 521 aa, Unknown
  Description of Unknown: Integrase A120 sequence
  PF07508,SSF53041,PS51737,cd00338,PTHR30461:SF3,PF00239, PS51736,SM00857,G3DSA:3.40.50.1390,PTHR30461
MTCVFVVCLVNHRGLSGVRYKPMRALVVIRLSRVTDATTSPERQLESCQRLCAQRGWDVVGVAEDLDVSGAVDPFDRKRRPNLARWLAFEEQPFDVIVAYRVDRLTRSIRHLQQLVHWAEDHKKLVVSATEAHFDTTTPFAAVVIALMGTVAQMELEAIKERNRSAAHFNIRAGKYRGSLPPWGYLPTRVDGEWRLVPDPVQRERILEVYHRVVDNHEPLHLVAHDLNRRGVLSPKDYFAKLQGREPQGREWSATALKRSLISEAMLGYATLNGKTVRDDDGAPLVRAEPILTREQLGALRAELVKTDRTKPAVATPSLLLRVLFCAVCGEPAYKFDAGRKIPRYRCRSFGFAARCGNGTVPIAEWDAFCEEQVLDLLGDSERLEKVWIAGSDSAVELAEVNAELVDLTSLIGSPAYRVGSPQREALDARIAALAARQEELEGLEARPSGWEWRETGQRFGDWWREQDTAAKNTWLRSMNVRLTFDVRGGLTRTIDFGDLQEYEQHLRLGSVVERLHTGMS

SEQ ID NO: 11553 - protein, 521 aa, Unknown
  Description of Unknown: Integrase A121 sequence
  PF07508,G3DSA:1.10.10.2600,SSF53041,PF13408,PS51737, cd00338,PTHR30461:SF3,PF00239,PS51736,SM00857, G3DSA:3.40.50.1390,PTHR30461
MARITKIETTKSFVKERKIRVAAFTRVSTKSEEQLLSLEIQKEHYESYINANSSWEYAGLYYDEGISGTKIEKREGLLALLKDCEDGKIDRVITKSISRFSRNTTDCLEMVRKLTSLKVFLFFEKENIDTEHMSSELMLSILSSIAESESKSISQNSKWSIKNHFKAGTFIISYPPYGYENKDGKMNIVPKEADIVKEIFTMTINGMGTHLIARELNNRSIPSKKGDKWHGSTVRGILQNEKYTGDAIFQKTYTDDNYNRHINYGEENMYLYKNHHEPIISHEIFDKVAEVIKQRGREKSIEKGTGKYQSRYVFSGKIYCGECGATFKRRQHYKPSGDYVAWCCNRHITDKNACSMMYIRDEDIKTTFLRMIRKLQTVHDQVLKPFVMSLKGTNNKQRLKQVLALEEQIEKNAEQATVLTNLMSSGYIEPEVFHAENNQLTLEADRLARNKQLIVKSINGDLSHLDEAQKLLRFTSKKEVITEFNDALFLEYVDTIKVNNRNEITFALKCGLNLTERLVKI

SEQ ID NO: 11554 - protein, 521 aa, Unknown
  Description of Unknown: Integrase A122 sequence
  PF07508,G3DSA:1.10.10.2600,SSF53041,PF13408,PS51737,cd00338, PTHR30461:SF3,PF00239,PS51736,SM00857,G3DSA:3.40.50.1390, PTHR30461
MKNVITIGANAPRNSELASISLPKKRRVAGYARVSTDHEDQTTSYESQMKYYTEYISSRSDWEFVKMYSDEGISGTNTKLRVGFKSMIEDALAGKIDLIITKSVSRFARNTVDSLTTVRKLKEVGVEIYFEKENIWTLDSKGELLITIMSSLAQEESRSISENVTWGLRKQFAEGKVHFPYTNVMGFEKGENGEIVVNQEDAKTVRYIFQQALLGKTPYSIAKDLTQQGILSPSGKNHWSSVTIKRMLRNEKYKGDALLQKTYTIDFLSKKKNINKGELPQYYVENNHEAIVDKETFDAVQATLDRKEKGKGSTTLFSSKLVCGDCGHYFGSKVWHSTSKYRRVIYQCNEKYKGEKKCTTPHVTEDEIKDWFVSAINKVISNKDEIISNLETLLEISGTADLEQRMKELETEVEVVSQMISKLVTDNAVMPQNQDVYQEKYRNLVDRYDALIVELESVEKEHLDKAKRNKELQAFLKTLKSQECLVTEFDDLLWETAVERIIIKENRNIEFIFKNGEVTVH

SEQ ID NO: 11555 - protein, 521 aa, Unknown
  Description of Unknown: Integrase A123 sequence
  PF07508,G3DSA:1.10.10.2600,SSF53041,PF13408,PS51737, cd00338,PTHR30461:SF3,PF00239,PS51736,SM00857, G3DSA:3.40.50.1390,PTHR30461
MKKVITIEPARPVHQVEETSVFTRRRVAGYARVSTDHEEQATSYEAQMKYYTDYINSRIDWEFVKMYSDEGITGTNTKSRMGFKEMINDALDGKIDLIITKSVSRFARNTVDSLSTVRKLKEHGVEIYFEKENIWTFDSKGELLITIMSSLAQEESRSISENVKWGKRKQFERGKVSIPFKSTLGFQRGEHGELVVNQEEAKLVRYIFHEFLTGKNCNTIAKSLTEKGILTPMGKTKWTFGTIKRILQNEKYKGDALLQKTFVTDFLTKSTKVNEGELPQYYVENNHEAIIEKEVFELVQVEFVKQKQRKSSKTLFSGKLICESCGAAFGSKVWHSNSKYRRVVYRCNHKYDGDKKCKTPHVIENEVKQWFIEAMNQVIENKAEILANLEALRKVVANTSELDSEISRLETELTDLTSEVEQLISDNTRTIQDQTSYQNTYNQLASQYEEKKAELERLKVEKADKQKRAVKVKDVIDTFTHQQCLLTAFDEKLWNTMVEQVIITKEKSAIFTFKSGQEIII

SEQ ID NO: 11556 - protein, 521 aa, Unknown
  Description of Unknown: Integrase A124 sequence
  PF07508,G3DSA:1.10.10.2600,SSF53041,PF13408,PS51737,cd00338, PTHR30461:SF3,PF00239,PS51736,SM00857,G3DSA:3.40.50.1390, PTHR30461
MKKVITIEPAKQVSHKVDLPSFTKRRVAGYARVSTDHEDQTTSYEAQMKYYTDYINNRSDWEFVKMYSDEGISGTNTKARIGFQRMVEDALDGKIDLILTKSVSRFARNTVDSLSTVRKLKEAGVEIYFEKENIWTFDSKGELLITIMSSLAQEESRSISENVTWGRRRQLAEGQVTFSYSQVLGFKKSDTGGFEIDHEEAKIVRYIFHQVLLGNNPNKIARELTAQGIPTPQGKRQWSYGTVKRMLRNEKYKGDALLQKSFTTDFLTKSTKPNEGELPQYYVENNHEAIIKREVFDLVQVELDKLEKKRQTSNIFTGRLFCGDCGSAFGSKVWHSTSKYKRTIYQCNAKYKGEHKCRTPHVTEEEIKGWFLSAINQLLSNRDEIIANTELLIDMAKDTSPLESRIDDLEHHLETIRQDIEDLVDRNARKAQNQDLYQEQYDTLVTAYQEIQKELQEATLSLEEQKSRSISLDGFIQELKQQDSLITDFNQELWQTSVERLDIKVDKHISLTFKNGVRIDL

SEQ ID NO: 11557 - protein, 521 aa, Unknown
  Description of Unknown: Integrase A125 sequence
  PF07508,G3DSA:1.10.10.2600,SSF53041,PF13408,PS51737, cd00338,PTHR30461:SF3,PF00239,PS51736,SM00857, G3DSA:3.40.50.1390,PTHR30461
MKKVITIEPAKQVTHKVDLPSFTKRRVAGYARVSTDHEDQTTSYEAQMTYYTDYINSRSDWEFVKMYSDEGISGTNTKKRLGFQEMVEDALDGKVDLILTKSVSRFARNTVDSLSTVRKLKEAGVEIYFEKENIWTFDSKGELLITIMSSLAQEESRSISENVTWGRRRQLAEGQVTFSYSQVLGFKKSDTGGFEIDQEEAKIVRYIFHQVLLGNNPNKIARELTAQGIPTPQGKRKWSYGTVKRMLRNEKYKGDALLQKSFTTDFLTKSTKPNEGELPQYYVENNHEAIIKREVFDLVQVELDKLEKKRQTNNIFTGRLFCGDCGSAFGSKVWHSTSKYKRTIYQCNAKYKGEHKCQTPHVTEEEIKGLFLSAMNQLLSNREEIVANTELLIDLAKDTSPLENKIDDLEQQLETIRQDIEDLVDRNARKAQNQDLYQEQYDTLVTAYQERQKELQEATSSLEEQKSKQLSLDGFIQQLKQQEDLITDFNQELWQTSVERLDIKEGKKISLTFKNGVRIDL

SEQ ID NO: 11558 - protein, 521 aa, Unknown
  Description of Unknown: Integrase A126 sequence
  PF07508,G3DSA:1.10.10.2600,SSF53041,PF13408,PS51737,cd00338, PTHR30461:SF3,PF00239,PS51736,SM00857,G3DSA:3.40.50.1390, PTHR30461
MKKVITIEPAKQVTHKVDLPSFTKRRVAGYARVSTDHEDQTTSYEAQMTYYTDYINSRSDWEFVKMYSDEGISGTNTKKRLGFQEMVEDALDGKVDLILTKSVSRFARNTVDSLSTVRKLKEAGVEIYFEKENIWTFDSKGELLITIMSSLAQEESRSISENVTWGRRRQLAEGQVTFSYSQVLGFKKSDTDGFEIDQEEAKIVRYIFHQVLLGNNPNKIARKLTAQGIPTPQGKRKWSYGTVKRMLRNEKYKGDALLQKSFTTDFLTKSKKANEGELPQYYVENNHEAIIKRDVFDLVQVELDKLEKKRQTSNIFTGRLFCGDCGSAFGSKVWHSTSKYKRTIYQCNAKYKDEHKCQTPHVTEEEIKGWFLSAMNQLLSNREEIVANTELLIDLAKDTSPLENKIDDLEQQLETIRQDIEDLVDRNARKAQNQDLYQEQYDTLVTAYQERQKELQEATSSLEEQKSKQLSLDGFIQQLKQQEDLITDFNQELWQTSVERLDIKEGKKISLTFKNGVRIDL

SEQ ID NO: 11559 - protein, 521 aa, Unknown
  Description of Unknown: Integrase A127 sequence
  PF07508,G3DSA:1.10.10.2600,SSF53041,PF13408,PS51737, cd00338,PTHR30461:SF3,PF00239,PS51736,SM00857, G3DSA:3.40.50.1390,PTHR30461
MKKVITIEPAKQVTHKVDLPSFTKRRVAGYARVSTDHEDQTTSYEAQMTYYTDYINSRSDWEFVKMYSDEGISGTNTKKRLGFQEMVEDALDGKVDLILTKSVSRFARNTVDSLSTVRKLKEAGVEIYFEKENIWTFDSKGELLITIMSSLAQEESRSISENVTWGRRRQLAEGQVTFSYSQVLGFKKSDTGGFEIDQEEAKIVRYIFHQVLLGNNPNKIARELTAQGIPTPQGKRKWSYGTVKRMLRNEKYKGDALLQKSFTTDFLTKSTKPNEGELPQYYVENNHEAIIKREVFDLVQVELDKLEKKRQTNNIFTGRLFCGDCGSAFGSKVWHSTSKYKRTIYQCNAKYKGEHKCQTPHVTEEEIKGWFLSAMNQLLSNREEIVANTELLIDLAKDTSPLENKIDDLEQQLETIRQDIEDLVDRNARKAQNQDLYQEQYDTLVTAYQERQKELQEATSSLEEQKSKQLSLDGFIQQLKQQEDLITDFNQELWQTSVERLDIKEGKKISLTFKNGVRIDL

SEQ ID NO: 11560 - protein, 520 aa, Unknown
  Description of Unknown: Integrase A128 sequence
  PF07508,G3DSA:1.10.10.2600,SSF53041,PF13408,PS51737,cd00338, PTHR30461:SF3,PF00239,PS51736,SM00857,G3DSA:3.40.50.1390, PTHR30461
MKNKIAIYVRVSTTKESQKDSPEHQKWACIEHCKQIDLDTSDLIIYEDRDTGTSIVARPQIQEMISDAQKGLFNTILFSSLSRFSRDALDSISLKRIFVNALGIRVISIEDFYDSQVEDNEMLFGIVSVVNQKLSEQISVASKRGIKQSAAKGNFIGNIAPYGYQKVNIEGRKTLIVDIEKAKVVREIFDLYVNKKMGEKEITKHLNENAIPSAKGGTWGITSVQRILQNEIYTGYNVYGKYEIKKVYTNLKNIGDRKRKLVKKDQELWQKSEKRTHQEIISQELYKKAQEIRQIRGGGKRGGRRKYVNVFAKIIYCKHCGSAMVTASCKKPDKYRYLICSKRRRHGASGCPNDKWIPYYDFRDEVISWVVEKLNKMIDSETGSEYSINFVSSINQNIGKEIDKINKLIESNRRLLFELRKSKMLGEIDEKQYGFEKEEYEKEILQLEEKVIKLTENERHDKDFEKIRKEIKQSVDELVTMGNYDDVEKTRIILSRLIQRIVVDSEGQIDVITPLGVVKD

SEQ ID NO: 11561 - protein, 520 aa, Unknown
  Description of Unknown: Integrase A129 sequence
  PF07508,G3DSA:1.10.10.2600,SSF53041,PF13408,PS51737, cd00338,PTHR30461:SF3,PF00239,PS51736,SM00857, G3DSA:3.40.50.1390,PTHR30461
MKNKIAIYVRVSTTKESQKDSPEHQKWACIEHCKQIDLDTADLIIYEDRDTGTSIVARPQIQEMISDAQKGLFNTILFSSLSRFSRDALDSISLKRIFVNALGIRVISIEDFYDSQIEDNEMLFGIVSVVNQKLSEQISVASKRGIKQSAAKGNFIGNIAPYGYQKVNIEGRKTLIVDIEKAKVVREIFDLYVNKKMGEKEITKHLNENAIPSAKGGTWGITSVQRILQNEIYTGYNVYGKYEIKKVYTNLKNIGDRKRKLVKKDQELWQKSEKRTHPEIISQELYKKAQEIRQIRGGGKRGGRRKYVNVFAKIIYCKHCGSAMVTASCKKSDKYRYLICSKRRRHGASGCPNDKWIPYYDFRDEVISWVVEKLKKMINSETGSEYSINFVSSINQNIGKEIDKINKLIESNRRLLFELRKSKMLGEIDEKQYGFEKEEYEKEILQLEEKVIKLTENERHDKDFEKIRKEIKQSVDELVTMGNYDDVEKTRIILSRLIQRIVVDSDGQIDVITPLGVIKD

SEQ ID NO: 11562 - protein, 520 aa, Unknown
  Description of Unknown: Integrase A130 sequence
  PF07508,SSF53041,PS51737,cd00338,PTHR30461:SF3,PF00239,PS51736, SM00857,G3DSA:3.40.50.1390,PTHR30461
MVCLVNHRGLSGVRYKPMRALVVIRLSRVTDATTSPERQLESCQQLCAQRGWDVVGVAEDLDVSGAVDPFDRKRRPNLARWLAFEEQPFDVIVAYRVDRLTRSIRHLQQLVHWAEDHKKLVVSATEAHFDTTTPFAAVVIALMGTVAQMELEAIKERNRSAAHFNIRAGKYRGSLPPWGYLPTRVDGEWRLVPDPVQRERILEVYHRVVDNHEPLHLVAHDLNRRGVLSPKDYFAKLQGREPQGREWSATALKRSLISEAMLGYATLNGKTVRDDDGAPLVRAEPILTREQLEALRAELVKTSRAKPAVATPSLLLRVLFCAVCGEPAYKFDAGRKIPRYRCRSFGFAVRCGNGTVPIAEWDAFCEEQVLDLLGDSERLEKVWVAGSDSAVELAEVNAELVDLTSLIGSPAYRAGSPQREALDARIAALAARQEELEGLEARPSGWEWRETGQRFGDWWRDQDTAGKNTWLRSMNVRLTFDVRGGLTRTIDFGDLQEYEQHLRLGSALDLVNAEKPPTGR

SEQ ID NO: 11563 - protein, 520 aa, Unknown
  Description of Unknown: Integrase A131 sequence
  PF07508,SSF53041,PS51737,cd00338,PTHR30461:SF3, PF00239,PS51736,SM00857,G3DSA:3.40.50.1390,PTHR30461
MKNPENREPEFQHSSLLATVSDMRVLGRLRISRATEESTSIERQREIVEQWASVNDHEIVGWAVDQDVSGSVDPFDAPALGPWLSDHRKHEWDILCAWKLDRLSRRAIPMNKLFGWMIDNDKTLVCVSENLDLGTWVGRMIANVIAGVAEGELEAIRERTTASHKKLRELGRWAGGPTYYGYIPKPRDGAGWELDIDPHAASVLREIIEKTIAGVPSETIVVELNERGELSPSDYHRKRNGKPVKGTAWNTSWLRQQLKSKTLLGHMTHKGETVYDDAGLPVQKGPALIDRDTYKQLQDALESRGINRTRRRTGASPLLGVAVCDVCDGPLYYRQTKNSKGTGMLRQYICKHGRYGNTKANGGEPYNIIQADLLEATVEELFLSKMGDQPRVERVFIPGEGHQHELETAERAVEDLTSLLGTITQEGARKRLLAQLAAAHERLAHLEELPSSEPHWETRETGETYREAWEGATTEERRQILLKAGVTLKVQMKDRVPRVHPGVIVANWIEPHDIEKRLAS

SEQ ID NO: 11564 - protein, 520 aa, Unknown
  Description of Unknown: Integrase A132 sequence
  PF07508,G3DSA:1.10.10.2600,SSF53041,PF13408,PS51737,cd00338, PTHR30461:SF3,PF00239,PS51736,SM00857,G3DSA:3.40.50.1390, PTHR30461
MKKITKIDELPQGQLPNTKLRVAAYARVSTDSDEQLESLKAQREHYERYIKSNPEWEFAGLYYDEGISGTKMEKRTELLRMIRDCKRGRIDFIITKSISRFARNTVDCLELVRKLIDIGVYIYFEKENLNTGDMESELMLSILSGFATEESASISQNSTWSIQKRFQNGSYVGTPPYGYTNIDGEMVIVPEEAEIIKRIFAECLSGKGGGTIARGLNKDKIPASRGNHWSAGTVIDMLRNEKYMGDVLLQKTYTDSNYNRHPNTGEKDQYYYKDNHEPIISREDFAKAQDLIDERAKMKCKGVKKNVYLNRYALSGKIVCGECGRNFRRKTNYSVGRSYIAWSCIGHIEDKESCSMLFLRDGEIKATLTTMMNKLAFSHKLILEPLFKSISQIDKESDRERMDAIDKRLEQLMEERNTLITLMAKGFLEPALFNQERNVLDSEMKNLSTEKTNLVSNSASGILRANEIKDLIDYVSADNFNGDYTEEIFEEFVENIIVNSRDELTFNLKCGLSLKEKVVR

SEQ ID NO: 11565 - protein, 520 aa, Unknown
  Description of Unknown: Integrase A133 sequence
  PF07508,G3DSA:1.10.10.2600,SSF53041,PF13408,PS51737, cd00338,PTHR30461:SF3,PF00239,PS51736,SM00857, G3DSA:3.40.50.1390,PTHR30461
MTEKNIMVIPARKRVGSTAAKEKIKKLRVAAYCRVSTETEEQNSSYEVQVAHYTEFIKKNNEWEFAGIFADDGISGTNTKKRDEFNRMIAECMDGNIDMVITKSISRFARNTLDCLQYIRQLKDKNISVYFEKENINTMDAKGEVLLTIMASLAQQESQSLSQNVKLGLQYRYQQGKVQVNHKRFMGYTKDEDGNLIIVPEEAEVIKRIYREYLEGQSLVGIGRGLEKDGILTAAGKPKWRPESVKKILQNEKYIGDALLQKTVTVDFLTKKRVKNEGHVPQYYVENSHEAIIPKELFLQVQEEIHRRSNIYTGEGKNKRIYSSKYALSAITFCGDCGDIYRRTYWNIHGRKEFVWRCVTRIEQGPEVCKNRTVKEDELYGAVMTAINRLLAGGNNMIKTLEENIHAVIGETTEYQISEINNLLEEKQKEIIKLANMGQGYEHLAEEIDELRDKRQTLLVEDASLSGENERINELIEFIRKNIFRTLEYDDKLVRKIIQSVTVYEDHFVIAFKSGFEMEV

SEQ ID NO: 11566 - protein, 520 aa, Unknown
  Description of Unknown: Integrase A134 sequence
  PF07508,SSF53041,PF13408,PS51737,cd00338,PTHR30461:SF3,PF00239 ,PS51736,SM00857,G3DSA:3.40.50.1390,PTHR30461
MGCRSCRLLRMSTPASPPRAVLYLRLSREDDASTSIVRQRAELEELAEREGWLIERELVDDGLTGRKQRANAVEALRMLRDGEADALVVWKFDRWSRQGLRAVADLVETLDERPDALFVAHRDGLRSSSPAWRIIASVLAEVARMESENTSTRIRSSQRHLREAGRFRGMVVPFGYRATANPDGPGRVLVHDELEAPLIRDIARRVLEDGATLTELTRELRDRGIPTGKSPARKARQAGKPHADLERGLWHLSALRTLLRNETLLGRTTHVVDGRRVAYTDEHGLPVTLWPPILDVATVQALRERLPEHGGKIGARTATRRAARLLSGVAWCECGAKLYVHRSGRAPYYRCSSKSFDIDAPCPAPRILAEPLEAHVADAYLAVAGAWPELEEVRVVSNPETDAELADIETALAEATTALLSDGADDVAILARIGALKARRRELADRPASAHVELRPTGRTMAEAWHAADPETADGLRKRRDLVLAALDHVELRPGAHKTHPGPIEERVRLHWHPPLELAA

SEQ ID NO: 11567 - protein, 520 aa, Unknown
  Description of Unknown: Integrase A135 sequence
  PF07508,G3DSA:1.10.10.2600,SSF53041,PF13408,PS51737, cd00338,PTHR30461:SF3,PF00239,PS51736,SM00857, G3DSA:3.40.50.1390,PTHR30461
MKKVITIQATPSIIRSSSDDFSLKKRRVAGYARVSTDHEDQATSYESQMRYYSEYISGRDDWEFVKMYSDEGISGTNTKLRTGFKAMVEDALNGKIDLIITKSVSRFARNTVDSLTTVRQLKEVGVEIYFEKENIWTLDSKGELLITIMSSLAQEESRSISENVTWGLRKQFAEGKVHFPYTNVLGFKAGEDGAIVVDQDEAKTVRYIFQQALIGKSPYHIAKDLTEQGIPSPSGKSRWNATTIKRMLRNEKYKGDALLQKTYTIDFLTKKKNINRGELPQYYVENNHEAIVDRETFDAVQQVLDAKGKKSSTSIFSSKLVCGDCGHFFGSKVWHSTSKYRRVIYRCNEKYNGENRCATPHVTEKEIKQWFVLAVNQVIENKDEIIDNIKVLCSIGSLEGIDNQIKELETETEILSQMVSRLVMENASTLQDQDEYQSKYRQLSAKYESLVEEIEELEVQKLAKSKRNKDLQDFITGLKQQEGLLTDFDELLWETMIESITITKDSDVEITFKNGAVSTI

SEQ ID NO: 11568 - protein, 520 aa, Unknown
  Description of Unknown: Integrase A136 sequence
  PF07508,G3DSA:1.10.10.2600,SSF53041,PF13408,PS51737,cd00338, PTHR30461:SF3,PF00239,PS51736,SM00857,G3DSA:3.40.50.1390, PTHR30461
MKKVITIQATPSIIRSSSDDFSLKKRRVAGYARVSTDHEDQATSYESQMRYYSEYISGRDDWEFVKMYSDEGISGTNTKLRTGFKAMVEDALNGKIDLIITKSVSRFARNTVDSLTTVRQLKEVGVEIYFEKENIWTLDSKGELLITIMSSLAQEESRSISENVTWGLRKQFAEGKVHFPYTNVLGFKAGEDGAIVVDQDEAKTVRYIFQQALIGKSPYHIAKDLTEQGIPSPSGKSHWNATTIKRMLRNEKYKGDALLQKTYTIDFLTKKKNINRGELPQYYVENNHEAIVDRETFDAVQQVLDAKGKKSSTSIFSSKLVCGDCGHFFGSKVWHSTSKYRRVIYRCNEKYNGENRCATPHVTEKEIKQWFVLAVNQVIENKDEIIDNIKVLCSIGSLEGIDNQIKELETETEILSQMVSRLVMENASTLQDQDEYQSKYRQLSAKYESLVEEIEELEVQKLAKSKRNKDLQDFITGLKQQEGLLTDFDELLWETMIESITITKDSDVEITFKNGAVSTI

SEQ ID NO: 11569 - protein, 520 aa, Unknown
  Description of Unknown: Integrase A137 sequence
  PF07508,G3DSA:1.10.10.2600,SSF53041,PF13408,PS51737, cd00338,PTHR30461:SF3,PF00239,PS51736,SM00857, G3DSA:3.40.50.1390,PTHR30461
MTEKNIMVIPARKRVGSTAAKEKIKKLRVAAYCRVSTETEEQNSSYEVQVAHYTEFIKKNNEWEFAGIFADDGISGTNTKKRDEFNRMIAECMDGNIDMVITKSISRFARNTLDCLQYIRQLKDKNISVYFEKENINTMDAKGEVLLTIMASLAQQESQSLSQNVKLGLQYRYQQGKVQVNHKRFMGYTKDEDGNLIIVPEEAEIIKRIYREYLEGQSLVGIGRGLEKDSIFTAAGKPRWRPETVKKILQNEKYIGDALLQKTVTVDFLTKKRVKNEGHVPQYYVENSHEAIIPKELYLQVQEEIHRRSNIYTGEGKNKRIYSSKYALSAITFCGDCGDIYRRTYWNIHGRKEFVWRCVTRIEQGPEVCKNRTVKEDELYGAVMTAINKLLAGGNNMIKTLEENIHAVIGETTEYQISEINNLLEEKQKELIKLANKGKDYEHLADEIDELRDKRQILLVEDASLSGENERINELIEFIRKNKFRTLEYDDKLVRKIIQNVTVYEDHFVIAFKSGFEMEI

SEQ ID NO: 11570 - protein, 520 aa, Unknown
  Description of Unknown: Integrase A138 sequence
  PF07508,G3DSA:1.10.10.2600,SSF53041,PF13408,PS51737,cd00338, PTHR30461:SF3,PF00239,PS51736,SM00857,G3DSA:3.40.50.1390, PTHR30461
MKKITKIDELPKGQLPNTKLRVAAYARVSTDSDEQLESLKAQREHYERYIKSNPEWEFAGLYYDEGISGTKMEKRTELLRMIRDCKQGRIDFIITKSISRFARNTVDCLELVRKLIDIGVYIYFEKENLNTGDMESELMLSILSGFAAEESASISQNSTWSIQKRFQNGSYVGTPPYGYTNIDSEMVIVPEEAEIIKRIFAECLSGKGGGTIARGLNKDKIPTRRGNHWSAGTVIDMLRNEKYMGDVLLQKTYTDSNYNRHPNTGEKDQYYYKDNHEPIISREDFAKAQDLIDERAKMKCKGVKKNVYLNRYALSGKIVCGECGRNFRRKTNYSAGRSYIAWSCIGHIEDKESCSMLFLRDGEIKATFTTMMNKLAFSNKLILEPLFKSISQIDEESDRERMDAIDKRMEQLMEERNTLITLMAKGFLEPALFNQERNVLDSEMKNLSTEKTNLVSNSASGILRANEIKDLIDYVSADNFNGDYTEELFEEFVENIIVNSRDELTFNLKCGLSLKEKVVR

SEQ ID NO: 11571 - protein, 520 aa, Unknown
  Description of Unknown: Integrase A139 sequence
  PF07508,SSF53041,PS51737,cd00338,PTHR30461:SF3, PF00239,PS51736,SM00857,G3DSA:3.40.50.1390,PTHR30461
MKNPEKREPEFQHSSLLATVSDMRVLGRLRISRATEESTSIERQREIVEQWASVNDHEIVGWAVDQDVSGSVDPFDAPALGPWLSDHRKHEWDILCAWKLDRLSRRAIPMNKLFGWMIDNDKTLVCVSENLDLGTWVGRMIANVIAGVAEGELEAIRERTTASHKKLRELGRWAGGPTYYGYVPKPRDGAGWELDIDPHAAGVLKEIIEKTIAGQATEAIVVELNERGELSPSDYHRKRSGKPIRGTKWNTSWLRTQLKSKTLLGHMTHNGETVYDDAGLPVQKGPALIDRDTYKQLQDALQSRGINRTKRRTGASPLLGVAVCDVCDGPLYYRQTKNQKGTAMLRQYICKHGRYGNTKANGGEPYNIIQADLLEATVEELFLSKMGDLLRVERVFIPGEGHQHELETAERAVEDLTSLLGTITQEGARKRLLAQLSAAHERLAHLEELPSSEPRWETRETGETYREAWESATTEERRQILLKAGVTLKVQMKGRVPRVHPGVIVANWIEPHDIEKRLAS

SEQ ID NO: 11572 - protein, 520 aa, Unknown
  Description of Unknown: Integrase A140 sequence
  PF07508,SSF53041,PS51737,cd00338,PTHR30461:SF3,PF00239, PS51736,SM00857,G3DSA:3.40.50.1390,PTHR30461
MKNPEKREPEFQHSSLLATVSDMRVLGRLRISRATEESTSIERQREIVEQWASVNDHEIVGWAVDQDVSGSVDPFDAPALGPWLSDHRKHEWDILCAWKLDRLSRRAIPMNKLFGWMIDNDKTLVCVSENLDLGTWVGRMIANVIAGVAEGELEAIRERTTASHKKLRELGRWAGGPTYYGYVPKPRDGAGWELDIDPHAAGVLKEIIEKTIAGQATEAIVVELNERGELSPSDYHRKRSGKPIRGTKWNTSWLRTQLKSKTLLGHMTHNGETVYDDAGLPVQKGPALIDRDTYKQLQDALQSRGINRTKRRTGASPLLGVAVCDVCDGPLYYRQTKNQKGTAMLRQYICKHGRYGNTKANGGEPYNIIQADLLEATVEELFLSKMGDLPRVERVFIPGEGHQHELETAERAVEDLTSLLGTITQEGARKRLLAQLSAAHERLAHLEELPSSEPRWETRETGETYREAWESATTEERRQILLKAGVTLKVQMKGRVPRVHPGVIVANWIEPHDIEKRLAS

SEQ ID NO: 11573 - protein, 520 aa, Unknown
  Description of Unknown: Integrase A141 sequence
  PF07508,SSF53041,PS51737,cd00338,PTHR30461:SF3, PF00239,PS51736,SM00857,G3DSA:3.40.50.1390,PTHR30461
MNNPENREPEFYHSSLLATMSDMRVLGRLRISRATEESTSIERQRELVEQWAAANEHEIVGWAVDQDVSGSVDPFDAPALGPWLTDHRKHDWDILVAWKLDRLSRRAIPMNKLFGWMMDNEKTLVCVSENLDLGTWVGRMIANVIAGVAEGELEAIRERTTASHKKLRELGRWAGGPTYYGYVPKPRDGAGWELDLDPHAAGVLREIIDKTIAGKPSEAIAVELNERGELSPSDYLRKRNGKPIRNTAWNTSTIRHQLKSKTLLGHMTHKGETVYDDAGLPVQKGPALIDRDTYKQLQDALESRGINRTRRRTGASPLLGVAVCDVCEGPLYYRSADNKDRGKTYRQYICKHGRYGNTQANGGEPYNIIQADLLEATVEELFLSKMGDLPRVERVFVPGEGHQHELETAERAVEDLTSLLGTVTQEGARKRLLAQLAAAHERLAHLEELPSSEPRWETRETGETYREAWDKAGTEERRQILLKAGVTLKVQMKGRVPRVHPGVIVAHWIEPHDIEKRLAS

SEQ ID NO: 11574 - protein, 519 aa, Unknown
  Description of Unknown: Integrase A142 sequence
  PF07508,SSF53041,PS51737,cd00338,PTHR30461:SF3,PF00239, PS51736,SM00857,G3DSA:3.40.50.1390,PTHR30461
MLTDETTSPERQRGANHDAGAALGIDFSDREAVDLGVSASKTTPFERPELGAWLKRPDEFDALVFWRFDRAVRSMDDMHELSKWARDHRKMIVIAEGPGGRLVLDFRNPLDPMAQLMVTLFAFAAQFEAQSIRERVLGAQAAMRTMPLRWRGSKPPYGYEPAPLESGGMTLVQDADAVAVIETIIKELMGGKTLSAICHELNEAGIPSPRDYWNTKKGRKKGGRVGNSVGEKITKESFKWRHGTLKKLLTSESLLGWKMTETGPVRDDEGAPVMATNEPILSREEFDAVGALIVDANQDGTKWERRDSTALLLRSILCDGCGQHMFVGHPSANSKGISSVYKCGSWGRGEKCPEPASVKLEWAEDYVRERFLRTVGGMRLTETRHIPGYDPQPEIDATTAEYEAHMKEQGQQKSKAAQAAWKRRADALDARLAELETREARPARVEMVQLDTTIADAWRDADDKGRRDMLREAGVTVRIKRAKRGRTFKLNEDRVVWHMGNDFFAQGAEELEAIARAEA

SEQ ID NO: 11575 - protein, 519 aa, Unknown
  Description of Unknown: Integrase A143 sequence
  PF07508,SSF53041,PS51737,cd00338,PTHR30461:SF3, PF00239,PS51736,SM00857,G3DSA:3.40.50.1390,PTHR30461
MLTDETTSPERQRAANHDAGSSLGIDFSGREAVDLGVSASKTTPFERPELGAWLKRPDDFDALVFWRFDRAVRSMDDMHELSKWARDHRKMIVIAEGPGGRLVLDFRNPLDPMAQLMVTLFAFAAQFEAQSIRERVLGAQAAMRTMPLRWRGSKPPYGYLPAPLEGGGYTLVQDKDAVAVIERVIKELKNGKTLSAICHELNEAGIPSPRDHWSLIQKRKKGGRVGNSVGEKITKESFKWRHGALKKLLKSESLLGWKMTEQGPVRDDEGAPVMATREPILTREEFDAVGALITEANEDGTKWERRDSTALLLRVILCDGCGQHMFVGNPSANSKGISAVYKCGSWGRGEKCPEPASVKLEWAEDYVRERFLRSVGGMRLTETRHIPGYDPQPEIDATTAEYEAHMREQGQQKSKAAQEAWKRRATALDARLAELESREARPARVEVVQLDTTIADAWRDADDKERRDMLREAGVTVRIKRAKRGRTFKLNEDRVKWHMSNEFFDQGAEELEAIARTEA

SEQ ID NO: 11576 - protein, 519 aa, Unknown
  Description of Unknown: Integrase A144 sequence
  PF07508,G3DSA:1.10.10.2600,SSF53041,PF13408,PS51737,cd00338, PTHR30461:SF3,PF00239,PS51736,SM00857,G3DSA:3.40.50.1390, PTHR30461
MTKKIITIEPAKILRSSELPSLKKRKVAGYARVSTDRDDQASSYESQMKYYTDYIGSRSDWEFVKMYSDEGISGTNTKKRLGFQEMVEDALNGKIDLILTKSVSRFARNTVDSLTTVRKLKEVGVEIYFEKENIWTLDSKGELLITIMSSLAQEESRSISENIKWSKRKMAAEGAVSFGYAHVLGFKVAENGGFDIDEDEAKIVRYIFGLFLQGENPNSIARILTEKGIPTPAGKKLWSYSTVKSMLQNEKYKGDALLQKSFTVDYLTKQKKKNEGELPQYYVENNHRAIIDKATFDLVQLELQKTHNRNKVSFCGKVICGCCGNPYGRHVWHSNSKHRRHIYRCNKKYKGEQKCDSPSVSEEEIQGWSVEVINQVIGNKNDIINNMKLLIKMLENTDKLTETIKNLEREMADIGEQAEKMVERNAKVIQNQEMYQAEYDRLVTRYEELQSLLLEKQSTLQLKRKQSADVKLFVDLLAKQEHMVTAFDEKLFNTLIEKMVIYKNKKVAVHFKNGQVIEI

SEQ ID NO: 11577 - protein, 518 aa, Unknown
  Description of Unknown: Integrase A145 sequence
  PF07508,SSF53041,PF13408,PS51737,cd00338, PTHR30461:SF3,PF00239,SM00857,G3DSA:3.40.50.1390,PTHR30461
MCWILPAVPVTLETMPQPLRALVGARVSVVQGPQKVSQQAQLETARKWAEAQGHEIVGTFEDLGVSASVRPDERPDLGKWLTDEGASKWDVIVWSKMDRAFRSTKHCVDFAQWAEERQKVVMFAEDNLRLDYRPGAAKGIDAMMAELFVYLGSFFAQLELNRFKSRAQDSHRVLRQTDRWASGLPPLGYKTVPHPSGKGFGLDTDEDTKAVLYDMAGKLLDGWSLIGIAKDLNDRGVLGSRSRARLAKGKPIDQAPWNVSTVKDALTNLKTQGIKMTGKGKHAKPVLDDKGEQIVLAPPTFDWDTWKQIQDAVALREQAPRSRVHTKNPMLGIGICGKCGATLAQQHSRKKSDKSVVYRYYRCSRTPVNCDGVFIVADEADTLLEEAFLYEWADQPVTRRVFVPGEDHTYELEQINETIARLRRESDAGLIVSDEDERIYLERMRSLITRRTKLEAMPRRSAGWVEETTGQTYGEAWETEDHQQLLKDAKVKFILYSNKPRNIEVVVPQDRVAVDLAI

SEQ ID NO: 11578 - protein, 517 aa, Unknown
  Description of Unknown: Integrase A146 sequence
  PF07508,G3DSA:1.10.10.2600,SSF53041,PF13408,PS51737,cd00338, PTHR30461:SF3,PF00239,PS51736,SM00857,G3DSA:3.40.50.1390, PTHR30461
MCAKKKPAMLEPDMQDAVIYTRYSSHNQRDCSIEQQVADCEIFARQNNLRVVKVYADRHLSGTTDNRPQFQQMLKDASHGHWAYVICWKIDRFARNRYDSATYKFRLKKAGVRVLYAKESIPDGPEGILLESVLEGSAEYYSAALAQNIRRGMKFNAEQCKVNSGSIPFGYCKGPDGRFAIHEANAEVVREIFRKAAAGMPFVDIANDLNSRGLKTSRGGRWNKGSFRLLMNEAYIGVYHFSDTRIEGGMPALIDQGTFWAANERLKANSSVRGRHQDGGDYLLTGKLKCAHCGSYMIGFSGTGKSGELHYYYGCQKRRRERACKKANVPREWIERVVVKAALDYVLRPDVMEWIADAVMEYQEREAASAQLAALTAELEENQKATDNVMKAIEAGIITSTTKQRLLDLEAKAQDLKRAIELEKLSHVRLERDQVLFWLDRFRGGSLQSQEFRRKVIDAFVSVVYLSDDHLRIAFNYSGGSNAEADFDLVMDAEAAAGELSKKFAQGHVTSTNIKAT

SEQ ID NO: 11579 - protein, 517 aa, Unknown
  Description of Unknown: Integrase A147 sequence
  PF07508,G3DSA:1.10.10.2600,SSF53041,PF13408,PS51737, cd00338,PF00239,PS51736,SM00857,G3DSA:3.40.50.1390, PTHR30461
MTYPFNMDQDLAKPTRRPRAVLYSRLSRASIVSTSMEGQREDLHGLAAREGWDVVAAFDDEGKSGGRKRANAEEALRMIRDGEADILAAYSVDRFSRQGIGEDAEVIRIIQAREHAARRGDGPPALAYFVREGIRSDSGDDWRLRYALSSEMAWKERELMVQRRQRSIYQLQEQGRFSGRGPAPWGYRSAPHPSGAGRTLVLDETEAHDIREAAARLISGASATSVATDMTARGVPAPRSPYRLALLKGEDPTGLATGFWGIGNLIQALTSPSITGRIVRHSRQTNALGGETRAGTPVLDAEGKPLQAFPPALPLGDWLALQERFQRGQGRGQQRTRKAARLASGLVWCQCGEKCYVIKYGRETRYRCASRSKGMIHCPAPSMSADVVEDIITQHYLATVGKLPAIERIESDDAPELAEALALAADELRRLTADMTKPGADIMTLATEVAKASARRDELLARPSERHVSWRPLGGSWADVWQTSDLETRRRQLTEAYDHWELRTPEHEPRLVPRTAE

SEQ ID NO: 11580 - protein, 515 aa, Unknown
  Description of Unknown: Integrase A148 sequence
  PF07508,G3DSA:1.10.10.2600,SSF53041,PF13408,PS51737,cd00338, PF00239,PS51736,SM00857,G3DSA:3.40.50.1390,PTHR30461
MNSLEVAIYLRKSRADVEEEQKAIAKGEAYDALGKHRRELLSLARKANHRVIDMYEEIVSGESITARPKMKLLLENILAEKYEGVLVVDVDRLGRGNKGDQSVIEDAFKETNTLIITPSAIYDLNQEDGEMSVEMKTFLANMEYRSIKRRLQRGLINTAKQGKDVGGNAPYGYKKDENLRLVIDEDKADVIRLIFRRCIDGVGVRFIRKELHELEIKSPTGNEWWGTTMIKKVISNAKYAGKMTYGIKQHKKLKDGRYTVKTKTDPNKMVIVDDAHEPIVSLEDFEAAQNAMRHRDPRVNAKKRLVYPMAGLVRCAKCGRLMRCQAPSNRKHKYLYCGNELCNQKGIRLDEIEDSVINEISTILARVKIEGDNVSVKSLEDERRQILKRIAKIERERSKNIEKKERVYDSYEDGTYTKEMFQERLTFIQNADRKNEQTIDELNEQLSTLEQRKQTKLDMIPAIENVLDVYNMTDDAEHKNRLLKTVIKQIDYDREVNKNRVYDPNEVVLRVHLVE

SEQ ID NO: 11581 - protein, 515 aa, Unknown
  Description of Unknown: Integrase A149 sequence
  PF07508,SSF53041,PS51737,cd00338,PTHR30461:SF3, PF00239,PS51736,SM00857,G3DSA:3.40.50.1390,PTHR30461
MSGQPLRSQWCTVQTMRALVVIRLSRVTDATTSPERQLESCQQLCAQRGWDVVGVAEDLDVSGAVDPFDRKRRPNLARWLAFEEQPFDVIVAYRVDRLTRSIRHLQQLVHWAEDHKKLVVSATEAHFDTTTPFAAVVIALMGTVAQMELEAIKERNRSAAHFNIRAGKYRGSLPPWGYLPTRVDGEWRLVPDPVQRERILEVYHRVVDNHEPLHLVAHDLNRRGVLSPKDYFAKLQGREPQGREWSATALKRSLISEAMLGYATLNGKTVRDDDGAPLVRAEPILTREQLEALRAELVKTDRTKPAVSTPSLLLRVLFCAVCGEPAYKFAGGGRKHPRYRCRSMGFLKHCGNGTVAMAEWDAFCEEQVLDLLGDSERLEKVWVAGSDSAVELAEVNAELVDLTSLIGSPAYRVGSPQREALDARIAALAARQEELEGLEARPSGWEWRETGQRFGDWWREQDTSGKNTWLRSMNVRLTFDVRGGLTRTIDFGDLQEYEQHLRLGSVVERLHAGMS

SEQ ID NO: 11582 - protein, 515 aa, Unknown
  Description of Unknown: Integrase A150 sequence
  PF07508,SSF53041,PF13408,PS51737,cd00338,PTHR30461:SF3, PF00239,SM00857,G3DSA:3.40.50.1390,PTHR30461
MQVRALVGARVSHVQGEEKTSHLTQRTKGESYAESQGWTVVGGFEDLDVSAIKLSPWDRPDLKQWLDEKADDWDALIFSKTDRVFRSANDCVKLAEWCKDHRKILVLVDDGIKLDYFNPEDSKDAFAGAMSKVFLILASVFAEIEGQRFVQRARDRVAYLRPTDRWGYGNPPYGFVVVDHPTGVGKALGHDEGDQAVLHRIADEVLSGNSLVSICVKLNDEGVLSPSDRTRVRAKKEPEGSKWRPLTMKRLLTSPSTQGIKMAKERPVLDAQGEPVRVGPESFDAETWKQLGIELADRATEPSKRRHSTNPLLGVAKCAICGLNMRQHGKTTKYGSYRYYNCIGHPIACPKVSIVAETAEDAVYSIFLNSHSGRRVKERVWQAGSDHSAELDQTLRTIESLREDRAAGLFNDPEDAKMYQQQMAALLSKRTALSDAPIIKAGWVEMETDRTYGEVWESSTEEEKRKMLVDAGVVLWVTNRNDYYVGDLDKLLGEGDGGEEFLASTVLAKAGIASQ

SEQ ID NO: 11583 - protein, 514 aa, Unknown
  Description of Unknown: Integrase A151 sequence
  PF07508,SSF53041,PS51737,cd00338,PTHR30461:SF3, PF00239,PS51736,SM00857,G3DSA:3.40.50.1390,PTHR30461
MSGQPPRSQWCTVQTMRALVVIRLSRVTDATTSPERQLESCQQLCAQRGWDVVGVAEDLDVSGAVDPFDRKRRPNLARWLAFEEQPFDVIVAYRVDRLTRSIRHLQQLVHWAEDHKKLVVSATEAHFDTTTPFAAVVIALMGTVAQMELEAIKERNRSAAHFNIRAGKYRGSLPPWGYLPTRVDGEWRLVPDPVQRERILEVYHRVVDNHEPLHLVAHDLNRRGVLSPKDYFAKLQGREPQGREWSATALKRSLISEAMLGYATLNGKTVRDDDGAPLVRSEPILTREQLEALRAELVKTDRTKPAVSTPSLLLRVLFCAVCGEPAYKFDAGRKIPRYRCRSFGFAQRCGNGTVPISEWDAFCEEQVLDLLGDAERLEKVWVAGSDSAVELAEVNAELVDLTSLIGSPAYRVGSPQREALDARIAALAARQEELEGLEARPSGWEWRETGQRFADWWREQDTAAKNTWLRSMNVRLTFDVRGGLTRTIDFGDLQEYEQHLRLGNVVERLHTGMS

SEQ ID NO: 11584 - protein, 514 aa, Unknown
  Description of Unknown: Integrase A152 sequence
  PF07508,G3DSA:1.10.10.2600,SSF53041,PF13408,PS51737,cd00338, PTHR30461:SF3,PF00239,PS51736,SM00857,G3DSA:3.40.50.1390, PTHR30461
MAKRKFNKGGEVRLVAYYRYSGGSGQTEQSIEGQRRDCETYARLHNMTIQKEYVDRHISGKTDDRAAFQQMITDSDKGAFDMVICWKTDRFARNRYDSAVYKKRLRDNGVEIVYAAESNIAGAEGIIIEGVMEALAEYYSAELAEKMRRGMRESALKGQAISRCRALGLKTDEHKRFVIDEKTAPTVRFIFEHYAAGESATSIVDKLNAKGLRTSQGNPFNKSSIPRIIQNEAYRGVYVSKSYDVRIEGAIPAIIDDELWERAQTMLKLNRQLKAKNEPKADYILSGKLYCSCGSLMRGMSGHSATGEVYRYYTCPNKNCHLRNIPKDDLEGKVMQSISDHLLQPEAMEALAEAMVEVQKADAEKPNAERVAIEQSLADVRRRSKNILDAIENGTANAQLCARLDDLSEQERTLNFQLSALEKEKPVVFTKEQYLFLLEQFLVEPSERTPEYGRRLVNTFVTSMVVSDRELVINFNVSDETVNKNKKTSQTNLQKESSSGMRLVRVARIELTAS

SEQ ID NO: 11585 - protein, 514 aa, Unknown
  Description of Unknown: Integrase A153 sequence
  PF07508,SSF53041,PS51737,cd00338,PTHR30461:SF3, PF00239,PS51736,SM00857,G3DSA:3.40.50.1390,PTHR30461
MSGQPLRSQWCTVQTMRALVVIRLSRVTDATTSPERQLESCQQLCAQRGWDVVGVAEDLDVSGAVDPFDRKRRPNLARWLSFEEQPFDVIVAYRVDRLTRSIRHLQQLVHWAEDHKKLIVSATEAHFDTTTPFAAVVIALMGTVAQMELEAIKERNRSAAHFNIRAGKYRGSLPPWGYLPTRVDGEWRLVPDPVQRERILEVYHRVVDNHEPLHLVAHDLNQRGILSPKDYFAKLQGREPKGREWSATALKRSLISEAMLGYATLNGKTVRDGDGAPLVRAEPILTREQLEALRAELVKTDRTKPAVSTPSLLLRVLFCAVCGEPAYKFDAGRKIPRYRCRSFGFAVRCGNGTVPIAEWDAFCEEQVLDLLGDAERLEKVWVAGSDSAVELAEVNAELVDLTSLIGSPAYRVGSPQREALDARIAALAARQEELEGLEARPSGWEWRETGQRFGDWWREQDTAGKNTWLRSMNVRLTFDVRGGLTRTIDFGDLQEYEQHLRLGSVVERLHTGMS

SEQ ID NO: 11586 - protein, 513 aa, Unknown
  Description of Unknown: Integrase A154 sequence
  PF07508,G3DSA:1.10.10.2600,SSF53041,PF13408,PS51737,cd00338, PTHR30461:SF3,PF00239,PS51736,SM00857,G3DSA:3.40.50.1390, PTHR30461
MKRITKIEPAKKTSKKKLRVAAYARVSTNRDDQLISLDAQKNHYEKYIKAKPNWEYAGLYFDEGLSGTHMEKRNGLLKLLEDCERGKIDYIIVKSISRFSRNTIDSIETIRSLCEKGIYIFFEKENIDTGKMDSELLLSIFSSLAESESKSISENNKWGIQKKYQNGTFKIGYPPYGYHNIEGQMVIDEKEAEIVRLIFSEVLLGKSPGLIAKELNEKNITSKRGKNWSSSVIHGMIRNEKYTGDVIFQKTFTDENFNRHINYGERNQYYAKDHHAPIISHDTFEKANSIIEKNGKEKGIVKYAGKYKNRYALSGKIICDECGGKLKRVKLSSYFGFACNTHIKNKELCNMKTISEDSVKAAFATMMNKLSSAREVVLLPLERSLKRNSSDMQLSQLEELESLLEKNTERKNQLMNFFTSGLLDPALYSEEIMRLEEEIEVLVNEQELITKNLSGGYERQKALELILSYTAKKNIITEFDDALFLRHVDHIIVYSRTEIGFVMKFGPIFKERI

SEQ ID NO: 11587 - protein, 513 aa, Unknown
  Description of Unknown: Integrase A155 sequence
  PF07508,G3DSA:1.10.10.2600,SSF53041,PF13408,PS51737, cd00338,PTHR30461:SF3,PF00239,PS51736,SM00857, G3DSA:3.40.50.1390,PTHR30461
MAKKIVTIEAVKPVCHQVDFLRKRKVAGYARVSTDHDDQASSYEAQMCYYENYIQSRHDWEFVKMYSDEGISGTNTKKRLGFQEMVADALDGKIDLIITKSISRFARNTVDALTTVRKLKEVGVEIYFEKENIWTLDSKGELLITIMSSLAQEESRSISENITWSKRKMAAEGQVTFNYTHVLGFKESKEGGFEIDEKEAEVVRYIFGLFLQGENPNSIAKILTDKKIATPAGKKVWSYSTIKSILSNEKYKGDALLQKSFTVDFLTKTRKTNQGELPQYYIENNHEAIIDKAIFDMVQVELKHERSRSTLSYFGKVICGCCGGSYGRQTWHSTSKYKRVVYRCNHKYKGEEKCDTPHASREEIEAWISQAISQLITNKDEIIRNLECLISVLAKSGQLEDELKTLESQLFSIQEEVEQLVNGKLTQNLYSQYDALVKNYHTLQKTYRDKQQVLQERKIKLKALNNFIDILRQQDKLVVVYDEKLFNTLVDKVIIYKDKQVEVHFKNEQVISM

SEQ ID NO: 11588 - protein, 512 aa, Unknown
  Description of Unknown: Integrase A156 sequence
  PF07508,G3DSA:1.10.10.2600,SSF53041,PS51737,cd00338,PF00239, PS51736,SM00857,G3DSA:3.40.50.1390,PTHR30461
MRTNEHNFHNIEEEIKHVAVYLRLSRGEDESELDNHKTRLLNRCELNNWSYELYKEIGSGSTIDDRPVMQKLLTDVEKNLYDAVLVVDLDRLSRGNGTDNDRILYSMKVSETLIVVESPYQVLDANNESDEEIILFKGFFARFEFKQINKRMREGKKLAQSRGQWVNSVTPYGYIVNKTTKKLTPSEEEAKVVIMIKDFFFEGKSTSDIAWELNKRKIKPRRATEWRSSSIANILQNEVYVGNIVYNKSVGNKKPSKSKTRVTTPYRRLPEEEWRRVYNAHQPLYSKEEFDRIKQYFECNVKSHKGSEVRTYALTGLCKTPDGKTMRVTQGKKGTDDDLYLFPKKNKHGDSSIYKGISYNVVYETLKEVILQVKDYLDSVLDQNENKDLVEELKEELMKKEDELETIQKAKNRIVQGFLIGLYDEQDSIELKVEKEKEIDEKEKEIEAIKMKIDNAKTVNNSIKKTKIERLLSDVQSAESEKEINRFYKTLIKEIIVDRTDENEAKIKVNFL

SEQ ID NO: 11589 - protein, 510 aa, Unknown
  Description of Unknown: Integrase A157 sequence
  PF07508,G3DSA:1.10.10.2600,SSF53041,PF13408,PS51737, cd03768,PTHR30461:SF3,PF00239,PS51736,SM00857, G3DSA:3.40.50.1390,PTHR30461
MYSKTHKRCDVLLCSILTQNWSKKQMSKKVAIYTRVSTTNQAEEGYSIDEQIDKLKMYCEAMDWKVSEIYTDAGFSGSKLTRPAMEKMITDIGLKKFDTVIVYKLDRLSRSVRDTLYLVKDVFTKNEIDFISLSESIDTSSAMGSLFLTILSAINEFERENIKERMTMGKIGRAKSGKSMMWAKTAFGYSHNQETGILEINPLEASIVEQIFNEYLKGTSITKLRDKLNEDGHIAKELPWSYRTIRQTLDNPVYCGYIKYKNNTFEGLHKPIISHETYLSVQKELEARQQQTYEKNNNPRPFQAKYLLSGIARCGYCGAPLRIVLGHRRKDGSRTMKYQCVNRFPRKTKGVTTYNDNKKCDSGAYDMQWIEDIVLKTLNGFQKSDKKLRKILNIKEESKVDTSGFQKQLKSINNKIQKNSDLYLNDFITMDDLKKRTEMLQGEKKLIQAKINEVDKPSTSEIFDLVKSELGETPISKISYEDKKKIVNNLISKVDVTADNIDIIFKFQLA

SEQ ID NO: 11590 - protein, 510 aa, Unknown
  Description of Unknown: Integrase A158 sequence
  PF07508,G3DSA:1.10.10.2600,SSF53041,PF13408,PS51737,cd03768, PTHR30461:SF3,PF00239,PS51736,SM00857,G3DSA:3.40.50.1390 ,PTHR30461
MYSKTHKRCDVLLCSILTQNWSKKQMSKKVAIYTRVSTTNQAEEGYSIDEQIDKLKMYCEAMDWKVSEIYTDAGFSGSKLTRPAMEKMITDIGLKKFDTVIVYKLDRLSRSVRDTLYLVKDVFTKNEIDFISLSESIDTSSAMGSLFLTILSAINEFERENIKERMTMGKIGRAKSGKSMMWAKTAFGYSHNQETGILEINPLEASIVEQIFNEYLKGTSITKLRDKLNEDGHIAKELPWSYRTIRQTLDNPVYCGYIKYKNNTFEGLHKPIISHETYLKVQKELEVRQQQTYEKNNNPRPFQAKYLLSGIARCGYCGAPLRIVLGHRRKDGSRTMKYQCVNRFPRKTKGVTTYNDNKKCDSGAYDMQWIEDIVLKTLNGFQKSDKKLRKILNIKEETKVDTSGFKKQLKSINNKIQKNSDLYLNDFITMDDLKKRTEMLQGEKKLIQAKINEVDKPSTSEIFDLVKSELGEIPISKISYEDKKKIVNNLISKVDVTADNIDIIFKFQLA

SEQ ID NO: 11591 - protein, 510 aa, Unknown
  Description of Unknown: Integrase A159 sequence
  PF07508,SSF53041,PF13408,PS51737,cd00338, PTHR30461:SF3,PF00239,SM00857,G3DSA:3.40.50.1390,PTHR30461
MPQPLRALVGARVSVVQGPQKVSQQAQLETARKWAEAQGHEIVGTFEDLGVSASVRPDERPDLGKWLTEEGASKWDVIVWSKMDRAFRSTKHCVDFAQWAEERQKVVMFAEDNLRLDYRPGAAKGIDAMMAELFVYLGSFFAQLELNRFKSRAQDSHRILRQTDRWASGLPPLGYKTVPHPSGKGFGLDTDPDGKDLLYQMAGRLLDGGSLIGIAKWLNETGAMSNRARARVAKGKPADQRPWTVGTVKDALTSLKTQGIKMSGKGKNSKPVLDAKGEQIVLAPPTFDWDTWKQIQDAVALREQAPRSRVHTKNPMLGIGICGKCGSTLAQQHSRKRPAKSDVPGQVVTYRYYRCSRTPVNCDGVFIVADEADEILEDAFLHEWADQPVTRRVFVPGEDHTYELEQINETIARLRRESDAGLIVSDEDEQVYLERMKSLITRRTRLEAMPLRSAGWVEETTGQTYGEAWKTEDHQQLLKDAKVKFILYTNKPRNIEVVVPQDRVAVDLAI

SEQ ID NO: 11592 - protein, 510 aa, Unknown
  Description of Unknown: Integrase A160 sequence
  PF07508,G3DSA:1.10.10.2600,SSF53041,PF13408,PS51737,cd00338, PTHR30461:SF3,PF00239,PS51736,SM00857,G3DSA:3.40.50.1390, PTHR30461
MKKVITIEPAKQVTHMVDLPSFTKRRVAGYARVSTDHEDQTTSYEAQMTYYTDYINSRSDWEFVKMYSDEGISGTNTKKRLGFQEMVEDALDGKIDLILTKSVSRFARNTVDSLSTVRKLKEAGVEIYFEKENIWTFDSKGELLITIMSSLAQEESRSISENVTWGRRHQLAEGQVTFSYSQVLGFKKCDTGGFEIDQEEAKIVRYIFHQVLLGNNPNKIARELTAQGIPTPQGKRKWSYGTVKRMLRNEKYKGDALLQKSFTTDFLTKSTKPNEGELPQYYVENNHEAIIKREVFDLVQVELDKLEKKRQTSNIFTGRLFCGDCGSAFGSKVWHSTSKYKRTIYQCNAKYKGEHKCQTPHVTEEEIKGWFLSAMNQLLGNREEIIANTELLIDMAKDTTPLESEIADLERHLETIRQDIEDLVDRNARKAQNQDLYQEQYDTLVTAYQEKQKELQETRSALEEQKSKQLSLDGFIQKFKEQDASSQTSTKNSGRPALSDWISKKIRKSA

SEQ ID NO: 11593 - protein, 509 aa, Unknown
  Description of Unknown: Integrase A161 sequence
  PF07508,G3DSA:1.10.10.2600,SSF53041,PF13408,PS51737, cd00338,PTHR30461:SF3,PF00239,PS51736,SM00857, G3DSA:3.40.50.1390,PTHR30461
MRAVAYARFSSDNQREESIEAQIMDIKKYALKNNITVLREYVDEAISGRTFERKSFKRMIEDAKKNMFDLILVHKVDRFARNRYDAAIYKSILKKHNIKIKYVMQPIDDSPEGNLMEGILESFAEYYSENLANEVMKGLKINAKKAQFNGGYPPLGYDIAEDKTYIINEREARIVREIFDLYLDGIGYKKIADILNNKGYKNKRGKPFVFNSIPTILKNDKYCGIYTYNKTSRKYKNGRRNLKKYNKDEDIIRVEDGIPKIISKEKFNTAQQEIKKRTKSRGKKIAVREYILSGLIKCECERKMSGYAQKRSKESNRYFYYRCTGCNNSIRAEKIETIATNFIKEQVFRDIDNLIIKIHKYIADQEAESPSELKYLKNELSNSNNQINNIVKMISNGVTSMHLAKKLEELETYIDGIQQRIGEINRMSVIPEDEIKNWLLELKNSFDNGKNIKKIISVFIKNIEITKEDINIDFFVKAPYKGANSLSVAPSAPPSAPELFAQKCCLKRI

SEQ ID NO: 11594 - protein, 509 aa, Unknown
  Description of Unknown: Integrase A162 sequence
  PF07508,G3DSA:1.10.10.2600,SSF53041,PF13408,PS51737,cd00338, PF00239,PS51736,SM00857,G3DSA:3.40.50.1390,PTHR30461
MELTPIEFKKDTEKIIPYSEYPYAVYVRISTDKEEQMTSPENQIEICRNWLEKNNYEWNDGSVLYDEQSGTVLIDRAAMQLILEKARRREIKMVVFKSISRLARDLKDALDIKETLISHGVRLVTIEEGYDSLYEGKNDMKFEIFSLFAAQYPKTLSVSISAALAAKVRRGEAIGPAPFGYKIEGENLVINEEEAPTIRQIFKWYVEDGYGFKSITKMLNEEMIKGNVSRPRKKDKWQVTSVQRIIKNPTYAGYFVHGRYTTVKQNGRKKFIENPREKWMVYENHHPAIIPKEMWEAANNKRMKKVKTKVTPWNEFRGIAKCSECGSNMVIIQTGNKKNKGGHWNYIKCSSYRRAGQYGCVNHAPILYEDFRELIIKRLKRKGKNIKLKLESGIVQKRKNEIAALEKEKLSLEQKRKRLIDLYLEDGLISKEEFQEKRKQYEDRIREIEDRIFLLSQEQNTTKEIKTIEDAFQQLENIDQDLYHVFKTLIDQIIVHPDGKIEILYKFKV

SEQ ID NO: 11595 - protein, 508 aa, Unknown
  Description of Unknown: Integrase A163 sequence
  PF07508,G3DSA:1.10.10.2600,SSF53041,PS51737,cd00338, PTHR30461:SF3,PF00239,PS51736,SM00857,G3DSA:3.40.50.1390, PTHR30461
MNRVCIYLRKSRADEEIEKELGQGETLAKHRKALLKFAKEKNLNIVKIREEIVSGESLIHRPEMLELLKEVEQGMYDAVLCMDLQRLGRGNMQEQGLILEAFKKSNTKIITLQKTYDLNNDFDEEYSEFEAFMSRKELKMINRRLQGGRVRSIQEGNYLSPLPPYGYLIHEEKFSRTLVPNPEQADVVKMIFDMYVNKQMGSSAIANELNKMGYKTYTGRNWASSSVINILKNPVYIGKITWKKKDIKKSADPNKSKDTRQRPRSEWIVSDGKHEPIVGKELFAKAQEIIKNKYHIPYQIVNGPRNPLAGLIICKICGSKMVYRPYKDKEAHIICPNKCGNKSSKFIYVEKRLLQALEEWMQGYELDLQIEEDDSSFAEAQEKQKEALERELHELQKQKNNLHDLLERGIYDIDTFVERSTIVAQRIEETQKSIDVLVQKIEEEKNKRDKEKILPEIRHVLDLYWKTDDIAQKNMLLKSVLEKAEYLKEKKQREDNFELWIYPKLPEK

SEQ ID NO: 11596 - protein, 508 aa, Unknown
  Description of Unknown: Integrase A164 sequence
  PF07508,SSF53041,PS51737,cd00338,PTHR30461:SF3,PF00239,PS51736, SM00857,G3DSA:3.40.50.1390,PTHR30461
MRVLGRLRLSRSTEESTSIERQREIVTAWAQSNGHTVVGWAEDVDVSGSVDPFDTPSLGPWLDERRGEWDILCAWKLDRLGRDAIRLNKLFGWCQEHGKTVASCSEGIDLSTPVGRLIANVIAFLAEGEREAIRERVTSSKQKLREIGRWGGGKPPYGYKGIPNPNGQGYVLVVDPVAQPVVRRIVDEILDGKPLTRLCTELSEEGYLTPAEYYATLKAGSPRQRAEAGEVTARWRPTALRNLLRSKALRGYAHHKGQTVRDEKGMPVQLAEPLVSADEWELLQEALDRVQADFSGRRVEGVSPLLGVAVCMKCDRPLHHDRYLVKRPYGDYHYRYYRCRDRHGKNLPAEMVEELTEESFLARVGDFPVRERVWVQGDTNWADLKEAVAAYDELMQAAGRAKSVTAKERLQRQLDALDERIAELESAPTTEAHWEYQPTGGTYRDAWEAADTDGRRELLKRSGITVAVFIDGVEGRRSKYNPGALHFDIRVPEELTRRLGLPDPVPSQ

SEQ ID NO: 11597 - protein, 507 aa, Unknown
  Description of Unknown: Integrase A165 sequence
  PF07508,SSF53041,PF13408,PS51737,cd00338, PTHR30461:SF3,PF00239,SM00857,G3DSA:3.40.50.1390,PTHR30461
METMPQPLRALVGARVSVVQGPQKVSQQAQLETARKWAEAQGHEIVGTFEDLGVSASVRPDERPDLGKWLTDEGASKWDVIVWSKMDRAFRSTKHCVDFAQWAEERQKVVMFAEDNLRLDYRPGAAKGIDAMMAELFVYLGSFFAQLELNRFKSRAQDSHRVLRQTDRWASGLPPLGYKTVPHPSGKGFGLDTDEDTKAVLYDMAGKLLDGWSLIGIAKDLNDRGVLGSRSRARLAKGKPIDQAPWNVSTVKDALTNLKTQGIKMTGKGKHAKPVLDDKGEQIVLAPPTFDWDTWKQIQDAVALREQAPRSRVHTKNPMLGIGICGKCGATLAQQHSRKKSDKSVVYRYYRCSRTPVNCDGVFIVADEADTLLEEAFLYEWADQPVTRRVFVPGEDHTYELEQINETIARLRRESDAGLIVSDEDERIYLERMRSLITRRTKLEAMPRRSAGWVEETTGQTYGEAWETEDHQQLLKDAKVKFILYSNKPRNIEVVVPQDRVAVDLAI

SEQ ID NO: 11598 - protein, 507 aa, Unknown
  Description of Unknown: Integrase A166 sequence
  PF07508,SSF53041,PF13408,PS51737,cd00338,PTHR30461:SF3, PF00239,SM00857,G3DSA:3.40.50.1390,PTHR30461
METMPQPLRALVGARVSVVQGPQKVSQQAQLETARKWAEAQGHEIVGTFEDLGVSASVRPDDRPDLGKWLTDEGASKWDVIVWSKMDRAFRSTKHCVDFAQWAEERQKVVMFAEDNLRLDYRPGAAKGIDAMMAELFVYLGSFFAQLELNRFKSRAQDSHRVLRQTDRWASGLPPLGYKTVPHPSGKGFGLDTDEDTKAVLYDMAGKLLDGWSLIGIAKDLNDRGVLGSRSRARLAKGKPIDQAPWNVSTVKDALTNLKTQGIKMTGKGKHAKPVLDDKGEQIVLAPPTFDWDTWKQIQDAVALREQAPRSRVHTKNPMLGIGICGKCGATLAQQHSRKKSDKSVVYRYYRCSRTPVNCDGVFIVADEADTLLEEAFLYEWADQPVTRRVFVPGEDHTYELEQINETIARLRRESDAGLIVSDEDERIYLERMRSLITRRTKLEAMPRRSAGWVEETTGQTYGEAWETEDHQQLLKDAKVKFILYSNKPRNIEVVVPQDRVAVDLAI

SEQ ID NO: 11599 - protein, 507 aa, Unknown
  Description of Unknown: Integrase A167 sequence
  PF07508,SSF53041,PF13408,PS51737,cd00338, PTHR30461:SF3,PF00239,SM00857,G3DSA:3.40.50.1390,PTHR30461
METMPQPLRALVGARVSVVQGPQKVSQQAQLETARKWAEAQGHEIVGTFEDLGVSASVRPDDRPDLGKWLTDEGASKWDVIVWSKMDRAFRSTKHCVDFAQWAEERQKVVMFAEDNLRLDYRPGAAKGIDAMMAELFVYLGSFFAQLELNRFKSRAQDSHRVLRQTDRWASGLPPLGYKTVPHPSGKGFGLDTDEDTKAVLYDMAGKLLDGWSLIGIAKDLNDRGVLGSRSRARLAKGKPIDQAPWNVSTVKDALTNLKTQGIKMTGKGKHAKPVLDAKGEQIVLAPPTFDWDTWKQIQDAVALREQAPRSRVHTKNPMLGIGICGKCGATLAQQHSRKKSDKSVVYRYYRCSRTPVNCDGVFIVADEADTLLEEAFLYEWADQPVTRRVFVPGEDHTYELEQINETIARLRRESDAGLIVSDEDERIYLERMRSLITRRTKLEAMPRRSAGWVEETTGQTYGEAWETEDHQQLLKDAKVKFILYSNKPRNIEVVVPQDRVAVDLAI

SEQ ID NO: 11600 - protein, 507 aa, Unknown
  Description of Unknown: Integrase A168 sequence
  PF07508,SSF53041,PS51737,cd00338,PTHR30461:SF3,PF00239, PS51736,SM00857,G3DSA:3.40.50.1390,PTHR30461
MYPTFVRVLGRLRLSRSTEESTSIERQREIVTAWADSNGHTVVGWAEDVDVSGAIDPFDTPSLGVWLDERRGEWDILCAWKLDRLGRDAIRLNKLFLWCQEHGKTVTSCSEGIDLGTPVGRLIANVIAFLAEGEREAIRERVASSKQKLREIGRWGGGKPPFGYMGVRNPDGQGHILVVDPVAKPVVRRIVEDILEGKPLTRLCTELTEERYLTPAEYYATLKAGAPRQQAEEGEVTAKWRPTAVRNLLRSKALRGHAHHKGQTVRDDQGRAIQLAEPLVDADEWELLQETLDGIAADFSGRRVEGASPLSGVAVCMTCDKPLHHDRYLVKRPYGDYPYRYYRCRDRHGKNVPAETLEELVEDAFLQRVGDFPVRERVWVQGDTNWADLKEAVAAYDELVQAAGRAKSATARERLQRQLDILDERIAELESAPNTEAHWEYQRTGGTYRDAWENSDADERRELLRRSGIVVAVHIDGVEGRRSKHNPGALHFDIRVPHELTQRLIAP

SEQ ID NO: 11601 - protein, 507 aa, Unknown
  Description of Unknown: Integrase A169 sequence
  PF07508,SSF53041,PF13408,PS51737,cd00338, PTHR30461:SF3,PF00239,SM00857,G3DSA:3.40.50.1390,PTHR30461
METMPEPLRALVGARVSVVQGPQKVSQQAQLETARKWAEAQGHEIVGTFEDLGVSASVRPDDRPDLGKWLTDEGASKWDVIVWSKMDRAFRSTKHCVDFAQWAEERQKVVMFAEDNLRLDYRPGAAKGIDAMMAELFVYLGSFFAQLELNRFKSRAQDSHRVLRQTDRWASGLPPLGYKTVPHPSGKGFGLDTDEDTKAVLYDMAGKLLDGWSLIGIAKDLNDRGVLGSRSRARLAKGKPIDQAPWNVSTVKDALTNLKTQGIKMTGKGKHAKPVLDEKGEQIVLAPPTFDWDTWKQIQDAVALREQAPRSRVHTKNPMLGIGICGKCGATLAQQHSRKKSDKSVVYRYYRCSRTPVNCDGVFIVADEADTLLEEAFLYEWADQPVTRRVFVPGEDHTYELEQINETIARLRRESDAGLIVSDEDERIYLERMRSLITRRTKLEAMPRRSAGWVEETTGQTYGEAWETEDHQQLLKDAKVKFILYSNKPRNIEVVVPQDRVAVDLAI

SEQ ID NO: 11602 - protein, 504 aa, Unknown
  Description of Unknown: Integrase A170 sequence
  PF07508,SSF53041,PS51737,cd00338,PTHR30461:SF3,PF00239, PS51736,SM00857,G3DSA:3.40.50.1390,PTHR30461
MRALVVIRLSRVTDATTSPERQLESCRQLCAQRGWDVVGVAEDLDVSGAVDPFDRKRRPNLARWLAFEEQPFDVIVAYRVDRLTRSIRHLQQLVHWAEDHKKLVVSATEAHFDTTTPFAAVVIALMGTVAQMELEAIKERNRSAAHFNIRAGKYRGSLPPWGYLPTRVDGEWRLVPDPVQRERILEVYHRVVDNHEPLHLVAHDLNRRGVLSPKDYFAKLQGREPQGREWSATALKRSLISEAMLGYATLNGKTVRDDDGAPLVRAAPILTREQLEALRAELVKTDRTKPAVSTPSLLLRVLFCAVCGEPAYKFAGGGRKHPRYRCRSMGFPKHCGNGTVAMAEWDAFCEEQVLDLLGDAERLEKVWVAGSDSAVELAEVNAELVDLTSLIGSPAYRAGSPQREALDARIAALAARQEELEGLEARPSGWEWRETGQRFGDWWRDQDTAGKNTWLRSMNVRLTFDVRGGLTRTIDFGDLQEYEQHLRLGAALDLVNAEKPPTGR

SEQ ID NO: 11603 - protein, 504 aa, Unknown
  Description of Unknown: Integrase A171 sequence
  PF07508,SSF53041,PS51737,cd00338,PTHR30461:SF3, PF00239,PS51736,SM00857,G3DSA:3.40.50.1390,PTHR30461
MRALVVIRLSRVTDATTSPERQLESCQQLCAQRGWDVVGVAEDLDVSGAVDPFDRKRRPNLARWLSFEEQPFDVIVAYRVDRLTRSIRHLQQLVHWAEDHKKLIVSATESHFDTTSPFAAVVIALMGTVAQMELEAIKERNRSAAHFNIRAGKYRGSLPPWGYMPARVDGEWRLLVDPVQRERILEVYHRVVDNHEPLHQIAHDLNQRGILSPKDYFAKLQGREPKGREWSATALKRSLISEAMLGYATLNGKTVRDDDGAPLVRADPILTREQLESLRAELVKADRTKPAVSTPSLLLRVLFCAVCGEPAYKFTGGGRKNARYRCRSWGWAQRCGNGTVAMAEWDAFCEEQVLDLLGDAERLEKVWVAGSDSAVELAEVNAELVDLTSLIGSPAYRVGSPQREALDARIAALAARQEELEGLEARPSGWEWRETGQRFGDWWREQDTPGKNTWLRSMNVRLTFDVRGGLTRTIDFGDLQEYEQHLRLGSALDLVNAEKPPTGR

SEQ ID NO: 11604 - protein, 504 aa, Unknown
  Description of Unknown: Integrase A172 sequence
  PF07508,SSF53041,PS51737,cd00338,PTHR30461:SF3,PF00239, PS51736,SM00857,G3DSA:3.40.50.1390,PTHR30461
MRALVVIRLSRVTDATTSPERQLESCQQLCAQRGWDVVGVAEDLDVSGAVDPFDRKRRPNLARWLAFEEQPFDVIVAYRVDRLTRSIRHLQQLVHWAEDHKKLVVSATEAHFDTTTPFAAVVIALMGTVAQMELEAIKERNRSAAHFNIRAGKYRGSLPPWGYLPTRVDGEWRLVPDPVQRERILEVYHRVVDNHEPLHLVAHDLNRRGVLSPKDYFAKLQGREPQGREWSATALKRSLISEAMLGYATLNGKTVRDDDGAPLVRSEPILTREQLEALRAELVKTDRTKPAVSTPSLLLRVLFCAVCGEPAYKFTGGGRKNARYRCRSWGWAQRCGNGTVAMAEWDAFCEEQVLDLLGDSERLEKVWVAGSDSAVELAEVNAELVDLTSLIGSPAYRVGSPQREALDARIAALAARQEELEGLEARPSGWEWRETGQRFGDWWRDQDTAGKNTWLRSMNVRLTFDVRGGLTRTIDFGDLQEYEQHLRLGSALDLVNAEKPPTGR

SEQ ID NO: 11605 - protein, 504 aa, Unknown
  Description of Unknown: Integrase A173 sequence
  PF07508,SSF53041,PS51737,cd00338,PTHR30461:SF3, PF00239,PS51736,SM00857,G3DSA:3.40.50.1390,PTHR30461
MRVLVVIRLSRVTDATTSPERQLESCRQLCAQRGWDVVGVAEDLDVSGAVDPFDRKRRPNLARWLSFEEQPFDVIVAYRVDRLTRSIRHLQQLVHWAEDHKKLIVSATEAHFDTTSPFAAVVIALMGTVAQMELEAIKERNRSAAHFNIRAGKYRGSLPPWGYMPARVDGEWRLVVDPVQRERILEVYHRVVDNHEPLHLVAHDLNQRGILSPKDYFAQLQGREPKGREWSATALKRSLISEAMLGYTTLNGKTVRDDDGAPLVRAEPILTREQLEALRAELVKTDRTKPAVATPSLLLRVLFCAVCGEPAYKFAGGGRKHPRYRCRSMGFPKHCGNGTVAMAEWDAFCEEQVLDLLGDAERLEKVWVAGSDSAVELAEVNAELVDLTSLIGSPAYRVGSPQREALDARIAALAARQEELEGLEARPSGWEWRETGQRFGDWWREQDIAAKNTWLRSMNVRLTFDVRGGLTRTIDFGDLQEYEQHLRLGTALDLVNAEKPPTGR

SEQ ID NO: 11606 - protein, 504 aa, Unknown
  Description of Unknown: Integrase A174 sequence
  PF07508,SSF53041,PS51737,cd00338,PTHR30461:SF3,PF00239, PS51736,SM00857,G3DSA:3.40.50.1390,PTHR30461
MRALVVIRLSRVTDATTSPERQLESCQQLCAQRGWDVVGVAEDLDVSGAVDPFDRKRRPNLARWLAFEEQPFDVIVAYRVDRLTRSIRHLQQLVHWAEDHKKLVVSATEAHFDTTTPFAAVVIALMGTVAQMELEAIKERNRSAAHFNIRAGKYRGSLPPWGYLPTRVDGEWRLVPDPVQRERILEVYHRVVDNHEPLHLVAHDLNQRGILSPKDYFAKLQGREPQGREWSATALKRSLISEAMLGYATLNGKTVRDDDGAPLVRAEPILTREQLEALRAELVKTSRAKPAVATPSLLLRVLFCAVCGEPAYKFAGGGRKHPRYRCRSMGFPKHCGNGTVAMAEWDAFCEEQVLDLLGDAERLEKVWVAGSDSAVELAEVNAELVDLTSLIGSPAYRVGSPQREALDARIAALAARQEELEGLEARPSGWEWRETGQRFGDWWREQDIAAKNTWLRSMNVRLTFDVRGGLTRTIDFGDLQEYEQHLRLGTALDLVNAEKPPTGR

SEQ ID NO: 11607 - protein, 504 aa, Unknown
  Description of Unknown: Integrase A175 sequence
  PF07508,SSF53041,PS51737,cd00338,PTHR30461:SF3, PF00239,PS51736,SM00857,G3DSA:3.40.50.1390,PTHR30461
MRALVVIRLSRVTDATTSPERQLESCQQLCAQRGWDVVGVAEDLDVSGAVDPFDRKRRPNLARWLAFEEQPFDVIVAYRVDRLTRSIRHLQQLVHWAEDHKKLVVSATEAHFDTTTPFAAVVIALMGTVAQMELEAIKERNRSAAHFNIRAGKYRGSLPPWGYLPTRVDGEWRLVPDPVQRERILEVYHRVVDNHEPLHLVAHDLNQRGVLSPKDYFAKLQGREPQGREWSATALKRSLISEAMLGYATLNGKTVRDDDGAPLVRAEPILTREQLEALRAELVKADRTKPAVSTPSLLLRVLFCAVCGEPAYKFTGGGRKNARYRCRSWGWAQRCGNGTVAMAEWDAFCEEQVLDLLGDSERLEKVWVAGSDSAVELAEVNAELVDLTSLIGSPAYRAGSPQREALDARIAALAARQEELEGLEARPSGWEWRETGQRFGDWWRDQDTAGKNAWLRSMNVRLTFDVRGGLTRTIDFGDLQEYEQHLRLGSALDLVNAEKPPTGR

SEQ ID NO: 11608 - protein, 504 aa, Unknown
  Description of Unknown: Integrase A176 sequence
  PF07508,SSF53041,PF13408,PS51737,cd00338,PTHR30461:SF3, PF00239,SM00857,G3DSA:3.40.50.1390,PTHR30461
MPQPLRALVGARVSVVQGPQKVSQQAQLETARKWAEAQGHEIVGTFEDLGVSASVRPDERPDLGKWLTDEGASKWDVIVWSKMDRAFRSTKHCVDFAQWAEERQKVVMFAEDNLRLDYRPGAAKGIDAMMAELFVYLGSFFAQLELNRFKSRAQDSHRVLRQTDRWASGLPPLGYKTVPHPSGKGFGLDTDEDTKAVLYDMAGKLLDGWSLIGIAKDLNDRGVLGSRSRARLAKGKPIDQAPWNVSTVKDALTNLKTQGIKMTGKGKHAKPVLNDKGEQIVLAPPTFDWDTWKQIQDAVALREQAPRSRVHTKNPMLGIGICGKCGATLAQQHSRKKSDKSVVYRYYRCSRTPVNCDGVFIVADEADTLLEEAFLYEWADQPVTRRVFVPGEDHTYELEQINETIARLRRESDAGLIVSDEDERIYLERMRSLITRRTKLEAMPRRSAGWVEETTGQTYGEAWETEDHQQLLKDAKVKFILYSNKPRNIEVVVPQDRVAVDLAI

SEQ ID NO: 11609 - protein, 504 aa, Unknown
  Description of Unknown: Integrase A177 sequence
  PF07508,SSF53041,PS51737,cd00338,PTHR30461:SF3, PF00239,PS51736,SM00857,G3DSA:3.40.50.1390,PTHR30461
MRALVVIRLSRVTDATTSPERQLESCQQLCAQRGWDVVGVAEDLDVSGAVDPFDRKRRPNLARWLAFEEQPFDVIVAYRVDRLTRSIRHLQQLVHWAEDHKKLVVSATEAHFDTTTPFAAVVIALMGTVAQMELEAIKERNRSAAHFNIRAGKYRGSLPPWGYLPTRVDGEWRLVPDPVQRERILEVYHRVVDNHEPLHLVAHDLNRRGVLSPKDYFAKLQGREPRGREWSATALKRSLISEAMLGCATLNGKTVRDDDGAPLVRAEPILTREQLEALRAELVKTDRTKPAVATPSLLLRVLFCAVCGEPAYKFTGGGRKNARYRCRSMGFPKHCGNGTVAMAEWDAFCEEQVLDLLGDAERLEKVWVAGSDSAVELAEVNAELVDLTSLIGSPAYRAGSPQREALDSRIAALAARQEELEGLEARPSGWEWRETGQRFGDWWRDQDTAGKNTWLRSMNVRLTFDVRGGLTRTIDFGDLQEYEQHLRLGAALYLVNAEKPPTGR

SEQ ID NO: 11610 - protein, 504 aa, Unknown
  Description of Unknown: Integrase A178 sequence
  PF07508,SSF53041,PS51737,cd00338,PTHR30461:SF3,PF00239, PS51736,SM00857,G3DSA:3.40.50.1390,PTHR30461
MRALVVIRLSRVTDTTTSPERQLESCQQLCAQRGWDVVGVAEDLDVSGAVDPFDRKRRPNLARWLSFEEQPFDVIVAYRVDRLTRSIRHLQQLVHWAEDHKKLIVSATEAHFDTTSPFAAVVIALMGTVAQMELEAIKERNRSAAHFNIRAGKYRGSLPPWGYMPARVEGEWRLLVDPVQRERILEVYHRVVDNHEPLHQIAHDLNQRGLPSPKDYFAKLQGREPKGREWSATALKRSLISEAMLGYTTLNGKTVRDDDGAPLVRSEPILTREQLEALRAELVKTDRTKPAVSTPSLLLRVLFCAVCGEPAYKFTGGGRKNARYRCRSWGWAQRCGNGTVAMAEWDAFCEEQVLDLLGDAERLEKVWVAGSDSAVELAEVNAELVDLTSLIGSPAYRAGSPQREALDARIAALAARQEELEGLEARPSGWEWRETGQRFGDWWRDQDTAGKNTWLRSMNVRLTFDVRGGLTRTIDFGDLQEYEQHLRLGTALDLVNAEKPPTGR

SEQ ID NO: 11611 - protein, 504 aa, Unknown
  Description of Unknown: Integrase A179 sequence
  PF07508,SSF53041,PF13408,PS51737,cd00338, PTHR30461:SF3,PF00239,SM00857,G3DSA:3.40.50.1390,PTHR30461
MPQPLRALVGARVSVVQGPQKVSQQAQLETARKWAEAQGHEIVGTFEDLGVSASVRPDERPDLGKWLTDEGASKWDVIVWSKMDRAFRSTKHCVDFAQWAEERQKVVMFAEDNLRLDYRPGAAKGIDAMMAELFVYLGSFFAQLELNRFKSRAQDSHRVLRQTDRWASGLPPLGYKTVPHPSGKGFGLDTDEDTKAVLYDMAGKLLDGWSLIGIAKDLNDRGVLGSRSRARLAKGKPIDQAPWNVSTVKDALTNLKTQGIKMTGKGKHAKPVLDDKGEQIVLAPPTFDWDTWKQIQDAVALREQAPRSRVHTKNPMLGIGICGKCGATLAQQHSRKKSDKSVVYRYYRCSRTPVNCDGVFIVADEADTLLEEAFLYEWADQPVTRRVFVPGEDHTYELEQINETIARLRRESDAGLIVSDEDERIYLERMRSLITRRTKLEAMPRRSAGWVEETTGQTYGEAWEIEDHQQLLKDAKVKFILYSNKPRNIEVVVPQDRVAVDLAI

SEQ ID NO: 11612 - protein, 504 aa, Unknown
  Description of Unknown: Integrase A180 sequence
  PF07508,SSF53041,PS51737,cd00338,PTHR30461:SF3,PF00239, PS51736,SM00857,G3DSA:3.40.50.1390,PTHR30461
MRALVVIRLSRVTDATTSPERQLESCQQLCAQRGWDVIGVAEDLDVSGAVDPFDRKRRPNLARWLAFEEQPFDVIVAYRVDRLTRSIRHLQQLVHWAEDHKKLVVSATEAHFDTTTPFAAVVIALMGTVAQMELEAIKERNRSAAHFNIRAGKYRGSLPPWGYLPTRVDGEWRLVPDPVQRERILEVYHRVVDNHEPLHLVAHDLNRRGVLSPKDYFAKLQGREPQGREWSATALKRSLISEAMLGYATLNGKTVRDDDGAPLVRSEPILTREQLEALRAELVKTDRTKPAVSTPSLLLRVLFCAVCGEPAYKFTGGGRKNARYRCRSWGWAQRCGNGTVAMAEWDAFCEEQVLDLLGDAERLEKVWVAGSDSAVELAEVNAELVDLTSLIGSPAYRAGSPQREALDARIAALAARQEELEGLEARPSGWEWRETGQRFGDWWRDQDTAGKNAWLRSMNVRLTFDVRGGLTRTIDFGDLQEYEQHLRLGSALDLVNAEKPPTGR

SEQ ID NO: 11613 - protein, 504 aa, Unknown
  Description of Unknown: Integrase A181 sequence
  PF07508,SSF53041,PF13408,PS51737,cd00338, PTHR30461:SF3,PF00239,SM00857,G3DSA:3.40.50.1390,PTHR30461
MPQPLRALVGARVSVVQGPQKVSQQAQLETARKWAEAQGHEIVGTFEDLGVSASVRPDERPDLGKWLTDEGASKWDVIVWSKMDRAFRSTKHCVDFAQWAEERQKVVMFAEDNLRLDYRPGAAKGIDAMMAELFVYLGSFFAQLELNRFKSRAQDSHRVLRQTDRWASGLPPLGYKTVPHPSGKGFGLDTDEDTKAVLYDMAGKLLDGWSLIGIAKDLNDRGVLGSRSRARLAKGKPIDQAPWNVSTVKDALTNLKTQGIKMTGKGKHAKPVLDDKGEQIVLAPPTFDWDTWKQIQDAVALREQAPRSRVHTKNPMLGIGICGKCGATLAQQHSRKKSDKSVVYRYYRCSRTPVNCDGVFIVADEADTLLEEAFLYEWADQPVTRRVFVPGEDHTYELEQINETIARLRRESDAGLIVSDEDERIYLERMRSLITRRTKLEAMPRRSAGWVEETTGQTYGEAWETDDHQQLLKDAKVKFILYSNKPRNIEVVVPQDRVAVDLAI

SEQ ID NO: 11614 - protein, 503 aa, Unknown
  Description of Unknown: Integrase A182 sequence
  PF07508,SSF53041,PS51737,cd00338,PTHR30461:SF3,PF00239, PS51736,SM00857,G3DSA:3.40.50.1390,PTHR30461
MRALVVIRLSRVTDATTSPERQLESCQQLCVQRGWEVVGVAEDLDVSGAVDPFDRKRRPNLARWLAFEDEPFDVIVAYRVDRLTRSIRHLQQLVHWAEDHKKLVVSATEPHFDTTSPFAAVVIALMGTVAQMELEAIKERNRSAAHFNIRAGKYRGSLPPWGYMPARVDGEWRLLVDPVQRERILEVYHRVVDNHEPLHLVAHDLNQRGILSPKDYFAKLQGREPQGREWSATALKRSLISEAMLGYATLNGKTVRDDDGAPLVRAEPILTREQLESLRAELVKADRAKPAVSTPSLLLRVLFCAVCGEPAYKFDAGRKIPRYRCRSFGFAQRCGNGTVPIAEWDAFCEEQVLDLLGDAERLEKVWVAGSDSAVELAEVNAELVDLTSLIGSPAYRVGSPQREALDSRIAALAARQEELEGLEARPSGWEWRETGQRFADWWAAQDTAGKNTWLRSMNVRLTFDVRGGLTRTIDFGDLQEYEQHLRLGAALDLVNAEKPPTGR

SEQ ID NO: 11615 - protein, 502 aa, Unknown
  Description of Unknown: Integrase A183 sequence
  PF07508,G3DSA:1.10.10.2600,SSF53041,PS51737,cd00338, PF00239,PS51736,SM00857,G3DSA:3.40.50.1390,PTHR30461
MNKKICIYLRKSRADEELEKTLGEGETLSKHRNALLKFAKENKLNVTDIKEEIVSGDSLFFRPKMLELLKEVENNMYYGVLVMDIDRLGRGGMKDQGIILDAFKESKTKIITPLKTYDLDNEMDEEITEFKTFFSRRELKTINRRMQGGRIRSIEEGNYIATNPPYGYDISFIKKNRTLKINEDEAPAINLIFKLYIEGNGASAIANELNNLRYKTKLGNNFSPSSVLTIIKNPIYIGKIPWKRKDIKKSKTPGKVKDTRTRDKSEWIIADGKHPGIVTNEIWESAQKILKGRYHIPYQLSNAPVNPFAGIISCGICGKKMVMRKARGINRLMCIYKCGNKSTRFDNVESDCLEALKDYLSNYSAEIKNSIKKEDIDMYSIQITNLKKELTTLNNQRLKLFDLLERNLYDEDTFLERSKNINDRIENITHTLKSLEKKVKKNSYTSYEEDIKHFKNVLDAYNLTKDVSKKNNLLKSILYKIEYTKTEKGKDYEIKLFPKLRK

SEQ ID NO: 11616 - protein, 502 aa, Unknown
  Description of Unknown: Integrase A184 sequence
  PF07508,G3DSA:1.10.10.2600,SSF53041,PS51737,cd00338,PF00239, PS51736,SM00857,G3DSA:3.40.50.1390,PTHR30461
MNKICIYLRKSRADEELEKTLGEGETLSKHRKALLKFAKEKKLNIVEIKEEIVSGESLFFRPKMLELLKEVENKQYTGVLVMDMQRLGRGNMQDQGIILETFKKSNTKIITPMKTYDLSDDFDEEYTEFEAFMSRKELKMINRRMQGGRVRSVEDGNYIATNPPLGYDIHWIKKSRTLKINPHECEIIKLIFKLYTEGNGAGSIAEHLNNLGYKTKFNNNFSRSSVLFILKNPIYIGKVTWKKKEIKKSKNPNKVKDTRTRDKSEWIVVDGKHEPMISMKMWNKAQEILNNKYHIPYQLVNGPANPLAGIVICSKCKFKMVMRKLKGVDRLLCRNNKCDNISNRYDSTEKAIIQALERYLKEYRINISNQNKTSDIKPYERQVNILEKELAALNEQKLKLFDFLERGIYDENTFLERSKNIEERITKTSSGIEKINDIINKEKKVVKEEDVIKFQKLLDGYKNTDDIKLKNELMKKLVNKVEYTKNKRGDTFGIDIFPKLKP

SEQ ID NO: 11617 - protein, 502 aa, Unknown
  Description of Unknown: Integrase A185 sequence
  PF07508,G3DSA:1.10.10.2600,SSF53041,PS51737,cd00338, PF00239,PS51736,SM00857,G3DSA:3.40.50.1390,PTHR30461
MNKICIYLRKSRADEELEKTLGEGETLSKHRKALLKFAKEKKLNIVEIKEEIVSGESLFFRPKMLELLKEVENKQYTGVLVMDMQRLGRGNMQDQGIILETFKKSNTKIITPMKTYDLSDDFDEEYTEFEAFMSRKELKMINRRMQGGRVRSVEDGNYIATNPPLGYDIHWIKKSRTLKINTHECEIIKLIFKLYTEGNGAGSIAEHLNNLGYKTKFNNNFSRSSVLFILKNPIYIGKVTWKKKEIKKSKNPNKVKDTRTRDKSEWIVVDGKHEPIISMKIWNKAQEILNNKYHIPYQLVNGPANPLAGIVICSKCKFKMVMRKLKGIDRLLCRNNKCNNISNRYDSTEKAIVQALERYLNEYRINISNKNKTSNIKPYERQINILEKELAALNEQKLKLFDFLERGIYDENTFLERSKNIEKRITKTSSGIEKINDIINKEKKVVKEEDVIKFQKLLDGYKNTDDIKLKNELMKKLVNKVEYTKDKRGETFGIDIFPKLKP

SEQ ID NO: 11618 - protein, 502 aa, Unknown
  Description of Unknown: Integrase A186 sequence
  PF07508,G3DSA:1.10.10.2600,SSF53041,PS51737,cd00338,PF00239, PS51736,SM00857,G3DSA:3.40.50.1390,PTHR30461
MNKICIYLRKSRADEELEKTLGEGETLSKHRKALLKFAKEKKLNIVEIKEEIVSGESLFFRPKMLELLKEVENKQYTGVLVMDMQRLGRGNMQDQGIILETFKKSNTKIITPMKTYDLSDDFDEEYTEFEAFMSRKELKMINRRMQGGRVRSVEDGNYIATNPPLGYDIHWIKKSRTLKINPHECEIIKLIFKLYTEGNGAGSIAEHLNNLGYKTKFNNNFSRSSVLFILKNPIYIGKVTWKKKEIKKSKNPNKVKDTRTRDKSEWIVVDGKHEPMISMKMWNKAQEILNNKYHIPYQLVNGPANPLAGIVICSKCKFKMVMRKLKGVDRLLCRNNKCDNISNRYDSTEKAIVQALERYLKEYRINISNRNKTSDIKPYERQINILEKELAALNEQKLKLFDFLERGIYDENTFLERSKNIEERITKTSLGIEKINDIINKEKKVVKEEDVIKFQKLLDGYKNTDDIKLKNELMKKLVNKVEYTKNKRGETFGIDIFPKLKP

SEQ ID NO: 11619 - protein, 502 aa, Unknown
  Description of Unknown: Integrase A187 sequence
  PF07508,SSF53041,PF13408,PS51737,cd00338, PTHR30461:SF3,PF00239,PS51736,SM00857,G3DSA:3.40.50.1390, PTHR30461
MRVLGRLRLSRSTEESTSIERQREIVTAWADSNGHTVVGWAEDVDVSGAVDPFDTPSLGPWLDERRGEWDILCAWKLDRLGRDAIRLNKLFLWCQENGKTVASTSEGIDLGTPVGRLIANVIAFLAEGEREAIRERVTSSKQKLREVGRWGGGKPPFGYMGIPNPDGQGYILVVDPIAKPVVRRIVDDVVDGKPLTRLCAELTEERYLTPAEYYATLKAGAPRQQADPGEVIAKWRPTAVRNLLRSKALRGHAHHRGQTVRDDQGRPVRLAEPLVDSDEWELLQETLDGIQADFSGRRVEGASPLSGVAVCMTCGRPLHFSRHMVKRPYGDYPYQYYRCQDRHGKNVPADVLDELVEENFLLKVGDYPVRERVWVQGDTNWADMKEAVAAYDELVQAAGRAKSATAKERLQRQLDALDTRIAELESAPATEAHWEYRETGSTYRDAWENSDTDQRRELLKKSGITVAVGIDGVEGRRSKHNPGALRFDIRVPAELTQRLGAS

SEQ ID NO: 11620 - protein, 502 aa, Unknown
  Description of Unknown: Integrase A188 sequence
  PF07508,SSF53041,PS51737,cd00338,PTHR30461:SF3,PF00239,PS51736, SM00857,G3DSA:3.40.50.1390,PTHR30461
MRVLGRLRLSRSTEESTSIERQREIVTAWAESNGHTLVGWAEDVDVSGAIDPFDTPSLGPWLDERRGEWDILCAWKLDRLGRDAIRLNKLFGWCQEHGKTVASCSEGIDLSTPVGRLIANVIAFLAEGEREAIRERVTSSKQKLREVGRWGGGKPPFGYMGIPNPDGQGHILVVDPVAKPVVRRIVDDILDGKPLTRLCTELTEERYLTPAEYYATLKAGAPRQKAEPDETPAKWRPTALRNLLRSKALRGYAHHKGQTVRDLKGQPVRLAEPLVDADEWELLQETLDRVQANWSGRRVEGVSPLSGVVVCITCDRPLHHDRYLVKRPYGDYPYRYYRCRDRHGKNLPAEMVETLMEESFLARVGDYPVRERVWVQGDTNWADLKEAVAAYDELVQAAGRAKSATAKERLQRQLDALDERIAELESAPATEAHWEYRPTGGTYRDAWETADTDERREILRRSGIVLAVGVDGVDGRRSKHNPGALHFDFRVPEELTQRLGVS

SEQ ID NO: 11621 - protein, 502 aa, Unknown
  Description of Unknown: Integrase A189 sequence
  PF07508,SSF53041,PS51737,cd00338,PTHR30461:SF3, PF00239,PS51736,SM00857,G3DSA:3.40.50.1390,PTHR30461
MRVLGRLRLSRSTEESTSIERQREIVTAWADSNGHTVVGWAEDVDVSGAIDPFDTPSLGVWLDERRGEWDILCAWKLDRLGRDAIRLNKLFLWCQEHGKTVTSCSEGIDLGTPVGRLIANVIAFLAEGEREAIRERVASSKQKLREIGRWGGGKPPFGYMGVRNPDGQGHILVVDPVAKPVVRRIVEDILEGKPLTRLCTELTEERYLTPAEYYATLKAGAPRQQAEEGEVTAKWRPTAVRNLLRSKALRGHAHHKGQTVRDDQGRAIQLAEPLVDADEWELLQETLDGIAADFSGRRVEGASPLSGVAVCMTCDKPLHHDRYLVKRPYGDYPYRYYRCRDRHGKNVPAETLEELVEDAFLQRVGDFPVRERVWVQGDTNWADLKEAVAAYDELVQAAGRAKSATARERLQRQLDILDERIAELESAPNTEAHWEYQPTGGTYRDAWENSDADERRELLRRSGIVVAVHIDGVEGRRSKHNPGALHFDIRVPHELTQRLIAP

SEQ ID NO: 11622 - protein, 502 aa, Unknown
  Description of Unknown: Integrase A190 sequence
  PF07508,SSF53041,PS51737,cd00338,PTHR30461:SF3,PF00239, PS51736,SM00857,G3DSA:3.40.50.1390,PTHR30461
MPTYDRSMRVIGRLRISRQSEESTSIDRQRELIQNWADTHDHEIVGWAEDIDVSGSVDPFEAPGLGPWLKRDRLGEWDILVAWKLDRIARRAIAINRVFHLCQEHDKTLVCISDNIDLSTWVGRLIANVIAGVAEGELEAIRERTLASHRKLRDLGRWPGGRPAYGYKAVERTDGPGWKLVHDEYSATIMREIVDRTLQGEAGNAIAQDLQERGVLPPAEYRRQMNGEKLRGGEWMGQVIRKMLKSRTLLGHVTHQQVTVINEKEGTPILKGEPLVSLEEWEELQAMLGGSSRPKNHNRTTAASPMLDVALCAECEKPLHLRTQRTQRKEKLHVHRYYYCPDKHGSAIRGEDVENAVENQFLEDFGDVPAMERVFREGENHEIEIKQAIRSIEALTPLLGTATSGTVLKSLTDQISALSNRVTYLESLPKAESGYILRPTGKTYREEWEERDEQGRRALLRRSGITATFRLTGKGRGGRNPAPGALEFNLRVPEDAHARMAS

SEQ ID NO: 11623 - protein, 502 aa, Unknown
  Description of Unknown: Integrase A191 sequence
  PF07508,SSF53041,PS51737,cd00338,PTHR30461:SF3, PF00239,PS51736,SM00857,G3DSA:3.40.50.1390,PTHR30461
MPTYDRSMRVIGRLRISRQSEESTSIDRQRELIQNWADTHDHEIVGWAEDIDVSGSIDPFEAPGLGPWLKRDRLGEWDILVAWKLDRIARRAIAINRVFHLCQEHDKTLVCISDNIDLSTWVGRLIANVIAGVAEGELEAIRERTLASHRKLRELGRWPGGRPAYGYKAVERTDGPGWKLVHDEYSATIMREIVDRTLQGEAGNAIAQDLQERGVLTPAEYRREMNGEKLRGGEWMGQVIRKMLKSRTLLGHVTHQQVTVINEKEGTPILKGEPLVSLEEWEELQAMLGGSSRPKNHNRTTAASPMLDVALCAECEKPLHLRTQRTQRKEKLHVHRYYYCPDKHGSAIRGEDVENAVENQFLEDFGDLPAMERVFREGENHEIEIKQAIQSIEALTPLLGAATSGTVLKSLTDQISALSNRVTYLESLPKAESGYILRPTGKTYREEWEERDEQGRRALLRRSGITATFMLTGKGRGGRNPAPGALQFNLRVPADAQERLAS

SEQ ID NO: 11624 - protein, 502 aa, Unknown
  Description of Unknown: Integrase A192 sequence
  PF07508,SSF53041,PS51737,cd00338,PTHR30461:SF3,PF00239, PS51736,SM00857,G3DSA:3.40.50.1390,PTHR30461
MPTYDRSMRVIGRLRISRQTEESTSIERQRELIQNWADTHDHEIVGWAEDKDVSGSVDPFDTPGLGPWLKRDRLDDWDILVAWKLDRIARRAIAINRVFHLCQEHDKTLVCISDSIDLSTWVGRLIANVIAGVAEGELEAIRERTLASHRKLRELGRWPGGRPAYGYKAVERTDGPGWKLVHDEYSATIMREIVDRTLQGEAGNAIAQDLQARGVLPPAEYRRQMNGEKLRGGEWMGQVIRKMLKSRTLLGHVTHQQVTVINEKEGTPILKGEPLVSLEEWEELQAMLGGSSRPKNHNRTTAASPMLDVALCAECEKPLHLRTQRTQRKEKLHVHRYYYCPDKHGSAIRGEDVENAVENQFLEDFGDLPAMERVFREGENHEIEIKQAIQSIEALTPLLGAATSGTVLKSLTDQISAISNRVTYLESLPKAESGYILRPTGKTYREEWEERDEQGRRALLRRAGITATFRLTGKGRGGRNPAPGALEFHLRVPEDAHDRMAS

SEQ ID NO: 11625 - protein, 502 aa, Unknown
  Description of Unknown: Integrase A193 sequence
  PF07508,SSF53041,PS51737,cd00338,PTHR30461:SF3, PF00239,PS51736,SM00857,G3DSA:3.40.50.1390,PTHR30461
MPTYDRSMRVIGRLRISRQTEESTSIERQRELIQNWADTHDHEIVGWAEDKDVSGSVDPFDTPGLGPWLKRDRLDDWDILVAWKLDRIARRAIAINRVFHLCQEHDKTLVCISDNIDLSTWVGRLIANVIAGVAEGELEAIRERTLASHRKLRELGRWPGGRPAYGYKAVERTDGPGWKLVHDEYSATIMREIVDRTLQGEAGNAIAQDLQARGVLPPAEYRRQMNGEKLRGGEWMGQVIRKMLKSRTLLGHVTHQQVTVINEKEGTPILKGEPLVSLEEWEELQAMLGGSSRPKNHNRTTAASPMLDVALCAECEKPLHLRTQRTQRKEKLHVHRYYYCPDKHGSAIRGEDVENAVENQFLEDFGDLPAMERVFREGENHEIEIKQAIQSIEALTPLLGAATSGTVLKSLTDQISAISNRVTYLESLPKAESGYILRPTGKTYREEWEERDEQGRRALLRRAGITATFRLTGKGRGGRNPAPGALEFHLRVPEDAHDRMAS

SEQ ID NO: 11626 - protein, 502 aa, Unknown
  Description of Unknown: Integrase A194 sequence
  PF07508,SSF53041,PS51737,cd00338,PTHR30461:SF3,PF00239, PS51736,SM00857,G3DSA:3.40.50.1390,PTHR30461
MRVLGRLRLSRSTEESTSIERQREIVTAWAQSNGHTLVGWAEDVDVSGAIDPFDTPSLGPWLDERRGEWDILCAWKLDRLGRDAIRLNKLFGWCQEHGKTVASCSEGIDLSTPVGRLIANVIAFLAEGEREAIRERVTSSKQKLREVGRWGGGKPPFGYMGVPNPDGQGHILVVDPVAKPVVRRIVDDILDGKPLTRLCTELTEERYLTPAEYYATLKAGAPRQKAEPDETPAKWRPTALRNLLRSKALRGYAHHKGQTVRDLKGQPVRLAEPLVDADEWELLQEILDRVQANWSGRRVEGVSPLSGVAVCITCDRPLHHDRYLVKRPYGDYPYRYYRCRDRHGKNLPAELVETLMEESFLARVGDYPVRERVWVQGDTNWADLKEAVAAYDELVQAAGRAKSATAKERLQRQLDALDERIAELESAPATEAHWEYRPTGGTYRDAWETADTDERREILRRSGIVLAVGVDGVEGRRSKHNPGALHFDFRVPEELTQRLGVA

SEQ ID NO: 11627 - protein, 502 aa, Unknown
  Description of Unknown: Integrase A195 sequence
  PF07508,SSF53041,PS51737,cd00338,PTHR30461:SF3, PF00239,PS51736,SM00857,G3DSA:3.40.50.1390,PTHR30461
MPTYDRSMRVIGRLRISRQTEESTSIERQRELIQNWADTHEHEIVGWAEDKDVSGSVDPFDTPGLGPWLKRDRLDDWDILVAWKLDRIARRAIAINRVFHLCQEHDKTLVCISDNIDLSTWVGRLIANVIAGVAEGELEAIRERTLASHRKLRELGRWPGGRPAYGYKAVERTDGPGWKLVHDEYSATIMREIVDRTLQGEAGNAIAQDLQARGVLPPAEYRRQMNGEKLRGGEWMGQVIRKMLKSRTLLGHVTHQQVTVINEKEGTPILKGEPLVSLEEWEELQAMLGGSSRPKNHNRTTAASPMLDVALCAECEKPLHLRTQRTQRKEKLHVHRYYYCPDKHGSAIRGEDVENAVENQFLEDFGDLPAMERVFREGENHEIEIKQAIQSIEALTPLLGAATSGTVLKSLTDQISAISNRVTYLESLPKAESGYILRPTGKTYREEWEERDEQGRRALLRRAGITATFRLTGKGRGGRNPAPGALEFHLRVPEDAHDRMAS

SEQ ID NO: 11628 - protein, 502 aa, Unknown
  Description of Unknown: Integrase A196 sequence
  PF07508,SSF53041,PS51737,cd00338,PTHR30461:SF3,PF00239, PS51736,SM00857,G3DSA:3.40.50.1390,PTHR30461
MRVLGRLRLSRSTEESTSIERQREIVTAWADSNGHTVVGWAEDVDVSGAIDPFDTPSLGVWLDERRGEWDILCAWKLDRLGRDAIRLNKLFLWCQEHGKTVTSCSEGIDLGTPVGRLIANVIAFLAEGEREAIRERVASSKQKLREIGRWGGGKPPFGYMGVRNPDGQGHILVVDPVAKPVVRRIVEDILEGKPLTRLCTELTEERYLTPAEYYATLKAGAPRQQAEEGEVTAKWRPTAVRNLLRSKALRGHAHHKGQTVRDDQGRAIQLAEPLVDADEWELLQETLDGIAADFSGRRVEGASPLSGVAVCMTCDKPLHHDRYLVKRPYGDYPYRYYRCRDRHGKNVPAETLEELVEDAFLQRVGDFPVRERVWVQGDTNWADLKEAVAAYDELVQAAGRAKSATARERLQRQLDILDERIAELESAPNTEAHWEYQRTGGTYRDAWENSDADERRELLRRSGIVVAVHIDGVEGRRSKHNPGALHFDIRVPHELTQRLIAP

SEQ ID NO: 11629 - protein, 502 aa, Unknown
  Description of Unknown: Integrase A197 sequence
  PF07508,SSF53041,PS51737,cd00338,PTHR30461:SF3, PF00239,PS51736,SM00857,G3DSA:3.40.50.1390,PTHR30461
MRVLGRLRLSRSTEESTSIERQREIVTAWAESNGHTLVGWAEDVDVSGAIDPFDTPSLGPWLDERRGEWDILCAWKLDRLGRDAIRLNKLFGWCQEHGKTVASCSEGIDLSTPVGRLIANVIAFLAEGEREAIRERVTSSKQKLREVGRWGGGKPPFGYMGIPNPDGQGHILVVDPVAKPVVRRIVDDILDGKPLTRLCTELTEERYLTPAEYYATLKAGAPRQKAEPDETPAKWRPTALRNLLRSKALRGYAHHKGQTVRDLKGQPVRLAEPLVDADEWELLQETLDRVQANWSGRRVEGVSPLSGVAVCITCDRPLHHDRYLVKRPYGDYPYRYYRCRDRHGKNLPAELVETLMEESFLARVGDYPVRERVWVQGDTNWADLKEAVAAYDELVQAAGRAKSATAKERLQRQLDALDERIAELESAPTTEAHWEYRPTGGTYRDAWETADTDERREILRRSGIVLAVGVDGVDGRRSKHNPGALHFDFRVPEELTQRLGVS

SEQ ID NO: 11630 - protein, 501 aa, Unknown
  Description of Unknown: Integrase A198 sequence
  PF07508,SSF53041,PS51737,cd00338,PTHR30461:SF3,PF00239, PS51736,SM00857,G3DSA:3.40.50.1390,PTHR30461
MVVIRLSRVTDATTSPERQLESCQQLCAQRGWDVVGVAEDLDVSGAVDPFDRKRRPNLARWLSFEEQPFDVIVAYRVDRLTRSIRHLQQLVHWAEDHKKLIVSATEAHFDTTTPFAAVVIALMGTVAQMELEAIKERNRSAAHFNIRAGKYRGSLPPWGYMPARVDGEWRLLVDPVQRERILEVYHRVVDNHEPLHLVAHDLNQRGILSPKDYFAKLQGREPKGREWSATALKRSLISEAMLGYATLNGKTVRDDDGAPLVRAEPILTREQLEALRAELVKTDRTKPAVSTPSLLLRVLFCAVCGEPAYKFTGGGRKNARYRCRSWGWAQRCGNGTVAMAEWDAFCEEQVLDLLGDAERLEKVWVAGSDSAVELAEVNAELVDLTSLIGSPAYRVGSPQREALDARIAALAARQEELEGLEARPSGWEWRETGQRFGDWWREQDTAAKNTWLRSMNVRLTFDVRGGLTRTIDFGDLQEYEQHLRLGSALDLVNAEKPPTGR

SEQ ID NO: 11631 - protein, 501 aa, Unknown
  Description of Unknown: Integrase A199 sequence
  PF07508,SSF53041,PS51737,cd00338,PTHR30461:SF3, PF00239,PS51736,SM00857,G3DSA:3.40.50.1390,PTHR30461
MSDMRVLGRLRISRATEESTSIERQREIVEQWASVNDHEIVGWAVDQDVSGSVDPFDAPALGPWLSDHRKHEWDILCAWKLDRLSRRAIPMNKLFGWMIDNDKTLVCVSENLDLGTWVGRMIANVIAGVAEGELEAIRERTTASHKKLRELGRWAGGPTYYGYVPKPRDGAGWELDIDPHAAGVLREIIEKTIAGQSTESIVVELNERGELAPSDYHRKRNGKPIRGTKWSTSWLRSQLKSKTLLGHMTHNGETVYDDAGLPVQKGPALVDRDTYKQLQDALESRGINRTRRRTGASPLLGVAVCDVCEGPLYYRQTKNAKGTAMLRQYICKHGRYGNTKANGGEPYNIIQADLLEATVEELFLSKMGDQPRVERVFIPGEGHQHELETAERAVEDLTSLLGTITQEGARKRLLAQLAAAHERLAHLEELPSSEPRWETRETGETYREAWEGATVEERRQILLKAGVTLKVQMKDRVPRVHPGVIVANWIEPHDIEKRLAS

SEQ ID NO: 11632 - protein, 500 aa, Unknown
  Description of Unknown: Integrase A200 sequence
  PF07508,SSF53041,PS51737,cd00338,PTHR30461:SF3,PF00239, SM00857,G3DSA:3.40.50.1390,PTHR30461
MTQTLRALVGARVSVVQGPQKVSHIAQQESGTKWATERGHEIVGTFKDLDVSASVSPFERPDLGPWLSPERQDEWDILVFSKIDRMFRSTRDCVKFAEWAEERKKILVFAEDSMTLNYRDKSDSLEKMMSELFIYIGSFFAQLELNRFRSRAKDSHRVLRGTDRWASGVPPLGFKVIDHPSGKGKGLATDPEGKELLYDMAGKLLEGWSFIRISQYLNEKKIPTQLDKARMAKGKPAYDNPWSVNTVIESLTSLRTQGLKMTRSGKKFVTVLDEAGEPIRMAPPTFDAATWKQIQEAAALRQNNRRSRSYTANPMLGVGFCGQCGASLAQQFSRSKLKDGTVNEHRYYRCGRTPVNCQNVFLRADDGDDLLEQTFLEAYGDEPVTRRVFVPGEDHTEELEQVRATIERLRRESDAGLIVSAEDERIYLERMKSLIDRRTQLEAVPRRAAGWVTEETGQAYREAWETEDHRTLLSEAGIRFELKSSKPMNFALHVPQKEAG

SEQ ID NO: 11633 - protein, 500 aa, Unknown
  Description of Unknown: Integrase A201 sequence
  PF07508,SSF53041,PS51737,cd00338,PTHR30461:SF3, PF00239,PS51736,SM00857,G3DSA:3.40.50.1390,PTHR30461
MRALVVIRLSRVTDATTSPERQLESCQQLCAQRGWDVVGVAEDLDVSGAVDPFDRKRRPNLARWLAFEEQPFDVIVAYRVDRLTRSIRHLQQLVHWAEDHKKLVVSATEAHFDTTTPFAAVVIALMGTVAQMELEAIKERNRSAAHFNIRAGKYRGSLPPWGYLPTRVDGEWRLVPDPVQRERILEVYHRVVDNHEPLHLVAHDLNRRGVLSPKDYFAKLQGREPQGREWSATALKRSLISEAMLGYATLNGKTVRDDDGAPLVRAEPILTREQLEALRAELVKTDRTKPAVSTPSLLLRVLFCAVCGEPAYKFAGGGRKHPRYRCRSMGFPKHCGNGTVAMAEWDAFCEEQVLDLLGDSERLEKVWVAGSDSAVELAEVNAELVDLTSLIGSPAYRAGSPQREALDSRIAALAARQEELEGLEARPSGWEWRETGQRFGDWWREQDTAGKNTWLRAMNVRLTFDVRGGLTRTIDFGDLQEYEQHLRLGSVVERLHAGMS

SEQ ID NO: 11634 - protein, 500 aa, Unknown
  Description of Unknown: Integrase A202 sequence
  PF07508,SSF53041,PS51737,cd00338,PTHR30461:SF3,PF00239, PS51736,SM00857,G3DSA:3.40.50.1390,PTHR30461
MRALVVIRLSRVTDATTSPERQLESCQQLCAQRGWDVVGVAEDLDVSGAVDPFDRKRRPNLARWLAFEEQPFDVIVAYRVDRLTRSIRHLQQLVHWAEDHKKLVVSATEAHFDTTTPFAAVVIALMGTVAQMELEAIKERNRSAAHFNIRAGKYRGSLPPWGYLPTRVDGEWRLVPDPVQRERILEVYHRVVDNHEPLHLVAHDLNRRGVLSPKDYFAKLQGREPQGREWSATALKRSLISEAMLGYATLNGKTVRDDDGAPLVRSEPILTREQLEALRAELVKTDRTKPAVSTPSLLLRVLFCAVCGEPAYKFTGGGRKNARYRCRSWGWAQRCGNGTVAMAEWDAFCEEQVLDLLGDAERLEKVWVAGSDSAVELAEVNAELVDLTSLIGSPAYRAGSPQREALDARIAALAARQEELEGLEARPSGWEWRETGQRFGDWWRDQDTAAKNTWLRSMNVRLTFDVRGGLTRTIDFGDLQEYEQHLRLGSVVERLHTGMS

SEQ ID NO: 11635 - protein, 500 aa, Unknown
  Description of Unknown: Integrase A203 sequence
  PF07508,SSF53041,PS51737,cd00338,PTHR30461:SF3, PF00239,PS51736,SM00857,G3DSA:3.40.50.1390,PTHR30461
MRALVVIRLSRVTDATTSPERQLESCQRLCAQRGWDVVGVAEDLDVSGAVDPFDRKRRPNLARWLAFEEQPFDVIVAYRVDRLTRSIRHLQQLVHWAEDHKKLVVSATEAHFDTTTPFAAVVIALMGTVAQMELEAIKERNRSAAHFNIRAGKYRGSLPPWGYLPTRVDGEWRLVPDPVQRERILEVYHRVVDNHEPLHLVAHDLNRRGVLSPKDYFAKLQGREPQGREWSATALKRSLISEAMLGYATLNGKTVRDDDGAPLVRAEPILTREQLEALRAELVKTDRTKPAVSTPSLLLRVLFCAVCGEPAYKFTGGGRKNARYRCRSWGWAQRCGNGTVAMAEWDAFCEEQVLDLLGDAERLEKVWVAGSDSAVELAEVNAELVDLTSLIGSPAYRVGSPQREALDARIAALAARQEELEGLEARPSGWEWRETGQRFGDWWREQDTSGKNTWLRSMNVRLTFDVRGGLTRTIDFGDLQEYEQHLRLGSVVERLHTGMS

SEQ ID NO: 11636 - protein, 500 aa, Unknown [sequence omitted]

SEQ ID NO: 11637 - protein, 500 aa, Unknown
  Description of Unknown: Integrase A205 sequence
  PF07508,SSF53041,PS51737,cd00338,PTHR30461:SF3, PF00239,PS51736,SM00857,G3DSA:3.40.50.1390,PTHR30461
MRALVVIRLSRVTDATTSPERQLESCQQLCAQRGWDVVGVAEDLDVSGAVDPFDRKRRPNLARWLAFEEQPFDVIVAYRVDRLTRSIRHLQQLVHWAEDHKKLIVSATEAHFDTTSPFAAVVIALMGTVAQMELEAIKERNRSAAHFNIRAGKYRGSLPPWGYMPARVDGEWRLLVDPVQRERILEVYHRVVDNHEPLHLVAHDLNRRGVLSPKDYFAKLQGREPQGREWSATALKRSLISEAMLGYTTLNGKTVRDDDGAPLVRAEPILTREQLEALRAELVKTDRTKPAVSTPSLLLRVLFCAVCGEPAYKFTGGGRKNARYRCRSWGWAQRCGNGTVAMAEWDAFCEEQVLDLLGDAERLEKVWVAGSDSAVELAEVNAELVDLTSLIGSPAYRVGSPQREALDARIAALAARQEELEGLEARPSGWEWRETGQRFGDWWREQDTAAKNTWLRSMNVRLTFDVRGGLTRTIDFGDLQEYEQHLRLGSVVERLHTGMS

SEQ ID NO: 11638 - protein, 500 aa, Unknown
  Description of Unknown: Integrase A206 sequence
  PF07508,SSF53041,PS51737,cd00338,PTHR30461:SF3,PF00239, PS51736,SM00857,G3DSA:3.40.50.1390,PTHR30461
MRALVVIRLSRVTDATTSPERQLESCQQLCAQRGWDVVGVAEDLDVSGAVDPFDRKRRPNLARWLAFEEQPFDVIVAYRVDRLTRSIRHLQQLVHWAEDHKKLIVSATEAHFDTTTPFAAVVIALMGTVAQMELEAIKERNRSAAHFNIRAGKYRGSLPPWGYLPTRVDGEWRLVPDPVQRERILEVYHRVVDNHEPLHLVAHDLNRRGVLSPKDYFAKLQGRDPQGREWSATALKRSLISEAMLGYATLNGKTVRDDDGAPLVRAEPILTREQLEALRAELVKTDRTKPAVSTPSLLLRVLFCAVCGEPAYKFTGGGRRNARYRCRSWGWAQRCGNGTVAMAEWDAFCEEQVLDLLGDAERLEKVWVAGSDSAVELAEVNAELVDLTSLIGSPAYRVGSPQREALDARIAALAARQEELEGLEARPSGWEWRETGQRFGDWWREQDTSGKNTWLRSMNVRLTFDVRGGLTRTIDFGDLQEYEQHLRLGSVVERLHTGMS

SEQ ID NO: 11639 - protein, 500 aa, Unknown
  Description of Unknown: Integrase A207 sequence
  PF07508,SSF53041,PS51737,cd00338,PTHR30461:SF3, PF00239,PS51736,SM00857,G3DSA:3.40.50.1390,PTHR30461
MRALVVIRLSRVTDATTSPERQLESCQQLCAQRGWDVVGVAEDLDVSGAVDPFDRKRRPNLARWLSFEEQPFDVIVAYRVDRLTRSIRHLQQLVHWAEDHKKLIVSATEAHFDTTSPFAAVVIALMGTVAQMELEAIKERNRSAAHFNIRAGKYRGSLPPWGYMPARVDGEWRLVPDPVQRERILEVYHRVVDNHEPLHLVAHDLNRRGVLSPKDYFAKLQGREPQGREWSATALKRSLISEAMLGYATLNGKTVRDDDGAPLVRAEPILTREQLESLRAELVKTDRTKPAVSTPSLLLRVLFCAVCGEPAYKFTGGGRKNARYRCRSWGWAQRCGNGTVAMAEWDAFCEEQVLDLLGDSERLEKVWVAGSDSAVELAELNAELVDLTSLIGSPAYRAGSPQREALDARIAALAARQEELEGLEARPSGWEWRETGQRFGDWWRDQDTAGKNTWLRSMNVRLTFDVRGGLTRTIDFGDLQEYEQHLRLGSVVERLHTGMS

SEQ ID NO: 11640 - protein, 500 aa, Unknown
  Description of Unknown: Integrase A208 sequence
  PF07508,SSF53041,PS51737,cd00338,PTHR30461:SF3,PF00239, PS51736,SM00857,G3DSA:3.40.50.1390,PTHR30461
MRALVVIRLSRVTDATTSPERQLESCQQLCAQRGWDVVGVAEDLDVSGAVDPFDRKRRPNLARWLAFEEQPFDVIVAYRVDRLTRSIRHLQQLVHWAEDHKKLVVSATEAHFDTTTPFAAVVIALMGTVAQMELEAIKERNRSAAHFNIRAGKYRGSLPPWGYLPTRVDGEWRLVPDPVQRERILEVYHRVVDNHEPLHLVAHDLSRRGVLSPKDYFAKLQGREPRGREWSATALKRSLISEAMLGYATLNGKTVRDDDGAPLVRAEPILTREQLEALRAELVKTDRTKPAVATPSLLLRVLFCAVCGEPAYKFTGGGRKNARYRCRSWGWAQRCGNGTVAMAEWDAFCEEQVLDLLGDSERLEKVWVAGSDSAVELAEVNAELVDLTSLIGSPAYRVGSPQREALDARIAALAARQEELEGLEARPSGWEWRETGQRFGDWWREQDIAAKNTWLRSMNVRLTFDVRGGLTRTIDFGDLQEYEQHLRLGSVVERLHAGMS

SEQ ID NO: 11641 - protein, 500 aa, Unknown
  Description of Unknown: Integrase A209 sequence
  PF07508,SSF53041,PS51737,cd00338,PTHR30461:SF3, PF00239,PS51736,SM00857,G3DSA:3.40.50.1390,PTHR30461
MRALVVIRLSRVTDATTSPERQLESCQQLCAQRGWDVVGVAEDLDVSGAVDPFDRRRRPNLARWLAFEEQPFDVIVAYRVDRLTRSIRHLQQLVHWAEDHKKLVVSATEAHFDTTTPFAAVVIALMGTVAQMELEAIKERNRSAAHFNIRAGKYRGSLPPWGYLPTRVDGEWRLVPDPVQRERILEVYHRVVDNHEPLHLVAHDLNQRGVLSPKDYFAKLQGREPRGREWSATALKRSLISEAMLGYATLNGKTVRDDDGAPLVRAEPILTREQLEALRAELVKTDRTKPAVSTQSLLLRVLFCAVCGEPAYKFTGGGRKNARYRCRSWGWAQRCGNGTVAMAEWDAFCEEQVLDLLGGSERLEKVWVAGSDSAVELAEVNAELVDLTSLIGSPAYRVGSPQREALDARIAALAARQEELEGLEARPSGWEWRETGQRFGDWWREQGTAGKNTWLRSMNVRLTFDVRGGLTRTIDFGDLQEYEQHLRLGSVVERLHAGMS

SEQ ID NO: 11642 - protein, 500 aa, Unknown
  Description of Unknown: Integrase A210 sequence
  PF07508,SSF53041,PS51737,cd00338,PTHR30461:SF3,PF00239, PS51736,SM00857,G3DSA:3.40.50.1390,PTHR30461
MRALVVIRLSRVTDATTSPERQLESCQQLCAQRGWDVVGVAEDLDVSGAVDPFDRKRRPNLARWLAFEEQPFDVIVAYRVDRLTRSIRHLQQLVHWAEDHKKLIVSATEAHFDTTSPFAAVVIALMGTVAQMELEAIKERNRSAAHFNIRAGKYRGSLPPWGYMPARVDGEWRLLVDPVQRERILEVYHRVVDNHEPLHQIAHDLNQRGILSPKDYFAKLQGREPKGREWSATALKRSLISEAMLGYTTLNGKTVRDDDGAPLVRAEPILTREQLESLRAELVKTSRAKPAVSTPALLLRVLFCAVCGEPAYKFTGGGRKNARYRCRSWGWAQRCGNGTVAMAEWDAFCEEQVLDLLEDSERLEKVWVAGSDSAVELAEVNAELVDLTSLIGSPAYRVGSPQREALDARIAALAARQEELEGLEARPSGWEWRETGQRFGDWWREQDTAAKNTWLRSMNVRLTFDVRGGLTRTIDFGDLQEYEQHLRLGSVVERLHTGMS

SEQ ID NO: 11643 - protein, 500 aa, Unknown
  Description of Unknown: Integrase A211 sequence
  PF07508,SSF53041,PS51737,cd00338,PTHR30461:SF3, PF00239,PS51736,SM00857,G3DSA:3.40.50.1390,PTHR30461
MRALVVIRLSRVTDATTSPERQLESCQRLCAQRGWDVVGVAEDLDVSGAVDPFDRKRRPNLARWLAFEEQPFDVIVAYRVDRLTRSIRHLQQLVHWAEDHKKLVVSATEAHFDTTTPFAAVVIALMGTVAQMELEAIKERNRSAAHFNIRAGKYRGSLPPWGYLPTRVDGEWRLVPDPVQRERILEVYHRVVDNHEPLHLVAHDLNRRGVLSPKDYFAKLQGREPQGREWSATALKRSLISEAMLGYATLNGKTVRDDDGAPLVRSEPILTREQLEALRAELVKTDRTKPAVSTPSLLLRVLFCAVCGEPAYKFTGGGRKNARYRCRSWGWAQRCGNGTVAMAEWDAFCEEQVLDLLGDSERLEKVWVAGSDSAVELAEVNAELVDLTSLIGSPAYRVGSPQREALDARIAALAARQEELEGLEARPSGWEWRETGQRFGDWWREQDTAAKNTWLRSMNVRLTFDVRGGLTRTIDFGDLQEYEQHLRLGSVVERLHTGMS

SEQ ID NO: 11644 - protein, 500 aa, Unknown
  Description of Unknown: Integrase A212 sequence
  PF07508,SSF53041,PS51737,cd00338,PTHR30461:SF3,PF00239, PS51736,SM00857,G3DSA:3.40.50.1390,PTHR30461
MRALVVIRLSRVTDATTSPERQLESCQQLCAQRGWDVVGVAEDLDVSGAVDPFDRKRRPSLARWLAFEEQPFDVIVAYRVDRLTRSIRHLQQLVHWAEDHKKLVVSATEAHFDTTTPFAAVVIALMGTVAQMELEAIKERNRSAAHFNIRAGKYRGSLPPWGYLPTRVDGEWRLVPDPVQRERILEVYHRVVDNHEPLHLVAHDLNRRGVLSPKDYFAKLQGREPQGREWSATALKRSLISEAMLGYATLNGKTVRDDDGAPLVRAEPILTREQLEALRAELVKTDRAKPAVSTPSLLLRVLFCAVCGEPAYKFTGGGRKNARYRCRSWGWAQRCGNGTVAMAEWDAFCEEQVLDLLGDAERLEKVWVAGSDSAVELAEVNAELVDLTSLIGSPAYRVGSPQREALDARIAALAARQEELEGLEARPSGWEWREAGQRFGDWWREQDTAAKNTWLRSMNVRLTFDVRGGLTRTIDFGDLQEYEQHLRLGSVVEQLHAGMS

SEQ ID NO: 11645 - protein, 500 aa, Unknown
  Description of Unknown: Integrase A213 sequence
  PF07508,SSF53041,PS51737,cd00338,PTHR30461:SF3, PF00239,PS51736,SM00857,G3DSA:3.40.50.1390,PTHR30461
MRALVVIRLSRVTDATTSPERQLESCQQLCAQRGWDVVGVAEDLDVSGAVDPFDRKRRPNLARWLAFEEQPFDVIVAYRVDRLTRSIRHLQQLVHWAEDHKKLVVSATEAHFDTTSPFAAVVIALMGTVAQMELEAIKERNRSAAHFNIRAGKYRGSLPPWGYLPTRVDGEWRLVPDPVQRERILEVYHRVVDNHEPLHLVAHDLNRRGVLSPKDYFAKLQGREPQGREWSATALKRSLISEAMLGYATLNGKTVRDDDGAPLVRAEPILTREQLEALRAELVKTSRAKPAVATPSLLLRVLFCAVCGEPAYKFTGGGRKNARYRCRSWGWAQRCGNGTVAMAEWDAFCEEQVLDLLGGSERLEKVWVAGSDSAVELAEVNAELVDLTSLIGSPAYRVGSPQREALDARIAALAARQEELEGLEARPSGWEWRETGQRFGDWWREQGTAGKNTWLRSMNVRLTFDVRGGLTRTIDFGDLQEYEQHLRLGSVVERLHAGMS

SEQ ID NO: 11646 - protein, 500 aa, Unknown
  Description of Unknown: Integrase A214 sequence
  PF07508,SSF53041,PS51737,cd00338,PTHR30461:SF3,PF00239, PS51736,SM00857,G3DSA:3.40.50.1390,PTHR30461
MRALVVIRLSRVTDATTSPERQLESCQQLCAQRGWDVVGVAEDLDVSGAVDPFDRKRRPNLARWLAFEEQPFDVIVAYRVDRLTRSIRHLQQLVHWAEDHKKLVVSATEAHFDTTTPFAAVVIALMGTVAQMELEAIKERNRSAAHFNIRAGKYRGSLPPWGYLPTRVDGEWRLVPDPVQRERILEVYHRVVDNHEPLHLVAHDLNRRGVLSPKDYFAKLQGREPRGREWSATALKRSLISEAMLGYTTLNGKTVRDDDGAPLVRAEPILTREQLESLRAELVKTDRTKPAVSTPSLLLRVLFCAVCGEPAYKFAGGQRKNPRYRCRSMGFPKHCGNGTVAMAEWDAFCEEQVLDLLGDAERLEKVWVAGSDSAVELAEVNAELVDLTSLIGSPAYRVGSPQREALDARIAALAARQEELEGLEARPSGWEWRETGQRFGDWWREQDASGKNTWLRSMNVRLTFDVRGGLTRTIDFGDLQEYEQHLRLGSVVERLHTGMS

SEQ ID NO: 11647 - protein, 500 aa, Unknown
  Description of Unknown: Integrase A215 sequence
  PF07508,SSF53041,PS51737,cd00338,PTHR30461:SF3, PF00239,PS51736,SM00857,G3DSA:3.40.50.1390,PTHR30461
MRALVVIRLSRVTDATTSPERQLESCRQLCAQRGWDVVGVAEDLDVSGAVDPFDRKRRPNLARWLAFEEQPFDVIVAYRVDRLTRSIRHLQQLVHWAEDHKKLVVSATEAHFDTTTPFAAVVIALMGTVAQMELEAIKERNRSTAHFNIRAGKYRGSLPPWGYLPTRVDGEWRLVSDPVQRERILEVYHRVVDNHEPLHQIAHDLNQRGLPSPKDYFAKLQGREPKGREWSATALKRSLISEAMLGYATLNGKTVRDDDGAPLVRAEPILTREQLEALRAELVKTDRTKPAVATPSLLLRVLFCAVCGEPAYKFTGGGRKNARYRCRSWGWAQRCGNGTVAMAEWDAFCEEQVLDLLGGSERLEKVWVAGSDSAVELAEVNAELVDLTSLIGSPAYRVGSPQREALDARIAALAARQEELEGLEARPSGWEWRETGQRFGDWWREQGTAAKNTWLRSMNVRLTFDVRGGLTRTIDFGDLQEYEQHLRLGSVVERLHAGMS

SEQ ID NO: 11648 - protein, 500 aa, Unknown
  Description of Unknown: Integrase A216 sequence
  PF07508,SSF53041,PS51737,cd00338,PTHR30461:SF3,PF00239, PS51736,SM00857,G3DSA:3.40.50.1390,PTHR30461
MRALVVIRLSRVTDATTSPERQLESCQQLCAQRGWDVVGVAEDLDVSGAVDPFDRKRRPNLARWLAFEEQPFDVIVAYRVDRLTRSIRHLQQLVHWAEDHKKLVVSATEAHFDTTTPFAAVVIALMGTVAQMELEAIKERNRSAAHFNIRAGKYRGSLPPWGYLPTRVDGEWRLVPDPVQRERILEVYHRVVDNHEPLHLVAHDLNRRGVLSPKDYFAKLQGREPQGREWSATALKRSLISEAMLGYATLNGKTVRDDDGAPLVRAEPILTREQLEALRAELVKTDRTKPAVSTPSLLLRVLFCAVCGEPAYKFAGGGRKHPRYRCRSMGFPKHCGNGTVAMAEWDAFCEEQVLDLLGDSERLEKVWVAGSDSAVELAEVNAELVDLTSLIGSPAYRVGSPQREALDARIAALAARQEELEGLEARPSGWEWRETGQRFADWWRDQDTAGKNTWLRSMNVRLTFDVRGGLTRTIDFGDLQEYEQHLRLGSVVEQLHTGMS

SEQ ID NO: 11649 - protein, 500 aa, Unknown
  Description of Unknown: Integrase A217 sequence
  PF07508,SSF53041,PS51737,cd00338,PTHR30461:SF3, PF00239,PS51736,SM00857,G3DSA:3.40.50.1390,PTHR30461
MRALVVIRLSRVTDATTSPERQLESCQQLCAQRGWDVVGVAEDLDVSGAVDPFDRKRRPSLARWLAFEEQPFDVIVAYRVDRLTRSIRHLQQLVHWAEDHKKLIVSATEAHFDTTSPFAAVVIALMGTVAQMELEAIKERNRSAAHFNIRAGKYRGSLPPWGYMPARVDGEWRLLVDPVQRERILEVYHRVVDNHEPLHLVAHDLNQRGILSPKDYFAQLQGREPQGRAWSATALKRSLISEAMLGYTTLNGKTVRDDDGAPLVRAEPILTREQLEALRAELVKTDRTKPAVSTPSLLLRVLFCAVCGEPAYKFAGGGRKHPRYRCRSMGFPKHCGNGTVAMAEWDAFCEEQVLDLLGDAERLEKVWVAGSDAAVELAELNAELVDLTSLIGSPAYRAGSPQREALDARIEALAARQEELEARELRPSGWEWRETGQRFADWWAAQDVAGKNAWLRSMNVRLTFDVRGGLTRTIDFGDLQEYEQHLRLGSVVERLHTGMS

SEQ ID NO: 11650 - protein, 500 aa, Unknown
  Description of Unknown: Integrase A218 sequence
  PF07508,SSF53041,PS51737,cd00338,PTHR30461:SF3,PF00239, PS51736,SM00857,G3DSA:3.40.50.1390,PTHR30461
MRALVVIRLSRVTDATTSPERQLESCQQLCAQRGWDVVGVAEDLDVSGAVDPFDRKRRPNLARWLSFEEQPFDVIVAYRVDRLTRSIRHLQQLVHWAEDHKKLIVSATEAHFDTTTPFAAVVIALMGTVAQMELEAIKERNRSAAHFNIRAGKYRGSLPPWGYMPARVDGEWRLLVDPVQRERILEVYHRVVDNHEPLHLVAHDLNRRGVLSPKDYFAKLQGREPQGREWSATALKRSLISEAMLGYTTLNGKTVRDDDGAPLVRAEPILTREQLESLRAELVKTDRTKPAVSTPSLLLRVLFCAVCGEPAYKFTGGGRKNARYRCRSWGWAQRCGNGTVAMAEWDAFCEEQVLDLLGDAERLEKVWVAGSDAAVELTELNAELVDLTSLIGSPAYRAGSPQREALDARIAALAARQEELEGLEARPSGWEWRETGQRFGDWWRDQDTAGKNTWLRSMNVRLTFDVRGGLTRTIDFGDLQEYEQHLRLGSVVEQLHTGMS

SEQ ID NO: 11651 - protein, 500 aa, Unknown
  Description of Unknown: Integrase A219 sequence
  PF07508,SSF53041,PS51737,cd00338,PTHR30461:SF3, PF00239,PS51736,SM00857,G3DSA:3.40.50.1390,PTHR30461
MRALVVIRLSRVTDATTSPERQLESCQQLCAQRGWDVVGVAEDLDVSGAVDPFDRRRRPNLARWLAFEEQPFDVIVAYRVDRLTRSIRHLQQLVHWAEDHKKLVVSATEAHFDTTTPFAAVVIALMGTVAQMELEAIKERNRSAAHFNIRAGKYRGSLPPWGYLPTRVDGEWRLVPDPVQRERILEVYHRVVDNHEPLHLVAHDLNRRGVLSPKDYFAKLQGREPRGREWSATALKRSLISEAMLGYATLNGKTVRDDDGAPLVRAEPILTREQLEALRAELVKTDRAKPSVSTPSMLLRVLFCAVCGEPAYKFTGGGRKNARYRCRSWGWAQRCGNGTVAMAEWDSFCEEQVLDLLGDSERLEKVWVAGSDSAVELAEVNAELVDLTSLIGSPAYRAGSPQREALDARIAALAARQEELEGLEARPSGWEWRETGQRFGDWWREQDTAGKNTWLRSMNVRLTFDVRGGLTRTIDFGDLQEYEQHLRLGSVVERLHAGMS

SEQ ID NO: 11652 - protein, 500 aa, Unknown
  Description of Unknown: Integrase A220 sequence
  PF07508,SSF53041,PS51737,cd00338,PTHR30461:SF3,PF00239, PS51736,SM00857,G3DSA:3.40.50.1390,PTHR30461
MRALVVIRLSRVTDATTSPERQLESCQQLCAQRGWDVVGVAEDLDVSGAVDPFDRKRRPNLARWLAFEEQPFDVIVAYRVDRLTRSIRHLQQLVHWAEDHKKLVVSATEAHFDTTSPFAAVVIALMGTVAQMELEAIKERNRSAAHFNIRAGKYRGSLPPWGYLPTRVDGEWRLVPDPVQRERILEVYHRVVDNHEPLHLVAYDLNRRGVLSPKDYFAKLQGREPQGREWSATALKRSLISEAMLGYATLNGKTVRDDDGAPLVRAEPILTREQLEALRAELVKTDRTKPAVSTPSLLLRVLFCAVCGEPAYKFAGGGRKHPRYRCRSMGFPKHCGNGTVAMAEWDAFCEEQVLDLLGDSERLEKVWVAGSDSAVELAEVNAELVDLTSLIGSPAYRVGSPQREALDARIAALAARQEELEGLEARPSGWEWRETGQRFGDWWREQDTAAKNTWLRSMNVRLTFDVRGGLTRTIDFGDLQEYEQHLRLGSVVERLHTGMS

SEQ ID NO: 11653 - protein, 500 aa, Unknown
  Description of Unknown: Integrase A221 sequence
  PF07508,SSF53041,PS51737,cd00338,PTHR30461:SF3, PF00239,SM00857,G3DSA:3.40.50.1390,PTHR30461
MTQTLRALVGARVSVVQGPQKVSHIAQQESGTKWATERGHEIVGTFKDLDVSASVSPFERPDLGPWLSPERQDEWDILVFSKIDRMFRSTRDCVKFAEWAEERKKILVFAEDSMTLNYRDKSDSLEKMMSELFIYIGSFFAQLELNRFRSRAKDSHRVLRGTDRWASGVPPLGFKVIDHPSGKGKGLATDPEGKELLYDMAGKLLEGWSFIRISQCLNEKKIPTQLDKARMAKGKPAYENPWSVNTVIESLTSLRTQGLKMTRSGKKFVTVLDEAGEPIRMAPPTFDAATWKQIQEAAALRQNNRRSRSYTANPMLGVGFCGQCGASLAQQFSRSKLKDGTVNEHRYYRCGRTPVNCQNVFLRADDGDELLEQTFLEAYGDEPVTRRVFVPGEDHTEELEQVRATIERLRRESDAGLIVSAEDERIYLERMKSLIDRRTQLEAVPRRAAGWVTEETGQTYREAWETEDHRTLLSEAGIRFELKSSKPMNFALHVPQKEAG

SEQ ID NO: 11654 - protein, 500 aa, Unknown
  Description of Unknown: Integrase A222 sequence
  PF07508,SSF53041,PS51737,cd00338,PTHR30461:SF3,PF00239,PS51736, SM00857,G3DSA:3.40.50.1390,PTHR30461
MRALVVIRLSRVTDATTSPERQLESCQQLCAQRGWDVVGVAEDLDVSGAVDPFDRKRRPNLARWLAFEEQPFDVIVAYRVDRLTRSIRHLQQLVHWAEDHKKLVVSATEAHFDTTTPFAAVVIALMGTVAQMELEAIKERNRSAAHFNIRAGKYRGSLPPWGYLPTRVDGEWRLVPDPVQRERILEVYHRVVDSHEPLHLVAHDLNRRGVLSPKDYFAKLQGREPQGREWSATALKRSLISEAMLGYATLNGKTVRDDDGAPLVRSEPILTREQLEALRAELVKTDRTKPAVSTPSLLLRVLFCAVCGEPAYKFAGGQRKNPRYRCRSMGFPKHCGNGTVAMAEWDAFCEEQVLDLLGDAERLEKVWVAGSDSAVELAEVNAELVDLTSLIGSPAYRAGSPQREALDARIAALAARQEELEGLEARPSGWEWRETGQRFGDWWREQDTSGKNTWLRSMNVRLTFDVRGGLTRTIDFGDLQEYEQHLRLGSVVERLHDGMS

SEQ ID NO: 11655 - protein, 500 aa, Unknown
  Description of Unknown: Integrase A223 sequence
  PF07508,SSF53041,PS51737,cd00338,PTHR30461:SF3, PF00239,PS51736,SM00857,G3DSA:3.40.50.1390,PTHR30461
MRALVVIRLSRVTDATTSPERQLESCQQLCAQRGWDVVGVAEDLDVSGAVDPFDRKRRPNLARWLAFEEQPFDVIVAYRVDRLTRSIRHLQQLVHWAEDHKKLVVSATEAHFDTTTPFAAVVIALMGTVAQMELEAIKERNRSAAHFNIRAGKYRGSLPPWGYLPTRVDGEWRLVPDPVQRERILEVYHRVVDNHEPLHLVAHDLNRRGVLSPKDYFAKLQGREPQGREWSATALKRSLISEAMLGYATLNGKTVRDDDGAPLVRAEPILTREQLEALRAELVKTSRAKPAVSTPSLLLRVLFCAVCGLPAYKFAGGQRKNPRYRCRSMGFPKHCGNGTVAMAEWDAFCEEQVLDLLGDAERLEKVWVAGSDSAVELAEVNAELVDLTSLIGSPAYRVGAPQREALDARIAALAARQEELEGLEARPSGWEWRETGQRFGDWWAQQDTAAKNTWLRAMNVRLTFDVRGGLTRTIDFGDLQEYEQHLRLGSVVEQLHTGMS

SEQ ID NO: 11656 - protein, 500 aa, Unknown
  Description of Unknown: Integrase A224 sequence
  PF07508,SSF53041,PS51737,cd00338,PTHR30461:SF3,PF00239, PS51736,SM00857,G3DSA:3.40.50.1390,PTHR30461
MRALVVIRLSRVTDATTSPERQLESCQQLCAQRGWDVVGVAEDLDVSGAVDPFDRKRRPNLARWLAFEEQPFDVIVAYRVDRLTRSIRHLQQLVHWAEDHKKLVVSATEAHFDTTTPFAAVVIALMGTVAQMELEAIKERNRSAAHFNIRAGKYRGSLPPWGYLPTRVDGEWRLVPDPVQRERILEVYHRVVDNHEPLHLVAHDLNRRGVLSPKDYFAKLQGREPRGREWSATALKRSLISEAMLGCATLNGKTVRDDDGAPLVRAEPILTREQLEALRAELVKADRTKPAVSTPSLLLRVLFCAVCGEPAYKFTGGGRKNARYRCRSWGWAQRCGNGTVAMAEWDAFCEEQVLDLLGDAERLEKVWVAGSDAAVELTELNAELVDLTSLIGSPAYRAGSPQREALDARIAALAARQEELEGLEARPSGWEWRETGQRFGDWWRDQDTAGKNTWLRSMNVRLTFDVRGGLTRTIDFGDLQEYEQHLRLGSVVEQLHTGMS

SEQ ID NO: 11657 - protein, 500 aa, Unknown
  Description of Unknown: Integrase A225 sequence
  PF07508,SSF53041,PS51737,cd00338,PTHR30461:SF3, PF00239,PS51736,SM00857,G3DSA:3.40.50.1390,PTHR30461
MRALVVIRLSRVTDATTSPERQLESCQQLCAQRSWDVVGVAEDLDVSGAVDPFDRKRRPNLARWLAFEEQPFDVIVAYRVDRLTRSIRHLQQLVHWAEDHKKLVVSATEAHFDTTTPFAAVVIALMGTVAQMELEAIKERNRSAAHFNIRAGKYRGSLPPWGYLPTRVDGEWRLVPDPVQRERILEVYHRVVDNHEPLHLVAHDLNRRGVLSPKDYFAKLQGREPRGREWSATALKRSLISEAMLGYATLNGKTVRDDDGAPLVRAEPILTREQLEALRAELVKTDRTKPAVSTPSLLLRVLFCAVCGEPAYKFTGGGRKNARYRCRSWGWAQRCGNGTVAMAEWDAFCEEQVLDLLGDAERLEKVWVAGSDSAVELAEVNAELVDLTSLIGSPAYRAGSPQREALDARIAALAARQEELEGLEARPSGWEWRETGQRFGDWWREQDTTAKNTWLRSMNVRLTFDVRGGLTRTIDFGDLQEYEQHLRLGNVVEQLHAGMS

SEQ ID NO: 11658 - protein, 500 aa, Unknown
  Description of Unknown: Integrase A226 sequence
  PF07508,SSF53041,PS51737,cd00338,PTHR30461:SF3,PF00239, PS51736,SM00857,G3DSA:3.40.50.1390,PTHR30461
MRALVVIRLSRVTDATTSPERQLESCQQLCAQRGWDVVGVAEDLDVSGAVDPFDRKRRPNLARWLAFEEQPFDVIVAYRVDRLTRSIRHLQQLVHWAEDHKKLVVSATEAHFDTTTPFAAVVIALMGTVAQMELEAIKERNRSAAHFNIRAGKYRGSLPPWGYLPTRVDGEWRLVPDPVQRERILEVYHRVVDNHEPLHLVAHDLNRRGVLSPKDYFAKLQGREPQGREWSATALKRSLISEAMLGYATLNGKTVRDDDGAPLVRAEPILTREQLEALRAELVKTDRTKPAVSTPSLLLRVLFCAVCGEPAYKFAGGGRKHPRYRCRSMGFPKHCGNGTVAMAEWDAFCEEQVLDLLGDAERLEKVWVGGSDSAVELAEVNAELVDLTSLIGSPAYRVGSPQREALDARIAALAARQEELEGLEARPSGWEWRETGQRFGDWWREQDIAAKNTWLRSMNVRLTFDVRGGLTRTIDFGDLQEYEQHLRLGSVVERLHAGMS

SEQ ID NO: 11659 - protein, 500 aa, Unknown
  Description of Unknown: Integrase A227 sequence
  PF07508,SSF53041,PS51737,cd00338,PTHR30461:SF3, PF00239,PS51736,SM00857,G3DSA:3.40.50.1390,PTHR30461
MRALVVIRLSRVTDATTSPERQLESCRQLCAQRGWEVVGVAEDLDVSGAVDPFDRKRRPNLARWLAFEEQPFDVIVAYRVDRLTRSIRHLQQLVHWAEDHKKLVVSATEAHFDTTTPFAAVVIALMGTVAQMELEAIKERNRSAAHFNIRAGKYRGSLPPWGYLPTRVDGEWRLVPDPVQRERILEVYHRVVDNHEPLHLVAHDLNRRGVLSPKDYFAKLQGREPRGREWSATALKRSLISEAMLGYATLNGKTVRDDDGAPLVRAEPILTREQLEALRAELVKTDRTKPAVSTPSLLLRVLFCAVCGEPAYKFAGGGRKHPRYRCRSMGFPKHCGNGTVAMAEWDAFCEEQVLDLLGDAERLEKVWVAGSDSAVELAEVNAELVDLTSLIGSPAYRVGSPQREALDARIAALAARQEELEGLEARPSGWEWRETGQRFGDWWREQDIAGKNTWLRSMNVRLTFDVRGGLTRTIDFGDLQEYEQHLRLGSVVERLHTGMS

SEQ ID NO: 11660 - protein, 500 aa, Unknown
  Description of Unknown: Integrase A228 sequence
  PF07508,SSF53041,PS51737,cd00338,PTHR30461:SF3,PF00239, PS51736,SM00857,G3DSA:3.40.50.1390,PTHR30461
MRALVVIRLSRVTDATTSPERQLESCQQLCAQRGWEVVGVAEDLDVSGAVDPFDRKRRPNLARWLAFEEQPFDVIVAYRVDRLTRSIRHLQQLVHWAEDHKKLVVSATEAHFDTTTPFAAVVIALMGTVAQMELEAIKERNRSAAHFNIRAGKYRGSLPPWGYMPTRVDGEWRLVPDPVQRERILEVYHRVVDNHEPLHQIAHDLNQRGLPSPKDYFAKLQGREPQGREWSATALKRSLISEAMLGYATLNGKTVRDDDGAPLVRAEPILTREQLEALRAELVKTDRTKPAVSTPSLLLRVLFCAVCGEPAYKFTGGGRKSARYRCRSWGWAQRCGNGTVAMAEWDAFCEEQVLDLLGDAERLEKVWVAGSDAAVELTELNAELVDLTSLIGSPAYRAGSPQREALDARIAALAARQEELEGLEARPSGWEWRETGQRFGDWWAAQDVAGKNAWLRSMNVRLTFDVRGGLTRTIDFGDLQEYEQHLRLGSVVERLHAGMS

SEQ ID NO: 11661 - protein, 500 aa, Unknown
  Description of Unknown: Integrase A229 sequence
  PF07508,SSF53041,PS51737,cd00338,PTHR30461:SF3, PF00239,PS51736,SM00857,G3DSA:3.40.50.1390,PTHR30461
MRALVVIRLSRVTDATTSPERQLESCQQLCAQRGWDVVGVAEDLDVSGAVDPFDRKRRPNLARWLSFEEQPFDVIVAYRVDRLTRSIRHLQQLVHWAEDHKKLIVSATEAHFDTTSPFAAVVIALMGTVAQMELEAIKERNRSAAHFNIRAGKYRGSLPPWGYLPTRVDGEWRLVPDPVQRERILEVYHRVVDNHEPLHQIAHDLNQRGILSPKDYFAKLQGREPKGREWSATALKRSLISEAMLGYTTLNGKTVRDDDGAPLVRAEPILTREQLEALRAELVKTDRTKPAVSTPSLLLRVLFCAVCGEPAYKFTGGGRKNARYRCRSWGWAQRCGNGTVAMAEWDAFCEEQVLDLLGDSERLEKVWVAGSDSAVELAEVNAELVDLTSLIGSPAYRAGSPQREALDARIAALAARQEELEGLEARPSGWEWRETGQRFGDWWRDQDTAGKNTWLRSMNVRLTFDVRGGLTRTIDFGDLQEYEQHLRLGSVVEQLHTGMS

SEQ ID NO: 11662 - protein, 500 aa, Unknown
  Description of Unknown: Integrase A230 sequence
  PF07508,SSF53041,PS51737,cd00338,PTHR30461:SF3,PF00239, PS51736,SM00857,G3DSA:3.40.50.1390,PTHR30461
MRALVVIRLSRVTDATTSPERQLESCRQLCAQRGWDVVGVAEDLDVSGAVDPFDRKRRPNLARWLAFEEQPFDVIVAYRVDRLTRSIRHLQQLVHWAEDHKKLVVSATEAHFDTTTPFAAVVIALMGTVAQMELEAIKERNRSAAHFNIRAGKYRGSLPPWGYLPTRVDGEWRLVPDPVQRERILEVYHRVVDNHEPLHLVAHDLNRRGVLSPKDYFAKLQGREPQGREWSATALKRSLISEAMLGYATLNGKTVRDDDGAPLVRAEPILTREQLEALRAELVKTDRAKPSVSTPSMLLRVLFCAVCGEPAYKFAGGQRKNPRYRCRSMGFPKHCGNGTVAMAEWDAFCEEQVLDLLGDAERLEKVWVAGSDSAVELAEVNAELVDLTSLIGSPAYRVGSPQREALDARIAALAARQEELEGLEARPSGWEWRETGQRFGDWWREQGTAAKNTWLRSMNVRLTFDVRGGLTRTIDFGDLQEYEQHLRLGSVVEQLHTGMS

SEQ ID NO: 11663 - protein, 500 aa, Unknown
  Description of Unknown: Integrase A231 sequence
  PF07508,SSF53041,PS51737,cd00338,PTHR30461:SF3, PF00239,PS51736,SM00857,G3DSA:3.40.50.1390,PTHR30461
MRALVVIRLSRVTDATTSPERQLESCQQLCAQRGWDVVGVAEDLDVSGAVDPFDRKRRPNLARWLAFEEQPFDVIVAYRVDRLTRSIRHLQQLVHWAEDHKKLVVSATEAHFDTTTPFAAVVIALMGTVAQMELEAIKERNRSAAHFNIRAGKYRGSLPPWGYLPTRVDGEWRLVPDPVQRERILEVYHRVVDNHEPLHLVAHDLNRRGVLSPKDYFAKLQGREPQGREWSATALKRSLISEAMLGYATLNGKTVRDDDGAPLVRAEPILTREQLEALRAELVKTDRTKPAVSTPSLLLRVLFCAVCGEPAYKFAGGGRKHPRYRCRSMGFPKHCGNGTVAMAEWDAFCEEQVLDLLGDSERLEKVWVAGSDSAVELAEVNAELVDLTSLIGSPTYRVGSPQREALDARIAALAARQEELEGLEARPSGWEWRETGQRFGDWWEQQDTAAKNTWLRSMNVRLTFDVRGGLTRTIDFGDLQEYEQHLRLGSVVERLHAGMS

SEQ ID NO: 11664 - protein, 500 aa, Unknown
  Description of Unknown: Integrase A232 sequence
  PF07508,SSF53041,PS51737,cd00338,PTHR30461:SF3,PF00239, PS51736,SM00857,G3DSA:3.40.50.1390,PTHR30461
MRALVVIRLSRVTDATTSPERQLESCQQLCAQRGWDVVGVAEDLDVSGAVDPFDRKRRPNLARWLAFEEQPFDVIVAYRVDRLTRSIRHLQQLVHWAEDHKKLVVSATEAHFDTTTPFAAVVIALMGTVAQMELEAIKERNRSAAHFNIRAGKYRGSLPPWGYLPTRVDGEWRLVPDPVQRERILEVYHRVVDNHEPLHLVAHDLNRRGVLSPKDYFAKLQGREPQGREWSATALKRSLISEAMLGYATLNGKTVRDDDGAPLVRAEPILTREQLEALRAELVKTDRTKPAVSTPSLLLRVLFCAVCGEPAYKFTGGGRKNARYRCRSWGWAQRCGNGTVAMAEWDAFCEEQVLDLLGDAERLEKVWVAGSDSAVELAEVNAELVDLTSLIGSPAYRVGSPQREALDARIAALAARQEELEGLEARPSGWEWRETGQRFGDWWREQDTSGKNTWLRSMNVRLTFDVRGGLTRTIDFGDLQEYEQHLRLGSVVERLHAGMS

SEQ ID NO: 11665 - protein, 500 aa, Unknown
  Description of Unknown: Integrase A233 sequence
  PF07508,SSF53041,PS51737,cd00338,PTHR30461:SF3, PF00239,PS51736,SM00857,G3DSA:3.40.50.1390,PTHR30461
MRALVVIRLSRVTDATTSPERQLESCQQLCAQRGWDVVGVAEDLDVSGAVDPFDRKRRPNLARWLAFEEQPFDVIVAYRVDRLTRSIRHLQQLVHWAEDHKKLVVSATEAHFDTTTPFAAVVIALMGTVAQMELEAIKERNRSAAHFNIRAGKYRGSLPPWGYLPTRVDGEWRLLVDPVQRERILEVYHRVVDNHEPLHLVAHDLNQRGILSPKDYFAQLQGREPQGRAWSATALKRSLISEAMLGYATLNGKTVRDDDGAPLVRAEPILTREQLEALRAELVKTDRTKPAVSTPSLLLRVLFCAVCGEPAYKFAGGGRKHPRYRCRSMGFPKHCGNGTVAMAEWDAFCEEQVLDLLGDAERLEKVWVAGSDAAVELAELNAELVDLTSLIGSPAYRAGSPQREALDARIEALAARQEELEGLEARPSGWEWRETGQRFGDWWREQDTAAKNTWLRSMNVRLTFDVRGGLTRTIDFGDLQEYEQHLRLGSVVERLHTGMS

SEQ ID NO: 11666 - protein, 500 aa, Unknown
  Description of Unknown: Integrase A234 sequence
  PF07508,SSF53041,PS51737,cd00338,PTHR30461:SF3,PF00239, SM00857,G3DSA:3.40.50.1390,PTHR30461
MTQTLRALVGARVSVVQGPQKVSHIAQQESGTRWATERGHEIVGTFKDLDVSASVSPFERPDLGPWLSPERQDEWDILVFSKIDRMFRSTRDCVKFAEWAEERKKILVFAEDSMTLNYRDKSDSLEKMMSELFIYIGSFFAQLELNRFRSRAKDSHRVLRGTDRWASGVPPLGFKVIDHPSGKGKGLATDPEGKELLYDMAGKLLEGWSFIRISQYLNEKKIPTQLDKARMAKGKPAYENPWSVNTVIESLTSLRTQGLKMTRSGKKFVTVLDEAGEPIRMAPPTFDAATWKQIQEAAALRQNNRRSRSYTANPMLGVGFCGQCGASLAQQFSRSKLKDGTVNEHRYYRCGRTPVNCQNVFLRADDGDELLEQTFLEAYGDEPVTRRVFVPGEDHTEELEQVRATIERLRRESDAGLIVSAEDERIYLERMKSLIDRRTQLEAVPRRAAGWVTEETGQTYREAWETEDHRTLLSEAGIRFELKSSKPMNFALHVPQKEAG

SEQ ID NO: 11667 - protein, 500 aa, Unknown
  Description of Unknown: Integrase A235 sequence
  PF07508,SSF53041,PS51737,cd00338,PTHR30461:SF3, PF00239,PS51736,SM00857,G3DSA:3.40.50.1390,PTHR30461
MRALVVIRLSRVTDATTSPERQLESCQQLCAQRGWDVVGVAEDLDVSGAVDPFDRKRRPNLARWLAFEEQPFDVIVAYRVDRLTRSIRHLQQLVHWAEDHKKLVVSATEAHFDTTTPFAAVVIALMGTVAQMELEAIKERNRSAAHFNIRAGKYRGSLPPWGYLPTRVDGEWRLVPDPVQRERILEVYHRVVDNHEPLHLVAHDLNRRGVLSPKDYFAKLQGREPQGREWSATALKRSLISEAMLGYATLNGKTVRDDDGAPLVRAEPILTREQLEALRAELVKTDRTKPAVSTPSLLLRVLFCAVCGEPAYKFAGGGRKHPRYRCRSMGFPKHCGNGTVAMAEWDAFCEEQVLDLLGDSERLEKVWVAGSDSAVELAEVNAELVDLTSLIGSPAYRAGSPQREALDSRIAALAARQEELEGLEARPSGWEWRETGQRFGDWWREQDTAAKNTWLRSMNVRLTFDVRGGLTRTIDFGDLQEYEQHLRLGSVVEQLHAGMS

SEQ ID NO: 11668 - protein, 500 aa, Unknown
  Description of Unknown: Integrase A236 sequence
  PF07508,SSF53041,PS51737,cd00338,PTHR30461:SF3,PF00239, PS51736,SM00857,G3DSA:3.40.50.1390,PTHR30461
MLGRLRLSRSTEESTSIERQREIVTAWADSNGHTVVGWAEDVDVSGAIDPFDTPSLGVWLDERRGEWDILCAWKLDRLGRDAIRLNKLFLWCQEHGKTVTSCSEGIDLGTPVGRLIANVIAFLAEGEREAIRERVASSKQKLREIGRWGGGKPPFGYMGVRNPDGQGHILVVDPVAKPVVRRIVEDILEGKPLTRLCTELTEERYLTPAEYYATLKAGAPRQQAEEGEVTAKWRPTAVRNLLRSKALRGHAHHKGQTVRDDQGRAIQLAEPLVDADEWELLQETLDGIAADFSGRRVEGASPLSGVAVCMTCDKPLHHDRYLVKRPYGDYPYRYYRCRDRHGKNVPAETLEELVEDAFLQRVGDFPVRERVWVQGDTNWADLKEAVAAYDELVQAAGRAKSATARERLQRQLDILDERIAELESAPNTEAHWEYQRTGGTYRDAWENSDADERRELLRRSGIVVAVHIDGVEGRRSKHNPGALHFDIRVPHELTQRLIAP

SEQ ID NO: 11669 - protein, 500 aa, Unknown
  Description of Unknown: Integrase A237 sequence
  PF07508,SSF53041,PS51737,cd00338,PTHR30461:SF3, PF00239,PS51736,SM00857,G3DSA:3.40.50.1390,PTHR30461
MRALVVIRLSRVTDATTSPERQLEACQQLCAQRGWDVVGVAEDLDVSGAVDPFDRKRRPNLARWLAFEEQPFDVIVAYRVDRLTRSIRHLQQLVHWAEDHKKLVVSATEAHFDTTTPFAAVVIALMGTVAQMELEAIKERNRSAAHFNIRAGKYRGSLPPWGYLPTRVDGEWRLVPDPVQRERILEVYHRVVDNHEPLHLVAHDLNRRGVLSPKDYFAKLQGREPQGREWSATALKRSLISEAMLGYATLNGKTVRDDDGAPLVRAEPILTREQLEALRAELVKTDRTKPAVSTPSLLLRVLFCAVCGEPAYKFAGGQRKNPRYRCRSMGFPKHCGNGTVAMAEWDAFCEEQVLDLLGDAERLEKVWVAGSDSAVELAEVNAELVDLTSLIGSPAYRVGSPQREALDARIAALAARQEELEGLEARPSGWEWRETGQRFADWWAQQDTAGKNTWLRAMNVRLTFDVRGGLTRTIDFGDLQEYEQHLRLGSVVERLHTGMS

SEQ ID NO: 11670 - protein, 500 aa, Unknown
  Description of Unknown: Integrase A238 sequence
  PF07508,SSF53041,PS51737,cd00338,PTHR30461:SF3,PF00239, PS51736,SM00857,G3DSA:3.40.50.1390,PTHR30461
MRALVVIRLSRVTDATTSPERQLESCQQLCAQRGWEVVGVAEDLDVSGAVDPFDRKRRPNLARWLAFEEQPFDVIVAYRVDRLTRSIRHLQQLVHWAEDHKKLIVSATEAHFDTTSPFAAVVIALMGTVAQMELEAIKERNRSAAHFNIRAGKYRGSLPPWGYMPARVEGEWRLLVDPVQRERILEVYHRVVDNHEPLHQIAHDLNQRGILSPKDYFAQLQGREPQGREWSATALKRSLISEAMLGYATLNGKTVRDDDGAPLVRSEPILTREQLEALRAELVKTDRTKPAVSTPSLLLRVLFCAVCGEPAYKFTGGGRKNARYRCRSWGWAQRCGNGTVAMAEWDAFCEEQVLDLLGDAERLEKVWVAGSDSAVELAEVNAELVDLTSLIGSPAYRVGSPQREALDARIAALAARQEELEGLEARPSGWEWRETGQRFADWWREQDTAAKNTWLRSMNVRLTFDVRGGLTRTIDFGDLQEYEQHLRLGSVVERLHAGMS

SEQ ID NO: 11671 - protein, 500 aa, Unknown
  Description of Unknown: Integrase A239 sequence
  PF07508,SSF53041,PS51737,cd00338,PTHR30461:SF3, PF00239,PS51736,SM00857,G3DSA:3.40.50.1390,PTHR30461
MLGRLRLSRSTEESTSIERQREIVTAWADSNGHTVVGWAEDVDVSGAIDPFDTPSLGVWLDERRGEWDILCAWKLDRLGRDAIRLNKLFLWCQEHGKTVTSCSEGIDLGTPVGRLIANVIAFLAEGEREAIRERVASSKQKLREIGRWGGGKPPFGYMGVRNPDGQGHILVVDPVAKPVVRRIVEDILEGKPLTRLCTELTEERYLTPAEYYATLKAGAPRQQAEEGEVTAKWRPTAVRNLLRSKALRGHAHHKGQTVRDDQGRAIQLAEPLVDADEWELLQETLDGIAADFSGRRVEGASPLSGVAVCMTCDKPLHHDRYLVKRPYGDYPYRYYRCRDRHGKNVPAETLEELVEDAFLQRVGDFPVRERVWVQGDTNWADLKEAVAAYDELVQAAGRAKSATARERLQRQLDILDERIAELESAPNTEAHWEYQPTGGTYRDAWENSDADERRELLRRSGIVVAVHIDGVEGRRSKHNPGALHFDIRVPHELTQRLIAP

SEQ ID NO: 11672 - protein, 500 aa, Unknown
  Description of Unknown: Integrase A240 sequence
  PF07508,SSF53041,PS51737,cd00338,PTHR30461:SF3,PF00239, PS51736,SM00857,G3DSA:3.40.50.1390,PTHR30461
MRALVVIRLSRVTDATTSPERQLESCQQLCAQRGWDVVGVAEDLDVSGAVDPFDRKRRPNLARWLAFEEQPFDVIVAYRVDRLTRSIRHLQQLVHWAEDHKKLIVSATEAHFDTTSPFAAVVIALMGTVAQMELEAIKERNRSAAHFNIRAGKYRGSLPPWGYMPARVDGEWRLVPDPVQRERILEVYHRVVDNHEPLHLVAHDLNRRGVLSPKDYFAQLQGREPQGRAWSATALKRSLISEAMLGYTTLNGKTVRDDDGAPLVRAEPILTREQLEALRAELVKTDRTKPAVSTPSLLLRVLFCAVCGEPAYKFTGGGRKNARYRCRSWGWAQRCGNGTVAMAEWDAFCEEQVLDLLGDSERLEKVWVAGSDSAVELAEVNAELVDLTSLIGSPAYRVGSPQREALDARIAALAARQEELEGLEARPSGWEWRETGQRFGDWWREQDTSAKNTWLRSMNVRLTFDVRGGLTRTIDFGDLQEYEQHLRLGSVVERLHTGMS

SEQ ID NO: 11673 - protein, 500 aa, Unknown
  Description of Unknown: Integrase A241 sequence
  PF07508,SSF53041,PS51737,cd00338,PTHR30461:SF3, PF00239,PS51736,SM00857,G3DSA:3.40.50.1390,PTHR30461
MRALVVIRLSRVTDATTSPERQLESCQQLCAQRGWEVVGVAEDLDVSGAVDPFDRKRRPNLARWLAFEEQPFDVIVAYRVDRLTRSIRHLQQLVHWAEDHKKLVVSATEAHFDTTTPFAAVVIALMGTVAQMELEAIKERNRSAAHFNIRAGKYRGSLPPWGYLPTRVDGEWRLVPDPVQRERILEVYHRVVDNHEPLHLVAHDLNQRGVLSPKDYFAKLQGREPQGREWSATALKRSLISEAMLGYATLNGKTVRDDDGAPLVRAEPILTREQLEALRAELVKTGRTKPAVSTPSLLLRVLFCAVCGEPAYKFAGGGRKHPRYRCRSMGFPKHCGNGTVAMAEWDAFCEEQVLDLLGDAERLEKVWVAGSDSAVELAELNAELVDLTSLIGSPAYRAGSPQREALDARIEALAARQEELEARELRPSGWEWRETGQRFADWWAAQDVAGKNAWLRSMNVRLTFDVRGGLTRTIDFGDLQEYEQHLRLGSVVEQLHTGMS

SEQ ID NO: 11674 - protein, 500 aa, Unknown
  Description of Unknown: Integrase A242 sequence
  PF07508,SSF53041,PS51737,cd00338,PTHR30461:SF3,PF00239, PS51736,SM00857,G3DSA:3.40.50.1390,PTHR30461
MRALVVIRLSRVTDATTSPERQLESCQQLCAQRGWDVVGVAEDLDVSGAVDPFDRKRRPNLARWLAFEEQPFDVIVAYRVDRLTRSIRHLQQLVHWAEDHKKLVVSATEAHFDTTTPFAAVVIALMGTVAQMELEAIKERNRSAAHFNIRAGKYRGSLPPWGYLPTRVDGEWRLVPDPVQRARILEVYHRVVDNHEPLHLVAHDLNRRGVLSPKDYFAKLQGREPQGREWSATALKRSLISEAMLGYATLNGKTVRDDDGAPLVRAEPILTREQLEALRAELVKTDRTKPAVSTPSLLLRVLFCAVCGEPAYKFAGGGRKHPRYRCRSMGFPKHCGNGTVAMAEWDAFCEEQVLDLLGDAERLEKVWVAGSDSAVELAEVNAELVDLTSLIGSPAYRVGSPQREALDARIAALAARQEELEGLEARPSGWEWRETGQRFGDWWREQDTAAKNTWLRSMNVRLTFDVRGGLTRTIDFGDLQEYEQHLRLGSVVERLHTGMS

SEQ ID NO: 11675 - protein, 500 aa, Unknown
  Description of Unknown: Integrase A243 sequence
  PF07508,SSF53041,PS51737,cd00338,PTHR30461:SF3, PF00239,PS51736,SM00857,G3DSA:3.40.50.1390,PTHR30461
MRALVVIRLSRVTDATTSPERQLESCRQLCAQRGWEVVGVAEDLDVSGAVDPFDRKRRPNLARWLAFEEQPFDVIVAYRVDRLTRSIRHLQQLVHWAEDHKKLVVSATEAHFDTTTPFAAVVIALMGTVAQMELEAIKERNRSAAHFNIRAGKYRGSLPPWGYLPTRVDGEWRLVPDPVQRERILEVYHRVVDNHEPLHLVAHDLNRRGVLSPKDYFAKLQGREPQGREWSATALKRSLISEAMLGYATLNGKTVRDDDGAPLVRSEPILTREQLEALRAELVKTDRTKPAVSTPSLLLRVLFCAVCGEPAYKFAGGGRKHPRYRCRSMGFPKHCGNGTVAMAEWDAFCEEQVLDLLGDSERLEKVWIAGSDSAVELAEVNAELVDLTSLIGSPAYRAGSPQREALDARIAALAARQEELEGLEARPSGWEWRETGQRFGDWWREQDTSGKNTWLRSMNVRLTFDVRGGLTRTIDFGDLQEYEQHLRLGSVVERLHTGMS

SEQ ID NO: 11676 - protein, 500 aa, Unknown
  Description of Unknown: Integrase A244 sequence
  PF07508,SSF53041,PS51737,cd00338,PTHR30461:SF3,PF00239, PS51736,SM00857,G3DSA:3.40.50.1390,PTHR30461
MRALVVIRLSRVTDATTSPERQLESCQQLCAQRGWDVVGVAEDLDVSGAVDPFDRKRRPNLARWLAFEEQPFDVIVAYRVDRLTRSIRHLQQLVHWAEDHKKLVVSATEAHFDTTTPFAAVVIALMGTVAQMELEAIKERNRSAAHFNIRAGKYRGSLPPWGYLPTRVDGEWRLVPDPVQRERILEVYHRVVDNHEPLHLVAHDLNRRGVLSPKDYFAKLQGREPRGREWSATALKRSLISEAMLGYTTLNGKTVRDDDGAPLVRAEPILTREQLESLRAELVKTDRTKPAVSTPSLLLRVLFCAVCGEPAYKFTGGGRKNARYRCRSWGWAQRCGNGTVAMAEWDAFCEEQVLDLLGDAERLEKVWVAGSDAAVELTELNAELVDLTSLIGSPAYRAGSPQREALDARIAALAARQEELEGLEARPSGWEWRETGQRFGDWWRDQDTAGKNTWLRSMNVRLTFDVRGGLTRTIDFGDLQEYEQHLRLGSVVEQLHTGMS

SEQ ID NO: 11677 - protein, 500 aa, Unknown
  Description of Unknown: Integrase A245 sequence
  PF07508,SSF53041,PS51737,cd00338,PTHR30461:SF3, PF00239,PS51736,SM00857,G3DSA:3.40.50.1390,PTHR30461
MRALVVIRLSRVTDATTSPERQLESCQQLCAQRGWDVIGVAEDLDVSGAVDPFDRKRRPNLARWLAFEEQPFDVIVAYRVDRLTRSIRHLQQLVHWAEDHKKLVVSATEAHFDTTTPFAAVVIALMGTVAQMELEAIKERNRSAAHFNIRAGKYRGSLPPWGYLPTRVDGEWRLVPDPVQRERILEVYHRVVDNHEPLHLVAHDLNRRGVLSPKDYFAKLQGREPQGREWSATALKRSLISEAMLGYATLNGKTVRDDDGAPLVRSEPILTREQLEALRAELVKTDRTKPAVSTPSLLLRVLFCAVCGEPAYKFAGGGRKHPRYRCRSMGFPKHCGNGTVAMAEWDAFCEEQVLDLLGDSERLEKVWAAGSDSAVELAEVNAELVDLTSLIGSPAYRVGSPQREALDARIAALAARQEELEGLEARPSGWEWRETGQRFGDWWREQDAAAKNTWLRSMNVRLTFDVRGGLTRTIDFGDLQEYEQHLRLGSVVEQLHAGMS

SEQ ID NO: 11678 - protein, 500 aa, Unknown
  Description of Unknown: Integrase A246 sequence
  PF07508,SSF53041,PS51737,cd00338,PTHR30461:SF3,PF00239, PS51736,SM00857,G3DSA:3.40.50.1390,PTHR30461
MRALVVIRLSRVTDATTSPERQLESCQQLCAQRGWDVVGVAEDLDVSGAVDPFDRKRRPNLARWLAFEEQPFDVIVAYRVDRLTRSIRHLQQLVHWAEDHKKLVVSATEAHFDTTTPFAAVVIALMGTVAQMELEAIKERNRSAAHFNIRAGKYRGSLPPWGYLPTRVDGEWRLVPDPVQRERILEVYHRVVDNHEPLHLVAHDLNRRGVLSPKDYFAKLQGREPRGREWSATALKRSLISEAMLGYATLNGKTVRDDDGAPLVRAEPILTREQLEALRAELVKTDRTKPAVSTPSLLLRVLFCAVCGEPAYKFTGGGRKNARYRCRSWGWAQRCGNGTVAMAEWDAFCEEQVLDLLGDAERLEKVWVAGSDSAVELAEVNAELVDLTSLIGSPAYRVGSPQREALDARIAALAARQEELEGLEARPSGWEWRETGQRFGDWWAQQDTAAKNTWLRSMNVRLTFDVRGGLTRTIDFGDLQEYEQHLRLGSVVERLHTGMS

SEQ ID NO: 11679 - protein, 500 aa, Unknown
  Description of Unknown: Integrase A247 sequence
  PF07508,SSF53041,PS51737,cd00338,PTHR30461:SF3, PF00239,PS51736,SM00857,G3DSA:3.40.50.1390,PTHR30461
MRALVVIRLSRVTDATTSPERQLESCQQLCAQRGWEVVGVAEDLDVSGAVDPFDRKRRPNLARWLAFEEQPFDVIVAYRVDRLTRSIRHLQQLVHWAEDHKKLVVSATEAHFDTTTPFAAVVIALMGTVAQMELEAIKERNRSAAHFNIRAGKYRGSLPPWGYLPTRVDGEWRLVPDPVQRERILEVYHRVVDNHEPLHLVAHDLNRRGVLSPKDYFAKLQGREPQGREWSATALKRSLISEAMLGYATLNGKTVRDDDGAPLVRAEPILTREQLEALRAELVKTDRTKPAVSTPSLLLRVLFCAVCGEPAYKFAGGQRKNPRYRCRSMGFPKHCGNGTVAMAEWDAFCEEQVLDLLGDSERLEKVWVAGSDSAVELAEVNAELVDLTSLIGSPAYRVGSPQREALDARIAALAARQEELEGLEARPSGWEWRETGQRFGDWWREQDTAAKNTWLRSMNVRLTFDVRGGLTRTIDFGDLQEYEQHLRLGSVVERLHAGMS

SEQ ID NO: 11680 - protein, 500 aa, Unknown
  Description of Unknown: Integrase A248 sequence
  PF07508,SSF53041,PS51737,cd00338,PTHR30461:SF3,PF00239, PS51736,SM00857,G3DSA:3.40.50.1390,PTHR30461
MRALVVIRLSRVTDATTSPERQLESCQQLCAQRGWDVVGVAEDLDVSGAVDPFDRKRRPNLARWLAFEEQPFDVIVAYRVDRLTRSIRHLQQLVHWAEDHKKLIVSATEAHFDTTSPFAAVVIALMGTVAQMELEAIKERNRSAAHFNIRAGKYRGSLPPWGYLPMRVDGEWRLVPDPVQRERILEVYHRVVDNHEPLHLVAHDLNRRGVLSPKDYFAKLQGREPQGREWSATALKRSLISEAMLGYTTLNGKTVRDDDGAPLVRAEPILTREQLESLRAELVKTDRTKPAVSTPSLLLRVLFCAVCGEPAYKFTGGGRKNARYRCRSWGWAQRCGNGTVAMAEWDAFCEEQVLDLLGDAERLEKVWVAGSDAAVELTELNAELVDLTSLIGSPAYRAGSPQREALDARIAALAARQEELEGLEARPSGWEWRETGQRFGDWWRDQDTAGKNTWLRSMNVRLTFDVRGGLTRTIDFGDLQEYEQHLRLGSVVEQLHTGMS

SEQ ID NO: 11681 - protein, 500 aa, Unknown
  Description of Unknown: Integrase A249 sequence
  PF07508,SSF53041,PS51737,cd00338,PTHR30461:SF3, PF00239,PS51736,SM00857,G3DSA:3.40.50.1390,PTHR30461
MRALVVIRLSRVTDATTSPERQLESCQQLCAQRGWEVVGVAEDLDVSGAVDPFDRKRRPNLARWLAFEEQPFDVIVAYRVDRLTRSIRHLQQLVHWAEDHKKLVVSATEAHFDTTTPFAAVVIALMGTVAQMELEAIKERNRSAAHFNIRAGKYRGSLPPWGYLPTRVDGEWRLVPDPVQRERILEVYHRVVDNHEPLHLVAHDLNRRGVLSPKDYFAKLQGREPQGREWSATALKRSLISEAMLGYATLNGKTVRDDDGAPLVRAEPILTREQLEALRAELVKTDRTKPAVSTPSLLLRVLFCAVCGEPAYKFAGGQRKNPRYRCRSMGFPKHCGNGTVAMAEWDAFCEEQVLDLLGDSERLEKVWVAGSDSAVELAEVNAELVDLTSLIGSPAYRVGSPQREALDARIAALAARQEELEGLEARPSGWEWRETGQRFGDWWREQDTAAKNTWLRSMNVRLTFDVRGGLTRTIDFGDLQEYEQHLRLGSVVERLHTGMS

SEQ ID NO: 11682 - protein, 500 aa, Unknown
  Description of Unknown: Integrase A250 sequence
  PF07508,SSF53041,PS51737,cd00338,PTHR30461:SF3,PF00239, PS51736,SM00857,G3DSA:3.40.50.1390,PTHR30461
MRALVVIRLSRVTDATTSPERQLESCQQLCAQRGWAVVGVAEDLDVSGAVDPFDRKRRPNLARWLAFEEQPFDVIVAYRVDRLTRSIRHLQQLVHWAEDHKKLVVSATEAHFDTTTPFAAVVIALMGTVAQMELEAIKERNRSAAHFNIRAGKYRGSLPPWGYLPTRIDGEWRLVPDPVQRERILEVYHRVVDNHEPLHLVAHDLNRRGVLSPKDYFAKLQGREPQGREWSATALKRSLISEAMLGYATLNGKTVRDDDGAPLVRSEPILTREQLEALRAELVKTDRTKPAVSTPSLLLRVLFCAVCGEPAYKFTGGGRKNARYRCRSWGWAQRCGNGTVAMAEWDAFCEEQVLDLLGDAERLEKVWVAGSDSAVELAEVNAELVDLTSLIGSPAYRVGSPQREALDARIAALAARQEELEGLEARPSGWEWRETGQRFGDWWRDQDTAGKNTWLRSMNVRLTFDVRGGLTRTIDFGDLQEYEQHLRLGSVVEQLHAGMS

SEQ ID NO: 11683 - protein, 500 aa, Unknown
  Description of Unknown: Integrase A251 sequence
  PF07508,SSF53041,PS51737,cd00338,PTHR30461:SF3, PF00239,SM00857,G3DSA:3.40.50.1390,PTHR30461
MTQTLRALVGARVSVVQGPQKVSHIAQQESGTKWATERGHEIVGTFKDLDVSASVSPFERPDLGPWLSPERQDEWDILVFSKIDRMFRSTRDCVKFAEWAEERKKILVFAEDSMTLNYRDKSDSLEKMMSELFIYIGSFFAQLELNRFRSRAKDSHRVLRGTDRWASGVPPLGFKVIDHPSGKGKGLATDPEGKELLYDMAGKLLEGWSFIRISQYLNEKRIPTQLDKARMAKGKPAYDNPWSVNTVIESLTSLRTQGLKMTRSGKKFVTVLDEAGEPIRMAPPTFDAATWKQIQEAAALRQNNRRSRSYTANPMLGVGFCGQCGASLAQQFSRSKLKDGTVNEHRYYRCGRTPVNCQNVFLRADDGDDLLEQTFLEAYGDEPVTRRVFVPGEDHTEELEQVRATIERLRRESDAGLIVSAEDERIYLERMKSLIDRRTQLEAVPRRAAGWVTEETGQTYREAWETEDHRTLLSEAGIRFELKSSKPMNFALHVPQKEAG

SEQ ID NO: 11684 - protein, 500 aa, Unknown
  Description of Unknown: Integrase A252 sequence
  PF07508,SSF53041,PS51737,cd00338,PTHR30461:SF3,PF00239,PS51736, SM00857,G3DSA:3.40.50.1390,PTHR30461
MRALVVIRLSRVTDATTSPERQLESCQRLCAQRGWDVVGVAEDLDVSGAVDPFDRKRRPNLARWLAFEEQPFDVIVAYRVDRLTRSIRHLQQLVHWAEDHKKLVVSATEAHFDTTTPFAAVVIALMGTVAQMELEAIKERNRSAAHFNIRAGKYRGSLPPWGYLPTRVDGEWRLVPDPVQRERILEVYHRVVDNHEPLHLVAHDLNRRGVLSPKDYFAKLQGREPQGREWSATALKRSLISEAMLGYATLNGKTVRDDDGAPLVRAEPILTREQLEALRAELVKTDRTKPAVSTPSLLLRVLFCAVCGEPAYKFAGGGRKHPRYRCRSMGFPKHCGNGTVAMAEWDAFCEEQVLDLLGDAERLEKVWVAGSDSAVELAEVNAELVDLTSLIGSPAYRVGSPQREALDARIAALAARQEELEGLEARPSGWEWRETGQRFGDWWREQGTAAKNTWLRSMNVRLTFDVRGGLTRTIDFGDLQEYEQHLRLGSVVERLHAGMS

SEQ ID NO: 11685 - protein, 500 aa, Unknown
  Description of Unknown: Integrase A253 sequence
  PF07508,SSF53041,PS51737,cd00338,PTHR30461:SF3, PF00239,SM00857,G3DSA:3.40.50.1390,PTHR30461
MTQTLRALVGARVSVVQGPQKVSHIAQQESGTKWATERGHEIVGTFKDLDVSASVSPFERPDLGPWLSPERQDEWDILVFSKIDRMFRSTRDCVKFAEWAEERKKILVFAEDSMTLNYRDKSDSLEKMMSELFIYIGSFFAQLELNRFRSRAKDSHRVLRGTDRWASGVPPLGFKVIDHPSGKGKGLTTDPEGKELLYDMAGKLLEGWSFIRISQYLNEKKIPTQLDKARMAKGKPAYENPWSVNTVIESLTSLRTQGLKMTRSGKKFVTVLDEAGEPIRMAPPTFDAATWKQIQEAAALRQNNRRSRSYTANPMLGVGFCGQCGASLAQQFSRSKLKDGTVNEHRYYRCGRTPVNCQNVFLRADDGDDLLEQTFLEAYGDEPVTRRVFVPGEDHTEELEQVRATIERLRRESDAGLIVSAEDERIYLERMKSLIDRRTQLEAVPRRAAGWVTEETGQSYREAWETEDHRTLLSEAGIRFELKSSKPMNFALHVPQKEAG

SEQ ID NO: 11686 - protein, 500 aa, Unknown
  Description of Unknown: Integrase A254 sequence
  PF07508,SSF53041,PS51737,cd00338,PTHR30461:SF3,PF00239,PS51736, SM00857,G3DSA:3.40.50.1390,PTHR30461
MRALVVIRLSRVTDATTSPERQLESCRQLCAQRGWDVVGVAEDLDVSGAVDPFDRKRRPNLARWLAFEEQPFDVIVAYRVDRLTRSIRHLQQLVHWAEDHKKLVVSATEAHFDTTTPFAAVVIALMGTVAQMELEAIKERNRSAAHFNIRAGKYRGSLPPWGYLPTRVDGEWRLVPDPVQRERILEVYHRVVDNHEPLHLVAHDLNRRGVLSPKDYFAKLQGREPQGREWSATALKRSLISEAMLGYATLNGKTVRDDDGAPLVRSEPILTREQLEALRAELVKTDRTKPAVATPSLLLRVLFCAVCGEPAYKFAGGGRKHPRYRCRSMGFPKHCGNGTVAMAEWDAFCEEQVLDLLGDAERLEKVWVAGSDSAVELAEVNAELVDLTSLIGSPAYRVGSPQREALDARIAALAARQEELEGLEARPSGWEWRETGQRFGDWWREQDTAAKNTWLRSMNVRLTFDVRGGLTRTIDFGDLQEYEQHLRLGSVVERLHTGMS

SEQ ID NO: 11687 - protein, 500 aa, Unknown
  Description of Unknown: Integrase A255 sequence
  PF07508,SSF53041,PS51737,cd00338,PTHR30461:SF3, PF00239,PS51736,SM00857,G3DSA:3.40.50.1390,PTHR30461
MRALVVIRLSRVTDATTSPERQLESCQQLCAQRGWEVVGVAEDLDVSGAVDPFDRKRRPNLARWLAFEEQPFDVIVAYRVDRLTRSIRHLQQLVHWAEDHKKLVVSATEAHFDTTTPFAAVVIALMGTVAQMELEAIKERNRSAAHFNIRAGKYRGSLPPWGYLPTRVDGEWRLVPDPAQRERILEVYHRVVDNHEPLHLVAHDLNRRGILSPKDYFAKLQGREPQGREWSATALKRSLISEAMLGYATLNGKTVRDDDGAPLVRAEPILTREQLEALRAELVKTDRTKPAVSTPSLLLRVLFCAVCGEPAYKFTGGGRKNARYRCRSWGWAQRCGNGTVAMAEWDAFCEEQVLDLLGGAERLEKVWVAGSDSAVELAEVNAELVDLTSLIGSPAYRVGSPQREALDARIAALAARQEELEGLEARPSGWEWRETGQRFGDWWREQDIAAKNTWLRSMNVRLTFDVRGGLTRTIDFGDLQEYEQHLRLGSVVEQLHTGMS

SEQ ID NO: 11688 - protein, 500 aa, Unknown
  Description of Unknown: Integrase A256 sequence
  PF07508,SSF53041,PS51737,cd00338,PTHR30461:SF3,PF00239, PS51736,SM00857,G3DSA:3.40.50.1390,PTHR30461
MRALVVIRLSRVTDATTSPERQLESCQQLCAQRGWDVVGVAEDLDVSGAVDPFDRKRRPNLARWLAFEEQPFDVIVAYRVDRLTRSIRHLQQLVHWAEDHKKLVVSATEAHFDTTTPFAAVVIALMGTVAQMELEAIKERNRSAAHFNIRAGKYRGSLPPWGYLPTRVDGEWRLVPDPVQRERILEVYHRVVDNHEPLHLVAHDLNRRGVLSPKDYFAKLQGREPQGREWSATALKRSLISEAMLGYATLNGKTVRDDDGAPLVRAEPILTREQLEALRAELVKTDRTKPAVATPSLLLRVLFCAVCGEPAYKFTGGGRKNARYRCRSWGWAQRCGNGTVAMAEWDAFCEEQVLDLLGDAERLEKVWVAGSDSAVELAEVNAELVDLTSLIGSPAYRVGSPQREALDARIAALAARQEELEGLEARPSGWEWRETGQRFGDWWREQDTAAKNTWLRSMNVRLTFDVRGGLTRTIDFGDLQEYEQHLRLGSVVEQLHAGMS

SEQ ID NO: 11689 - protein, 500 aa, Unknown
  Description of Unknown: Integrase A257 sequence
  PF07508,SSF53041,PS51737,cd00338,PTHR30461:SF3, PF00239,PS51736,SM00857,G3DSA:3.40.50.1390,PTHR30461
MRALVVIRLSRVTDATTSPERQLESCQQLCTQRGWDVVGVAEDLDVSGAVDPFDRKRRPNLARWLAFEEQPFDVIVAYRVDRLTRSIRHLQQLVHWAEDHKKLIVSATEAHFDTTSPFAAVVIALMGTVAQMELESIKERNRSAAHFNIRAGKYRGSLPPWGYLPTRVDGEWRLVPDPVQRERILEVYHRVVDNHEPLHLVAHDLNRRGVLSPKDYFAKLQGREPQGREWSATALKRSLISEAMLGYATLNGKTVRDDDGALLVRAEPILTREQLEALRAELVKTDRTKPAVATPSLLLRVLFCAVCGEPAYKFTGGQRKNPRYRCRSMGFPKHCGNGTVAMAEWDAFCEEQVLDLLGDAERLEKVWVAGSDSAVELAEVNAELVDLTSLIGSPAYRVGSPQREALDARIAALAARQEELEGLEARPSGWEWRETGQRFGDWWREQDTAAKNTWLRSMNVRLTFDVRGGLTRTIDFGDLQEYEQHLRLGGVVEQLHTGMS

SEQ ID NO: 11690 - protein, 500 aa, Unknown
  Description of Unknown: Integrase A258 sequence
  PF07508,SSF53041,PS51737,cd00338,PTHR30461:SF3,PF00239, SM00857,G3DSA:3.40.50.1390,PTHR30461
MTQTLRALVGARVSVVQGPQKVSHIAQQESGTKWATERGHEIVGTFKDLDVSASVSPFERPDLGPWLSPERQDEWDILVFSKIDRMFRSTRDCVKFAEWAEERKKILVFAEDSMTLNYRDKSDSLEKMMSELFIYIGSFFAQLELNRFRSRAKDSHRVLRGTDRWASGVPPLGFKVIDHPSGKGKGLATDPEGKELLYDMAGKLLEGWSFIRISQYLNEKKIPTQLDKARMAKGKPAYDNPWSVNTVIESLTSLRTQGLKMTRSGKKFVTVLDEAGEPIRMAPPTFDAATWKQIQEAAALRQNNRRSRSYTANPMLGVGFCGQCGASLAQQFSRSKLKDGTVNEHRYYRCGRTPVNCQNVFLRADDGDDLLEQTFLEAYGDEPVTRRVFVPGEDHTEELEQVRATIERLRRESDAGLIVSAEDERIYLERMKSLIDRRTQLEAVPRRAAGWVTEETGQTYREAWETEDHRTLLSEAGIRFELKSSKPMNFALHVPQKEAG

SEQ ID NO: 11691 - protein, 500 aa, Unknown
  Description of Unknown: Integrase A259 sequence
  PF07508,SSF53041,PS51737,cd00338,PTHR30461:SF3, PF00239,PS51736,SM00857,G3DSA:3.40.50.1390,PTHR30461
MRALVVIRLSRVTDATTSPERQLESCQQLCAQRGWDVVGVAEDLDVSGAVDPFDRKRRPNLARWLAFEEQPFDVIVAYRVDRLTRSIRHLQQLVHWAEDHKKLVVSATEAHFDTTTPFAAVVIALMGTVAQMELEAIKERNRSAAHFNIRAGKYRGSLPPWGYLPTRVDGEWRLVPDPVQRERILEVYHRVVDNHEPLHLVAHDLNQRGILSPKDYFAQLQGREPQGREWSATALKRSLISEAMLGYTTLNGKTVRDDDGAPLVRSEPILTREQLEALRAELVKTDRTKPAVSTPSLLLRVLFCAVCGEPAYKFAGGGRKNARYRCRSWGWAQRCGNGTVAMAEWDAFCEEQVLDLLGDAERLEKVWVAGSDSAVELAEVNAELVDLTSLIGSPAYRAGSPQREALDARIAALAARQEELEGLEARPSGWEWRETGQRFGDWWREQDIAAKNTWLRSMNVRLTFDVRGGLTRTIDFGDLQEYEQHLRLGSVVEQLHAGMS

SEQ ID NO: 11692 - protein, 500 aa, Unknown
  Description of Unknown: Integrase A260 sequence
  PF07508,SSF53041,PS51737,cd00338,PTHR30461:SF3,PF00239, PS51736,SM00857,G3DSA:3.40.50.1390,PTHR30461
MRALVVIRLSRVTDATTSPERQLESCQQLCAQRGWDIVGVAEDLDVSGAVDPFDRKRRPNLARWLAFEEQPFDVIVAYRVDRLTRSIRHLQQLVHWAEDHKKLIVSATEAHFDTTSPFAAVVIALMGTVAQMELEAIKERNRSAAHFNIRAGKYRGSLPPWGYMPARVDGEWRLLVDPVQRERILEVYHRVVDNHEPLHLVAHDLNRRGILSPKDYFAQLQGREPQGRAWSATALKRSLISEAMLGYTTLNGKTVRDDDGAPLVRAEPILTREQLEALRAELVKTDRTKPAVSTPSLLLRVLFCAVCGEPAYKFTGGGRKNARYRCRSWGWAQRCGNGTVAMAEWDAFCEEQVLDLLGDAERLEKVWVAGSDSAVELAEVNAELVDLTSLIGSPAYRVGSPQREALDARIAALAARQEELEGLEARPSGWEWRETGQRFGDWWREQDIAGKNTWLRSMNVRLTFDVRGGLTRTIDFGDLQEYEQHLRLGSVVERLHTGMS

SEQ ID NO: 11693 - protein, 500 aa, Unknown
  Description of Unknown: Integrase A261 sequence
  PF07508,SSF53041,PS51737,cd00338,PTHR30461:SF3, PF00239,PS51736,SM00857,G3DSA:3.40.50.1390,PTHR30461
MRALVVIRLSRVTDATTSPERQLESCHQLCAQRGWDVVGVAEDLDVSGAVDPFDRKRRPNLARWLAFEEQPFDVIVAYRVDRLTRSIRHLQQLVHWAEDHKKLVVSATEAHFDTTTPFAAVVIALMGTVAQMELEAIKERNRSAAHFNIRAGKYRGSLPPWGYLPTRVDGEWRLVPDPVQRERILEVYHRVVDNHEPLHLVAHDLNRRGVLSPKDYFAKLQGREPQGREWSATALKRSLISEAMLGYATLNGKTVRDDDGAPLVRAEPILTREQLEALRAELVKTDRTKPAVSTPSLLLRVLFCAVCGEPAYKFTGGGRKNARYRCRSWGWAQRCGNGTVAMAEWDAFCEEQVLDLLGDAERLEKVWVAGSDSAVELAEVNAELVDLTSLIGSPAYRVGSPQREALDARIAALAARQEELEGLEARPSGWEWRETGQRFGDWWREQDTSGKNTWLRSMNVRLTFDVRGGLTRTIDFGDLQEYEQHLRLGSVVEQLHAGMS

SEQ ID NO: 11694 - protein, 500 aa, Unknown
  Description of Unknown: Integrase A262 sequence
  PF07508,SSF53041,PS51737,cd00338,PTHR30461:SF3,PF00239, PS51736,SM00857,G3DSA:3.40.50.1390,PTHR30461
MRALVVIRLSRVTDATTSPERQLESCQQLCAQRGWDVVGVAEDLDVSGAVDPFDRKRRPNLARWLAFEEQPFDVIVAHRVDRLTRSIRHLQQLVHWAEDHKKLVVSATEAHFDTTTPFAAVVIALMGTVAQMELEAIKERNRSAAHFNIRAGKYRGSLPPWGYLPTRVDGEWRLVPDPVQRERILEVYHRVVDNHEPLHLVAHDLNRRGVLSPKDYFAKLQGREPQGREWSATALKRSLISEAMLGYATLNGKTVRDDDGAPLVRAEPILTREQLEALRAELVNTDRTKPAVSTPSLLLRVLFCAVCGEPAYKFTGGGRKNPRYRCRSWGWAQRCGNGTVAMAEWDAFCEEQVLDLLGDAERLEKVWVAGSDSAVELAEVNAELVDLTSLIGSPAYRVGSPQREALDARIAALAARQEELEGLEARPSGWEWRETGQRFGDWWREQDTSAKNTWLRSMNVRLTFDVRGGLTRTIDFGDLQEYEQHLRLGSVVERLHTGMS

SEQ ID NO: 11695 - protein, 500 aa, Unknown
  Description of Unknown: Integrase A263 sequence
  PF07508,SSF53041,PS51737,cd00338,PTHR30461:SF3, PF00239,SM00857,G3DSA:3.40.50.1390,PTHR30461
MTQTLRALVGARVSVVQGPQKVSHIAQQESGTKWATERGHEIVGTFKDLDVSASVSPFERPDLGPWLSPERQDEWDILVFSKIDRMFRSTRDCVKFAEWAEERKKILVFAEDSMTLNYRDKSDSLEKMMSELFIYIGSFFAQLELNRFRSRAKDSHRVLRGTDRWASGVPPLGFKVIDHPSGKGKGLATDPEGKELLYDMAGKLLEGWSFIRISQYLNEKKIPTQLDKARMAKGKPAYENPWSVNTVIESLTSLRTQGLKMTRSGKKFVTVLDEAGEPIRMAPPTFDAATWKQIQEAAALRQNNRRSRSYTANPMLGVGFCGQCGASLAQQFSRSKLKDGTVNEHRYYRCGRTPVNCQNVFLRADDGDDLLEQTFLEAYGDEPVTRRVFVPGEDHTEELEQVRATIERLRRESDAGLIVSAEDERIYLERMKSLIDRRTQLEAVPRRAAGWVTEETGQTYREAWETEDHRTLLSEAGIRFELKSSKPMNFALHVPQKEAG

SEQ ID NO: 11696 - protein, 500 aa, Unknown
  Description of Unknown: Integrase A264 sequence
  PF07508,SSF53041,PS51737,cd00338,PTHR30461:SF3,PF00239,PS51736, SM00857,G3DSA:3.40.50.1390,PTHR30461
MRALVVIRLSRVTDATTSPERQLESCRQLCAQRGWDVVGVAEDLDVSGAVDPFDRKRRPNLARWLAFEEQPFDVIVAYRVDRLTRSIRHLQQLVHWAEDHKKLVVSATEAHFDTTTPFAAVVIALMGTVAQMELEAIKERNRSAAHFNIRAGKYRGSLPPWGYLPTRVDGEWRLVPDPVQRERILEVYHRVVDNHEPLHLVAHDLNRRGVLSPKDYFAQLQGREPQGRAWSATALKRSLISEAMLGYATLNGKTVRDDDGAPLVRSEPILTREQLESLRAELVKTDRTKPAVSTPSLLLRVLFCAVCGEPAYKFAGGGRKHPRYRCRSMGFPKHCGNGTVAMAEWDAFCEEQVLDLLGDSERLEKVWVAGSDSAVELAEVNAELLDLTSLIGSPAYRAGSPQREALDARIAALAARQEELEGLEARPSGWEWRETGQRFGDWWRDQDTAGKNTWLRSMNVRLTFDVRGGLTRTIDFGDLQEYEQHLRLGSVVERLHTGMS

SEQ ID NO: 11697 - protein, 500 aa, Unknown
  Description of Unknown: Integrase A265 sequence
  PF07508,SSF53041,PS51737,cd00338,PTHR30461:SF3, PF00239,PS51736,SM00857,G3DSA:3.40.50.1390,PTHR30461
MRALVVIRLSRVTDATTSPERQLESCQQLCAQRGWDVVGVAEDLDVSGAVDPFDRKRRPNLARWLAFEEQPFDVIVAYRVDRLTRSIRHLQQLVHWAEDHKKLVVSATESHFDTTSPFAAVVIALMGTVAQMELEAIKERNRSAAHFNIRAGKYRGSLPPWGYMPARVDGEWRLLVDPVQRERILEVYHRVVDNHEPLHQIAHDLNQRGILSPKDYFAKLQGREPKGREWSATALKRSLISEAMLGYATLNGKTVRDDDGAPLVRAEPILTREQLEALRAELVKTARTKPAVSTPSLLLRVLFCAVCGEPAYKFAGGQRKNPRYRCRSMGFPKHCGNGTVAMAEWDAFCEEQVLDLLGDAERLEKVWVAGSDSAVELAEVNAELVDLTSLIGSPAYRVGSPQREALEARIAALAARQEELEGLEARPSGWEWRETGQRFGDWWRDQDTAGKNTWLRSMSVRLTFDVRGGLTRTIDFGDLQEYEQHLRLGSVVEQLHTGMS

SEQ ID NO: 11698 - protein, 499 aa, Unknown
  Description of Unknown: Integrase A266 sequence
  PF07508,SSF53041,PS51737,cd00338,PTHR30461:SF3,PF00239, PS51736,SM00857,G3DSA:3.40.50.1390,PTHR30461
MRALVVIRLSRVTDATTSPERQLESCQQLCAQRGWEVVGVAEDLDVSGAVDPFDRKRRPNLARWLAFEEQPFDVIVAYRVDRLTRSIRHLQQLVHWAEDHKKLVVSATEAHFDTTSPFAAVVIALMGTVAQMELEAIKERNRSAAHFNIRAGKYRGSLPPWGYLPTRVDGEWRLVPDPVQRERILEVYHRVVDNHEPLHLVAHDLNRRGVLSPKDYFAKLQGREPQGREWSATALKRSLISEAMLGYATLNGKTVRDDDGAPLVRAEPILTREQLEALRAELVKTDRAKPAVSTPSLLLRVLFCAVCGEPAYKFDAGRKIPRYRCRSFGFAQRCGNGTVPIAEWDAFCEEQVLDLLGDSERLEKVWVAGSDSAVELAEVNAELVDLTSLIGSPAYRVGSPQREALDARIAALAARQEELEGLEARPSGWEWRETGQRFGDWWREQDTSAKNTWLRSMNVRLTFDVRGGLTRTIDFGDLQEYEQHLRLGSVVEQLHAGMS

SEQ ID NO: 11699 - protein, 499 aa, Unknown
  Description of Unknown: Integrase A267 sequence
  PF07508,SSF53041,PS51737,cd00338,PTHR30461:SF3, PF00239,PS51736,SM00857,G3DSA:3.40.50.1390,PTHR30461
MRALVVIRLSRVTDATTSPERQLESCQQLCAQRGWEVVGVAEDLDVSGAVDPFDRKRRPNLARWLAFEEQPFDVIVAYRVDRLTRSIRHLQQLVHWAEDHKKLVVSATEAHFDTTTPFAAVVIALMGTVAQMELEAIKERNRSAAHFNIRAGKYRGSLPPWGYLPTRVDGEWRLVPDPVQRERILEVYHRVVDNHEPLHLVAHDLNRRGVLSPKDYFAKLQGREPQGREWSATALKRSLISEAMLGYATLNGKTVRDDDGAPLVRAEPILTREQLEALRAELVKTDRAKPAVSTPSLLLRVLFCAVCGEPAYKFDAGRKIPRYRCRSFGFAQRCGNGTVPIAEWDAFCEEQVLDLLGDSERLEKVWVAGSDSAVELAEVNAELVDLTSLIGSPAYRVGSPQREALDARIAALAARQEELEGLEARPSGWEWRETGQRFGDWWREQDTSAKNTWLRSMNVRLTFDVRGGLTRTIDFGDLQEYEQHLRLGSVVEQLHAGMS

SEQ ID NO: 11700 - protein, 499 aa, Unknown
  Description of Unknown: Integrase A268 sequence
  PF07508,SSF53041,PS51737,cd00338,PTHR30461:SF3,PF00239, PS51736,SM00857,G3DSA:3.40.50.1390,PTHR30461
MRALVVIRLSRVTDATTSPERQLESCQQLCAQRGWDVVGVAEDLDVSGAVDPFDRKRRPNLARWLAFEEQPFDVIVAYRVDRLTRSIRHLQQLVHWAEDHKKLVVSATEAHFDTTTPFAAVVIALMGTVAQMELEAIKERNRSAAHFNIRAGKYRGSLPPWGYLPTRVDGEWRLVPDPVQRERILEVYHRVVDNHEPLHLVAHDLNRRGVLSPKDYFAKLQGREPQGREWSATALKRSLISEAMLGYATLNGKTVRDDDGAPLVRSEPILTREQLEALRAELVKTDRTKPAVSTPSLLLRVLFCAVCGEPAYKFDAGRKIPRYRCRSFGFAQRCGNGTVPISEWDAFCEEQVLDLLGDAERLEKVWVAGSDSAVELAEVNAELVDLTSLIGSPAYRVGSPQREALDARIAALAARQEELEGLEARPSGWEWRETGQRFGDWWREQDTAAKNTWLRSMNVRLTFDVRGGLTRTIDFGDLQEYEQHLRLGNVVERLHTGMS

SEQ ID NO: 11701 - protein, 499 aa, Unknown
  Description of Unknown: Integrase A269 sequence
  PF07508,SSF53041,PS51737,cd00338,PTHR30461:SF3, PF00239,PS51736,SM00857,G3DSA:3.40.50.1390,PTHR30461
MRALVVIRLSRVTDATTSPERQLESCQQLCAQRGWDVVGVAEDLDVSGAVDPFDRKRRPNLARWLAFEEQPFDVIVAYRVDRLTRSIRHLQQLVHWAEDHKKLVVSATEAHFDTTTPFAAVVIALMGTVAQMELEAIKERNRSAAHFNIRAGKYRGSLPPWGYLPTRVDGEWRLVPDPVQRERILEVYHRVVDNHEPLHLVAHDLNRRGVLSPKDYFAKLQGREPQGREWSATALKRSLISEAMLGYATLNGKTVRDDDGAPLVRAEPILTREQLEALRAELVKTDRAKPAVSTPSLLLRVLFCAVCGEPAYKFDAGRKIPRYRCRSFGFAQRCGNGTVPIAEWDAFCEEQVLDLLGDSERLEKVWVAGSDSAVELAEVNAELVDLTSLIGSPAYRAGSPQREALDARIAALAARQEELEGLEARPSGWEWRETGQRFGDWWREQDTSAKNTWLRSMNVRLTFDVRGGLTRTIDFGDLQEYEQHLRLGSVVEQLHAGMS

SEQ ID NO: 11702 - protein, 499 aa, Unknown
  Description of Unknown: Integrase A270 sequence
  PF07508,SSF53041,PS51737,cd00338,PTHR30461:SF3,PF00239, SM00857,G3DSA:3.40.50.1390,PTHR30461
MPKYDGRMRVLGRVRLSRFQEESTSVERQREIVENWAKQHDHEIIGWAEDIDVSRSVDPFDTPGLGPWFTDKTKIDQWDIVATWKLDRLATGSIYLNKMMGWCAENEKVIVSVTENFDLSTWVGRMIANVIAGVAEGELEAIKERTQASRKKLVSVGRWTGGRPTYGYRAVEIPSGGWALEPDPESSVTLAWMIDEVLAGTSANAIAKSLNERGVLTPADFVRYRNGKPTKGAKWSVTALLSLLRSRTLLGEIMHNGRTVLGDDGEPVLAGPPLIDVEKFNRVQAVLEARSLKQYMDRVDASPLLGVLVCAGCGDNMYHQRQMDKRRGVMYRYYKCLKRCGQQFHADVAEEMVENQFLNDLGDSEALTRVYIPAENHQIELEEAVRLMDGLTPLLGAVTSDHARKRLTEQISALDSKIARLEMLPESPARTELQPTGLTYRELWESLDTDGRRELMVKAGIRAAVKVEGRTVGGRGGRTTGAITFHFQIPEDLHERLAS

SEQ ID NO: 11703 - protein, 499 aa, Unknown
  Description of Unknown: Integrase A271 sequence
  PF07508,SSF53041,PS51737,cd00338,PTHR30461:SF3, PF00239,PS51736,SM00857,G3DSA:3.40.50.1390,PTHR30461
MRALVVIRLSRVTDATTSPERQLESCQQLCAQRGWDVVGVAEDLDVSGAVDPFDRKRRPNLARWLAFEEQPFDVIVAYRVDRLTRSIRHLQQLVHWAEDHKKLVVSATEAHFDTTTPFAAVVIALMGTVAQMELEAIKERNRSAAHFNIRAGKYRGSLPPWGYLPTRVDGEWRLVPDPVQRERILEVYHRVVDNHEPLHLVAHDLNRRGVLSPKDYFAKLQGREPQGREWSATALKRSLISEAMLGYATLNGKTVRDDDGAPLVRAEPILTREQLEALRAELVKTDRAKPAVSTPSLLLRVLFCAVCGEPAYKFDAGRKIPRYRCRSFGFAQRCGNGTVPIAEWDAFCEEQVLDLLGDSERLEKVWVAGSDSAVELAEVNAELVDLTSLIGSPAYRVGSPQREALDARIAALAARQEELEGLEARPSGWEWRETGQRFGDWWREQDTSAKNTWLRSMNVRLTFDVRGGLTRTIDFGDLQEYEQHLRLGSVVEQLHAGMS

SEQ ID NO: 11704 - protein, 499 aa, Unknown
  Description of Unknown: Integrase A272 sequence
  PF07508,SSF53041,PS51737,cd00338,PTHR30461:SF3,PF00239, PS51736,SM00857,G3DSA:3.40.50.1390,PTHR30461
MRALVVIRLSRVTDATTSPERQLESCQRLCAQRGWDVVGVAEDLDVSGAVDPFDRKRRPNLARWLAFEEQPFDVIVAYRVDRLTRSIRHLQQLVHWAEDHKKLVVSATEAHFDTTTPFAAVVIALMGTVAQMELEAIKERNRSAAHFNIRAGKYRGSLPPWGYLPTRVDGEWRLVPDPVQRERILEVYHRVVDNHEPLHLVAHDLNRRGVLSPKDYFAKLQGREPQGREWSATALKRSLISEAMLGYATLNGKTVRDDDGAPLVRSEPILTREQLEALRAELVKTDRTKPAVSTPSLLLRVLFCAVCGEPAYKFDAGRKIPRYRCRSFGFAQRCGNGTVPISEWDAFCEEQVLDLLGDAERLEKVWVAGSDSAVELAEVNAELVDLTSLIGSPAYRVGSPQREALDARIAALAARQEELEGLEARPSGWEWRETGQRFADWWREQDTAAKNTWLRSMNVRLTFDVRGGLTRTIDFGDLQEYEQHLRLGSVVERLHTGMS

SEQ ID NO: 11705 - protein, 499 aa, Unknown
  Description of Unknown: Integrase A273 sequence
  PF07508,SSF53041,PS51737,cd00338,PTHR30461:SF3, PF00239,PS51736,SM00857,G3DSA:3.40.50.1390,PTHR30461
MRALVVIRLSRVTDATTSPERQLASCQQLCEQRGWEVVGVAEDLDVSGAVDPFDRKRRPNLARWLAFEDQPFDVLVAYRVDRLTRSIRHLQQLVHWAEDHKKLVVSATEPHFDTTTPFAAVVIALMGTVAQMELEAIKERTRSTAHFNIRAGKYRGSLPPWGYMPARVDGEWRLIVDPVQRERILEVYHRVVDNHEPLHLIAHDLNGRGVLSPKDYFATLQGREPKGREWSATALKRSLISDAMLGYATLNGKTVRDDTGAPLVRAEPILTREQLESVRAELVKTDRAKPSVSTPSMLLRVLHCGVCGEPAYKFDAGRKIPRYRCRSFGYAVRCGNGTVPIAEWDAFCEEQVLDLLGDAERLEKVWVAGSDAAVELAEVNAELVDLTSLIGSPAYRAGSPQRTALDARIAALAARQEELEGLEARPSGWEWRETGQRFAEWWAEQDTAAKNTWLRSMNVRLTFDVRGGLTRTIDFGDLQEYEQHLRLGSVVERLHTGMS

SEQ ID NO: 11706 - protein, 499 aa, Unknown
  Description of Unknown: Integrase A274 sequence
  PF07508,SSF53041,PS51737,cd00338,PTHR30461:SF3,PF00239, PS51736,SM00857,G3DSA:3.40.50.1390,PTHR30461
MRALVVIRLSRVTDATTSPERQLESCQQLCAQRGWDVVGVAEDLDVSGAVDPFDRKRRPNLARWLAFEEQPFDVIVAYRVDRLTRSIRHLQQLVHWAEDHKKLVVSATEAHFDTTTPFAAVVIALMGTVAQMELEAIKERNRSAAHFNIRAGKYRGSLPPWGYLPTRVDGEWRLVPDPVQRERILEVYHRVVDNHEPLHLVAHDLNRRGVLSPKDYFAKLQGREPQGREWSATALKRSLISEAMLGYATLNGKTVRDDDGAPLVRSEPILTREQLEALRAELVKTDRTKPAVSTPSLLLRVLFCAVCGEPAYKFDAGRKIPRYRCRSFGFAQRCGNGTVPISEWDAFCEEQVLDLLGDAERLEKVWVAGSDSAVELAEVNAELVDLTSLIGSPAYRVGSPQREALDARIAALAARQEELEGLEARPSGWEWRETGQRFGDWWREQDTAAKNTWLRSMNVRLTFDVRGGLTRTIDFGDLQEYEQNLRLGNVVERLHTGMS

SEQ ID NO: 11707 - protein, 499 aa, Unknown
  Description of Unknown: Integrase A275 sequence
  PF07508,SSF53041,PS51737,cd00338,PTHR30461:SF3, PF00239,PS51736,SM00857,G3DSA:3.40.50.1390,PTHR30461
MRALVVIRLSRVTDATTSPERQLESCQQLCAQRGWDVVGVAEDLDVSGAVDPFDRKRRPNLARWLAFEEQPFDVIVAYRVDRLTRSIRHLQQLVHWAEDHKKLVVSATEAHFDTTTPFAAVVIALMGTVAQMELEAIKERNRSAAHFNIRAGKYRGSLPPWGYLPTRVDGEWRLVPDPVQRERILEVYHRVVDNHEPLHLVAHDLNRRGVLSPKDYFAKLQGREPQGREWSATALKRSLISEAMLGYATLNGKTVRDDDGAPLVRSEPILTREQLEALRAELVKTDRTKPAVSTPSLLLRVLFCAVCGEPAYKFDAGRKIPRYRCRSFGFAQRCGNGTVPISEWDAFCEEQVLDLLGDAERLEKVWVAGSDSAVELAEVNAELVDLTSLIGSPAYRVGSPQREALDARIAALAARQEELEGLEARPSGWEWRETGQRFADWWREQDTAAKNTWLRSMNVRLTFDVRGGLTRTIDFGDLQEYEQHLRLGSVVERLHTGMS

SEQ ID NO: 11708 - protein, 498 aa, Unknown
  Description of Unknown: Integrase A276 sequence
  PF07508,SSF53041,PS51737,cd00338,PTHR30461:SF3,PF00239, PS51736,SM00857,G3DSA:3.40.50.1390,PTHR30461
MPTYDRSMRVIGRLRISRQTEESTSIDRQRELIQNWADTHDHEIVGWAEDKDVSGSVDPFDTPGLGPWLKRDRLDDWDILVAWKLDRIARRAIAINRVFHLCQEHDKTLVCISDNIDLSTWVGRLIANVIAGVAEGELEAIRERTLASHRKLRELGRWPGGRPAYGYKAVENENGPGWKLVHDEYSATIMREIVDRTLQGEAGNAIAQDLQARGVLPPAEYRRQMNGEKLRGGEWMGQVIRRMLKSRTLLGHVTHQKVTVIHETEGTPILKGEPLVTLEEFEELQAILGGSSRPKNHNRSTGASPMLDVALCGECGKPLHLRTQRTERKTKVHVHRYYYCPDKHGQALRAEIVERTVEEQFLDMFGDKPAMERVFREGENHEIEIKQAIQSIEALTPLLGAATSGTVLKSLTDQISAISNRVTYLESLPKAESGYILRATGKTYREEWESRDEQGRRSLLKRSGVTVTFLLQGKTRTTEGALQTEIKFPGDVEERLAS

SEQ ID NO: 11709 - protein, 498 aa, Unknown
  Description of Unknown: Integrase A277 sequence
  PF07508,SSF53041,PF13408,PS51737,cd00338, PTHR30461:SF3,PF00239,SM00857,G3DSA:3.40.50.1390,PTHR30461
MRVLGRLRISRATEESTSIERQREIVEQWAAAHDHEIVGWAEDQDVSGSVDPFDAPALGPWLSEHRKHEWDILCAWKLDRLSRRAIPMNKLFGWMIDNDKTLVCVSENLDLGTWVGRMIANVIAGVAEGELEAIRERTTASHKKLRELGRWAGGPTYYGYVPKPRDSAGWELDIDPHAAGVLKEIIEKTIAGQSTESIVVELNERGELAPSDYLRKRTGKPLRGTKWNTSTIRHQLKSKTLLGHMTHKGQTVYDEAGLPVQKGPALIDRDTFKQLQDALEARGINRTKRVTGASPLLGVAVCDVCGGPMYYRSTSNRNNTGLLRQYICKHGRYGKTQANGGEPYNIIQADLLEAHVEEQFLWRMGDKRRIERVFVPGEGHQDELETAERAVEDLTSLLGTITQASARSRLLAQLAAAHDRLSRLEELPASEPRWEIRETGDTYAEAWQKATTEERRQIMLKAGVQMRVQMKDRVPRVFAGVLHSNWIEPTDIEERLLA

SEQ ID NO: 11710 - protein, 498 aa, Unknown
  Description of Unknown: Integrase A278 sequence
  PF07508,SSF53041,PS51737,cd00338,PTHR30461:SF3,PF00239, PS51736,SM00857,G3DSA:3.40.50.1390,PTHR30461
MRVLGRLRISRATEESTSIERQRELVEQWAAAHEHEIVGWAVDQDVSGSVDPFDAPALGPWLSDHRKHEWDILCAWKLDRLSRRAIPMNKLFGWMIDNDKTLVCVSENLDLGTWVGRMIANVIAGVAEGELEAIRERTTASHKKLRELGRWAGGPTYYGYVPKPRDGAGWELDIDPHAAGVLREIIEKTIAGQSTESIVVELNERGELSPSDYHRKRSGKPIRGTKWNTSWLRTQLKSKTLLGHMTHNGETVYDDAGLPVQKGPALIDRDTYKQLQDALQSRGINRTKRRTGASPLLGVAVCDVCDGPLYYRQTKNQKGTAMLRQYICKHGRYGNTKANGGEPYNIIQADLLEATVEELFLSKMGDLPRVERVFIPGEGHQHELETAERAVEDLTSLLGTITQEGARKRLLAQLSAAHERLAHLEELPSSEPRWETRETGETYREAWESATTEERRQILLKAGVTLKVQMKGRVPRVHPGVIVANWIEPHDIEKRLAS

SEQ ID NO: 11711 - protein, 498 aa, Unknown
  Description of Unknown: Integrase A279 sequence
  PF07508,SSF53041,PS51737,cd00338,PTHR30461:SF3, PF00239,PS51736,SM00857,G3DSA:3.40.50.1390,PTHR30461
MPTYDRSMRVIGRLRISRQTEESTSIERQRELIQNWADTHDHEIVGWAEDKDVSGSVDPFDTPGLGPWLKRDRLDDWDILVAWKLDRIARRAIAINRVFHLCQEHDKTLVCISDNIDLSTWVGRLIANVIAGVAEGELEAIRERTLASHRKLRELGRWPGGRPAYGYKAVENENGPGWKLVHDEYSATIMREIVDRTLQGEAGNAIAQDLQARGVLPPAEYRRQMNGEKLRGGEWMGQVIRKMLKSRTLLGHVTHQQVTVINEKEGTPILKGEPLVSLEEWEELQAMLGGSSRPKNHNRSTGASPMLDVALCGECGKPLHLRTQRTERKTKVHVHRYYYCPDKHGQAIRAEIVERTVEEQFLDMFGDKPAMERVFREGENHEIEIKQAIQSIEALTPLLGAATSGTVLKSLTDQISAISNRVTYLESLPKAESGYILRATGKTYREEWESRDEQGRRSLLKRSGVTVTFLLQGKTRTTEGALQTEIKFPGDVEERLAS

SEQ ID NO: 11712 - protein, 498 aa, Unknown
  Description of Unknown: Integrase A280 sequence
  PF07508,SSF53041,PS51737,cd00338,PTHR30461:SF3,PF00239, PS51736,SM00857,G3DSA:3.40.50.1390,PTHR30461
MRVLGRLRISRATEESTSIERQREIVEQWASVNDHEIVGWAVDQDVSGSVDPFDAPALGPWLSDHRKHEWDILCAWKLDRLSRRAIPMNKLFGWMIDNDKTLVCVSENLDLGTWVGRMIANVIAGVAEGELEAIRERTTASHKKLRELGRWAGGPTYYGYIPKPRDGAGWELDIDPHAASVLREIIEKTIAGVPSETIVVELNERGELSPSDYHRKRNGKPVKGTAWNTSWLRQQLKSKTLLGHMTHKGETVYDDAGLPVQKGPALIDRDTYKQLQDALESRGINRTRRRTGASPLLGVAVCDVCDGPLYYRQTKNSKGTGMLRQYICKHGRYGNTKANGGEPYNIIQADLLEATVEELFLSKMGDQPRVERVFIPGEGHQHELETAERAVEDLTSLLGTVTQEGARKRLLAQLAAAHERLAHLEELPSSEPRWETRETGETYREAWEGATTEERRQILLKAGVTLKVQMKDRVPRVHPGVIVANWIEPHDIEKRLAS

SEQ ID NO: 11713 - protein, 498 aa, Unknown
  Description of Unknown: Integrase A281 sequence
  PF07508,SSF53041,PS51737,cd00338,PTHR30461:SF3, PF00239,PS51736,SM00857,G3DSA:3.40.50.1390,PTHR30461
MPTYDRSMRVIGRLRISRQTEESTSIERQRELIQNWADTHDHEIVGWAEDKDVSGSVDPFDTPGLGPWLKRDRLDDWDILVAWKLDRIARRAIAINRVFHLCQEHDKTLVCISDNIDLSTWVGRLIANVIAGVAEGELEAIRERTLASHRKLRELGRWPGGRPAYGYKAVERTDGPGWKLVHDEYSATIMREIVDRTLQGEAGNAIAQDLQERGVLTPAEYRREMNGEKLRGGEWMGQVIRKMLKSRTLLGHVTHQQVTVINEKEGTPILKGEPLVSLEEWEELQAILGGSSRPKNHNRSTGASPMLDVALCGECGKPLHLRTQRTERKTKVHVHRYYYCPDKHGQALRAEIVERTVEEQFLDMFGDKPAMERVFREGENHEIEIKQAIQSIEALTPLLGAATSGTVLKSLTDQISAISNRVTYLESLPKAESGYILRATGKTYREEWESRDEQGRRSLLKRSGVTVTFLLQGKTRTTEGALQTEIKFPGDVEERLAS

SEQ ID NO: 11714 - protein, 498 aa, Unknown
  Description of Unknown: Integrase A282 sequence
  PF07508,SSF53041,PS51737,cd00338,PTHR30461:SF3,PF00239, PS51736,SM00857,G3DSA:3.40.50.1390,PTHR30461
MRVLGRLRISRATEESTSIERQREIVEQWASVNDHEIVGWAVDQDVSGSVDPFDAPALGPWLSEHRKHEWDILVAWKLDRLSRRAIPMNKLFGWMIDNEKTLVCVSENLDLGTWVGRMIANVIAGVAEGELEAIRERTTASHKKLRELGRWAGGPTYYGYVPKPRDGAGWELDIDPHAAGVLTEIIEKTIAGQSTESIVVELNERGELAPSDYHRKRNGKPIRGTKWSTSWLRSQLKSKTLLGHMTHNGETVYDDAGLPVQKGPALVDRDTYKQLQDALESRGINRTRRRTGASPLLGVAVCDVCEGPLYYRQTKNAKGTAMLRQYICKHGRYGNTQANGGEPYNIIQADLLEATVEELFLSKMGDLPRVERVFIPGEGHQHELETAERAVEDLTSLLGTITQESARKRLLAQLAAAHERLAHLEELPSSEPRWETRETGETYREAWEGATVEERRQILLKAGVTLKVQMKDRVPRVHPGVIVANWIEPHDIEKRLAS

SEQ ID NO: 11715 - protein, 498 aa, Unknown
  Description of Unknown: Integrase A283 sequence
  PF07508,SSF53041,PS51737,cd00338,PTHR30461:SF3, PF00239,PS51736,SM00857,G3DSA:3.40.50.1390,PTHR30461
MPTYDRSMRVIGRLRISRQTEESTSIERQRELIQNWADTHEHEIVGWAEDKDVSGSVDPFDTPGLGPWLKRDRLDDWDILVAWKLDRIARRAIAINRVFHLCQEHDKTLVCISDNIDLSTWVGRLIANVIAGVAEGELEAIRERTLASHRKLRELGRWPGGRPAYGYKAVENENGPGWKLVHDEYSATIMREIVDRTLQGEAGNAIAQDLQARGVLPPAEYRRQMNGEKLRGGEWMGQVIRKMLKSRTLLGHVTHQQVTVINEKEGTPILKGEPLVSLEEWEELQAMLGGSSRPKNHNRSTGASPMLDVALCGECGKPLHLRTQRTERKTKVHVHRYYYCPDKHGQAIRAEIVERTVEEQFLDMFGDKPAMERVFREGENHEIEIKQAIQSIEALTPLLGAATSGTVLKSLTDQISAISNRVTYLESLPKAESGYILRATGKTYREEWESRDEQGRRSLLKRSGVTVTFLLQGKTRTTEGALQTEIKFPGDVEERLAS

SEQ ID NO: 11716 - protein, 498 aa, Unknown
  Description of Unknown: Integrase A284 sequence
  PF07508,SSF53041,PS51737,cd00338,PTHR30461:SF3,PF00239, PS51736,SM00857,G3DSA:3.40.50.1390,PTHR30461
MPTYDRSMRVIGRLRISRQTEESTSIERQRELIQNWADTHDHEIVGWAEDKDVSGSVDPFDTPGLGPWLKRDRLDDWDILVAWKLDRIARRAIAINRVFHLCQEHDKTLVCISDNIDLSTWVGRLIANVIAGVAEGELEAIRERTLASHRKLRELGRWPGGRPAYGYKAVENENGPGWKLVHDEYSATIMREIVDRTLQGEAGNAIAQDLQARGVLPPAEYRRQMNGEKLRGGEWMGQVIRRMLKSRTLLGHVTHQKVTVIHETEGTPILKGEPLVTLEEFEELQAILGGSSRPKNHNRSTGASPMLDVALCGECGKPLHLRTQRTERKTKVHVHRYYYCPDKHGQALRAEIVERTVEDQFLDMFGDKPAMERVFREGENHEIEIKQSIQSIEALTPLLGAATSGTVLKSLTDQISAISNRVTYLESLPKAESGYILRPTGKTYREEWESRDEQGRRSLLKRSGVTVTFLLQGKTRTTEGALQTEIKFPGDVEERLAS

SEQ ID NO: 11717 - protein, 498 aa, Unknown
  Description of Unknown: Integrase A285 sequence
  PF07508,SSF53041,PS51737,cd00338,PTHR30461:SF3, PF00239,PS51736,SM00857,G3DSA:3.40.50.1390,PTHR30461
MPTYDRSMRVIGRLRISRQTEESTSIERQRELIQNWADTHEHEIVGWAEDKDVSGSVDPFDTPGLGPWLKRDRLDDWDILVAWKLDRIARRAIAINRVFHLCQEHDKTLVCISDNIDLSTWVGRLIANVIAGVAEGELEAIRERTLASHRKLRELGRWLGGRPAYGYKAVENENGPGWKLVHDEYSATIMREIVDRTLQGEAGNAIAQDLQARGVLPPAEYRRQMNGEKLRGGEWMGQVIRKMLKSRTLLGHVTHQQVTVINEKEGTPILKGEPLVSLEEWEELQAMLGGSSRPKNHNRSTGASPMLDVALCGECGKPLHLRTQRTERKTKVHVHRYYYCPDKHGQAIRAEIVERTVEEQFLDMFGDKPAMERVFREGENHEIEIKQAIQSIEALTPLLGAATSGTVLKSLTDQISAISNRVTYLESLPKAESGYILRATGKTYREEWESRDEQGRRSLLKRSGVTVTFLLQGKTRTTEGALQTEIKFPGDVEERLAS

SEQ ID NO: 11718 - protein, 498 aa, Unknown
  Description of Unknown: Integrase A286 sequence
  PF07508,SSF53041,PS51737,cd00338,PTHR30461:SF3,PF00239, PS51736,SM00857,G3DSA:3.40.50.1390,PTHR30461
MRVLGRLRISRATEESTSIERQRELVEQWAAAHEHEIVGWAVDQDVSGSVDPFDAPALGPWLSDHRKHEWDILCAWKLDRLSRRAIPMNKLFGWMIDNDKTLVCVSENLDLGTWVGRMIANVIAGVAEGELEAIRERTTASHKKLRELGRWAGGPTYYGYVPKPRDGAGWELDIDLHAAGVLREIIEKTIAGQSTESIVVELNERGELSPSDYHRKRSGKPIRGTKWNTSWLRTQLKSKTLLGHMTHNGETVYDDAGLPVQKGPALIDRDTYKQLQDALQSRGINRTKRRTGASPLLGVAVCDVCDGPLYYRQTKNQKGTAMLRQYICKHGRYGNTKANGGEPYNIIQADLLEATVEELFLSKMGDLPRVERVFIPGEGHQHELETAERAVEDLTSLLGTITQEGARKRLLAQLSAAHERLAHLEELPSSEPRWETRETGETYREAWESATTEERRQILLKAGVTLKVQMKGRVPRVHPGVIVANWIEPHDIEKRLAS

SEQ ID NO: 11719 - protein, 498 aa, Unknown
  Description of Unknown: Integrase A287 sequence
  PF07508,SSF53041,PS51737,cd00338,PTHR30461:SF3, PF00239,PS51736,SM00857,G3DSA:3.40.50.1390,PTHR30461
MPTYDRSMRVIGRLRISRQTEESTSIERQRELIQNWADTHDHEIVGWAEDKDVSGSVDPFDTPGLGPWLKRDRLDDWDILVAWKLDRIARRAIAINRVFHLCQEHDKTLVCISDNIDLSTWVGRLIANVIAGVAEGELEAIRERTLASHRKLRELGRWPGGRPAYGYKAVENENGPGWKLVHDEYSATIMREIVDRTLQGEAGNAIAQDLQARGVLPPAEYRRQMNGEKLRGGEWMGQVIRRMLKSRTLLGHVTHQKVTVIHETEGTPILKGEPLVTLEEFEELQAILGGSSRPKNHNRSTGASPMLDVALCGECGKPLHLRTQRTERKTKVHVHRYYYCPDKHGQALRAEIVERTVEEQFLDMFGDKPAMERVFREGENHEIEIKQAIQSIEALTPLLGAATSGTVLKSLTDQISAISNRVTYLESLPKAESGYILRATGKTYREEWESRDEQGRRSLLKRSGVTVTFLLQGKTRTTEGALQTEIKFPGDVEERLAS

SEQ ID NO: 11720 - protein, 498 aa, Unknown
  Description of Unknown: Integrase A288 sequence
  PF07508,SSF53041,PS51737,cd00338,PTHR30461:SF3,PF00239, PS51736,SM00857,G3DSA:3.40.50.1390,PTHR30461
MPTYDRSMRVIGRLRISRQTEESTSIERQRELIQNWADTHDHEIVGWAEDKDVSGSVDPFDTPGLGPWLKRDRLDDWDILVAWKLDRIARRAIAINRVFHLCQEHDKTLVCISDNIDLSTWVGRLIANVIAGVAEGELEAIRERTLASHRKLRELGRWPGGRPAYGYKAVERTDGPGWKLVHDEYSATIMREIVDRTLQGEAGNAIAQDLQARGVLPPAEYRRQMNGEKLRGGEWMGQVIRKMLKSRTLLGHVTHQQVTVINEKEGTPILKGEPLVSLEEWEELQAMLGGSSRPKNHNRSTGASPMLDVALCGECGKPLHLRTQRTERKTKVHVHRYYYCPDKHGQAIRAEIVERTVEEQFLDMFGDKPAMERVFREGENHEIEIKQAIQSIEALTPLLGAATSGTVLKSLTDQISAISNRVTYLESLPKAESGYILRATGKTYREEWESRDEQGRRSLLKRSGVTVTFLLQGKTRTTEGALQTEIKFPGDVEERLAS

SEQ ID NO: 11721 - protein, 498 aa, Unknown
  Description of Unknown: Integrase A289 sequence
  PF07508,SSF53041,PS51737,cd00338,PTHR30461:SF3, PF00239,PS51736,SM00857,G3DSA:3.40.50.1390,PTHR30461
MPTYDRSMRVIGRLRISRQSEESTSIDRQRELIQNWADTHDHEIVGWAEDIDVSGSVDPFEAPGLGPWLKRDRLGEWDILVAWKLDRIARRAIAINRVFHLCQEHDKTLVCISDNIDLSTWVGRLIANVIAGVAEGELEAIRERTLASHRKLRELGRWPGGRPAYGYKAVERTDGPGWKLVHDEYSATIMREIVDRTLQGEAGNAIAQDLQERGVLPPAEYRRQMNGEKLRGGEWMGQVIRKMLKSRTLLGHVTHQQVTVINEKEGTPILKGEPLVSLEEWEELQAMLGGSSRPKNHNRSTGASPMLDVALCGECGKPLHLRTQRTERKTKVHVHRYYYCPDKHGQALRAEIVERTVEEQFLDMFGDKPAMERVFREGENHEIEIKQSIQSIEALTPLLGAATSGTVLKSLTDQISAISNRVTYLESLPKAESGYILRPTGKTYREEWESRDEQGRRSLLKRSGVTVTFLLQGKTRTTEGALQTEIKFPGDVEERLAS

SEQ ID NO: 11722 - protein, 498 aa, Unknown
  Description of Unknown: Integrase A290 sequence
  PF07508,SSF53041,PS51737,cd00338,PTHR30461:SF3,PF00239, PS51736,SM00857,G3DSA:3.40.50.1390,PTHR30461
MRVLGRLRISRATEESTSIERQRELVEQWAAAHEHEIVGWAVDQDVSGSVDPFDAPALGPWLSDHRKHEWDILCAWKLDRLSRRAIPMNKLFGWMIDNDKTLVCVSENLDLGTWVGRMIANVIAGVAEGELEAIRERTTASHKKLRELGRWAGGPTYYGYVPKPRDGAGWELDIDPHAAGVLREIIEKSIAGQSTESIVVELNERGELSPSDYHRKRGGKPIRGTKWNTSWLRTQLKSKTLLGHMTHNGETVYDDAGLPVQKGPALIDRDTYKQLQDALQSRGINRTKRRTGASPLLGVAVCDVCDGPLYYRQTKNQKGTAMLRQYICKHGRYGNTKANGGEPYNIIQADLLEATVEELFLSKMGDLPRVERVFIPGEGHQHELETAERAVEDLTSLLGTITQEGARKRLLAQLSAAHERLAHLEELPSSEPRWETRETGETYREAWESATTEERRQILLKAGVTLKVQMKGRVPRVHPGVIVANWIEPHDIEKRLAS

SEQ ID NO: 11723 - protein, 497 aa, Unknown
  Description of Unknown: Integrase A291 sequence
  PF07508,SSF53041,PF13408,PS51737,cd00338, PTHR30461:SF3,PF00239,PS51736,SM00857,G3DSA:3.40.50.1390, PTHR30461
MRVLGRIRLSRMMEESTSVERQREFIETWARQNDHEIVGWAEDLDVSGSVDPFDTQGLGPWLKEPKLREWDILCAWKLDRLARRAVPLHKLFGMCQDEQKVLVCVSDNIDLSTWVGRLVASVIAGVAEGELEAIRERTLSSQRKLRELGRWAGGKPAYGFKAQEREDSAGYELVHDEHAANVMLGVIEKVLAGQSTESVARELNEAGELAPSDYIRARAGRKTRGTKWSNAQIRQLLKSKTLLGHVTHNGATVRDDDGIPIRKGPALISEEKFDQLQAALDARSFKVTNRSAKASPLLGVAICGLCGRPMHIRQHRRNGNLYRYYRCDSGSHSGGGGAAPEHPSNIIKADDLEALVEEHFLDEVGRFNVQEKVYVPASDHRAELDEAVRAVEELTQLLGTMTSATMKSRLMGQLTALDERIARLENLPSEEARWDYRATDQTYAEAWEEADTEGRRQLLIRSGITAEVKVTGGDRGVRGVLEFHLKVPEDVRERLSA

SEQ ID NO: 11724 - protein, 497 aa, Unknown
  Description of Unknown: Integrase A292 sequence
  PF07508,SSF53041,PF13408,PS51737,cd00338,PTHR30461:SF3,PF00239, PS51736,SM00857,G3DSA:3.40.50.1390,PTHR30461
MRVLGRIRLSRMMEESTSVERQREFIETWARQNDHEIVGWAEDLDVSGSVDPFDTQGLGPWLKEPKLREWDILCAWKLDRLARRAVPLHKLFGMCQDEQKVLVCVSDNIDLSTWVGRLVASVIAGVAEGELEAIRERTLSSQRKLRELGRWAGGKPAYGFKAQEREDSAGYELVHDEHAANVMLGVIEKVLAGQSTESVARELNEAGELAPSDYIRARAGRKTRGTKWSNAQIRQLLKSKTLLGHVTHNGSTVRDDDGIPIRKGPALISEEKFDQLQAALDARSFKVTNRSAKASPLLGVAICGLCGRPMHIRQHRRNGNLYRYYRCDSGSHSGGGGAAPEHPSNIIKADDLETLVEEHFLDEVGRFNVQEKVYVPASDHRAELDEAVRAVEELTQLLGTMTSATMKSRLMGQLTALDERIARLENLPSEEARWDYRATDQTYTEAWEEADTEGRRQLLIRSGITAEVKVTGGDRGVRGVLEFHLKVPEDVRERLSA

SEQ ID NO: 11725 - protein, 497 aa, Unknown
  Description of Unknown: Integrase A293 sequence
  PF07508,SSF53041,PF13408,PS51737,cd00338, PTHR30461:SF3,PF00239,PS51736,SM00857,G3DSA:3.40.50.1390, PTHR30461
MRVLGRIRLSRMMEESTSVERQREFIETWARQNDHEIVGWAEDLDVSGSVDPFDTQGLGPWLKEPKLREWDILCAWKLDRLARRAVPLHKLFGMCQDEQKVLVCVSDNIDLSTWVGRLVASVIAGVAEGELEAIRERTLSSQRKLRELGRWAGGKPAYGFKAQEREGSAGYELVHDEHAANVMLGVIEKVLAGQSTESVARELNEAGELAPSDYIRARAGRKTRGTKWSNAQIRQLLKSKTLLGHVTHNGSTVRDDDGIPIRKGPALISEEKFDQLQAALDARSFKVTNRSAKASPLLGVAICGLCGRPMHIRQHRRNGNLYRYYRCDSGSHSGGGGAAPEHPSNIIKADDLEALVEEHFLDEVGGFNVQEKVYVPASDHRAELDEAVRAVEELTQLLGTMTSATMKSRLMSQLTALDERIARLENLPSEEARWDYRATDQTYAEAWEEADTEGRRQLLIRSGITAEVKVTGGDRGVRGVLEFHLKVPEDVRERLSA

SEQ ID NO: 11726 - protein, 497 aa, Unknown
  Description of Unknown: Integrase A294 sequence
  PF07508,SSF53041,PF13408,PS51737,cd00338,PTHR30461:SF3,PF00239, PS51736,SM00857,G3DSA:3.40.50.1390,PTHR30461
MRVLGRIRLSRMMEESTSVERQREFIETWARQNDHEIVGWAEDLDVSGSVDPFDTQGLGPWLKEPKLREWDILCAWKLDRLARRAVPLHKLFGMCQDEQKVLVCVSDNIDLSTWVGRLVASVIAGVAEGELEAIRERTLSSQRKLRELGRWAGGKPAYGFKAQEREDSAGYELVHDEHAANVMLGVIEKVLAGQSTESVARELNEAGELAPSDYIRARAGRKTRGTKWSNAQIRQLLKSKTLLGHVTHNGSTVRDDDGIPIRKGPALISEEKFDQLQAALDARSFKVTNRSAKASPLLGVAICGLCGRPMHIRQHRRNGNLYRYYRCDSGSHSGGGGAAPEHPSNIIKADDLETLVEEHFLDEVGRFNVQEKVYVPASDHRAELDEAVRAVEELTQLLGTMTSATMKSRLMGQLTALDERIARLENLPSEEARWDYRATDQTYAEAWEEADTEGRRQLLIRSGITAEVKVTGGGRGVRGVLEFHLKVPEDVRERLSA

SEQ ID NO: 11727 - protein, 497 aa, Unknown
  Description of Unknown: Integrase A295 sequence
  PF07508,SSF53041,PF13408,PS51737,cd00338, PTHR30461:SF3,PF00239,PS51736,SM00857,G3DSA:3.40.50.1390, PTHR30461
MRVLGRIRLSRMMEESTSVERQREFIETWARQNDHEIVGWAEDLDVSGSVDPFDTQGLGPWLKEPKLREWDILCAWKLDRLARRAVPLHKLFGMCQDEQKVLVCVSDNIDLSTWVGRLVASVIAGVAEGELEAIRERTLSSQRKLRELGRWAGGKPAYGFKAQEREDSAGYELVHDEHAANVMLGVIEKVLAGQSTESVARELNEAGELAPSDYIRARAGRKTRGTKWSNAQIRQLLKSKTLLGHVTHNGSTVRDDDGIPIRKGPALISEEKFDQLQAALDARSFKVTNRSAKASPLLGVAICGLCGRPMHIRQHRRNGNLYRYYRCDSGSHSGGGGAAPEHPSNIIKADDLETLVEEHFLDEVGRFNVQEKVYVPASDHRAELDEAVRAVEELTQLLGTMTSATMKSRLMGQLTALDERIARLENLPSEEARWDYRATDQTYAEAWEEADTEGRRQLLIRSGITAEVKVTGGDRGVRGVLEFHLKVPEDVRERLSA

SEQ ID NO: 11728 - protein, 497 aa, Unknown
  Description of Unknown: Integrase A296 sequence
  PF07508,SSF53041,PF13408,PS51737,cd00338,PTHR30461:SF3,PF00239, PS51736,SM00857,G3DSA:3.40.50.1390,PTHR30461
MRVLGRIRLSRMMEESTSVERQREFIETWARQNDHEIVGWAEDLDVSGSVDPFDTQGLGPWLKEPKLREWDILCAWKLDRLARRAVPLHKLFGMCQDEQKVLVCVSDNIDLSTWVGRLVASVIAGVAEGELEAIRERTLSSQRKLRELGRWAGGKPAYGFKAQEREGSAGYELVHDEHAANVMLGVIEKVLAGQSTESVARELNEAGELAPSDYIRARAGRKTRGTKWSNAQIRQLLKSKTLLGHVTHNGSTVRDDDGIPIRKGPALISEEKFDQLQAALDARSFKVTNRSAKASPLLGVAICGLCGRPMHIRQHRRNGNLYRYYRCDSGSHSGGGGAAPEHPSNIIKADDLEALVEEHFLDEVGGFNVQEKVYVPASDHRAELDEAVRAVEELTQLLGTMTSATMKSRLMGQLTALDERIARLENLPSEGARWDYRATDQTYAEAWEEADTEGRRQLLIRSGITAEVKVTGGDRGVRGVLEFHLKVPEDVRERLSA

SEQ ID NO: 11729 - protein, 497 aa, Unknown
  Description of Unknown: Integrase A297 sequence
  PF07508,SSF53041,PF13408,PS51737,cd00338, PTHR30461:SF3,PF00239,PS51736,SM00857,G3DSA:3.40.50.1390, PTHR30461
MRVLGRIRLSRMMEESTSVERQREFIETWAQQNDHEIVGWAEDLDVSGSVDPFDTQGLGPWLKEPKLREWDILCAWKLDRLARRAVPLHKLFGMCQDEQKVLVCVSDNIDLSTWVGRLVASVIAGVAEGELEAIRERTLSSQRKLRELGRWAGGKPAYGFKAQEREDSAGYELVHDEHAANVMLGVIEKVLAGQSTESIARELNDAGELAPSDYIRARAGRKTRGTKWSNAQIRQLLKSKTLLGHVTHNGSTVRDDDGIPIRKGPALISDEKFDQLQAALDARSFKVTNRSAKASPLLGVAICGLCGRPMHIRQHRRNGNLYRYYRCDSGSHSGGGGAAPEHPSNIIKADDLEALVEEHFLDEVGGFNVQEKVYVPASDHRAELDEAVRAVEELTQLLGTMTSATMKSRLMGQLTALDERIARLENLPSEEARWDYRATDQTYAEAWEEADTEGRRQLLIRSGITAEVKVTGGDRGVRGVLEFHLKVPEDVRERLSA

SEQ ID NO: 11730 - protein, 497 aa, Unknown
  Description of Unknown: Integrase A298 sequence
  PF07508,SSF53041,PF13408,PS51737,cd00338,PTHR30461:SF3,PF00239, PS51736,SM00857,G3DSA:3.40.50.1390,PTHR30461
MRVLGRIRLSRMMEESTSVERQREFIETWARQNDHEIVGWAEDLDVSGSVDPFDTQGLGPWLKEPKLREWDILCAWKLDRLARRAVPLHKLFGMCQDEQKVLVCVSDNIDLSTWVGRLVASVIAGVAEGELEAIRERTLSSQRKLRELGRWAGGKPAYGFKAQEREGSAGYELVHDEHAANVMLGVIEKVLAGQSTESVARELNEAGELAPSDYIRARAGRKTRGTKWSNAQIRQLLKSKTLLGHVTHNGSTVRDDDGIPIRKGPALISEEKFDQLQAALDARSFKVTNRSAKASPLLGVAICGLCGRPMHIRQHRRNGNLYRYYRCDSGSHSGGGGAAPEHPSNIIKADDLEALVEEHFLDEVGGFNVQEKVYVPASDHRAELDEAVRAVEELTQLLGTMTSATMKSRLMGQLTALDERIARLENLPSEEARWDYRATDQTYAEAWEEADTEGRRQLLIRSGITAEVKVTGGDRGVRGVLEFHLKVPEDVRERLSA

SEQ ID NO: 11731 - protein, 497 aa, Unknown
  Description of Unknown: Integrase A299 sequence
  PF07508,SSF53041,PF13408,PS51737,cd00338, PTHR30461:SF3,PF00239,PS51736,SM00857,G3DSA:3.40.50.1390, PTHR30461
MRVLGRIRLSRMMEESTSVERQREFIETWARQNDHEIVGWAEDLDVSGSVDPFDTQGLGPWLKEPKLREWDILCAWKLDRLARRAVPLHKLFGMCQDEQKVLVCVSDNIDLSTWVGRLVASVIAGVAEGELEAIRERTLSSQRKLRELGRWAGGKPAYGFKAQEREDSAGYELVHDEHAANVMLGVIEKVLAGQSTESVARELNEAGELAPSDYIRARAGRKTRGTKWSNAQIRQLLKSKTLLGHVTHNGATVRDDDGIPIRKGPALISEEKFDQLQAALDARSFKVTNRSAKASPLLGVAICGLCGRPMHIRQHRRNGNLYRYYRCDSGSHSGGGGVAPEHPSNIIKADDLETLVEEHFLDEVGRFNVQEKVYVPASDHRAELDEAVRAVEELTQLLGTMTSATMKSRLMGQLTALDERIARLENLPSEEARWDYRATSQTYAEAWEEADTEGRRQLLIRSGITAEVKVTGGDRGVRGVLEFHLKVPEDVRERLSA

SEQ ID NO: 11732 - protein, 496 aa, Unknown
  Description of Unknown: Integrase A300 sequence
  PF07508,SSF53041,PS51737,cd00338,PF00239,SM00857, G3DSA:3.40.50.1390,PTHR30461
MAKQLRALVGARVSVVQGPQKVSHLAQQETGEKWVRERGHLIVGTFRDLDVSATVSPFERPDLGPWLSPEQEDEWDVLVFSKIDRMFRSTRDCVKFAEWAEQRKKILVFAEDSMTLNYRDQSDSLEKMMSELFIYIGSFFAQLELNRFKSRAKDSHRVLRGMDRWASGVPPLGFQVVDHPSGKGKGLDTDPVGKSLLYEMAGKLLEGWSFIRIAAWLNELGALTNMDRARQAKGHAPKSKPWNVSNVIDILTSPRTQGLKMTGRGKHAKTVLNAEGEPIRMAPATFDADTWKKIQEAAAKRQGNPRSRTHSANPMLGVGFCGVCGASLAQQFSRPRGGDKVYRSYRCGRTPLNCNGVSIRADDADTLMEETFMAKWGDERVTNKVFVPGEDHSEELETVVATIERLRRESDAGLIVSADDERVYLERMKSLIDRRTALEATPRRVAGWAIEELPHTYRDVWETEDHRQLLIDKGIRFELKSSKPVMSFAMFESSTS

SEQ ID NO: 11733 - protein, 495 aa, Unknown
  Description of Unknown: Integrase A301 sequence
  PF07508,SSF53041,PS51737,cd00338,PTHR30461:SF3, PF00239,PS51736,SM00857,G3DSA:3.40.50.1390,PTHR30461
MIRLSRVTDATTSPERQLESCQQLCAQRGWDVVGVAEDLDVSGAVDPFDRKRRPNLARWLAFEEQPFDVIVAYRVDRLTRSIRHLQQLVHWAEDHKKLIVSATEAHFDTTTPFAAVVIALMGTVAQMELEAIKERNRSAAHFNIRAGKYRGSLPPWGYLPTRVDGEWRLVPDPVQRERILEVYHRVVDNHEPLHLVAHDLNQRGILSPKDYFAKLQGREPKGREWSATALKRSLISEAMLGYTTLNGKTVRDDDGAPLVRAEPILTREQLEALRAELVKTDRTKPAVSTPSLLLRVLFCAVCGEPAYKFAGGGRKHPRYRCRSMGFPKHCGNGTVAMAEWDAFCEEQVLDLLGDAERLEKVWVAGSDSAVELAEVNAELVDLTSLIGSPAYRVGSPQREALDARIAALAARQEELEGLEARPSGWEWRETGQRFGDWWREQDIAAKNTWLRSMNVRLTFDVRGGLTRTIDFGDLQEYEQHLRLGSVVERLHTGMS

SEQ ID NO: 11734 - protein, 495 aa, Unknown
  Description of Unknown: Integrase A302 sequence
  PF07508,SSF53041,PS51737,cd00338,PTHR30461:SF3,PF00239, PS51736,SM00857,G3DSA:3.40.50.1390,PTHR30461
MIRLSRVTDATTSPERQLESCQQLCAQRGWDVVGVAEDLDVSGAVDPFDRKRRPNLARWLAFEEQPFDVIVAYRVDRLTRSIRHLQQLVHWAEDHKKLVVSATEAHFDTTTPFAAVVIALMGTVAQMELEAIKERNRSAAHFNIRAGKYRGSLPPWGYLPTRVDGEWRLVPDPVQRERILEVYHRVVDSHEPLHLVAHDLNRRGVLSPKDYFAKLQGREPQGREWSATALKRSLISEAMLGYATLNGKTVRDDDGAPLVRSEPILTREQLEALRAELVKTDRTKPAVSTPSLLLRVLFCAVCGEPAYKFAGGQRKNPRYRCRSMGFPKHCGNGTVAMAEWDAFCEEQVLDLLGDAERLEKVWVAGSDSAVELAEVNAELVDLTSLIGSPAYRAGSPQREALDARIAALAARQEELEGLEARPSGWEWRETGQRFGDWWREQDTSGKNTWLRSMNVRLTFDVRGGLTRTIDFGDLQEYEQHLRLGSVVERLHDGMS

SEQ ID NO: 11735 - protein, 495 aa, Unknown
  Description of Unknown: Integrase A303 sequence
  PF07508,SSF53041,PS51737,cd00338,PTHR30461:SF3, PF00239,PS51736,SM00857,G3DSA:3.40.50.1390,PTHR30461
MIRLSRVTDATTSPERQLESCQQLCAQRGWDVVGVAEDLDVSGAVDPFDRKRRPNLARWLSFEEQPFDVIVAYRVDRLTRSIRHLQQLVHWAEDHKKLIVSATEAHFDTTSPFAAVVIALMGTVAQMELEAIKERNRSAAHFNIRAGKYRGSLPPWGYLPTRVDGEWRLVPDPVQRERILEVYHRVVDNHEPLHQIAHDLNQRGILSPKDYFAKLQGREPKGREWSATALKRSLISEAMLGYTTLNGKTVRDDDGAPLVRAEPILTREQLEALRAELVKTDRTKPAVSTPSLLLRVLFCAVCGEPAYKFTGGGRKNARYRCRSWGWAQRCGNGTVAMAEWDAFCEEQVLDLLGDSERLEKVWVAGSDSAVELAEVNAELVDLTSLIGSPAYRAGSPQREALDARIAALAARQEELEGLEARPSGWEWRETGQRFGDWWRDQDTAGKNTWLRSMNVRLTFDVRGGLTRTIDFGDLQEYEQHLRLGSVVEQLHTGMS

SEQ ID NO: 11736 - protein, 495 aa, Unknown
  Description of Unknown: Integrase A304 sequence
  PF07508,G3DSA:1.10.10.2600,SSF53041,PS51737,cd00338,PF00239, PS51736,SM00857,G3DSA:3.40.50.1390,PTHR30461
MTTRAAIYLRISEDKTGEEKGVDRQLQDALAVIRERGWVQAGDPYQDNSISASKRNVRRPAYDRMVADYQAGKFDAIVCYDLDRLTRQPRQLEDWIDAAQETGLAIVTTNGEADLSTDGGRMFARVKAAVARSEIERKGARHRRANAQRVEEGIPHGGRRRYGYEPGGMVPRPEEAAVVRRCFEAVAAGQSIRSIVTDLRREGVPGGTGSGWGNSRLRYMLLNPSYAGLLHVGEEALPSEKVQPIVSRELYEEVRAILTDDQRRTSPGPGRKHLASGFVACGVEDCPNTLRVHSGFYRCQIKTLNSNDRYIDPTGAAHPSIKVDLLDARLRKEMALALLTTTPAQLRGDDAPSVAPLIAQLDRLETAVAATMADRDDGLVSPQAARARLLTLRDERLEVEAALDAARASRTSSVTLSEMARDLILSSGVPHGPTRVIREVLPRVVEAIEAMDIDRQRDALQQLLAVQVQPGRGTDRIKVWHLVAEHLNPDLIPDV

SEQ ID NO: 11737 - protein, 495 aa, Unknown
  Description of Unknown: Integrase A305 sequence
  PF07508,SSF53041,PS51737,cd00338,PTHR30461:SF3, PF00239,PS51736,SM00857,G3DSA:3.40.50.1390,PTHR30461
MRVIGRLRISRQSEESTSIDRQRELIQNWADTHDHEIVGWAEDIDVSGSVDPFEAPGLGPWLKRDRLGEWDILVAWKLDRIARRAIAINRVFHLCQEHDKTLVCISDNIDLSTWVGRLIANVIAGVAEGELEAIRERTLASHRKLRELGRWPGGRPAYGYKAVERTDGPGWKLVHDEYSATIMREIVDRTLQGEAGNAIAQDLQERGVLTPAEYRREMNGEKLRGGEWMGQVIRKMLKSRTLLGHVTHQQVTVINEKEGTPILKGEPLVSLEEWEELQAMLGGSSRPKNHNRTTAASPMLDVALCAECEKPLHLRTQRTQRKEKLHVHRYYYCPDKHGSAIRGEDVENAVENQFLEDFGDLPAMERVFREGENHEIEIKQAIQSIEALTPLLGAATSGTVLKSLTDQISALSNRVTYLESLPKAESGYILRPTGKTYREEWEERDEQGRRALLRRSGITATFMLTGKGRGGRNPAPGALQFNLRVPADAQERLAS

SEQ ID NO: 11738 - protein, 495 aa, Unknown
  Description of Unknown: Integrase A306 sequence
  PF07508,SSF53041,PS51737,cd00338,PTHR30461:SF3,PF00239, PS51736,SM00857,G3DSA:3.40.50.1390,PTHR30461
MIRLSRVTDATTSPERQLESCRQLCAQRGWDVVGVAEDLDVSGAVDPFDRKRRPNLARWLAFEEQPFDVIVAYRVDRLTRSIRHLQQLVHWAEDHKKLVVSATEAHFDTTTPFAAVVIALMGTVAQMELEAIKERNRSAAHFNIRAGKYRGSLPPWGYLPTRVDGEWRLVPDPVQRERILEVYHRVVDNHEPLHLVAHDLNRRGVLSPKDYFAKLQGREPQGREWSATALKRSMISEAMLGYATLNGKTVRDDDGAPLVRAEPILTREQLEALRAELVKTDRTKPAVATPSLLLRVLFCAVCGEPAYKFAGGGRKHPRYRCRSMGFPKHCGNGTVAMAEWDAFCEEQVLDLLGDSERLEKVWVAGSDSAVELAEVNAELVDLTSLIGSPAYRVGSPQREALDARIAALAARQEELEGLEARPSGWEWRETGQRFGDWWREQDTSGKNTWLRSMNVRLTFDVRGGLTRTIDFGDLQEYEQHLRLGSVVERLHTGMS

SEQ ID NO: 11739 - protein, 494 aa, Unknown
  Description of Unknown: Integrase A307 sequence
  PF07508,SSF53041,PS51737,cd00338,PTHR30461:SF3, PF00239,PS51736,SM00857,G3DSA:3.40.50.1390,PTHR30461
MIRLSRVTDATTSPERQLESCQQLCAQRGWDVVGVAEDLDVSGAVDPFDRKRRPNLARWLAFEEQPFDVIVAYRVDRLTRSIRHLQQLVHWAEDHKKLVVSATEAHFDTTTPFAAVVIALMGTVAQMELEAIKERNRSAAHFNIRAGKYRGSLPPWGYLPTRVDGEWRLVPDPVQRERILEVYHRVVDNHEPLHLVAHDLNRRGVLSPKDYFAKLQGREPQGREWSATALKRSLISEAMLGYATLNGKTVRDDDGAPLVRAEPILTREQLEALRAELVKTDRAKPAVSTPSLLLRVLFCAVCGEPAYKFDAGRKIPRYRCRSFGFAQRCGNGTVPIAEWDAFCEEQVLDLLGDSERLEKVWVAGSDSAVELAEVNAELVDLTSLIGSPAYRAGSPQREALDARIAALAARQEELEGLEARPSGWEWRETGQRFGDWWREQDTSAKNTWLRSMNVRLTFDVRGGLTRTIDFGDLQEYEQHLRLGSVVEQLHAGMS

SEQ ID NO: 11740 - protein, 493 aa, Unknown
  Description of Unknown: Integrase A308 sequence
  PF07508,SSF53041,PF13408,PS51737,cd00338,PTHR30461:SF3, PF00239,PS51736,SM00857,G3DSA:3.40.50.1390,PTHR30461
MRVLGRIRLSRVMEESTSVERQREIIETWARQNDHEIIGWAEDLDVSGSVDPFETPALGPWLTDHRKHEWDILVAWKLDRLSRRAIPMNKLFGWVMENDKTLVCVSENLDLSTWIGRMIANVIAGVAEGELEAIRERTKGSQKKLRELGRWGGGKPYYGYRAQEREDAAGWELVPDEHASAVLLSIIEKVLEGQSTESIARELNERGELSPSDYLRHRAGKPTRGGKWSNAHIRQQLRSKTLLGYSTHNGETIRDERGIAVRKGPALVSQDVFDRLQAALDSRSFKVTNRSAKASPLLGVLVCRVCERPMHLRQHHNKKRGKTYRYYQCVGGVEKTHPANLTNADQMEQLVEESFLAELGDRKIQERVYIPAESHRAELDEAVRAVEEITPLLGTVTSDTMRKRLLDQLSALDARISELEKMPESEARWEYREGDETYAEAWNRGDAEARRQLLLKSGITAAAEMKGREARVNPGVLHFDLRIPEDILERMAG

SEQ ID NO: 11741 - protein, 493 aa, Unknown
  Description of Unknown: Integrase A309 sequence
  PF07508,SSF53041,PF13408,PS51737,cd00338, PTHR30461:SF3,PF00239,PS51736,SM00857,G3DSA:3.40.50.1390, PTHR30461
MRVLGRIRLSRVMEESTSVERQREIIETWARQNDHEIIGWAEDLDVSGSVDPFETPALGPWLTDHRKHEWDILVAWKLDRLSRRAIPMNKLFGWVMENDKTLVCVSENLDLSTWIGRMIANVIAGVAEGELEAIRERTKGSQKKLRELGRWGGGKPYYGYRAQEREDAAGWELVPDEHASAVLLSIIEKVLEGQSTESIARELNERGELSPSDYLRHRAGKPTRGGKWSNAHIRQQLRSKTLLGYSTHNGETIRDERGIAVRKGPALVSQDVFDRLQAALDSRSFKVTNRSAKASPLLGVLICRVCERPMHLRQHHNKKRGKTYRYYQCVGGVEKTHPANLTNADQMEQLVEESFLAELGDRKIQERVYIPAESHRAELDEAVRAVEEITPLLGTVTSDTMRKRLLDQLSALDARISELEKLPESEARWEYREGDETYAEAWNRGDAEARRQLLLKSGITAAAEMKGREARVNPGVLHFDLRIPEDILERMSA

SEQ ID NO: 11742 - protein, 493 aa, Unknown
  Description of Unknown: Integrase A310 sequence
  PF07508,SSF53041,PF13408,PS51737,cd00338,PTHR30461:SF3,PF00239, PS51736,SM00857,G3DSA:3.40.50.1390,PTHR30461
MRVLGRIRLSRVMEESTSVERQREIIETWARQNDHEIIGWAEDLDVSGSVDPFETPALGPWLTDHRKHEWDILVAWKLDRLSRRAIPMNKLFGWVMENDKTLVCVSENLDLSTWIGRMIANVIAGVAEGELEAIRERTKGSQKKLRELGRWGGGKPYYGYRAQEREDAAGWELVPDEHASKVLLSIIEKVLEGQSTESIARELNERGELSPSDYLRHRAGKPTRGGKWSNAHIRQQLRSKTLLGYSTHNGETIRDERGIAVRKGPALVSQDVFDRLQAALDSRSFKVTNRSAKASPLLGVLVCRVCERPMHLRQHHNKKRGKTYRYYQCVGGVEKTHPANLTNADQMEQLVEESFLAELGDRKIQERVYIPAESHRAELDEAVRAVEEITPLLGTVTSDTMRKRLLDQLSALDARISELEKLPESEARWEYREGDETYAEAWNRGDAEARRQLLLKSGITAAAEMKGREARVNPGVLHFDLRIPEDILERMSA

SEQ ID NO: 11743 - protein, 493 aa, Unknown
  Description of Unknown: Integrase A311 sequence
  PF07508,SSF53041,PF13408,PS51737,cd00338, PTHR30461:SF3,PF00239,PS51736,SM00857,G3DSA:3.40.50.1390, PTHR30461
MRVLGRIRLSRVMEESTSVERQREIIETWARQNDHEIIGWAEDLDVSGSVDPFETPALGPWLTDHRKHEWDILVAWKLDRLSRRAIPMNKLFGWVMENDKTLVCVSENLDLSTWIGRMIANVIAGVAEGELEAIRERTKGSQKKLRELGRWGGGKPYYGYRAQEREDAAGWELVPDEHASAVLLSIIEKVLEGQSTESIARELNERGELSPSDYLRHRAGKPTRGGKWSNAHIRQQLRSKTLLGYSTHNGETIRDERGIAVRKGPALVSQDVFDRLQVALDSRSFKVTNRSAKASPLLGVLVCRVCERPMHLRQHHNKKRGKTYRYYQCVGGVEKTHPANLTNADQMEQLVEESFLAELGDRKIQERVYIPAESHRAELDEAVRAVEEITPLLGTVTSDTMRKRLLDQLSALDARISELEKMPESEARWEYREGDETYAEAWNRGDAEARRQLLLKSGITAAAEMKGREARVNPGVLHFDLRIPEDILERMSA

SEQ ID NO: 11744 - protein, 493 aa, Unknown
  Description of Unknown: Integrase A312 sequence
  PF07508,SSF53041,PF13408,PS51737,cd00338,PTHR30461:SF3,PF00239 ,PS51736,SM00857,G3DSA:3.40.50.1390,PTHR30461
MRVLGRIRLSRVMEESTSVERQREIIETWARQNDHEIIGWAEDLDVSGSVDPFETPALGPWLTDHRKHEWDILVAWKLDRLSRRAIPMNKLFGWVMENDKTLVCVSENLDLSTWIGRMIANVIAGVAEGELEAIRERTKGSQKKLRELGRWGGGKPYYGYRAQEREDAAGWELVPDEHASAVLLSIIEKVLEGQSTESIARELNERGELSPSDYLRHRAGKPTRGGKWSNAHIRQQLRSKTLLGYSTHNGETIRDERGIAVRKGPALVSQDVFDRLQAALDSRSFKVTNRSAKASPLLGVLVCRVCERPMHLRQHHNKKRGKTYRYYQCVGGVEKTHPANLTNADQMEQLVEESFLAELGDRKIQERVYVPAESHRAELDEAVRAVEEITPLLGTVTSDTMRKRLLDQLSALDARISELEKLPESEARWEYREGDETYAEAWNRGDAEARRQLLLKSGITAAAEMKGREARVNPGVLHFDLRIPEDILERMAG

SEQ ID NO: 11745 - protein, 493 aa, Unknown
  Description of Unknown: Integrase A313 sequence
  PF07508,SSF53041,PF13408,PS51737,cd00338, PTHR30461:SF3,PF00239,PS51736,SM00857,G3DSA:3.40.50.1390, PTHR30461
MRVLGRIRLSRVMEESTSVERQREIIETWARQNDHEIIGWAEDLDVSGSVDPFETPALGPWLTDHRKHEWDILVAWKLDRLSRRAIPMNKLFGWVMENDKTLVCVSENLDLSTWIGRMIANVIAGVAEGELEAIRERTKGSQKKLRELGRWGGGKPYYGYRAQEREDAAGWELVPDEHASAVLLSIIEKVLEGQSTESIARELNERGELSPSDYLRHRAGKPTRGGKWSNAHIRQQLRSKTLLGYSTHNGETIRDERGIAVRKGPALVSQDVFDRLQVALDSRSFKVTNRSAKASPLLGVLICRVCDRPMHLRQHHNKKRGKTYRYYQCVGGVEKTHPANLTNADQMEQLVEESFLAELGDRKIQERVYIPAESHRAELDEAVRAVEEITPLLGTVTSDTMRKRLLDQLSALDARISELEKMPESEARWEYREGDETYAEAWNRGDAEARRQLLLKSGITAAAEMKGREARVNPGVLHFDLRIPEDILERMSA

SEQ ID NO: 11746 - protein, 493 aa, Unknown
  Description of Unknown: Integrase A314 sequence
  PF07508,SSF53041,PF13408,PS51737,cd00338,PTHR30461:SF3,PF00239 ,PS51736,SM00857,G3DSA:3.40.50.1390,PTHR30461
MRVLGRIRLSRVMEESTSVERQREIIETWARQNDHEIIGWAEDLDVSGSVDPFETPALGPWLTDHRKHEWDILVAWKLDRLSRRAIPMNKLFGWVMENDKTLVCVSENLDLSTWIGRMIANVIAGVAEGELEAIRERTKGSQKKLRELGRWGGGKPYYGYRAQEREDAAGWELVPDEHASAVLLSIIEKVLEGQSTESIARELNERGELSPSDYLRHRAGKPTRGGKWSNAHIRQQLRSKTLLGYSTHNGETIRDERGIAVRKGPALVSQDVFDRLQVALDSRSFKVTNRSAKASPLLGVLVCRVCDRPMHLRQHHNKKRGKTYRYYQCVGGVEKTHPANLTNADQMEQLVEESFLAELGDRKIQERVYIPAESHRAELDEAVRAVEEITPLLGTVTSDTMRKRLLDQLSALDARISELEKLPESEARWEYREGDETYAEAWNRGDAEARRQLLLKSGITAAAEMKGREARVNPGVLHFDLRIPEDILERMSA

SEQ ID NO: 11747 - protein, 492 aa, Unknown
  Description of Unknown: Integrase A315 sequence
  PF07508,SSF53041,PF13408,PS51737,cd00338, PTHR30461:SF3,PF00239,PS51736,SM00857,G3DSA:3.40.50.1390, PTHR30461
MRVLGRVRLSRFNEESTSVERQREIIENWAQQNGHEVIGFAEDIDVSRSVDPFETPGLGQWLNDKTKIDQWDIVATWKLDRLATGSIYLNKTMGWCFEHEKVIVSVTENFDLSTWVGRMIANVIAGVAEGELEAIKERTQASRKKLVSIGRWTGGRPTFGYRKVEIESGGYALEPDPESSKTLHWIVDEVLNGRSAKSLVDDMNERGVYTPADFVRYRNGKETKGAKWSVTTLLSLLRSRTLLGHIMHNGQVVLDGVGEPVLAGPPLIDVDTFNRVQATLEARSRAQKVERTDASPLLGVLVCAECGDNMYHQRQVDKRYDRLYRYYKCLNRCGQQIHAEMAEQMVENQFLDDLGDAEALTRVYIPAENHQIELEEAQRLLDGLYPLLGTVTSAHAQKRLTEQISALDSKIAQLEMLPESPARTELRPTGVTYRKLWESLDSDGRRELMVKAGIQARMKVADRPQGARATGQTGAVTFHFHIPEDLHERIAS

SEQ ID NO: 11748 - protein, 492 aa, Unknown
  Description of Unknown: Integrase A316 sequence
  PF07508,SSF53041,PS51737,cd00338,PTHR30461:SF3,PF00239,PS51736 ,SM00857,G3DSA:3.40.50.1390,PTHR30461
MRISRATEESTSIERQREIVEQWASVNDHEIVGWAVDQDVSGSVDPFDAPALGPWLSDHRKHEWDILCAWKLDRLSRRAIPMNKLFGWMIDNDKTLVCVSENLDLGTWVGRMIANVIAGVAEGELEAIRERTTASHKKLRELGRWAGGPTYYGYVPKPRDGAGWELDIDPHAAGVLKEIIEKTIAGQATEAIVVELNERGELSPSDYHRKRSGKPIRGTKWNTSWLRTQLKSKTLLGHMTHNGETVYDDAGLPVQKGPPLIDRDTYKQLQDALQSRGINRTKRRTGASPLLGVAVCDVCDGPLYYRQTKNQKGTAMLRQYICKHGRYGNTKANGGEPYNIIQADLLEATVEELFLSKMGDLPRVERVFIPGEGHQHELETAERAVEDLTSLLGTITQEGARKRLLAQLSAAHERLAHLEELPSSEPRWETRETGETYREAWESATTEERRQILLKAGVTLKVQMKGRVPRVHPGVIVANWIEPHDIEKRLAS

SEQ ID NO: 11749 - protein, 492 aa, Unknown
  Description of Unknown: Integrase A317 sequence
  PF07508,SSF53041,PS51737,cd00338,PTHR30461:SF3, PF00239,PS51736,SM00857,G3DSA:3.40.50.1390,PTHR30461
MRISRATEESTSIERQREIVEQWASVNDHEIVGWAVDQDVSGSVDPFDAPALGPWLSDHRKHEWDILCAWKLDRLSRRAIPMNKLFGWMIDNDKTLVCVSENLDLGTWVGRMIANVIAGVAEGELEAIRERTTASHKKLRELGRWAGGPTYYGYVPKPRDGAGWELDIDPHAAGVLKEIIEKTIAGQATEAIVVELNERGELSPSDYHRQRSGKPIRGTKWNTSWLRTQLKSKTLLGHMTHNGETVYDDAGLPVQKGPALTDRDTYKQLQDALQSRGINRTKRRTGASPLLGVAVCDVCDGPLYYRQTKNSKGTGMLRQYICKHGRYGNTKANGGEPYNIIQADLLEATVEELFLSKMGDLPRVERVFIPGEGHQHELETAERAVEDLTSLLGTITQEGARKRLLAQLSAAHERLAHLEELPSSEPRWETRETGETYREAWESATTEERRQILLKAGVTLKVQMKGRVPRVHPGVIVANWIEPHDIEKRLAS

SEQ ID NO: 11750 - protein, 492 aa, Unknown
  Description of Unknown: Integrase A318 sequence
  PF07508,SSF53041,PS51737,cd00338,PTHR30461:SF3,PF00239, PS51736,SM00857,G3DSA:3.40.50.1390,PTHR30461
MRISRATEESTSIERQREIVEQWASVNDHEIVGWAVDQDVSGSVDPFDAPALGPWLSDHRKHEWDILCAWKLDRLSRRAIPMNKLFGWMIDNDKTLVCVSENLDLGTWVGRMIANVIAGVAEGELEAIRERTTASHKKLRELGRWAGGPTYYGYVPKPRDGAGWELDIDPHAAGVLKEIIEKTIAGQATEAIVVELNERGELSPSDYHRQRSGKPIRGTKWNTSWLRTQLKSKTLLGHMTHNGETVYDDAGLPVQKGPALIDRDTYKQLQDALESRGINRTRRRTGASPLLGVAVCDVCDGPLYYRQTKNSKGTGMLRQYICKHGRYGNTKANGGEPYNIIQADLLEATVEELFLSKMGDQPRVERVFIPGEGHQHELETAERAVEDLTSLLGTITQESARKRLLAQLAAAHERLAHLEELPSSEPRWETRETGETYREAWESATTEERRQILLKAGVTLKVQMKDRVPRVHPGVIVANWIEPHDIEKRLAS

SEQ ID NO: 11751 - protein, 492 aa, Unknown
  Description of Unknown: Integrase A319 sequence
  PF07508,SSF53041,PS51737,cd00338,PTHR30461:SF3, PF00239,SM00857,G3DSA:3.40.50.1390,PTHR30461
MRVLGRVRLSRFQEESTSVERQREIVENWAKQHDHEIIGWAEDIDVSRSVDPFDTPGLGPWFTDKTKVDQWDIVATWKLDRLATGSIYLNKMMGWCAENEKVIVSVTENFDLSTWVGRMIANVIAGVAEGELEAIKERTQASRKKLVSVGRWTGGRPTYGYRAVEIPSGGWALEPDPESSVTLAWMIDEVLAGTSANAIAKSLNERGVLTPADFVRYRNGKPTKGAKWSVTALLSLLRSRTLLGEIMHNGRTVLGDDGEPVLAGPPLIDVEKFNRVQAVLEARSLKQYMDRVDASPLLGVLVCAGCGDNMYHQRQMDKRRGVMYRYYKCLKRCGQQFHADVAEEMVENQFLNDLGDSEALTRVYIPAENHQIELEEAVRLMDGLTPLLGAVTSDHARKRLTEQISALDSKIARLEMLPESPARTELQPTGLTYRELWESLDTDGRRELMVKAGIRAAVKVEGRTVGGRGGRTTGAITFHFQIPEDLHERLAS

SEQ ID NO: 11752 - protein, 491 aa, Unknown
  Description of Unknown: Integrase A320 sequence
  PF07508,G3DSA:1.10.10.2600,SSF53041,PF13408,PS51737,cd00338, PTHR30461:SF3,PF00239,PS51736,SM00857,G3DSA:3.40.50.1390, PS00397,PTHR30461
MQSELEERKKAFVYVRVSTYEQYVKGYSISNQKRELLQYCESMNWEVIKIFIEKGVTAKNLDLRKEANAAIEEAKKGECDYIVSLKIDRIFRNTEDLLATTRILLGYDVILKFKEQETNYLDPYGKASMTIMGMVSELELSVIKDRTMSGKIEKARQGIKSPGRVIPYGFDYVDKQFVANEKANIVRMIFDDAAKGYGFTTIAYHLRSKNVPSINDLSWNNVQIKRIITNKIYIGHCCFKIKNKEIVDVLAKNIEPIVSEEIWYAANNLYLAKTQNGKITKYAYDDFIFADVLYCSCCGWKFSSKKSKRVDPKKRPAKYEDRFYRYYKCIHNDTVFENVCSNKKVLNAKKFENYFLQQLNNFIIQPKNEKTVNEKINRLNDIKLLEKSIIELNTKKKRLLDKYLSGIIEDDMYISKNSDIVQEIDYNAKKIEELKSFDDEKEFDLEYLSKLKFVINDIWDVMDNKEKRNFISSTFEKITIDNGEIIKIIFR

SEQ ID NO: 11753 - protein, 490 aa, Unknown
  Description of Unknown: Integrase A321 sequence
  PF07508,G3DSA:1.10.10.2600,SSF53041,PS51737,cd00338, PF00239,PS51736,SM00857,G3DSA:3.40.50.1390,PTHR30461
MYELKYAVYVRVSTDRDEQVSSIENQIDICRYWIEKNGYEWDENSIYKDEAVSGTAWLERHAMQLILEKVRRKELDTVVFKSIHRLGRDLRDALEIKEILLGHGVRLVTIEEGYDSYYEGKNDLKFEMYAMFASQLPKTVSVSVSAALAAKVRRGEYTGGIVPYGYKIVDQKYTINEEEAELVRKMYELYDNGLGYMKIADAINDMGVPSRTGKLWAYPSIRAIITNAAYKGDYIMQKYAEVKVDGRKKMIINPKEKWVVFENHHPAIITRDLWDRVNNSKTDKKTKRRVAIKNELRGLACCAHCRTPLALQQRMYKNKEGETRYYCYLICGRYKRMGARGCVKHSGLQYSDLRLFVLQKLKEKENDLEKVFNLNDTDKHQEKQKKLRKEKKELEIKRERLLDLYLDGGPIDKETFTKRDKNFEKIIKEKELEILKLDDVKTLVVEQQKVKEAFELLEKSEDLYSTFKKLITRIEVSQDGVINIVYRFEE

SEQ ID NO: 11754 - protein, 489 aa, Unknown
  Description of Unknown: Integrase A322 sequence
  PF07508,G3DSA:1.10.10.2600,SSF53041,PS51737,cd00338, PTHR30461:SF3,PF00239,PS51736,SM00857,G3DSA:3.40.50.1390 ,PS00397,PTHR30461
MKKAAAYARVSTKDQSKISIEGQFKTIENFAKQYGFKIVDYFSDKDSGKKMKREQLDVLLENAYKGKYDVILVEKYDRFSRAGIDGQIIIQDLEKNYNVLVIAALEPFDVSTPQGRFTRTIILASYTLEGEMISQRTKMRMKDIASKKYWMGGNPPYGFDSYQIIDEEGKKRRKLKINEEQAKIVREIFELRLKNIGYSEIAKRLNERGIKNARGKLWRGSTILDMINNPLYAGIYIYGKGNKRSRKRSSELKDAVIIENFVDPIIPKEIFEEVNKKNGKLTSALTKNKYLLKGLIYTEFGDRMLGSGGKTPSYVSSAWQYGKTRTYLGISKSKIEREVFLRVKHQLLKLDFNDEEFWEDFAETINYIKKLKINVENDKIAALRKRLEEVEEQLINLTTAIKSGIINDEIKKENEILMKEKNDLINKIKMSNVNIVEETPENLRKKWKEKIEALENYDEDKLIEIYNQLIEQIIVYKDKYIEVKFKQFE

SEQ ID NO: 11755 - protein, 488 aa, Unknown
  Description of Unknown: Integrase A323 sequence
  PF07508,SSF53041,PS51737,cd00338,PTHR30461:SF3, PF00239,PS51736,SM00857,G3DSA:3.40.50.1390,PTHR30461
MRVLGRIRLSRLSDESTSPERQREIIENWAKANDHVVVGWAEDLDVSGSVDPFDTPALGPWLTEPKLHEWDILCAWKLDRLSRRAIPMNKLFGWVMDHDKTLVCVNDNIDLSTWIGRMIANVIAGVAEGELEAIRERTKSSHRKLRELGRWPGGRPAYGYRAVEREDAAGWELEPDPVSSLILKQIIDWVLQGQSVESIAKDLTDMKEMSPSDYIRQHRTGEAPRGHPWHGRTIVKLLRSKTLLGHVTHQGMTVRDENGVPVLKGPPLIDQETFDRLQAALDAAARPKTVNRTSNASPLLGVAVCMECEGLLHHRRQRTAGKVYRYYHCPHGHTQSIPADDLETLVEERFLGVLGDHEVHERVYFAAESHEQELRQAQEAIDDLTSILAGAKSNTARERVLMQLQALDKRMVELEALPQRAAREEMQPTGEFYKDAWEQADEQGRRALLIRSGITAKAKLVGRVANQSGGALTFDLVVPEDLRERITL

SEQ ID NO: 11756 - protein, 487 aa, Unknown
  Description of Unknown: Integrase A324 sequence
  PF07508,SSF53041,PS51737,cd00338,PTHR30461:SF3,PF00239, PS51736,SM00857,G3DSA:3.40.50.1390,PTHR30461
MRVLGRIRLSRLSDESTSPERQREIIEGWAKSNDHTIVGWAEDLDVSGSVDPFDTPALGPWLSEPKLHEWDILCAWKLDRLSRRAIPMNKLFGWVMDHDKTLVCVNDNIDLSTWIGRMVANVIAGVAEGELEAIRERTTASHRKLRELGRWPGGRPSYGYRAVEREDAAGWVLEPDPVSSVVLRSIIDWVLQGQSVESIAKDLTAMGEVSPSDYVRQRAGEAPRGHPWHGRTIVKLLRSKTLLGYVTHNGTTVRDENGVPVQKGPPLVDQDTFNRLQAALDDGSRPKTVNRTSKASPLLGVALCWDCEKPLYSRRQTTAGKVYRYYHCRDGHTQSIPADDLQQLVEERFLNALGDQEVHEMVYLPAESHQAELEEAQIAVQELTSALGRMKSNYAQQRIHTQLEALDKRIQELEGLPTSEARSEMRPTGGLYKDAWEEADEQGRRELLIKSGITAKAKLEGRVPNQSGGALSFDLVVPEDLLARMSV

SEQ ID NO: 11757 - protein, 487 aa, Unknown
  Description of Unknown: Integrase A325 sequence
  G3DSA:1.10.10.60,SSF46689
MSDYLRSEKPSFSACYRRMVKVAKKNKWTPVPSERALRRRLDAEVPAEVQTLARDGKEKAKTLYPAQRRSRASLHPMQVVNMDGHKLDVFVKVPWSEAPVRMFLLGIQDLYSGKILSWRLSDSENKETVRLVIGDMVENFGIPEAIVLDNGRAFASHWISGGTANRYRFKVKDEDPRGLLTTLGVEVHWTNPFSGQSKPIERAWRDLAENISKHPFCAGAYTGNTTANKPENYGSRAIPLSDFHMHVSEQVAEHNAQAGRRAANCAGRSFDDTFAASIETAIVSQPTAAQKSLWLLASEVIRTQKGNGEIHYQGNRYWNSALTQHAGKKITIRFDPDDLHGSIKVYDLNNSLICDAQCIADTGFFDQDAARNHARARRDYLKGLKATADAQRKLSAKQLGELIYKGEKTRTEEPKPVRPKVTRIARGNLAVKEEAVADAISQEDFERGFARALRGDEPTVIQFPQGMHEPVSSEYGSKKKGGRNPAR

SEQ ID NO: 11758 - protein, 486 aa, Unknown
  Description of Unknown: Integrase A326 sequence
  PF07508,SSF53041,PS51737,cd00338, PTHR30461:SF3,PF00239,SM00857,G3DSA:3.40.50.1390,PTHR30461
MRVLGRVRLSRFSDESTSVERQREIIAKWAADNDHTVVGYAEDVDVSRSVDPFDTPALGPWFTPEQRGEWDIVACWKLDRIATGSIYLNKVMAWCGEHEKSLVSVTENFDLGTWVGRLIANVIAGVAEGELEAIRERTQASRRKLVAVGRWTGGRPTYGYRAVEQDGGGWTLEPDPESSAILRRIVDRALAGESTLSIVRGLNDEGVLSPADYVRYRNGKPTLGAKWTTTATLDLMRSRTLLGQIVHNGAVVRDDSGKPVLGGPPLIDYDTFTRLQAALDARSRTQKVERVDASPLLGVAVCWECGSNLFHQRQMNRGKPYRYYKCPNKCSQAVKADDAEAVVEDMFLDKVGGHDELERVFIPGADHSTELREAQEAVDELTKVLGTMSSNTVRTAVLGQLEALDKRIQELECLPLTEARVELQPTGRLYRDAWGSLDSDGRRELLVKAGITARLKVEGRPVGGRAPGAFYFDLVVPEDLRERMSL

SEQ ID NO: 11759 - protein, 486 aa, Unknown
  Description of Unknown: Integrase A327 sequence
  PF07508,G3DSA:1.10.10.2600,SSF53041,PF13408,PS51737,cd00338, PTHR30461:SF21,PF00239,PS51736,SM00857,G3DSA:3.40.50.1390, PTHR30461
MTATLETPPQVVAPPRLRAAVYLRMSTDKELGIDRQREDCVALCERLGWDPVLYVDNDRSAVKENVRREAYEQMCEDIRDGRIDAIITWRSDRLYRKMKSLLPLIDLIQGVNKNGKRIPIETCQTGLIDLTTDAGRMTAKILAAVAENEGEVRTARQMRAYEQIAESGRSLGAPAFGYTNDPKARVREIVPEEAAAIREGYDDVLAGCTLYSIAKKWNDRGLKTPRGNAFVATVVGRILRNPRYAGLYRFRGEIIGEGDWEPIVDVETWAMATAVLDGKNTGPKGPRVRTTLLSGIVRCGHCGNRMSASKNSNGEPIYKCKRYEVCNHGVTRVRKKVDKYVEARIVAKLEERKWVVGTKSDADQAKALHTEAETLRARKASFTDALVDGTLTPAQVKEASDKVDAKLEEIERQLARLTKSRVYDGLLGHDDLEAVWVGLPLDRKRAIIEQLCDKIVIRHVEITGRAAAKLPLGHNIDIYWHKPSDD

SEQ ID NO: 11760 - protein, 486 aa, Unknown
  Description of Unknown: Integrase A328 sequence
  PF07508,G3DSA:1.10.10.2600,SSF53041,PF13408,PS51737, cd00338,PTHR30461:SF21,PF00239,PS51736,SM00857, G3DSA:3.40.50.1390,PTHR30461
MTATLETPPQVVAPPRLRAAVYLRMSTDKELGIDRQREDCVALCERLGWDPVLYVDNDRSAVKENVRREAYEQMCEDIRDGRIDAIITWRSDRLYRKMKSLLPLIDLIQGVNKNGKRIPIETCQTGLIDLTTDAGRMTAKILAAVAENEGEVRTARQMRAYEQIAESGRSLGAPAFGYTNDPKARVREIVPEEAAAIREGYDDVLAGCTLYSIAKKWNDRGLKTPRGNAFVATVVGRILRNPRYAGLYRFRGEIIGEGDWEPIVAVETWAMATAVLDGKNTGPKGPRVRTTLLSGIVRCGHCGNRMSASKNSNGEPIYKCKRYEVCNHGVTRVRKKVDKYVEARIVAKLEERKWVVGTKSDADQAKALHTEAETLRARKASFTDALVDGTLTPAQVKEASDKVDAKLEEIERQLARLTKSRVYDGLLGHDDLEAVWVGLPLDRKRAIIEQLCDKIVIRHVEITGRAAAKLPLGHNIDIYWHKPSDD

SEQ ID NO: 11761 - protein, 485 aa, Unknown
  Description of Unknown: Integrase A329 sequence
  PF07508,G3DSA:1.10.10.2600,SSF53041,PF13408,PS51737,cd00338, PTHR30461:SF3,PF00239,PS51736,SM00857,G3DSA:3.40.50.1390, PTHR30461
MTKKVAIYTRVSTTNQAEEGFSIDEQIDRLTKYAEAMGWQVSDTYTDAGFSGAKLERPAMQRLINDIENKAFDTVLVYKLDRLSRSVRDTLYLVKDVFTKNKIDFISLNESIDTSSAMGSLFLTILSAINEFERENIKERMTMGKLGRAKSGKSMMWTKTAFGYYHNRKTGILEIVPLQATIVEQIFTDYLSGISLTKLRDKLNESGHIGKDIPWSYRTLRQTLDNPVYCGYIKFKDSLFEGMHKPIIPYETYLKVQKELEERQQQTYERNNNPRPFQAKYMLSGMARCGYCGAPLKIVLGHKRKDGSRTMKYHCANRFPRKTKGITVYNDNKKCDSGTYDLSNLENTVIDNLIGFQENNDSLLKIINGNNQPILDTSSFKKQISQIDKKIQKNSDLYLNDFITMDELKDRTDSLQAEKKLLKAKISENKFNDSTDVFELVKTQLGSIPINELSYDNKKKIVNNLVSKVDVTADNVDIIFKFQLA

SEQ ID NO: 11762 - protein, 485 aa, Unknown
  Description of Unknown: Integrase A330 sequence
  PF07508,SSF53041,cd00338,PTHR30461:SF3,PF00239, PS51736,SM00857,G3DSA:3.40.50.1390,PS00397,PTHR30461
MVTGLTDYSDCVGYCRVSTQKQFEEGHGLERYIAQLKSWGLNDNQIFWDIESGASDKRKGYNKVLDLIKSGAIKKLIIPCFDRFTRSTLQWEQASLELQKHNVTVIFLDGGSTDLTSPDDLFKMRILAAMSAAVRDKNKFNSSQGHKFRRLNEKAHMACFGYKKSENGDTLVINHDLYKDTNKTYYRVARDIIELFLEKRSLSGTVRSMCSTYMSARLWPRHLDFPHTKSALKDWLTHPMLRGNLVYFRNDPEKELIIPNKFDPILTDGEFYEVASIISQKRKTKYKKDTLVNPLMGLAVCAGCGSFMRVQTSQYVPIKNNPSKKLKKIRYLVCEGAYPRPEKPKICDRRSTFSLKLEDYIDSVISTICLRAETIADLGSIQIDRTVEETAEIKELRQQISKLVGLGDNDLNEIIQIKQTKLNNLLNALKKESAGSEGIYEKLLEYGSKPEFWQCATVDEMYVLFQDLVEKVECDCGEINVILKI

SEQ ID NO: 11763 - protein, 484 aa, Unknown
  Description of Unknown: Integrase A331 sequence
  PF07508,G3DSA:1.10.10.2600,SSF53041,PF13408,PS51737,cd00338, PF00239,PS51736,SM00857,G3DSA:3.40.50.1390,PTHR30461
MKILKYAVYVRVSTDRDEQVSSVENQIDICRYWLEKNGYEWDPNAVYFDDGISGTAWLERHAMQLILEKARRNELDTVVFKSIHRLARDLRDALEIKEILIGHGIRLVTIEENYDSLYEGGNDIKFEMFAMFAAQLPKTISVSVSAAMQAKARRGEFIGKPGLGYDVIDKKLVINEKEAEIVREIFDLSYKGYGFKKIANILNDKGTYTKFGQLWSHTTVGKILKNQTYKGNLVLNSYKTVKVDGKKKRVYTPKERLTIIEDHYPTIVSKELWNAVNSDRASKKKTKQDTRNEFRGMMFCKHCGEPITAKYSGRYAKGSKKEWVYMKCSNYIRFNRCVNFDPAHYDDIREAIIYGLKQQEKELEIHFNPKMHQKRNDKSTEIKKQIKLLKVKKEKLIDLYVEGLIDKEMFSKRDLNFENEIKEQELALLKLTDQNKRNKEEKKIKEAFSMLDEEKDMHEVFKTLIKKITLSKDKYIDIEYTFSL

SEQ ID NO: 11764 - protein, 484 aa, Unknown
  Description of Unknown: Integrase A332 sequence
  PF07508,G3DSA:1.10.10.2600,SSF53041,PF13408,PS51737, cd00338,PF00239,PS51736,SM00857,G3DSA:3.40.50.1390, PTHR30461
MKILKYAVYVRVSTDRDEQVSSVENQIDICRYWLEKNGYEWDPNAVYFDDGISGTAWLERHAMQLILEKARRNELDTVVFKSIHRLARDLRDALEIKEILIGHGIRLVTIEENYDSLYEGGNDIKFEMFAMFAAQLPKTISVSVSAAMQAKARRGEFIGKPGLGYDVIDKKLVINEKEAEIVREIFDLSYKGYGFKKIANILNDKGTYTKFGQLWSHTTVGKILKNQTYKGNLVLNSYKTVKVDGKKKRVYTPKERLTIIEDHYPTIVSKELWNAVNSDRASKKKTKQDTRNEFRGMMFCKHCGEPITAKYSGRYAKGSKKEWVYMKCSNYIRFNRCVNFDPAHYDDIREAIIYGLKQQEKELEIHFNPKMHQKRNDKSREIKKQIKLLKVKKEKLIDLYVEGLIDKEMFSKRDLNFENEIKEQELALLKLTDQNKRNKEEKKIKEAFSMLDEEKDMHEVFKTLIKKITLSKDKYIDIEYTFSL

SEQ ID NO: 11765 - protein, 484 aa, Unknown
  Description of Unknown: Integrase A333 sequence
  PF07508,G3DSA:1.10.10.2600,SSF53041,PF13408,PS51737, cd00338,PTHR30461:SF21,PF00239,PS51736,SM00857,G3DSA:3.40.50 .1390,PTHR30461
MTATLERHLDTPQQEALRVGVYLRMSTDKELGIDRQREDCLALAERLGWVPVEYIDNDRSATKENVKREGFDALSEDIRDGRIDSIITWRSDRLYRKMKDLLPLIDLIQGVNKTGKRIPIETCQTGLIDLTTDAGRMTAKILAAVSENEGEVRTARQMRAYEQIADSGRRLGAPAFGWTHDPRDPQIVPEEAAAIRQAYADVLAGCTLYSIAKKWNEDGLRTTRGNQFVGSVVGKILRSPRNAGLLTFRDEIVGEGTWEPIVDRETWEAACAVLDQKNTGKKGPRVRSTLLSGIVRCGACGNKMAAGKNSNGEPIYKCKRYEVCKHGVTRVRKKVDKYVEMSMVAKLEQRKWIVGTQVDAEQAKGLHAEAEALRARKASFGEALADGTLTPAQVKDATDRVNAKLEEIDAKLARLTRSRVFDGLLGHDDLEKVWLGLDLERKRAIIESLCDKIVIQHVGQTGRSAAKLPLGHAIKIHWHDPSND

SEQ ID NO: 11766 - protein, 484 aa, Unknown
  Description of Unknown: Integrase A334 sequence
  PF07508,G3DSA:1.10.10.2600,SSF53041,PF13408,PS51737, cd00338,PTHR30461:SF21,PF00239,PS51736,SM00857, G3DSA:3.40.50.1390,PTHR30461
MTATLERHLDTPQQEALRVGVYLRMSTDKELGIDRQREDCLALAERLGWVPVEYIDNDRSATKENVKREGFDALSDDIRDGRIDSIITWRSDRLYRKMKDLLPLIDLIQGVNKTGKRIPIETCQTGLIDLTTDAGRMTAKILAAVSENEGEVRTARQMRAYEQIADSGRRLGAPAFGWTHDPRDPQIVPEEAAAIREGYADVLAGCTLYSIAKKWSDAGLRTTRGNAFVGSVVGKILRSPRNAGLLTFRDEIVGEGTWEPIVDRETWEAACAVLDQKNTGQKGPRVRSTLLSGIVRCGACGNKMAAGKNSNGEPIYKCKRYEVCKHGVTRVRKKVDKYVEMSMVAKLEQRKWIVGTQVDAEQAKGLHAEAEALRARKASFGEALADGTLTPAQVKDATDRVNAKLEEIDAKLARLTRSRVFDGLLGHDDLEKVWLGLDLERKRAIIESLCDKIVIQHVGQTGRSAAKLPLGHAIKIHWHDPSND

SEQ ID NO: 11767 - protein, 484 aa, Unknown
  Description of Unknown: Integrase A335 sequence
  PF07508,G3DSA:1.10.10.2600,SSF53041,PF13408,PS51737,cd00338, PTHR30461:SF21,PF00239,PS51736,SM00857,G3DSA:3.40.50.1390 ,PTHR30461
MTATLERHLDTPQQEALRVGVYLRMSTDKELGIDRQREDCLALAERLGWVPVEYIDNDRSATKENVKREGFDALSDDIRDGRIDSIITWRSDRLYRKMKDLLPLIDLIQGVNKTGKRIPIETCQTGLIDLTTDAGRMTAKILAAVSENEGEVRTARQMRAYEQIADSGRRLGAPAFGWTHDPRDPQIVPEEAAAIREGYADVLAGCTLYSIAKKWSDAGLRTTRGNAFVGSVVGKILRSPRNAGLLTFRDEIVGEGTWEPIVDRETWEAACAVLDQKNTGQKGPRVRSTLLSGIVRCGACGNKMAAGKNSNGEPIYKCKRYEVCKHGVTRVRKKVDKYVEMSMVAKLEQRKWIVGTQVDAEQAKGLHAEAEALRARKASFGEALADGTLTPAQVKDATDRVNVKLEEIDAKLARLTRSRVFDGLLGHDDLEKVWLGLDLERKRAIIESLCDKIVIQHVGQTGRSAAKLPLGHAIKIHWHDPSND

SEQ ID NO: 11768 - protein, 484 aa, Unknown
  Description of Unknown: Integrase A336 sequence
  PF07508,G3DSA:1.10.10.2600,SSF53041,PF13408,PS51737, cd00338,PTHR30461:SF3,PF00239,PS51736,SM00857, G3DSA:3.40.50.1390,PS00397,PTHR30461
MKKATAYARVSTTEQSKTSIDGQLDTIRNFAKFNDIKIIEEFWDKESGGKMSRPNFDIMIENAFAGKYDLILVEKIDRFAREDIEATLLIKQLEDAGIFVMSVLEPADVTTPSGRFQRWIMLGFGKLEREIIADRTKRRMRDTAKRGYWMGGIPPYGYKTVEVKDNEGRIRKKLEIIEEEAKVIRKIFELHADGKGLSAIAEFLNNNNISTRKGKPWAKTTIYDLLKNKKYIGIYEYGKGTKRNHHSKNSKPLIIENVIPPIIDKELWEKSKKQFRTPVRISMIRNYLLRGKIFCAECGAPLVGNGGKKTMYVCSNWKSRKGDHYVGISKNKIEKHVFLYLKHLLIDNRPNFKQIANTFNYLYKTKKQSKNRKIEYIKNTLEEKYEQRKNIINAIKKGVMIETLTQEAKQIEREIKELNLQLEKLMQNVYFEITEEELEHRWNNLTEMILSDDEDTLKELYDLLIEKIEVASDGYIKIIDKDIL

SEQ ID NO: 11769 - protein, 484 aa, Unknown
  Description of Unknown: Integrase A337 sequence
  SSF53041,PF13408,cd00338,PTHR30461:SF21,PF00239,SM00857, G3DSA:3.40.50.1390,PTHR30461
MRNGDITPEEAAELERKGVLKQRDDVKILADRHDREVIFYEDNNLSAFKRNVRRPRFQDMVRDLKAGKLAGMVVYDIDRGFRQPKDLESVIDIYQDFSEKKKVRLIFDTMSGQNFDLSTGDGRFTARLYVNIANKSSEDTSRRIARDNASKARKGVYHGGGPSFGWKEDDRTKLDPKAAGLVRDIVLGHLKGDKIATCMEYLSDKGAVNPTSGKPFTWAGTKTLIFRARNFGIRIYQGEPQLDDEGNYILGDWEPIFTKDDGTPDFDLWERLEALRKGKSPEGSQEKSTVKYLLSRIVRCGRCGYPMVGKTVWVRGTKSQSFAYNCNKSNPDACGKMGVTGPRVDELVKSLVWAQVLRASKNRQVPEPQESWSKEAELKDVEGQIAELKALWEAKEVRAATYVTTLDDLESRRTQLKAERAFHTATPAIRVITPELLKNGWEGLSVERQRIIIRSVLKAVIIHPARDGKKGGPFDPARVEPVFA

SEQ ID NO: 11770 - protein, 484 aa, Unknown
  Description of Unknown: Integrase A338 sequence
  PF07508,G3DSA:1.10.10.2600,SSF53041,PF13408,PS51737, cd00338,PF00239,PS51736,SM00857,G3DSA:3.40.50.1390, PTHR30461
MEILKYAVYVRVSTDRDEQVSSVENQIDICRYWLEKNGYEWDPNAVYFDDGISGTAWLERHAMQLILEKARRNELDTVVFKSIHRLARDLRDALEIKEILIGHGIRLVTIEENYDSLYEGGNDIKFEMFAMFAAQLPKTISVSVSAAMQAKARRGEFIGKPGLGYDVIDKKLVINEKEAEVVREIFDLSYKGYGFKKIANILNDKGTYTKFGQLWSHTTVGKVLKNQTYKGNLVLNSYKTVKVDGKKKRVYTPKERLTIIEDHYPAIISKELWNAVNSDRASKKKTKQDTRNEFRGLMFCKHCGEPITAKYSGRYAKGSKKEWVYMKCSNYIRFNRCVNFDPVHYDDIREAIIYGLKQQEKELEIHFNPKMHQKRNDKSTEIKKQIKLLKVKKEKLIDLYVEGLIDKEMFSKRDLNFENEIKEQELALLKLTDQNKRNKEEKKIKEAFSMLDEEKDMHEVFKTLIKKITLSKDKYIDIEYTFSL

SEQ ID NO: 11771 - protein, 484 aa, Unknown
  Description of Unknown: Integrase A339 sequence
  PF07508,G3DSA:1.10.10.2600,SSF53041,PF13408,PS51737,cd03768, PTHR30461:SF3,PF00239,PS51736,SM00857,G3DSA:3.40.50.1390, PS00397,PTHR30461
MQTKKVAIYVRVSSLHQAIEGYSIGQQQDALTKYCEAMNWAIYNVYTDAGFSGGKIDRPAMQKLITDAKTGKFDTVLVYKLDRLSRSVQDTLFLVRDIFNENNIGFVSLQENIDTSTAMGNLFLTLLSAIAEFEREQIKERMQMGRYGRAKSGKSMMWNLTSYGYRYNKETQSMDVVPSEALIIKRIYKEYLSGKSISRIKDGLNDEGHVTRDKPWAYKRISHILTSIVYTGVTEFKGEIYEGLHEAIIDKETFELAQAEFKKRQQQTKQNKNNPRPFQAKYMLSGMIRCGYCGAPLKMRKGPVRKDGTRLMAYDCHNRWKRKHTYLTVYNNNEQCTQSGRYLKEDVEGYVINEIKKLQENPDELNKYLKQPEETKVDTKKIESQIKKIDKQIAKLNDLYLNDLITIEDLKSKADKFKSEKNILEAQLKKDENSILKLKAENVRKNLSVKDIDKMTYEEQRNLAKTLIKKVDVTKEDIKIIFDF

SEQ ID NO: 11772 - protein, 484 aa, Unknown
  Description of Unknown: Integrase A340 sequence
  PF07508,G3DSA:1.10.10.2600,SSF53041,PF13408,PS51737, cd00338,PTHR30461:SF3,PF00239,PS51736,SM00857, G3DSA:3.40.50.1390,PS00397,PTHR30461
MNKVAIYVRVSTTMQAEEGYSIDEQIDKLKSYCKIKDWTVYDIYKDGGFSGGNIERPAMERLISDAKRKKFDTVLVYKLDRLSRSQKDTLFLIEEVFDKNDISFLSLNESFDTSTAFGKAMIGILSVFAQLEREQIKERMLLGKIGRAKTGKSMMFSKVSFGYTYDKLKDELVVNQAESIIVRKIFDAYLGGLSLNKLRDYLNNNGIYRGDKPWNYQGLRRILSNPVYIGMIRYREEIYPGNHKAIIDIDDYNKTQEEIKKRQIKALEFSNNPRPFRSKYMLSGIAKCGYCGTPLQIILGSKRKDGTRNMRYQCINRFPRNTKGVTIYNDGKKCESGFYEKADIEEFVINEIRSLQINYNKLDAMFDRHPTVNSDDIKKQIITLDNKLKRLNDLYINNMIELDDLKKQTQSLRKQKTILEDELLNNPAITQEKNKKHFKEMLATKDITKLDYETQKNIVNNLINKVFVKSGYIKIEWKIPFKKA

SEQ ID NO: 11773 - protein, 484 aa, Unknown
  Description of Unknown: Integrase A341 sequence
  PF07508,G3DSA:1.10.10.2600,SSF53041,PF13408,PS51737,cd00338, PTHR30461:SF3,PF00239,PS51736,SM00857,G3DSA:3.40.50.1390,PS00397 ,PTHR30461
MNKVAIYVRVSTTMQAEEGYSIDEQIDKLTSYCKIKDWTVYDIYKDGGFSGGNIERPAMERLISDAERKKFDTVLVYKLDRLSRSQKDTLFLIEEVFGKNDISFLSLNESFDTSTAFGKAMIGILSVFAQLEREQIKERMLLGKIGRAKTGKAMMFSKVSFGYTYDKLKDELVVNQAESIIVRKIFEAYLGGLSLNKLRDYLNNNGIYRGDKPWNYQGLRRILSNPVYIGMIRYRGEIYPGNHQAIIDIDDYNKTQEEIKKRQITALEFSNNPRPFRAKYMLSGIAKCGYCGTPLRIILGSKRKDGSRNMRYQCINRFPRNTKGVTVYNDGKKCNSGFYEKADVEEFVINQIRDLQFNINKLDNLFDKHPSIDIKSIERQISSLDNKLKRLNDLYLNDMIDLEDLKKQTQLLRQQKTMLEDELLNNPAITQEKNKKYFKEFLATKDITKLDYETQKNIVNNLINKVFVKSGYIKIEWKIPFKKM

SEQ ID NO: 11774 - protein, 484 aa, Unknown
  Description of Unknown: Integrase A342 sequence
  PF07508,G3DSA:1.10.10.2600,SSF53041,PF13408,PS51737, cd00338,PTHR30461:SF3,PF00239,PS51736,SM00857, G3DSA:3.40.50.1390,PS00397,PTHR30461
MNKVAIYVRVSTTMQAEEGYSIDEQIDKLTSYCKIKDWTVYDIYKDGGFSGGNIERPAMERLISDAKRKRFDTVLVYKLDRLSRSQKDTLYLIEEIFGKNDISFLSLNESFDTSTPFGKAMIGILSVFAQLEREQIKERMLLGKIGRAKTGKSMMFSKVSFGYTYDRVKDELIVNQAEAMIVRKIFDEYLGGRSLTKLRDYLNNNQIYRGDKPWNYQGLRRILSNPVYIGMIRYREEIYPGNHQPIIDTDDYNKTQEEIKKRQIEALEFSNNPRPFRAKYMLSGIAKCGYCGTPLQIILGTKRKDGTRNMRYQCINRFPRQTKGITIYNDGKKCNSGFYEKADIEEFVIAEIRGLQLNHNKLDDMFDKHPTIDIEGIEKQITSLDNKLKRLNDLYLNDMIELDDLKKQTQSLRKQKTMLEDELQNNPAIMQEKNKKHFQEMLGTKDITTLDYETQKNIVNNLVNKVFVKSGHIKIEWKIPFKKA

SEQ ID NO: 11775 - protein, 484 aa, Unknown
  Description of Unknown: Integrase A343 sequence
  PF07508,G3DSA:1.10.10.2600,SSF53041,PF13408,PS51737,cd03768, PTHR30461:SF3,PF00239,PS51736,SM00857,G3DSA:3.40.50.1390, PS00397,PTHR30461
MQPKKVAIYVRVSSLHQAIEGYSIGQQQDALTKYCEAMNWAIYNVYTDAGFSGGKIDRPAMQKLITDAKTGKFDTVLVYKLDRLSRSVQDTLFLVRDIFNENNIGFVSLQENIDTSTAMGNLFLTLLSAIAEFEREQIKERMQMGRYGRAKSGKSMMWNLTSYGYRYNKETQSMDVVPSEALIVKRIYKEYLSGKSISRIKDGLNNEGHITRDKPWAYKRISHILTSIVYTGVTEFKGEIYEGLHEAIIDKETFELAQAEFKKRQQQTKQNKNNPRPFQAKYMLSGMIRCGYCGAPLKMRKGPVRKDGTRLMAYDCHNRWKRKHSYLTVYNNNEQCTQSGRYLKEDVEGYVINEIKKLQENPDELNKYLKQPEETKVDTKKIESQIKKIDKQITKLNDLYLNDLITIEDLKSKADKLKSEKNILEVQLKKDENSILKLKAENVRKNLSVKDIDKMTYEEQRNLAKTLIKKVDVTKEDIKIIFDF

SEQ ID NO: 11776 - protein, 484 aa, Unknown
  Description of Unknown: Integrase A344 sequence
  PF07508,G3DSA:1.10.10.2600,SSF53041,PF13408,PS51737, cd03768,PTHR30461:SF3,PF00239,PS51736,SM00857, G3DSA:3.40.50.1390,PS00397,PTHR30461
MMTTNKVAIYVRVSTTNQAEEGYSIEEQKDKLSSYCHIKDWSIYNIYTDGGFSGSNTERPALEKLIKDAKKKKFDTVLVYKLDRLSRSQKDTLYLIEDIFLENKIDFVSLLENFDTSTPFGKAMVGILSVFAQLEREQIKERMQLGKLGRAKSGKSMMWAKTSYGYDYHKETGTVTVNPWQSIIIADIFDWYLSGKSITKIRDALNDMYGEDNGGKVWNYRAVRMILANPVYCGYNQYKGEIYKGNHEPIISEEVFNKTQEELKIRQQLAAEYSNPRPFQAKYMLSGIAQCGYCYAPLKIIMGMVRKDGTRYIRYECYQRHPRKTKGVTVYNNNEKCHSGAYEKDEVEEYVLNEISKLQNDTNYLDELFSNPETESIDRDSYQKQIDELTKKLSRLNDLYIDDRISLEELQKKSAEFTTIRAFLEAELENDPTLKADKQKENMRQTLATDDILGLDYDKQKAIVRTLINKVQVTDEDIAIKWKI

SEQ ID NO: 11777 - protein, 482 aa, Unknown
  Description of Unknown: Integrase A345 sequence
  PF07508,G3DSA:1.10.10.2600,SSF53041,PF13408,PS51737,cd00338, PTHR30461:SF3,PF00239,PS51736,SM00857,G3DSA:3.40.50.1390, PS00397,PTHR30461
MNKKVALYVRVSTLEQAESGYSIGEQIDKLRKYADIKEWHVYDVYEDGGFSGSNTTRPALERLISDAKRHTFDTVLVYKLDRLSRSQKDTLFLIEDIFKANEVDLVSLNENFDTSTAFGTAMIGILSVFAQLEREQIKERMKLGKIGRARSGKAMGWHVTPFGYLYDKQTGNFVVDDLAAGVVKMIFSDYLNGMSITKLRDKLNIAGHIGKDREWSYRTLRQTLDNPTYTGLVKYDGQVFEGNHEAIIDKKTFDAVQNELDIRQKKAYAFNNNPRPFQSKYMLSGIIRCGYCGAPLVSTLGNVRKDGTRLMKYQCTKRIIKKTRTTTVYNDNKKCDSGFYMMRNIESYVVNAVSELQASPELIESMMQSTAKQPKTNIKQLESELAKISSRLKKLSDLYLNDLISIDDLKKQTTDLKENRKRIEDTIDNNKDNNDEKVGMLKLKLTGSDIKERDYQDQSTLVKAFVRKVSVTSDNIEISWNF

SEQ ID NO: 11778 - protein, 482 aa, Unknown
  Description of Unknown: Integrase A346 sequence
  PF07508,G3DSA:1.10.10.2600,SSF53041,PF13408,PS51737, cd03768,PTHR30461:SF3,PF00239,PS51736,SM00857, G3DSA:3.40.50.1390,PS00397,PTHR30461
MMNTINKVAIYVRVSTNVQAEEGYSIDEQIDKLKSYCQIKDWTVYDVYKDGGFSGGNINRPALEKMIIDAKKKRFDTVLVYKLDRLSRSQKDTLFLIEDVFSKNDISFLSLQENFDTSTPFGKALVGLLSVFAQLEREQIKERMQLGMIGRAKSGKPMMFTNVSFGYTYSPKTQQLTINQAEAVIVKQIFNEFLGGMSPLRLMAYLNENNILRNGKEWNYQGIQRILRNPVYIGKIKYNNVIYPGLHEPIIDEESYYKAQKLLDARQDEMRIKGKNRQFKAKYMLSGTAKCGYCGAPLRIKIGNKRLDGTRLKVYQCCNRYPRKYAVVTYNDNKKCNSGNYQKEDLEQYVIAEIRKLQLKPEKIDKLFNKVSKIDTVQINKQIASIDNKINRLNDLYLNDMIDIDKLKSDAEKFKEQKRVLEKELDKDLKIQEQEKNKEDFKKTIGFKDVTKLDYEEQSFIVKSLIDKILVKKGFIKILWKI

SEQ ID NO: 11779 - protein, 481 aa, Unknown
  Description of Unknown: Integrase A347 sequence
  PF07508,G3DSA:1.10.10.2600,SSF53041,PF13408,PS51737,cd03768, PTHR30461:SF3,PF00239,PS51736,SM00857,G3DSA:3.40.50.1390, PS00397,PTHR30461
MITTNKVAIYVRVSTTNQVEEGYSIDEQKDKLSSYCDIKDWNVYKVYTDGGFSGSNTDRPALESLIKDAKKRKFDTVLVYKLDRLSRSQKDTLHLIEDVFIKNGIEFLSLQENFDTSTPFGKAMIGLLSVFAQLEREQIKERMQLGKLGRAKSGKSMMWAKTSYGYDYHKETGTVTINPAQALTIKFIFESYLRGRSITKLRDDLNEKYPKHVPWSYRAVRTILDNPVYCGFNQYKGEIYPGNHEPIISKEEYDKTQSELKIRQRTAAENVNPRPFQAKYILSGIAQCGYCGAPLKIMLGVKRKDGSRLKKYECHQRHPRTLRGVTTYNDNKKCDSGFYYKDKLEASVLKEISKLQDDADYLDKIFSGDNAETIDRESYKKQIEELSKKLSRLNDLYIDDRITLEELQSKSAEFISMRGTLETELENDPALRKNKRKADMRKLLNAEKVFSMDYENQKVLVRRLINKVKVTAEDIVINWKI

SEQ ID NO: 11780 - protein, 481 aa, Unknown
  Description of Unknown: Integrase A348 sequence
  PF07508,G3DSA:1.10.10.2600,SSF53041,PF13408,PS51737, cd03768,PTHR30461:SF3,PF00239,PS51736,SM00857, G3DSA:3.40.50.1390,PS00397,PTHR30461
MKTMNKVAIYVRVSTTNQVEEGYSIDEQKDKLSSYCDIKDWNVYKVYTDGGFSGSNTDRPALESLIKDAKKRKFDTVLVYKLDRLSRSQKDTLHLIEDVFIKNGIEFLSLQENFDTSTPFGKAMIGLLSVFAQLEREQIKERMQLGKLGRAKSGKSMMWAKTSYGYDYHKETGTVTINPAQALTIKFIFESYLRGRSITKLRDDLNEKYPKHVPWSYRAVRTILDNPVYCGFNQYKGEIYPGNHEPIISKEEYDKTQSELKIRQRTAAENVNPRPFQAKYILSGIAQCGYCGAPLKIMLGVKRKDGSRLKKYECHQRHPRTLRGVTTYNDNKKCDSGFYYKDKLEASVLKEISKLQDDADYLDKIFSGDNAETIDRESYKKQIEELSKKLSRLNDLYIDDRITLEELQSKSAEFISMRGTLETELENDPALRKNKRKADMRKLLNAEKVFSMDYENQKVLVRRLINKVKVTAEDIVINWKI

SEQ ID NO: 11781 - protein, 481 aa, Unknown
  Description of Unknown: Integrase A349 sequence
  PF07508,G3DSA:1.10.10.2600,SSF53041,PF13408,PS51737,cd03768, PTHR30461:SF3,PF00239,PS51736,SM00857,G3DSA:3.40.50.1390,PS00397 ,PTHR30461
MKTMNKVAIYVRVSTTNQVEEGYSIDEQKDKLSSYCDIKDWNVYKVYTDGGFSGSNTDRPALESLIKDAKKRKFDTVLVYKLDRLSRSQKDTLHLIEDVFIKNGIEFLSLQENFDTSTPFGKAMIGLLSVFAQLEREQIKERMQLGKLGRAKSGKSMMWAKTSYGYDYHKETGTVTINPAQALTIKFIFESYLRGRSITKLRDDLNEKYPKHVPWSYRAVRTILDNPVYCGFNQYKGEIYPGNHEPIISKEEYDKTQSELKIRQRTAAENVNPRPFQAKYILSGIAQCGYCGAPLKIMLGVKRKDGSRLKKYECHQRHPRTLRGVTTYNDNKKCDSGFYYKDKLEASVLKEISKLQDDADYLDKIFSGDNAETIDRERYKKQIEELSKKLSRLNDLYIDDRITLEELQSKSAEFISMRATLETELENDPALRKNKRKADMRKLLNAEKVFSMDYEGQKVLVRGLINKVQVTAEDIVIKWKI

SEQ ID NO: 11782 - protein, 481 aa, Unknown
  Description of Unknown: Integrase A350 sequence
  PF07508,G3DSA:1.10.10.2600,SSF53041,PF13408,PS51737, cd03768,PTHR30461:SF3,PF00239,PS51736,SM00857, G3DSA:3.40.50.1390,PS00397,PTHR30461
MITTNKVAIYVRVSTTNQVEEGYSIDEQKDKLSSYCDIKDWNVYKVYTDGGFSGSNTNRPAIEQLIKDAQKKKFDTVLVYKLDRLSRSQKDTLHLIEDVFIKNGIEFLSLQENFDTSTPFGKAMIGLLSVFAQLEREQIKERMQLGKLGRAKAGKSMMWAKTSYGYDYHRETGTITINPAQALTIKFIFESYLRGRSITKLRDDLNEKYPKHVPWSYRAVRTILDNPVYCGFNQYKGEIYPGNHEPIISKEEYDKTQSELKIRQRTAAENVNPRPFQAKYILSGIAQCGYCGAPLKIMLGVKRKDGSRLKKYECHQRHPRTLRGVTTYNDNKKCDSGFYYKDKLEASVLKEISKLQDDADYLDKIFSGDNAETIDRESYKKQIEELSKKLSRLNDLYIDDRITLEELQSKSAEFISMRGTLETELENDPALRKNKRKADMRKLLNAEKVFSMDYENQKVLVRRLINKVKVTAEDIVINWKI

SEQ ID NO: 11783 - protein, 481 aa, Unknown
  Description of Unknown: Integrase A351 sequence
  PF07508,G3DSA:1.10.10.2600,SSF53041,PF13408,PS51737,cd03768, PTHR30461:SF3,PF00239,PS51736,SM00857,G3DSA:3.40.50.1390, PS00397,PTHR30461
MITTNKVAIYVRVSTTNQVEEGYSIDEQKDKLSSYCDIKDWNVYKVYTDGGFSGSNTDRPALESLIKDAKKRKFDTVLVYKLDRLSRSQKDTLHLIEDVFIKNGIEFLSLQENFDTSTPFGKAMIGLLSVFAQLEREQIKERMQLGKLGRAKSGKSMMWAKTSYGYDYHKETGTVTINPAQALTIKFIFESYLRGRSITKLRDDLNEKYPKHVPWSYRAVRTILDNPVYCGFNQYKGEIYPGNHEPIISKEEYDKTQSELKIRQRTAAENVNPRPFQAKYILSGIAQCGYCGAPLKIMLGVKRKDGSRLKKYECHQRHPRTLRGVTTYNDNKKCDSGFYYKDKLEASVLKEISKLQDDADYLDKIFSGDNAETIDRESYKKQIEELSKKLSRLNDLYIDDRITLEELQSKSAEFISMRGTLETELENDPALRKNKRKADMRKLLNAEKVFSMNYENQKVLVRRLINKVKVTAEDIVINWKI

SEQ ID NO: 11784 - protein, 481 aa, Unknown
  Description of Unknown: Integrase A352 sequence
  PF07508,G3DSA:1.10.10.2600,SSF53041,PF13408,PS51737, cd03768,PTHR30461:SF3,PF00239,PS51736,SM00857, G3DSA:3.40.50.1390,PS00397,PTHR30461
MIATNKVAIYVRVSTTSQVEEGYSIDEQKAKLSSYCDIKDWSVYKIYTDGGFSGSNTDRPALEGLIKDAKKRKFDTVLVYKLDRLSRSQKDTLYLIEDIFIKNNIAFLSLQENFDTSTPFGKAMIGLLSVFAQLEREQIKERMQLGKIGRAKAGKSMMWAKTSYGYDYHRETGTITINPAQALAVKFIFESYLRGRSITKLRDDLNEKYPKHVPWSYRAVRTILDNPVYCGFNQYKGEIYPGNHESIISKEEYDKTQSELKIRQRTAAENVNPRPFQAKYILSGIAQCGYCGAPLKIMLGVKRKDGSRLKKYECHQRHPRTLRGVTTYNDNKKCDSGFYYKDKLEAYVLTEISKLQDNAGYLDKIFSGDNAETIDRESYKKQIEELSKKLSRLNDLYIDDRITLEELQSKSAEFISMRGTLETELENDPALRKNKRKADMRKLLNAEKIFSMDYEGQKVLVRGLINKVQVTAEDIVINWKI

SEQ ID NO: 11785 - protein, 481 aa, Unknown
  Description of Unknown: Integrase A353 sequence
  PF07508,SSF53041,PS51737,cd00338,PF00239,PS51736,SM00857,G3DSA: 3.40.50.1390,PTHR30461
MNTSGGDRVALYARISQDTSGKAVGVADQLETARKFSADRGYDVVAEHSDNDISAFRGADRPGYQRVLKLARERKIDRVIVYQLTRMTRNRGERAEFIDAFHACKVNVSEAQGGDYDLSTAAGRSWVDIQGALATWESEIKSERVTAAAARRARSGRPSGDLGYGWIKHGTGASATWTEHPHEAEVVREIVDRLLAGETLRGITQSLNDRGEPAPKSASWGKTSVKKLALRESNVALRIHHRGQADEERFDGCWPALVDRAKHEKVGALLREPARQTNGTKRPGARKHLLSWGIGECGVCGGMLRVATKRGRYGRPLDLYVCDANNGCVGRSEPAVDDLVKTVVIKRLSRPDALEWLLGDDDEARRWAERVDELNRRLADAADAFADGAITGEQLRRITAKLQPDLDDALERARESAGALNVDVLRPLAGPEAAQRWDDMEMAQRRAVLEALGLRVIIDRTRPGPGFDPSSVRFVWGRSAD

SEQ ID NO: 11786 - protein, 481 aa, Unknown
  Description of Unknown: Integrase A354 sequence
  PF07508,SSF53041,PS51737,cd00338,PF00239, PS51736,SM00857,G3DSA:3.40.50.1390,PTHR30461
MNTSGGDRVALYARISQDTSGKAVGVADQLETARKFSADRGYDVVAEHSDNDVSAFRGADRPGYQRVLRLARERKIDRVIVYQLTRMTRNRGERAEFIDAFHACKVNVSEAQGGDYDLSTAAGRSWVDIQGALATWESEIKSERVTAAAARRARSGRPSGDLGYGWIKHGTGASATWTEHPHEAEVVREIVDRLLAGETLRGITQSLNDRGEPAPKSASWGKTSVKKLALRESNVALRIHHRGQVDEERFDGCWPALVDRAKHEKVGALLREPARQTNGTKRPGARKHLLSWGIGECGVCGGMLRVATKHGRYGRPLDLYVCDANNGCVGRSEPTVDNLVKTVVIKRLSRPDALEWLLGDDDEARRWAERVDELNRRLADAADAFADGAITGEQLRRITAKLQPDLDDALERARESAGALNVDVLRPLAGPEAAQRWDDMEMSQRRAVLEALGLRVIIDRTRRGPGFDPSSVRFVWGRSAD

SEQ ID NO: 11787 - protein, 481 aa, Unknown
  Description of Unknown: Integrase A355 sequence
  PF07508,G3DSA:1.10.10.2600,SSF53041,PF13408,PS51737,cd00338, PF00239,PS51736,SM00857,G3DSA:3.40.50.1390,PTHR30461
MKYAVYVRVSTDRDEQVSSVENQIDICRYWLEKNGYEWDPNAVYFDDGISGTAWLERHAMQLILEKARRNELDTVVFKSIHRLARDLRDALEIKEILIGHGIRLVTIEENYDSLYEGGNDIKFEMFAMFAAQLPKTISVSVSAAMQAKARRGEFIGKPGLGYDVIDKKLVINEKEAEIVREIFDLSYKGYGFKKIANILNDKGTYTKFGQLWSHTTVGKILKNQTYKGNLVLNSYKTVKVDGKKKRVYTPKERLTIIEDHYPTIVSKELWNAVNSDRASKKKTKQDTRNEFRGMMFCKHCGEPITAKYSGRYAKGSKKEWVYMKCSNYIRFNRCVNFDPAHYDDIREAIIYGLKQQEKELEIHFNPKMHQKRNDKSTEIKKQIKLLKVKKEKLIDLYVEGLIDKEMFSKRDLNFENEIKEQELALLKLTDQNKRNKEEKKIKEAFSMLDEEKDMHEVFKTLIKKITLSKDKYIDIEYTFSL

SEQ ID NO: 11788 - protein, 481 aa, Unknown
  Description of Unknown: Integrase A356 sequence
  PF07508,SSF53041,PF13408,PS51737,cd00338, PTHR30461:SF3,PF00239,PS51736,SM00857,G3DSA:3.40.50.1390, PTHR30461
MEESTSVERQREIIETWARQNDHEIIGWAEDLDVSGSVDPFETPALGPWLTDHRKHEWDILVAWKLDRLSRRAIPMNKLFGWVMENDKTLVCVSENLDLSTWIGRMIANVIAGVAEGELEAIRERTKGSQKKLRELGRWGGGKPYYGYRAQEREDAAGWELVPDEHASAVLLSIIDKVLEGQSTESIARELNERGELSPSDYLRHRAGKPTRGGKWSNAHIRQQLRSKTLLGYSTHNGETIRDERGIAVRKGPALVSQDVFDRLQAALDSRSFKVTNRSAKASPLLGVLICRVCERPMHLRQHHNKQRGKTYRYYQCVGGVEKTHPANLTNADQMEQLVEESFLAELGDRKIQERVYIPAESHRAELDEAVRAVEEITPLLGTVTSDTMRKRLLDQLSALDARISELEKMPESEARWDYREGDETYAEAWNRGDAEERRQLLIKSGITAAAEMKGREARVNPGVLHFDLRIPDDILERMAG

SEQ ID NO: 11789 - protein, 481 aa, Unknown
  Description of Unknown: Integrase A357 sequence
  PF07508,G3DSA:1.10.10.2600,SSF53041,PF13408,PS51737,cd03768, PTHR30461:SF3,PF00239,PS51736,SM00857,G3DSA:3.40.50.1390, PS00397,PTHR30461
MKTMNKVAIYVRVSTTSQVEEGYSIDEQKAKLSSYCDIKDWNVYKVYTDGGFSGSNTDRPALESLIKDAKKRKFDTVLVYKLDRLSRSQKDTLHLIEDVFIKNGIEFLSLQENFDTSTPFGKAMIGLLSVFAQLEREQIKERMQLGKLGRAKSGKSMMWAKTSYGYDYHKETGTVTINPAQALTIKFIFESYLRGRSITKLRDDLNEKYPKHVPWSYRAVRTILDNPVYCGFNQYKGEIYPGNHEPIISKEEYDKTQSELKIRQRTAAENVNPRPFQAKYILSGIAQCGYCGAPLKIMLGVKRKDGSRLKKYECHQRHPRTLRGVTTYNDNKKCDSGFYYKDKLEASVLKEISKLQDDADYLDKIFSGDNAETIDRESYKKQIEELSKKLSRLNDLYIDDRITLEELQSKSAEFISMRGTLETELENDPALRKNKRKADMRKLLNAEKVFSMDYENQKVLVRRLINKVKVTAEDIVINWKI

SEQ ID NO: 11790 - protein, 481 aa, Unknown
  Description of Unknown: Integrase A358 sequence
  PF07508,G3DSA:1.10.10.2600,SSF53041,PF13408,PS51737, cd03768,PTHR30461:SF3,PF00239,PS51736,SM00857, G3DSA:3.40.50.1390,PS00397,PTHR30461
MITTNKVAIYVRVSTTNQVEEGYSIDEQKDKLSSYCDIKDWNVYKVYTDGGFSGSNTDRPALESLIKDAKKRKFDTVLVYKLDRLSRSQKDTLHLIEDVFIKNGIEFLSLQENFDTSTPFGKAMIGLLSVFAQLEREQIKERMQLGKLGRAKSGKSMMWAKTSYGYDYHKETGTVTINPAQALTIKFIFESYLRGRSITKLRDDLNEKYPKHVPWSYRAVRTILDNPVYCGFNQYKGEIYPGNHEPIISKEEYDKTQSELKIRQRTAAENVNPRPFQAKYILSGIAQCGYCGAPLKIMLGVKRKDGSRLKKYECHQRHPRTLRGVTTYNDNKKCDSGFYYKDKLEAYVLKEISKLQDDADYLDKIFSGDNAETIDRESYKKQIEELSKKLSRLNDLYIDDRITLEELQSKSAEFISMRGTLETELENDPALRKNKRKADMRKLLNAEKVFSMDYESQKVLVRRLINKVKVTAEDIVINWKI

SEQ ID NO: 11791 - protein, 481 aa, Unknown
  Description of Unknown: Integrase A359 sequence
  PF07508,G3DSA:1.10.10.2600,SSF53041,PF13408,PS51737,cd03768, PTHR30461:SF3,PF00239,PS51736,SM00857,G3DSA:3.40.50.1390,PS00397 ,PTHR30461
MKTMNKVAIYVRVSTTNQVEEGYSIDEQKDKLSSYCDIKDWNVYKVYTDGGFSGSNTDRPALESLIKDAKKRKFDTVLVYKLDRLSRSQKDTLHLIEDVFIKNGIEFLSLQENFDTSTPFGKAMIGLLSVFAQLEREQIKERMQLGKIGRAKAGKSMMWAKTSYGYDYHRETGTITINPAQALTIKFIFESYLRGRSITKLRDDLNEKYPKHVPWSYRAVRTILDNPVYCGFNQYKGEIYPGNHESIISKEEYDKTQSELKIRQRTAAENVNPRPFQAKYILSGIAQCGYCGAPLKIMLGVKRKDGSRLKKYECHQRHPRTLRGVTTYNDNKKCDSGFYYKDKLEAYVLTEISKLQDNAGYLDKIFSGDNAETIDRESYKKQIEELSKKLSRLNDLYIDDRITLEELQSKSAEFISMRGTLETELENDPALRKNKRKADMRKLLNAEKIFSMDYEGQKVLVRGLINKVQVTAEDIVINWKI

SEQ ID NO: 11792 - protein, 481 aa, Unknown
  Description of Unknown: Integrase A360 sequence
  PF07508,G3DSA:1.10.10.2600,SSF53041,PF13408,PS51737, cd00338,PF00239,PS51736,SM00857,G3DSA:3.40.50.1390, PTHR30461
MKYAVYVRVSTDRDEQVSSVENQIDICRYWLEKNGYEWDPNAVYFDDGISGTAWLERHAMQLILEKARRNELDTVVFKSIHRLARDLRDALEIKEILIGHGIRLVTIEENYDSLYEGGNDIKFEMFAMFAAQLPKTISVSVSAAMQAKARRGEFIGKPGLGYDVIDKKLVINEKEAEIVREIFDLSYKGYGFKKIANILNDKGTYTKFGQLWSHTTVGKILKNQTYKGNLVLNSYKTVKVDGKKKRVYTPKERLTIIEDHYPAIVSKELWNAVNSDRASKKKTKQDTRNEFRGMMFCKHCGEPITAKYSGRYAKGSKKEWVYMKCSNYIRFNRCVNFDPVHYDDIREAIIYGLKKQEKELEIHFNPKMHQKRNDKSTEIKKQIKLLKVKKEKLIDLYVEGLIDKEMFSKRDLNFENEIKEQELALLKLTDQNKRNKEEKKIKEAFSMLDEEKDMHEVFKTLIKKITLSKNKYIDIEYTFSL

SEQ ID NO: 11793 - protein, 481 aa, Unknown
  Description of Unknown: Integrase A361 sequence
  PF07508,SSF53041,PF13408,PS51737,cd00338,PTHR30461:SF3,PF00239, PS51736,SM00857,G3DSA:3.40.50.1390,PTHR30461
MEESTSVERQREIIETWARQNDHEIIGWAEDLDVSGSVDPFETPALGPWLTDHRKHEWDILVAWKLDRLSRRAIPMNKLFGWVMENDKTLVCVSENLDLSTWIGRMIANVIAGVAEGELEAIRERTKGSQKKLRELGRWGGGKPYYGYRAQEREDAAGWELVPDEHASAVLLSIIEKVLEGQSTESIARELNERGELSPSDYLRHRAGKPTRGGKWSNAHIRQQLRSKTLLGYSTHNGETIRDERGIAVRKGPALVSQDVFDRLQAALDSRSFKVTNRSAKASPLLGVLVCRVCERPMHLRQHHNKKRGKTYRYYQCVGGVEKTHPANLTNADQMEQLVEESFLAELGDRKIQERVYIPAESHRAELDEAVRAVEEITPLLGTVTSDTMRKRLLDQLSALDARISELEKLPESEARWEYREGDETYAEAWNRGDAEARRQLLLKSGITAAAEMKGREARVNPGVLHFDLRIPDDILERMSA

SEQ ID NO: 11794 - protein, 481 aa, Unknown
  Description of Unknown: Integrase A362 sequence
  PF07508,G3DSA:1.10.10.2600,SSF53041,PF13408,PS51737, cd03768,PTHR30461:SF3,PF00239,PS51736,SM00857, G3DSA:3.40.50.1390,PS00397,PTHR30461
MITTNKVAIYVRVSTTSQVEEGYSIDEQKAKLSSYCDIKDWSVYKIYTDGGFSGSNTDRPALEGLIKDAKKRKFDTVLVYKLDRLSRSQKDTLYLIEDIFIKNNIAFLSLQENFDTSTPFGKAMIGLLSVFAQLEREQIKERMQLGKIGRAKAGKSMMWAKTSYGYDYHRETGTITINPAQALAVKFIFESYLRGRSITKLRDDLNEKYPKHVPWSYRAVRTILDNPVYCGFNQYKGEIYPGNHESIISKEEYDKTQSELKIRQRTAAENVNPRPFQAKYILSGIAQCGYCGAPLKIMLGVKRKDGSRLKKYECHQRHPRTLRGVTTYNDNKKCDSGFYYKDKLEAYVLTEISKLQDNAGYLDKIFSGDNAETIDRESYKKQIEELSKKLSRLNDLYIDDRITLEELQSKSAEFISMRGTLETELENDPALRKNKRKADMRKLLNAEKIFSMDYEGQKVLVRGLINKVQVTAEDIVINWKI

SEQ ID NO: 11795 - protein, 481 aa, Unknown
  Description of Unknown: Integrase A363 sequence
  PF07508,G3DSA:1.10.10.2600,SSF53041,PF13408,PS51737,cd03768, PTHR30461:SF3,PF00239,PS51736,SM00857,G3DSA:3.40.50.1390,PS00397 ,PTHR30461
MKTTNKVAIYVRVSTTSQVEEGYSIEEQKDKLESYCKIKDWSVYKVYTDGGFSGSNTDRPALESLIKDAKKRKFDTVLVYKLDRLSRSQKDTLHLIEDVFIKNGIEFLSLQENFDTSTPFGKAMIGLLSVFAQLEREQIKERMQLGKIGRAKAGKSMMWAKTSYGYDYHRETGTITINPAQALAIKFIFESYLRGRSITKLRDDLNEKYPKHVPWSYRAVRTILDNPVYCGFNQYKGEIYPGNHEPIISKEEYDKTQSELKIRQRTAAENVNPRPFQAKYILSGIAQCGYCGAPLKIMLGVKRKDGSRLKKYECHQRHPRTLRGVTTYNDNKKCDSGFYYKDKLEAYVLTEISKLQDNAGYLDKIFSGDNAETIDRESYKKQIEELSKKLSRLNDLYIDDRITLEELQSKSAEFISMRGTLETELENDPALRKNKRKADMRKLLNAEKIFSMDYEGQKVLVRGLINKVQVTAEDIVINWKI

SEQ ID NO: 11796 - protein, 481 aa, Unknown
  Description of Unknown: Integrase A364 sequence
  PF07508,G3DSA:1.10.10.2600,SSF53041,PF13408,PS51737, cd03768,PTHR30461:SF3,PF00239,PS51736,SM00857, G3DSA:3.40.50.1390,PS00397,PTHR30461
MIATNKVAIYVRVSTTNQVEEGYSIDEQKDKLSSYCDIKDWNVYKVYTDGGFSGSNTDRPALESLIKDAKKRKFDTVLVYKLDRLSRSQKDTLHLIEDVFIKNGIEFLSLQENFDTSTPFGKAMIGLLSVFAQLEREQIKERMQLGKLGRVKSGKSMMWAKTSYGYDYHKETGTVTINPAQALTIKFIFESYLRGRSITKLRDDLNEKYPKHVPWSYRAVRTILDNPVYCGFNQYKGEIYPGNHEPIISKEEYDKTQSELKIRQRTAAENVNPRPFQAKYILSGIAQCGYCGAPLKIMLGVKRKDGSRLKKYECHQRHPRTLRGVTTYNDNKKCDSGFYYKDKLEAYVLKEISKLQDDADYLDKIFSGDNAETIDRESYKKQIEELSKKLSRLNDLYIDDRITLEELQSKSAEFISMRGTLETELENDPALRKNKRKADMRKLLNAEKVFSMDYENQKVLVRRLINKVKVTAEDIVINWKI

SEQ ID NO: 11797 - protein, 481 aa, Unknown
  Description of Unknown: Integrase A365 sequence
  PF07508,SSF53041,PS51737,cd00338,PF00239,PS51736,SM00857,G3DSA:3 .40.50.1390,PTHR30461
MNTSGGDRVALYARISQDTSGKAVGVADQLETARKFSADRGYDVVAEHSDNDISAFRGADRPGYQRVLKLARERKIDRVIVYQLTRMTRNRGERAEFIDAFHACKVNVSEAQGGDYDLSTAAGRSWVDIQGALATWESEIKSERVTAAAARRARSGRPSGDLGYGWIKHGTGASATWTEHPHEAEVVREIVDRLLAGETLRGITQSLNDRGEPAPKSASWGKTSVKKLALRESNVALRIHHRGQADEERFDGCWPALVDRAKHEKVGALLREPARQTNGTKRPGARKHLLSWGIGECGVCGGMLRVATKRGRYGRPLDLYVCDANNGCVGRSEPAVDNLVKTVVIKRLSRPDALEWLLGDDDEARRWAERVDELNRRLADAADAFADGAITGEQLRRITAKLQPDLDDALERARESAGALNVDVLRPLAGPEAAQRWDGMEMSQRRAVLEALGLRVIIDRTRRGPGFDPSSVRFVWGRSAD

SEQ ID NO: 11798 - protein, 481 aa, Unknown
  Description of Unknown: Integrase A366 sequence
  PF07508,G3DSA:1.10.10.2600,SSF53041,PF13408,PS51737, cd03768,PTHR30461:SF3,PF00239,PS51736,SM00857, G3DSA:3.40.50.1390,PS00397,PTHR30461
MITTNKVAIYVRVSTTNQAEEGYSIEEQKDKLKSYCNIKDWNVFNVYTDGGFSGSNTERPALEQLIKDAKKKKFDTVLVYKLDRLSRSQKDTLYLIEDIFLENNIDFVSLLENFDTSTPFGKAMVGILSVFAQLEREQIKERMQLGKLGRAKAGKSMMWAKVAYGYTYHKGSGEMTINELEAIVVREIFNSYLEGMSITKLRDKINDTYPKTPAWSYRIIRQILDNPVYCGYNQYKGEVYKGNHEPIISEEDFNKTQDELKIRQRTAAEKFNPRPFQAKYMLSGIAQCGYCKAPLKIIMGAVRKDGTRFIKYECYQRHPRTTRGVTTYNNNQKCHSSSYYKQDVEDYVLREISKLQNDKKAIDELFENTNMDTIDRESIKKQIEAISSKIKRLNDLYIDDRITIDELRKKSTEFTLSKTFLKEKLENDPILKQQESKDNIKKILSCDDILTMDYDQQKIIVKGLINKVQVTADKVIIKWKI

SEQ ID NO: 11799 - protein, 481 aa, Unknown
  Description of Unknown: Integrase A367 sequence
  PF07508,G3DSA:1.10.10.2600,SSF53041,PF13408,PS51737,cd03768, PTHR30461:SF3,PF00239,PS51736,SM00857,G3DSA:3.40.50.1390,PS00397 ,PTHR30461
MNAINKVAIYVRVSTNVQAEEGYSIDEQIDKLKSYCQIKDWTVYDVYKDGGFSGGNINRPALEKMIIDAKKKRFDTVLVYKLDRLSRSQKDTLFLIEDVFSKNDISFLSLQENFDTSTPFGKALVGLLSVFAQLEREQIKERMQLGMIGRAKSGKPMMFTNVSFGYTYSPKTQQLTINQAEAVIVKQIFNEFLGGMSPLRLMAYLNENNILRNGKEWNYQGIQRILRNPVYIGKIKYNNVIYPGLHEPIIDEESYYKAQKLLDARQDEMRIKGKNRQFKAKYMLSGTAKCGYCGAPLRIKIGNKRLDGTRLKVYQCCNRYPRKYAVVTYNDNKKCNSGNYQKEDLEQYVIAEIRKLQLKPEKIDKLFNKVSKIDTVQINKQIASIDNKINRLNDLYLNDMIDIDKLKADAEKFKEQKRVLEKELDKDLKIQEQEKNKEDFKKTIGFKDVTKLDYEEQSFIVKSLIDKILVKKGFIKILWKI

SEQ ID NO: 11800 - protein, 481 aa, Unknown
  Description of Unknown: Integrase A368 sequence
  PF07508,G3DSA:1.10.10.2600,SSF53041,PF13408,PS51737, cd03768,PTHR30461:SF3,PF00239,PS51736,SM00857, G3DSA:3.40.50.1390,PS00397,PTHR30461
MITTNKVAIYVRVSTTSQAEEGYSIEEQKAKLSSYCDIKDWSVYKIYTDGGFSGSNTDRPALEGLIKDAKKRKFDTVLVYKLDRLSRSQKDTLYLIEDVFIKNNIAFLSLQENFDTSTPFGKAMIGLLSVFAQLEREQIKERMQLGKIGRAKAGKSMMWAKTSYGYDYHRETGTITINPAQALAVKFIFESYLRGRSITKLRDDLNEKYPKHVPWSYRAVRTILDNPVYCGFNQYKGEIYPGNHEPIISKEEYDKTQSELKIRQRTAAENVNPRPFQAKYILSGIAQCGYCGAPLKIMLGVKRKDGSRLKKYECHQRHPRTLRGVTTYNDNKKCDSGFYYKDKLEAYVLEEISKLQDDADFLDKIFSGDNAETIDRESYKKQIEELSKKLSRLNDLYIDDRITLEELQSKSAEFISMRATLETELENDPALRKNKRKADMRKLLNAEKVFSMDYESQKVLVRGLINKVQVTAEDIVIKWKI

SEQ ID NO: 11801 - protein, 481 aa, Unknown
  Description of Unknown: Integrase A369 sequence
  PF07508,G3DSA:1.10.10.2600,SSF53041,PF13408,PS51737,cd03768, PTHR30461:SF3,PF00239,PS51736,SM00857,G3DSA:3.40.50.1390,PS00397 ,PTHR30461
MITTNKVAIYVRVSTTNQAEEGYSIEEQKDKLKSYCNIKDWNVFNVYTDGGFSGSNTERPALEQLIKDAKKKKFDTVLVYKLDRLSRSQKDTLYLIEDIFLENNIDFVSLLENFDTSTPFGKAMVGILSVFAQLEREQIKERMQLGKLGRAKAGKSMMWAKVAYGYTYHKGSGEMTINELEAIVVREIFNSYLEGMSITKLRDKINDTYPKTPAWSYRIIRQILDNPVYCGYNQYKGEVYKGNHEPIISEEDFNKTQDELKIRQRTAAEKFNPRPFQAKYMLSGIAQCGYCKAPLKIIMGAVRKDGTRFIKYECYQRHPRTTRGVTTYNNNQKCHSSSYYKQDVEDYVLREISKLQNDKKAIDELFENTNMDTIDRESIKKQIEAISSKIKRLNDLYIDDRITIDELRKKSTEFTLSKTFLEEKLENDPILKQQESKDNIKKILSCDDILTMDYDQQKIIVKGLINKVQVTADKVIIKWKI

SEQ ID NO: 11802 - protein, 480 aa, Unknown
  Description of Unknown: Integrase A370 sequence
  PF07508,G3DSA:1.10.10.2600,SSF53041,PF13408,PS51737, cd00338,PTHR30461:SF3,PF00239,PS51736,SM00857, G3DSA:3.40.50.1390,PS00397,PTHR30461
MRTALYIRVSTEDQAREGYSIQMQKEKLHAYCVSQGWDIEGFYIDDGYSAKDLDRPAMKRMIENIQQGLIDCVLVYRLDRLTRSVLDLHNLLKLFDEHDCKFKSATEVYDTTTATGRMFITFVAALAQWERENTAERVKANMQQMVHEGKYPGGKVNFGYRLEGKKIVIDEQEAAVVRKMFDLYLEGNGDNRTATLLNRMGHRTRQGRLWTGKQVRDVLTNQVYIGRFFYMDEYHDGIIPPIIEREKFETAQKMREGRRGKHPRQVASDYIFSGVLRCARCGRVMPGKLSNHTKKNGVYARRKYTCRGTFTKLCDMPMLDEQAIEEVFLQYIREIRDASAASEVAASYEQDSDHISRQIQDIETQLDEIKKRRKRLQLAFANEVISLEELKELTSEDRKIEKELQNKLEELKEQEESSEVSPQELIEILMQFGENWNHLSDKEKKNLISMFIKEIYVQAENTRPNRWRKRKVWIERVEFL

SEQ ID NO: 11803 - protein, 480 aa, Unknown
  Description of Unknown: Integrase A371 sequence
  PF07508,G3DSA:1.10.10.2600,SSF53041,PF13408, PS51737,cd00338,PF00239,PS51736, SM00857,G3DSA:3.40.50.1390,PTHR30461
MKYAVYVRVSTDRDEQVSSVENQIDICRYWLEKNGYEWDPNAVYFDDGISGTAWLERHAMQLILEKARRNELDTVVFKSIHRLARDLRDALEIKEILIGHGIRLVTIEENYDSLYEGGNDIKFEMFAMFAAQLPKTISVSVSAAMQAKARRGEFIGKPGLGYDVIDKKLVINEKEAEVVREIFDLSYKGYGFKKIANILNDKGTYTKFGQLWSHTTVGKVLKNQTYKGNLVLNSYKTVKVDGKKKRVYTPKERLTIIEDHYPAIVSKELWNAVNRDRASKKKTKQDTRNEFRGMMFCKHCGEPITAKYSGRYAKGSKKEWVYMKCSNYIRFNRCVNFDPVHYDDIREAIIYGLKQQEKQLEIHFNPKMHQKRNDKSTEIKKQIKLLKVKKEKLIDLYVEGLIDKEMFSKRDLNFENEIKEQELELLKLTDQNKRNKEEKKIKEAFSMLDEEDMHEVFKTLIKKITLSKDKYIDIEYTFSL

SEQ ID NO: 11804 - protein, 480 aa, Unknown
  Description of Unknown: Integrase A372 sequence
  PF07508,G3DSA:1.10.10.2600,SSF53041,PF13408,PS51737, cd03768,PTHR30461:SF3,PF00239,PS51736,SM00857, G3DSA:3.40.50.1390,PS00397,PTHR30461
MTMHKVAIYVRVSTTSQADEGYSIDEQKAKLTSYCDIKDWNIYEIYTDGGFSGSNTERPALEQLIRDAKRKLFDTVLVYKLDRLSRSQKDTLYLIEDVFLENDIEFVSLLENFDTSTPFGKAMIGLLSVFAQLEREQIKERMQLGKLGRAKSGKSMQWAKTSYGYDYIKETGTLSVNQYQALIVRKMFKWYLSGMSITKLRDALNEQYGQDKEWSYRTVRAILSNPVYCGYNQFKGQIFPGTHEPIISEEDFNKTQEEIKTRQRTAAQRFNPRPFQAKYMLSGIAQCGYCSAPLAIKLGMIRKDGTRLIKYECKQRHPRKTKGVTVYNNNEKCDSGFYFKDDIEHFVLTEISKLQTDSDYIDKLFSNTDKETIDRDSYQKQIDNLTAKISRLNDLYIDDRISLEELQKRSSDFMAERSALEKELDADNSIKTVERKKDIKRVLDTKDVLTLDYEQQKAIARALISKVRVTSETIVILWKL

SEQ ID NO: 11805 - protein, 479 aa, Unknown
  Description of Unknown: Integrase A373 sequence
  PF07508,G3DSA:1.10.10.2600,SSF53041,PF13408,PS51737,cd00338, PTHR30461:SF3,PF00239,PS51736,SM00857,G3DSA:3.40.50.1390,PS00397 ,PTHR30461
MNKVAIYVRVSTTSQAEEGYSIDEQIDKLSSYCKIKDWTVYDVYKDGGFSGGNIERPAMERLISDAKRKRFDTVLVYKLDRLSRSQKDTLFLIEEVFIKNNISFLSLNESFDTSTPFGKAMIGILSVFAQLEREQIKERLMLGKVGRAKSGKPMMFSSISFGYTYDKHAKELHINQAEAVIVKKIFSEYLSGRSLTNLRDYLNDNGFTRNGRYWDYQGLKRIMKNPVYIGMIRYNGVIYPGNHQAIIDAETFDKTQIELKKRQLQAAELQNNPRPFRAKYMLSGLLRCGYCSAPLTVVLSGKTKSGSRNIFYECYNRHPKIKKGRTIYNDGKKCNSGTYNKSYLEECILNEIRLLQLNPERIDDIYDVQPTIDVDSIENQIATLNKKLDKLNDLYLNDMVSMDVLKKQTHTLRQQKKILEHELENNNVEIIKNSKRIFIETLNISDVTKLDYNIQKNIANTLIKEIVVKNGEITIQWRI

SEQ ID NO: 11806 - protein, 479 aa, Unknown
  Description of Unknown: Integrase A374 sequence
  PF07508,G3DSA:1.10.10.2600,SSF53041,PF13408,PS51737, cd03768,PTHR30461:SF3,PF00239,PS51736,SM00857, G3DSA:3.40.50.1390,PTHR30461
MAKVAIYTRVSTTLQADEGYSLEEQINKLKSYCDIKDWTVYKVYSDGGFTGSNIERPAMTNLVSDAKAKKFDTVLVYKLDRLSRSQKDTLYLIEEVFIKNDINFLSLNENFDTSSAFGKAMIGILSVFAQLEREQIKERMMLGKVGRAKSGKSMMWGKSSYGYEYHKKNGSMEIVPGEAIIVKKIFELYVSGKSITKLRDYLNENNLLTNKKVKWSYQATRGILTNPVYCGLIRYDGQIYPGLHEPIISKEMFDLTQEIIKERQMTALTNCNPRPFKAKYMLSGIGRCGYCGAPLKIMLGRIRNDGTRTIRYDCTNRFPRKTKPITVYNDYKKCNSGYYYKDDVEKVVLDRIYSLQLDNADTDKIFGKDEIIDNSKIEKEIKQINLKIEKLNDLYLNDLISLEELKSKTTNLINQKKLLEDEITDRQKKKENPLKKQAIKTISNKNIYELSYEDQALIVKSLINRIYVKENEIQIEWKN

SEQ ID NO: 11807 - protein, 479 aa, Unknown
  Description of Unknown: Integrase A375 sequence
  PF07508,G3DSA:1.10.10.2600,SSF53041,PF13408,PS51737,cd00338, PTHR30461:SF3,PF00239,PS51736,SM00857,G3DSA:3.40.50.1390, PS00397,PTHR30461
MKAALYIRVSTQEQAIEGYSISSQRQKLTAYSYSQGWEIVDYYVDEGKSAKDLDRPELKRMLDDIKQHKIDVVLVYRLDRITRSVMDLYELLGIFDKYHCKFKSATEVYDTTSATGRLFITLVASMAQWERETIAERVSMGMAEKVRQGEWHGSEAPYGFYYNIETKELVIDESEAHVVRDIFTKYLDGLSDRKIAIYLNEKKVPTRKGARWRENRIRYILTNPIYIGNLRWGVRVNREQAFQVENAVPAIIDKETFEKAQMIRNSRRRFHGRQATSDFIFSGVLKCARCGSPMKGHTHKCKNKRNKSYRCIKVLFNECDMPLISERIIEYQFLKAVKELIFKEIKIETKSSDQHIDKEKIIKNLQTELNKIEERRKKWQYAWVNEMIDDNQFKDRMNEELIKEQEIKRKLEDINVEIEEFEMDNELKELMSDALENWIRLDDHEKKQLIQIAINKIIVEKIPSNKVLERAKILEIEFN

SEQ ID NO: 11808 - protein, 479 aa, Unknown
  Description of Unknown: Integrase A376 sequence
  PF07508,SSF53041,PF13408,PS51737,cd00338, PTHR30461:SF3,PF00239,PS51736,SM00857,G3DSA:3.40.50.1390, PTHR30461
MERQREFIETWARQNDHEIVGWAEDLDVSGSVDPFDTQGLGPWLKEPKLREWDILCAWKLDRLARRAVPLHKLFGMCQDEQKVLVCVSDNIDLSTWVGRLVASVIAGVAEGELEAIRERTLSSQRKLRELGRWAGGKPAYGFKAQEREGSAGYELVHDEHAANVMLGVIEKVLAGQSTESVARELNEAGELAPSDYIRARAGRKTRGTKWSNAQIRQLLKSKTLLGHVTHNGSTVRDDDGIPIRKGPALISEEKFDQLQAALDARSFKVTNRSAKASPLLGVAICGLCGRPMHIRQHRRNGNLYRYYRCDSGSHSGGGGAAPEHPSNIIKADDLEALVEEHFLDEVGGFNVQEKVYVPASDHRAELDEAVRAVEELTQLLGTMTSATMKSRLMSQLTALDERIARLENLPSEEARWDYRATDQTYAEAWEEADTEGRRQLLIRSGITAEVKVTGGDRGVRGVLEFHLKVPEDVRERLSA

SEQ ID NO: 11809 - protein, 479 aa, Unknown
  Description of Unknown: Integrase A377 sequence
  PF07508,G3DSA:1.10.10.2600,SSF53041,PF13408,PS51737,cd00338, PTHR30461:SF3,PF00239,PS51736,SM00857,G3DSA:3.40.50.1390, PS00397,PTHR30461
MNKVAIYVRVSTKGQADEGYSIDEQIALLTSYCSIHKWKIYDTYVDAGVSGATIERPELSRLSRDAKKKKFNTMIVYDLKRLGRSQRNNIAFIEDVLEKNGIGFISLTENFDTSSPLGKAMVGILSAFGQLDRDTIRERMMMGKIGRAKAGKPMMTSTIAFGYTYDRVTSSLNINQAEAIIVKTIYNEYILGRSLTKLRDYLNENGLLRNGKPWSYQGVSRILRNPVYKGMNRFRGEVYQGTHEPIISAELFDRTQKELKKRQIEAYKRNNNRRPFRAKYMLSGIIRCGVCGSPMEITLGFKRNDGTRNMRYQCINRFPRQTKGITVYNDAQKCDTGLYEKSDIEIHVLSQVRLLQLNKAKLESMFERTDVINVEDIQNQIETLNNKMRRLNDLYLNDMIDLDDLRSQTQNFLKQKELLENELENNPALNQEQDKEQFKELLGTKDITQLDYDKQKLIIKNLIDKVFVKPGNIEIKWRI

SEQ ID NO: 11810 - protein, 479 aa, Unknown
  Description of Unknown: Integrase A378 sequence
  PF07508,G3DSA:1.10.10.2600,SSF53041,PF13408,PS51737, cd03768,PTHR30461:SF3,PF00239,PS51736,SM00857, G3DSA:3.40.50.1390,PS00397,PTHR30461
MNKVAIYVRVSTKGQAEEGYSIDEQIALLTSYCSIHKWKIHDTYVDAGISGATIERPELSRLSRDAQKKKFNTMIVYDLKRLGRSQRNNISFIEDVLEKNGIGFISLTENFDTSTPLGKAMVGILSAFGQLDRDTIRERMMMGKIGRAKSGKPMMTSTIAFGYTYDKVTSSLNINPAEAIVVKIIYNEYLSGRSLTKLRDYLNENDLLRNGKPWNYQGVSRVLRNPVYMGMVRFRGEVYQGNHDPIIDSETFEAVQKELKKRQLETYEFNKNTRPFRAKYMLSGIIKCGYCGSPMGVTLGTKRKDGTRNIRYQCVNRFPRTTKGITVYNNGQKCNSGFYEKDDIEIYVLGQVRLLQLNKTKLNKMFETPEIINVEEIENQINSLNNKMKRLNDLYLNDMISLDELKTQTYTFLKQKDLLENELNNNPAIHQEENRKQFQKLLGTKDITQLSYEEQSFAIKNLIDKVFVKPGIIDINWRI

SEQ ID NO: 11811 - protein, 479 aa, Unknown
  Description of Unknown: Integrase A379 sequence
  PF07508,G3DSA:1.10.10.2600,SSF53041,PF13408,PS51737,cd00338, PTHR30461:SF3,PF00239,PS51736,SM00857,G3DSA:3.40.50.1390,PS00397 ,PTHR30461
MKTAVYIRVSTDEQVNEGYSISAQKQKLKAFCVSQGWDVVGLYADEGISAKDTNRPYLQRMIQDIKNGEIECVLVYRLDRLTRSVFDLYKLLEVFEQHDCKFKSATEVYDTTTAMGRMFITIVAALAQWERENMGERISFGFGEKIRQGKYPLNFAPLGYDLSKEESKLYINEKEAATVRIVYNLYQSGMGFGKVAKELNAQEIYTKDRNKWTDNTTMKTIRNPIYYGSMRWNGLIYKLKHEPILTYEEWSNTQEIIKARTSQTPRSVSSRYIFSGKLKCNGCGGPMQGYYTTSKAAGGGVNQYPQYRCRNKRNGKCSKSRSLSETKLEKAFLEYLENENYLDLYEKTADKGEKELNKKEPEVDIQQLKNNLNRIENRKKKWQYAWAEDAMSFNDFKRRMDEAQKEEDEIKEKIESAEVETEEPFSKNDIIKILKDIEQNWIMLNVQEKKNLVNSIIEEVRYDQTGKTVTIDRINFKKD

SEQ ID NO: 11812 - protein, 478 aa, Unknown
  Description of Unknown: Integrase A380 sequence
  PF07508,G3DSA:1.10.10.2600,SSF53041,PF13408,PS51737, cd00338,PTHR30461:SF3,PF00239,PS51736,SM00857, G3DSA:3.40.50.1390,PTHR30461
MRVCKYRRVSTDMQREEGVSLSTQDERLDAFIKSQGWTVVADYADEGFSAKNMDRPAIQQLIQDLKRDKFDVVLVYRLDRLVRSVSDLHELLQIMDKHDVKFKSCTEVFDTTSATGRMFITIIATLAQWERETIAERVFDNMLARSEKGMRNGAPAPYGYIYKDGSLELVKEEAKWVKFIFDKYKTTGSQNIAKTLNKRGIKTRKGEVWSDFSIRYLLRNPIYAGYVRWNYRSLAKGKCTGDEVIQKIDQDNFQAIITKEEFDEIQILIKERSTVAFRSDNFYPYSGVAKCAKCGNSLTGAFKNKKSGGIYRFYKCAGRFRTGICDAPVISEEAIDIALMKCLDLPEFDLKYEEQNKIDREQLEKELTKIELKKSRIKELYLDGDISKNEYRKRMDSLIDDEIRIQKKLEIEEIEATYEEVLEWMSLIKESWNELSFETRKAAIRTIFSSLTVKIIKDPVFGRYPQLPVVEITNYKLK

SEQ ID NO: 11813 - protein, 478 aa, Unknown
  Description of Unknown: Integrase A381 sequence
  PF07508,G3DSA:1.10.10.2600,SSF53041,PF13408,PS51737,cd03768, PTHR30461:SF3,PF00239,PS51736,SM00857,G3DSA:3.40.50.1390, PS00397,PTHR30461
MNKVAIYVRVSTTNQAEEGYSIEEQIDKLKAYCMIKDWSVYDIYVDAGFSGSNIKRPAIQKLIKDTKRKVFDTVLVYKLDRLSRSQKDTLYLIEDVFLENKIDFVSLLENFDTSTAFGKAMVGILSVFAQLDREQIKERMQLGKLGRAKSGKPMMWAKVAYGYTYHIGTGKMTVNQSEAIIVKEVFSSYLNGRSITKLRDDLNEKYPKTPAWSYRTIRQMLDNPVYCGYNKYKGQVYPGNHAPIISKEIYNQVQDELKIRQQKAYEHNNNYRPFQSKYMLSGIAQCGYCKAPLKITLGTIRKDGTRFKRYQCVQRTPRKTKGATVYNNNEKCNSGFYEKDDIEAYVLESISKLQTDSNCIDELFNDEPEKLDRDALNKEIETLSNKISRLNDLYINNLITLDDLKTKTDTLQSKIDILKEKLEKDPALERQKNKQKMLKKLDTKDIFKMDYEEQKMLVRALINKVQVTADSIKILWKI

SEQ ID NO: 11814 - protein, 478 aa, Unknown
  Description of Unknown: Integrase A382 sequence
  PF07508,G3DSA:1.10.10.2600,SSF53041,PF13408,PS51737, cd03768,PTHR30461:SF3,PF00239,PS51736,SM00857, G3DSA:3.40.50.1390,PS00397,PTHR30461
MNKVAIYVRVSTTNQADEGYSIDEQIDKLKAYCEIKDWVVYKVFTDAGFTGSNIERPAMTKLISAAKKKQFDTILVYKLDRLSRSQKDTLYLIEEIFIKNGIDFLSLSENFDTSSAFGKAMIGILSVFAQLEREQIKERMMLGKVGRAKSGKTMMWAHPAYGYTYNKETSSLDIVPAEAALIKKIYELYIKGKSISKLRDYLNDNKIFVNKSVPWSHRTISYALTNPVYCGMIRYEGKLYDGLHEPIITKELFNKTQEVLAERRMEASKKNPRPFQSKYMLSGIIRCGCCNAPMKSLLGMPRKDGTRTRRYQCINRFPRKTKPVTVYNDNKKCDSGYYYMEDVEHAVLHRISTLYSDEIEASEFFEDEITFDIQKVKDEITKIESKINKLNDLYINDFISLDSLKKQSANLINEKKIIENEIEKENSKQVNNLKEDALKILATNNIHDLDYEMQSYVVKSLIDKVFVTKEDMEILFKK

SEQ ID NO: 11815 - protein, 478 aa, Unknown
  Description of Unknown: Integrase A383 sequence
  PF07508,G3DSA:1.10.10.2600,SSF53041,PF13408,PS51737,cd03768, PTHR30461:SF3,PF00239,PS51736,SM00857,G3DSA:3.40.50.1390,PS00397 ,PTHR30461
MKTTNKVAIYVRVSTTSQAEEGYSIDEQLFSLRKYCEAMNWQVYHEYVDAGFSGGKLDRPEITQLIQDAKNKLFDTILVYKLDRLSRSVPDTLYLVRDVFGKRDIGFVSLQENIDTSSAMGNLFITLLSAIAEFEREQITERMEMGKLGRAKSGKTMAWRVTAFGYDYNKETGNLELDPVKAPLVKMVFDEYMQGTSIDNIADKMNSLDYTGKDRPWAHHGVASLLDNPVYYGMNRYKDKIYKGNHEPVITKELFDLVQKERERRRQGTPESHNTPPWQRKYFATKVCRCGLCGERMKLDRGKKRKKDGFTPMVYYCKNSRPYRNATCHNVLYQRDIVEDYIIHEVAKIQNNPNILKRGEYRTKEYELERQRKQLNETIKRNTDKLSKLNNLYLNDLITLEDLKKQSDLLIKRKRYSEERLALTYQTTEDDEREYRLKSFLAFPDLLTADYETQRKAVEMIVDRVELTKDKYIIHYNF

SEQ ID NO: 11816 - protein, 477 aa, Unknown
  Description of Unknown: Integrase A384 sequence
  PF07508,SSF53041,PS51737,cd00338,PTHR30461:SF3, PF00239,PS51736,SM00857,G3DSA:3.40.50.1390,PTHR30461
MAGQRVLGRIRLSRLTEESTSAARQRELIQQWADMNEHTVVGWAEDLDVSGSIDPFDSPSLGPWFREDKRDEWDILVAWKLDRIGRRAIALNRVFGWMMDHNKTLVCVSDNIDLSTWVGRLVANVIAGVAEGELEAIRERTRAGRKKILESGRWPGGVVPYGLRPVPNPGGGWKLEVDPEPASVIHRIVEEIIAGSAVEAVANRLDEDGIPAPKGGTWLPSTIWKLCGSNHLLGHARYGGKSVRDAEGRPVLNAEPILTWDQWDALQRALEARRRGGSRTRDTSPLLGVAVCYECDKPLFHKIYKRDYGRRLYRYYHCRDKTHNQQVEAEVVETLLEESFLQRIGDLPVLERVFIPSENHEIELEEARRAIEELTPLLATVTSATMRKSLLEQLSALDSRLTELEALPTREAHWEYRETGQTYAEAWKEADTEGRRQILLRSGITLAVILAGKARNSGGSLKFDFRVPEDIEKRLSA

SEQ ID NO: 11817 - protein, 477 aa, Unknown
  Description of Unknown: Integrase A385 sequence
  PF07508,G3DSA:1.10.10.2600,SSF53041,PS51737,cd00338, PTHR30461:SF21,PF00239,PS51736,SM00857,G3DSA:3.40.50.1390 ,PTHR30461
MEATTKAAVYLRQSIDRTGEGLAVDRQREDCLKLCEDKGWEPVEYVDNDVSASTGKPRPAYKQMLADIRSGAVQAVVAWNLDRLHRRPIELEEFIELANKHKVALATVSGDTDLSTDSGRFYARMLGVVARHEMERKSARQKAAHRQRVKQGRPWWSGPPPFGYEADEGHENIRINKEEAKLIRKAYRDVLKGVAIHTIAKEWNAQGVKTRRGNDWAGPTVRQFLANPRNAGLKVYLGEVVGKAPWPAIIDEATYKSYMAYVKAPGRGPGKPLARKHLLSGIARCGRCGGRMGVGMTGRKYYDENGKEHRVDTYACKICFKVSRDRRKTDEVVRAVMIKLLSQPDALALAARPELPNVQELLEEANTIRDRMDNLAVEFADGGITASQMRIANERLQDRLEEVERKLVDVNSRRVLDGVIGVKDVAARWDSLPVERRRAIVETIATVTIQPTVRGRPFDPSLIEIRRRFPEEAPNGL

SEQ ID NO: 11818 - protein, 477 aa, Unknown
  Description of Unknown: Integrase A386 sequence
  PF07508,G3DSA:1.10.10.2600,SSF53041,PF13408,PS51737, cd00338,PTHR30461:SF3,PF00239,PS51736,SM00857, G3DSA:3.40.50.1390,PS00397,PTHR30461
MMNRNKVAIYVRVSTQGQVDEGYSLDEQVDLLTNYCKLKAWTLYDVYVDPGISGKNMHRPEIERLTRDAKHKLFDIVLIYDLKRLGRSQKENIVLVEDVFNKNGIRLVSFTENFDASTPVGKMVFGMLSAYAELDRANIAERMMMGKIGRAKAGKAMSWGMPPFAYDYNKETGNLELDEAKAPIVEMIFSDYLKGASVNQIVQKLNSMDYNGKDHEWKHHAVTVILENPSYCGMTRYIDQIYEANHKPIIDKVTFDLVQIERKKRLSKYHDNDLVGPFQRKYIGSKFCYCGLCGANLKSEKDKRNKHTGIRPISFYCPNTRSRGTNDCTNKRFRQDILEGYILKEVAKLQQQPEKLRVIKPKKDAENESKLDNYKNKIRQNTSKLSKLNELYINDLMPIDELKKRSKTLYDENEFLEKQIEQLSSTTREDELRNKIDTFLAFPDILTADYETQKQAIEIVVSRVEVTKNGIDIFFNF

SEQ ID NO: 11819 - protein, 477 aa, Unknown
  Description of Unknown: Integrase A387 sequence
  PF07508,G3DSA:1.10.10.2600,SSF53041,PF13408,PS51737,cd03768, PTHR30461:SF3,PF00239,PS51736,SM00857,G3DSA:3.40.50.1390, PS00397,PTHR30461
MITTRKVAIYVRVSTTNQAEEGYSIQGQIDSLIKYCEAMGWIIYEEYTDAGFSGGKIDRPAMSKLITDAKHKRFDTILVYKLDRLSRSVRDTLYLVKDVFNQNNIHFVSLQENIDTSSAMGNLFLTLLSAIAEFEREQITERMTMGKIGRAKSGKTMAWTYTPFGYDYNKEKGELILDPAKAPIVKMIYTDYLKGMSIQKIVDKLNKMDYNGKDCTWFPHGVKHLLDNPVYYGMTRYNNKLFPGNHQPIITKELFDKTQRERQRRRLGIEENHYTIPFQAKYMLSKFLRCRQCGSRMGLELGRPRKKEGKRSKKYYCLNSRPKRTASCDTPLYDAETLEDYVLHEIAKIQKDPSIASRQKHIEDHELKYKRERIEANINKTVNQLSKLNNLYLNDLITLEDLKTQTNTLIAKKRLLENELDKTCDNDDELDRQETIADFLALPDVWTMDYEGQKYAVELLVQRVKVDRDNIDIHWTF

SEQ ID NO: 11820 - protein, 476 aa, Unknown
  Description of Unknown: Integrase A388 sequence
  PF07508,G3DSA:1.10.10.2600,SSF53041,PS51737,cd00338, PF00239,SM00857,G3DSA:3.40.50.1390,PTHR30461
MHFMQNRGSGPDAECDIYVRISQDLTGDELGVQRQEQRCRALAAQLKLNVRHVWVDNDLSATKKSVVRPDFEAMLQSKPQAIVCWHTDRLIRVTRDLERVIELGVNVYAVEAGHLDLSTPAGRAVARTVTAWATYEGEQKAARQKLANQQAAQQGRPYTAGIRPFGYADDHMTLIAEEAAAIVEGAQMILGGESLSAVARKWTESGLQSPRSKVTGANGWTLRGVKNVLTSPRYIGQSTYLGEVMGEGQWPPILDPEVYYSVVAILNNPERFSGGKRTGRTPDNLLSGIALCGYDGCTDTVNARGYRGVPVYGCGLTHTRTPRSIADDRASKATLARLMFPDFLGQILETQNAQDGHSGAQLQSQAQELRERLDGLAVAYAEGTISLSQMTAGSAALQKKLEAIESELVSAAGIPPLDPVKGVAGLIEGWPTLPLPTRRAWVDFCCIVTLNPARGRHMSSMTADDHVTIEWRDVSE

SEQ ID NO: 11821 - protein, 476 aa, Unknown
  Description of Unknown: Integrase A389 sequence
  PF07508,SSF53041,PS51737,cd00338,PTHR30461:SF3,PF00239,PS51736, SM00857,G3DSA:3.40.50.1390,PTHR30461
MYPFDMRVLGRIRLSRITEESTSAARQREIIQQWSDMNDHQIVGWAEDLDVSGSIDPFETPALGPWLAEDRRDEWDILVSWKLDRVGRRAIPLNRLFGWMLEHDKTLVCVNDNIDLSTWVGRLVANVIAGVAEGELEAIRERTKAGRQAVLRAGRWPGGPTPYGLRPARADVGARLEIVPEQAEVIHRIVREVCAGSSIEAVANRLNEDGVPSPKNGEWLPSTLWKIVTAKYLLGHATYEGNTVYDAEGRPVLNADPILTQDEWDDLQAAVAARRVNYTVRSKTTSPLHGVVYCLICDLPMFHKRMDRPYGKRHYRYYHCRDKQHGVFIDAEQVESAVEDTFIHVLGDVTVKERAWLPAEDHELEREEAERAIDDISALLGTMTSETVRSRLSTQLAALDSRLRELEGLPSREARWEYRETGQTYADAWREADTEERRQLLLRSGITAAVHVRGKTRNSGGAWEFEFRIPDAVKSL

SEQ ID NO: 11822 - protein, 476 aa, Unknown
  Description of Unknown: Integrase A390 sequence
  PF07508,G3DSA:1.10.10.2600,SSF53041,PS51737,cd00338, PF00239,SM00857,G3DSA:3.40.50.1390,PTHR30461
MSFMQNRGSGQVAECDIYVRISQDLTGDEYGVQRQEKRCRALAAQLGLNVRHVWVDNDLSATKKNVVRPDFEALLQSNPQAIVCWHTDRLIRVTRDLERVIELGINVYAVEAGHLDLSTPAGRAVARTVTAWATYEGEQKAARQKLANQQAAQQGRPYTAGIRPFGYGDDHMTIIADEAAAIVEGAQMILAGESLSAVARKWDEAKLQSPRSKVTGAKGWTLRGVKQVLTSPRYAGMATYLGEVMGQAQWPPILDPEVHYSVVAILNSPERFSGGKRTGRTPGTLLAGIGQCGYDGCTDTVNGRGYRGVLVYGCKDTHTRTPRSIADDRVSKATLARLMFPDFLGQILESQNAQDGQSGAQLHSQAQELRDRLDGLAVAYAEGAISLSQMTAGSTALQKKLEEIESQMVSSAGIPPLDPVKGIAGLIEGWPTLPLPTRRAWVDFCCIVTLNPAKGRHLTSMSVDDHVTIEWRDVSE

SEQ ID NO: 11823 - protein, 476 aa, Unknown
  Description of Unknown: Integrase A391 sequence
  PF07508,G3DSA:1.10.10.2600,SSF53041,PS51737,cd00338, PTHR30461:SF21,PF00239,SM00857,G3DSA:3.40.50.1390 ,PTHR30461
MRGMNNRGSGSEAEADLYLRISQDVTGDELGVQRQETKCRELCKQLGLNVRHVWVDNDLSATKKSVVRPDFEAMLRSQPQAIVCWHTDRLIRVTRDLERVIELGVNVYAVEAGHLDLSTPAGRAVARTVTAWATYEGEQKAARQKLANQQAAQQGRPYTAGIRPFGYGDDHMTIMAEEAAAIVDGANMILAGESLSAVARKWSEAGLQSPRSKAAEAKGWTLRGVKKVLTSPRYIGQSTYLGEVMGKAQWPPILDPEIHYGVVAILNNPERFSGGRRTGRVAATLLAGIGQCGYDGCDDTVNGRGYRGVPVYGCGLTHTRTPRSIADDRASKATLARLMFPDFLGQILSSQNAQDGTSSAALQAEAEELRKRLDGLAMAYAEGAISLSQMTAGSGALQKKLEAIDAELVSSAGIPPLDPVKGVAGLIEGWPGLPLPTRRAWVDFCCVVTLNPAKGRHLTSMTTDDHVSIEWRDVEE

SEQ ID NO: 11824 - protein, 474 aa, Unknown
  Description of Unknown: Integrase A392 sequence
  PF07508,G3DSA:1.10.10.2600,SSF53041,PS51737,cd03768, PF00239,PS51736,SM00857,G3DSA:3.40.50.1390,PS00397, PTHR30461
MNLMDENTPKNVGIYVRVSTEEQAKEGYSISAQKEKLKAYCISQGWDSYKFYIDEGKSAKDIHRPSLELMLRHIEQGIIDTVLVYRLDRLTRSVRDLYSLLDYFDKYQAVFRSATEVYDTGSATGRLFITLVAAMAQWERENLGERVKMGQVEKARQGQFSAPAPFGFTKEGESLVKNPEEGEVLLDMIDKIKKGYSLRELADYLDESDAIPKRGYKWHIASILVILKNPVLYGGFRWAGEILEGAFEGYISKKEFEQLQKMLHDRQNFKRRETSSIFIFQAKILCPNCGSRLTCERSIYFRKKDNKNVESNHYRCQACALNKKPAIGISEKKFEKALIEYMQNANFKREPKIPQEKQQDYDKLHQKIISIEKQRKKYQKAWSMELMTDQEFEQLMAETKEALQKALAKLEQNDLHPIEKPLNIERAKELAKMFRENWSVLTGEEKRQTVQELIKHIEFEKKDNKARILDIHFY

SEQ ID NO: 11825 - protein, 474 aa, Unknown
  Description of Unknown: Integrase A393 sequence
  PF07508,G3DSA:1.10.10.2600,SSF53041,PF13408,PS51737,cd00338, PTHR30461:SF3,PF00239,PS51736,SM00857,G3DSA:3.40.50.1390, PS00397,PTHR30461
MKCVAYIRVSTDEQAKHGYSIAAQKERLEAYCVSQEWDLIDTFVDDGYSAKDLNRPHFKEMMERVKNDDIDVLLVYRLDRLTRSVLDLYEILKILDTHNCMFKSATEVYDTTNAMGRLFITLVAAIAQWERENTAERVKLGMEKKTKLGKWKGGMPPYGYKILNKELEVNQDEEPLIKYIFHLSKTLGFYTIAKKLTEQGFTTRKGGDWHVDTVRDIANNPIYAGYLTFNDPKDSKKPPRQQTLYDGQHSRIIPREEFWSLQDLLDKRRTFGGKRETSNYYFSSVLRCARCGSSMSGHKGSQGVKTYRCSGKKAGKKCTSHIIKEDNLVLTVLNSLEEITKQIIGDTNQNNISQQKITELETELKLIQKLMKKQKVMFENDVISINELIAKTENLRHQEKQLSEEISKYQKANNTNTEEIKFIMENIHSLWNDANDFERKQIISTIFNQLVIDTEDEYKRGTGASRKIIIVSAK

SEQ ID NO: 11826 - protein, 473 aa, Unknown
  Description of Unknown: Integrase A394 sequence
  PF07508,G3DSA:1.10.10.2600,SSF53041,PS51737,cd00338, PF00239,SM00857,G3DSA:3.40.50.1390,PTHR30461
MNHRGSGPDAETDIYVRISQDLTGDELGVQRQEERCRALCAQLGLKVRHVWVDNDLSATKKDVVRPDFEAMLQSKPQAIVCWHTDRLIRVTRDLERVIELGINVYAVEAGHLDLSTPAGRAVARTVTAWATYEGEQKAARQKLANQQAAQQGRPYTAGIRPFGYGEDHMSIMAEEAAAIVEGAQMILAGESLSAVARRWDEAKLQSPRSKVTGAKGWTLRGVKKVLTSPRYVGQSTYLGEVMGEAQWPPILDPEVHYSVVAILNSPERFSGGKRTGRTPGTLLAGIGLCGYDDCTDTVNGRGYRGVPVYGCTATHTRTPRSIADDRASKATLARLMFPDFLGQILETQSAQDGRSGAQLQSQAQELRNRLDGLAVAYAEGSISLSQMTAGSTALQKKLEEIESEMVSSAGIPPLDPVKGVAGLIEGWPGLPLPTRRAWVDFCCIVTLNPAKGRHMTSMSVDDHVTIEWRDVEE

SEQ ID NO: 11827 - protein, 473 aa, Unknown
  Description of Unknown: Integrase A395 sequence
  PF07508,G3DSA:1.10.10.2600,SSF53041,PS51737,cd00338,PF00239, SM00857,G3DSA:3.40.50.1390,PTHR30461
MQNRGSGQVAECDIYVRISQDLTGDEYGVQRQEKRCRALAAQLGLNVRHVWVDNDLSATKKNVVRPDFEALLQSNPQAIVCWHTDRLIRVTRDLERVIELGINVYAVEAGHLDLSTPAGRAVARTVTAWATYEGEQKAARQKLANQQAAQQGRPYTAGIRPFGYGDDHMTIIADEAAAIIEGAQMILAGESLSAVARAWDEAKLQSPRSKVTGAKGWTLRGVKQVLTSPRYAGMATYLGEVMGRAQWPPILDPEVHYSVVAILNSPERFSGGKRTGRTPGTLLAGIGQCGYDGCTDTVNGRGYRGVLVYGCKDTHTRTPRSIADDRASKATLARLMFPDFLGQILESQNAQDGPSGAQLQSQAQELRDRLDGLAVAYAEGAISLSQMTAGSTALQKKLEEIESQMVSTAGIPPLDPVKGIAGLIEGWPNLPLPTRRAWVDFCCIVTLNPAKGRHLTSMTVDDHVTIEWRDVEE

SEQ ID NO: 11828 - protein, 473 aa, Unknown
  Description of Unknown: Integrase A396 sequence
  PF07508,G3DSA:1.10.10.2600,SSF53041,PS51737,cd00338, PF00239,SM00857,G3DSA:3.40.50.1390,PTHR30461
MQNRGSGQVAECDIYVRISQDLTGDEYGVQRQEKRCRALAAQLGLNVRHVWVDNDLSATKKNVVRPDFEALLQSNPQAIVCWHTDRLIRVTRDLERVIELGINVYAVEAGHLDLSTPAGRAVARTVTAWATYEGEQKAARQKLANQQAAQQGRPYTAGIRPFGYGDDHMTIIADEAAAIVEGAQMILAGESLSAVARKWDAAKLQSPRSKVTGAKGWTLRGVKQVLTSPRYAGMATYLGEVMGQAQWPPILDPEVHYSVVAILNSPERFSGGKRTGRTPGTLLAGIGQCGYDGCTDTVNGRGYRGVLVYGCKDTHTRTPRSIADDRASKATLARLMFPDFLGQILESQNAQDGQSGAQLQSQAQELRDRLDGLAVAYAEGAISLSQMTAGSTALQKKLEEIESQMVSSAGIPPLDPVKGIAGLIEGWPTLPLPTRRAWVDFCCIVTLNPAKGRHLTSMSVDDHVTIEWRDVSE

SEQ ID NO: 11829 - protein, 473 aa, Unknown
  Description of Unknown: Integrase A397 sequence
  PF07508,G3DSA:1.10.10.2600,SSF53041,PS51737,cd00338,PF00239, SM00857,G3DSA:3.40.50.1390,PTHR30461
MQNRGSGQVAECDIYVRISQDLTGDEYGVQRQEKRCRALAAQLGLNVRHVWVDNDLSATKKNVVRPDFEAMLQSKPQAIVCWHTDRLIRVTRDLERVIELGINVYAVEAGHLDLSTPAGRAVARTVTAWATYEGEQKAARQKLANQQAAQQGRPYTAGIRPFGYGDDHMTIIADEAAAIVEGAQMILAGESLSAVARKWDEAKLQSPRSKVTGAKGWTLRGVKQVLTSPRYAGMATYLGEVMGQAQWPPILDPEVHYSVVAILNSPERFSGGKRTGRTPGTLLAGIGQCGYDGCTDTVNGRGYRGVLVYGCKDTHTRTPRSIADDRASKATLARLMFPDFLGQILESQNAQDGQSGAQLQSQAQELRDRLDGLAVAYAEGAISLSQMTAGSTALQKKLEEIESQMVSSAGIPPLDPVKGIAGLIEGWPTLPLPTRRAWVDFCCIVTLNPAKGRHLTSMTVDDHVTIEWRDVSE

SEQ ID NO: 11830 - protein, 473 aa, Unknown
  Description of Unknown: Integrase A398 sequence
  PF07508,G3DSA:1.10.10.2600,SSF53041,PF13408,PS51737, cd03768,PTHR30461:SF3,PF00239,PS51736,SM00857, G3DSA:3.40.50.1390,PS00397,PTHR30461
MRNKVAIYVRVSTASQADEGYSIDEQKSKLEAYCEIKDWKIYDTYIDGGFSGANTQRPELERLISDAKRKKIDIVLVYKLDRLSRSQKDTLFLIEDVFAKNDVAFISLQENFDTSTPFGKASIGMLSVFAQLEREQIKERMMLGKEGRAKNGKSMSWTTIPFGYDYSKETGILSVNPTQALIVKRIFTEYLNGKSVVKIIRDLNAEGHVGRKRPWGETITKYLLKNETYLGKSKYKGKVFEGQHDAIISQELFDLVQLEVEKRQISAFEKYNNPRPFRAKYMLSGLMKCGYCGASLGLYVAPKNKNGVSKYKYQCRHRYHKDKAIRCNSGWYSKDELEKRVIKELERLKFDPKYKKETLAKKDETIKVEDIKKQLERINKQVSKLTELYLDEVITRKDLDEKNAKIKTERQYLEEQLENQKSNVMSIRKRKLSRLLKDFDIEKLSYEEASKIVKSVIKEIVVTKDDMTITLDF

SEQ ID NO: 11831 - protein, 473 aa, Unknown
  Description of Unknown: Integrase A399 sequence
  PF07508,G3DSA:1.10.10.2600,SSF53041,PF13408,PS51737,cd00338, PTHR30461:SF3,PF00239,PS51736,SM00857,G3DSA:3.40.50.1390, PTHR30461
MSPDKPLRAVGYVRLSKATDTSTSPERQRRDIARFIEARGWETVATVEDIDVSATRRRLDRPGIHELRRIFSRKAADVVVVSRLDRIARNVADVSTLLDEGIAIVSASEAFDTSTAQGRAMAQVAQVFAELEAKTIGLRVSSSRGHLPAIGRWPGGPTPYGFTTDELPGGGGRTLVHHPDEAPIVRRMVTRAIEGAGPSAIARELNADGIPSRRGVEWNVRTVGRILRHGSLRGYATVKGDKVRDEIGLPVVIWPPLITPEEARQLDAALARTPHPGSYGDGGPEPLLQGLALCSSCGSPMTPRHFRRPDLAAMYVCQSRNRGRLCDRPQTANAARLEGVAERLFLASYGRIPVVETVEEATVPDGLPEVLQAIEETTDAMRAPGADVMALAERLVALNGERERLKALPHTTTRSKATGELYADLWERSGTVERRELMRGLQAFVIVHPARARGHWNDDRVELVDYMAGQLDD

SEQ ID NO: 11832 - protein, 472 aa, Unknown
  Description of Unknown: Integrase A400 sequence
  PF07508,G3DSA:1.10.10.2600,SSF53041,PS51737,cd00338, PF00239,PS51736,SM00857,G3DSA:3.40.50.1390,PTHR30461
MGKRAVIYTRVSRDDTGEGQSNQRQETECRRLTDYRRMDVVAVEADISISASKGLERPAWLRVLGMVERGEVDYVIAYHMDRVTRSMTELEQLIEMCLKYEVGLATVSGDIDLTTDVGRMVARIIGAVARAEVERKAARQKLANAQRAAEGKPHVAGVRPFGYADDHRQVITIEAQAIRAAAEAALAGESMIGIAESWDQAGLHSARARRGHDKGSRPTKAGWSARGVRNVLVNPRYAGIRLYNGERVGQGDWEPILDVETHLRLVEKLTDPSRRKGTVKAGRTPTSLLTAIARCSVCEGTVRASSVRGRLTYSCRNSHAHVDREVADLMTQEWVIDRLAQPEVLAKLAPSGDDRVDQAKAVVEKRREALKTYARLLATGAMDEEQFIEASAVARREVEEAEAILSQAGTGDLLAGLDVGSDAVGPQFLALSLARQRGIVERLVDVTLLPASKARKVVTPEAERVVLADRAA

SEQ ID NO: 11833 - protein, 472 aa, Unknown
  Description of Unknown: Integrase A401 sequence
  PF07508,G3DSA:1.10.10.2600,SSF53041,PS51737,cd00338, PTHR30461:SF21,PF00239,PS51736,SM00857,G3DSA:3.40.50.1390 ,PTHR30461
MMNRGGPTIRADIYVRISLDRTGEELGVERQEESCRELCKSLGMEVGQVWVDNDLSATKKNVVRPAFEAMLVSNPQAIICWHTDRLIRVTRDLERVIDLGVNVHAVMAGHLDLSTPAGRAVARTVTAWATYEGEQKAERQKLANIQNARAGKPYTPGIRPFGYGEDHMTVVGDEADAIRDGAKMILDGWSLSAVARYWEELGLQSPRSMAAGGKGWSLRGVKKVLTSPRYVGRSSYLGEVVGDALWPPILDPDVYYGVVAILNNPERFSGGARTGRTPGTLLSGIGQCGYDDCKDTVGGRGYRGVLVYGCKDTHTRTPRSIADARASNATLARLMFPDFLPGLLASGQTESGESAASMHAEAQTLRERLDGLATAYAEGAINLSQMTAGSEALRKKLEIVEAELVGSAGIPPFDPVAGVAGLISGWPDLPLPTRRAWVDFCCVVTLNPQRGRHLSSMTVDDHVTIEWRDVAE

SEQ ID NO: 11834 - protein, 472 aa, Unknown
  Description of Unknown: Integrase A402 sequence
  PF07508,G3DSA:1.10.10.2600,SSF53041,PF13408,PS51737, cd00338,PTHR30461:SF3,PF00239,PS51736,SM00857, G3DSA:3.40.50.1390,PTHR30461
MIPMKIIGYVRLSRASREESTSVVRQREIIEKTCAARDFELVDIVEDVDVSATKTRLDRPGLSEVRERIRAGHADAVMVWRLDRIARSVVDFGVLLDDGLDIISATEPLDTASPMGRAMAEVLQVFARLEAKTIGVRISASQEHLRKVGRFPGGVIPYGYRAVPHPDGVGRALEPHPAEAAVVRRMADEVLAGDSVYAVTTRLNRDGIPARRGTKWSTTSVQRILRSNAVLGRVKVRGELLRDDATGLPSVVWEPLLSVAEVERLRALTDWTPTPGRSEATAEGKRRKASRLLSGLIFCPGCGYPLTAKSRHTTGAPIYVCEARARGRVCPGGIAIECERVEEEVARQFLAVVGRWSLVEPRISVREVSGLAAVEEALRSTTDALRAPDANLPALFERLTKLRTERDRLAALPEEPVVEMLETGRTFAEAWAETDTAGRRSLLLNSGVSISIARAPQRGKWNPERVSVAFHG

SEQ ID NO: 11835 - protein, 472 aa, Unknown
  Description of Unknown: Integrase A403 sequence
  PF07508,SSF53041,PF13408,PS51737,cd00338,PTHR30461:SF3,PF00239, PS51736,SM00857,G3DSA:3.40.50.1390,PTHR30461
MGAMRILGYVRLSRASREESTSVVRQREIIAKTCAARDFELVDIIEDVDVSATKTRLERPGLSEIRARIKAGEADAVMVWRLDRIARSVVDFGVLLDEGLDIISATEPLDTASPMGRAMAEVLQVFARLEAKTIGVRISASQEHLRRVGRFPGGVIPYGYRAVPHPDGVGRALEPHPEEAAVVRRMADEVLGGASVYAVTTGLNRDGIRPRRASEWTPTSVQRILRSNAVLGRVKVRGELLRDDATGLPLQVWEPILRVEEVERLRALTDWTPTPGRSEATAEGRRTKATRLLSGLIFCPGCGYPLTAKSRRSTGAPLYVCEARARGRVCPGGVAIECERVEEEVARQFLAVVGRWQAVEPRVSVREVSGLAAVEEALRATTDALRAPDADLPVLLERLTKLRAERDRLAALPEEPVVELVDSGRTFAQAWADQDVSGRRALLANSGAEITIERAPQRGKWSPERVRVAFHG

SEQ ID NO: 11836 - protein, 472 aa, Unknown
  Description of Unknown: Integrase A404 sequence
  PF07508,G3DSA:1.10.10.2600,SSF53041,PF13408,PS51737, cd03768,PTHR30461:SF3,PF00239,PS51736,SM00857, G3DSA:3.40.50.1390,PS00397,PTHR30461
MAKVAIYARVSTLNQADEGYSIQGQVESLTKYCEAMSWTIHDTYIDAGFSGGKLERPEINRLINDVKLKKFDTVLVYKLDRLSRNVKDTLFLVKEIFTDNDIHFVSLKENIDTSSAMGSLFLTLLSAIAEFEREQIKERMMFGKLGRAKSGKTMSWTTSPYGYTYDKEQGKLIAIPSQAIVVKKLFDYYISGMSIANMLRKMNAEEQIGRTAEWSINAMKNILRNEVYYGMVKYRGQLFKGEHEPFISKKTFELAQIERERRKQYFSKKFKNTSPFKAKYMLSGLLRCGCCSQPLISNVQRKSANGRTNIFYQCKERYNKDLSKRCTESGRFRKEILEEFVINELSKIKINNKYVENFSKDEPKIDINNLKKEINSIEQKLEKVSELYIDGIVTRDILIKKSEKLIKQKEFVQKQIDEMDTVSEKDKMNIIKKTIDRWNPEKTSYEDTTLLVRKLVKYIVVDEERIDIFLNF

SEQ ID NO: 11837 - protein, 472 aa, Unknown
  Description of Unknown: Integrase A405 sequence
  PF07508,G3DSA:1.10.10.2600,SSF53041,PF13408,PS51737,cd03768, PTHR30461:SF3,PF00239,PS51736,SM00857,G3DSA:3.40.50.1390,PS00397 ,PTHR30461
MIATNKVAIYVRVSTISQAEEGYSIDEQINKLKAYCDIKDWSIYDVYSDGGFSGASTNRPALERLINDAMKKEFDTVIVYKLDRLSRSQKDTLYLIEEIFNKYDIAFYSLAENFDTSTAFGKAMVGILSVFAQLEREQIKERMLLGKLGRAKAGHSMMWTNPPFGYRISKGDKVVSINPVQSVIVKRIFSEYIAGKPISKILTDLDTEGHVGRSKPWSLTTIKDILKNPTYWGKIRYQGELYDGLHEPIISEEEFKLAQVELRRRQDETFSRTNNPRPFQSKYMLSGLLKCGYCGSTLRIYVAHKRKDGTYPPLKYQCANRFSKDTKKRCNSRQYDKSELEATIISKLNQLRLNNDIEVVTKPNINKDELKQEIQAIATKLNRLTDLYVDGIINRDDLQKRRLALENQKSILESELAIDHDELLTRRKQTILEELGRLNLIEGSYVEQTTIVRKVVKEILVKTGSIDLMLDI

SEQ ID NO: 11838 - protein, 472 aa, Unknown
  Description of Unknown: Integrase A406 sequence
  PF07508,G3DSA:1.10.10.2600,SSF53041,PF13408,PS51737, cd03768,PTHR30461:SF3,PF00239,PS51736,SM00857, G3DSA:3.40.50.1390,PTHR30461
MQTKRKVAIYSRVSTLHQAEEGYSIGQQIEALTKYCQAMGWAIYDNYSDGGFSGGKLERPAMQKMIQDAESGKFDTVVVYKLDRLSRNVRDTLYLVKDVFNANNVDFVSLQENIDTKSAMGNLFITLLSAIAEFEREQIKERMQLGVKGRAKSGKTTSWTTPPFGYEYNTNTQLMTINHYQAEIVRDMFDKIISGWSIMGITTHLRKTNSKKWTHVRVKRILENVAYIGKVKYRDEIFDGEHAPILTEEVFYKAQKALEERTNKKDNTRPFQGLYMLSNIAKCGYCGTPLKIDSYKPRKDGTRKRTYTCINRNPKRIKTAIYNDGKQCKESGRYDVKDVEKYVLTEISKLQLNPKSIESLYRDKPEENITAHQERLKKLETKLSKLNDLYINELISMEVLKQKSAELLKEKSSLETFINNNKRKTNNKPAFEKVAKMDDIFKMSYDDQKRIVKTLIKRVEVKRDEINVIFKL

SEQ ID NO: 11839 - protein, 472 aa, Unknown
  Description of Unknown: Integrase A407 sequence
  PF07508,G3DSA:1.10.10.2600,SSF53041,PF13408,PS51737,cd03768, PTHR30461:SF3,PF00239,PS51736,SM00857,G3DSA:3.40.50.1390, PTHR30461
MNTKRKVAIYSRVSTLHQAEEGYSIGQQIEALTKYCQAMGWVIYDNYSDGGFSGGKLERPAMQKMIQDAKSGKFDTVVVYKLDRLSRNVRDTLYLVKDVFNANNVDFVSLQENIDTKSAMGNLFITLLSAIAEFEREQIKERMQLGVKGRAKSGKTTSWTTPPFGYEYDTNTQLMTINHYQAEIVRDIFDKIISGWSIMGITTHLRKTNNKKWTHVRVKRILENVAYIGKVKYRDEIFDGEHAPILTEEIFYKAQKALEERTSKKDNTRPFQGLYMLSNIAKCGYCGTPLKIDSYKPRKDGTRKRTYTCINRNPKRIKTATYNDGKQCKESGRYDVKDVERYVLNEISKLQLNPKSIESLYIDKPEENITAHQERLKKLETKLSKLNDLYINELISMEALKQKSAELLKEKSSLETFINNNKRKINNKPAFEKVAKMDDVFKMSYDDQKKIVKTLIKRVEVKRDEINVIFKL

SEQ ID NO: 11840 - protein, 471 aa, Unknown
  Description of Unknown: Integrase A408 sequence
  PF07508,G3DSA:1.10.10.2600,SSF53041,PF13408,PS51737, cd00338,PTHR30461:SF3,PF00239,PS51736,SM00857, G3DSA:3.40.50.1390,PS00397,PTHR30461
MKVVLYVRVSTQEQVEEGYSIDSQLANLRKFAESQNWEVIGEYVDEGFSAKNLKRPSIENLMNDVPKKKFDVVLVYKLDRLVRSVLDLHNLLNLFDKHGVMFRSATEMFDTTSAMGRFFISIVGSMAAWERENLGERVFVNMKHKAEEGKRPGGKAPFGYDASKDSLVINEDEAQWVRWIFNEYRTKGKDMISFELNSRGVRTKNGRLWSNSVLDYLINNPVYAGYIRWNRRDISGKVKEDIVLVKGDHEPIISQEVFDEAQRIQKKRYVFKEKGNKHYPFTGILKCERCGMPLYAERAKRKNGYRIYYKCSGRFNHNICKLPVIPTEVIENEFLRLLKADVLYSEPEKEIDTSSIRKQLKALERKIERMKELYIEGDIEKDDYNVRMREAKQKELALWQTLDDNTHYFTKEQFIELASNIRAVWQEATDEERKKAVHAIMDYIYVDVTKESQRTVGSLPEIAFTRTKVLS

SEQ ID NO: 11841 - protein, 471 aa, Unknown
  Description of Unknown: Integrase A409 sequence
  PF07508,G3DSA:1.10.10.2600,SSF53041,PS51737,cd00338,PF00239, PS51736,SM00857,G3DSA:3.40.50.1390,PTHR30461
MGGVRAIIYNRVSSDPTGRGRSVADQETENRAICERNGWTIGEVLTDNDRSATRFATRERPEYRRLTEILQRGDVLVTWEASRAQRDLEAYVALRNLCAERGVLWCYSGKVYDLTVGDDRFVTGLDALLAEKEAEQTRERIMRGHRTNLAAGGAHGHVPFGYRIVRDPTTGRPLQRVPDEATAPLVQEAARRVLAGESVRSIVADLKVRTPGKPWSTSTLRRMLMNPTYAGYRTHRGEIARKGTWEPLIAQDDHDRLVALFGSRRTVPRGAAPKYLLTGIAVCGVCGGRLIMRQQGSVPAAKKRVDGKLWFYGCEGGHVGRDREKVDDAVTRVVVALLSNPDELAKLAEPSDATPAGDDVDDVAELRQRLTDAVDAYDAGKLSIEMLARIEARLQPRIEAAEERSKARYLSPVVAQVAAAPDSAGAWSALTLADKREFLRATMHIEVQRVRSRWELGVEVYPLRMAPHADA

SEQ ID NO: 11842 - protein, 471 aa, Unknown
  Description of Unknown: Integrase A410 sequence
  PF07508,G3DSA:1.10.10.2600,SSF53041,PF13408,PS51737, cd03768,PTHR30461:SF3,PF00239,PS51736,SM00857, G3DSA:3.40.50.1390,PTHR30461
MRKVAIYSRVSTINQAEEGYSIQGQIEALTKYCEAMEWKIYKNYSDAGFSGGKLERPAITELIEDGKNNKFDTILVYKLDRLSRNVKDTLYLVKDVFTANNIHFVSLKENIDTSSAMGNLFLTLLSAIAEFEREQIKERMQFGVMNRAKSGKTTAWKTPPYGYRYNKDEKTLSVNELEAANVRQMFNMIISGCSIMSITNYARDNFVGNTWTYVKVKRILENETYKGLVKYREQTFSGDHQAIIDEKTYNKAQIALAHRTDTKTNTRPFQGKYMLSHIAKCGYCGAPLKVCTGRAKNDGTRRQTYVCVNKTESLARRSVNNYNNQKICNTGRYEKKHIEKYVIDVLYKLQHDKEYLKKIKKDDNIIDITPLKKEIEIIDKKINRLNDLYINDLIDLPKLKKDIEELNHLKDDYNKAIKLNYLDKKNEDSLGMLMDNIDIRKSSYDVQSRIVKQLIDRVEVTMDNIDIIFKF

SEQ ID NO: 11843 - protein, 471 aa, Unknown
  Description of Unknown: Integrase A411 sequence
  PF07508,G3DSA:1.10.10.2600,SSF53041,PF13408,PS51737,cd03768, PTHR30461:SF3,PF00239,PS51736,SM00857,G3DSA:3.40.50.1390, PTHR30461
MRKVAIYSRVSTINQAEEGYSIQGQIEALTKYCEAMEWKIYKNYSDAGFSGGKLERPAITELIEDGKNNKFDTILVYKLDRLSRNVKDTLYLVKDVFTANNIHFVSLKENIDTSSAMGNLFLTLLSAIAEFEREQIKERMQFGVMNRAKSGKTTAWKTPPYGYRYNKDEKTLSVNELEAANVRQMFDMIISGCSIMSITNYARDNFVGNTWTHVKVKRILENETYKGLVKYREQTFSGDHQAIIDEKTYNKAQIALAHRTDTKTNTRPFQGKYMLSHIAKCGYCGAPLKVCTGRAKNDGTRRQTYVCVNKTESLARRSVNNYNNQKICNTGRYEKKHIEKYVIDVLYKLQHDKEYLKKIKKDDNIIDITPLKKEIEIIDKKINRLNDLYINDLIDLPKLKKDIEELNHLKDDYNKAIKLNYLDKKNEDSLGMLMDNIDIRKSSYDVQSRIVKQLIDRVEVTMDNIDIIFKF

SEQ ID NO: 11844 - protein, 471 aa, Unknown
  Description of Unknown: Integrase A412 sequence
  PF07508,G3DSA:1.10.10.2600,SSF53041,PF13408,PS51737, cd03768,PTHR30461:SF3,PF00239,PS51736,SM00857, G3DSA:3.40.50.1390,PTHR30461
MRKVAIYSRVSTINQAEEGYSIQGQIEALTKYCEAMEWKIYKNYSDAGFSGGKLERPAITELIEDGKNNKFDTILVYKLDRLSRNVKDTLYLVKDVFTANNIHFVSLKENIDTSSAMGNLFLTLLSAIAEFEREQIKERMQFGVMNRAKSGKTTAWKTPPYGYRYNKDEKTLSVNELEAANVRQMFNMIISGCSIMSITNYARDNFVGNTWTHVKVKRILENETYKGLVKYREQTFSGDHQAIIDEKTYNKAQIALAHRTDTKTNTRPFQGKYMLSHIAKCGYCGAPLKVCTGRAKNDGTRRQTYVCVNKTESLARRSVNNYNNQKICNTGRYEKKHIEKYVIDVLYKLQHDKEYLKKIKKDDNIIDITPLKKEIEIIDKKINRLNDLYINDLIDLPKLKKDIEELNHLKDDYNKAIKLNYLDKKNEDSLGMLMDNINIRKSSYDVQSRIVKQLIDRVEVTMDNIDIIFKF

SEQ ID NO: 11845 - protein, 471 aa, Unknown
  Description of Unknown: Integrase A413 sequence
  PF07508,G3DSA:1.10.10.2600,SSF53041,PF13408,PS51737,cd03768, PTHR30461:SF3,PF00239,PS51736,SM00857,G3DSA:3.40.50.1390, PTHR30461
MRKVAIYSRVSTINQAEEGYSIQGQIEALTKYCEAMEWKIYKNYSDAGFSGGKLERPAITELIEDGKNNKFDTILVYKLDRLSRNVKDTLYLVKDVFTANNIHFVSLKENIDTSSAMGNLFLTLLSAIAEFEREQIKERMQFGVMNRAKSGKTTAWKTPPYGYRYNKDEKTLSVNELEAANVRQMFDMIISGCSIMSITNYARDNFVGNTWTHVKVKRILENETYKGLVKYREQTFSGDHQAIIDEKTYNKAQIALAHRTDTKTNTRPFQGKYMLSHIAKCGYCGAPLKVCTGRAKNDGTRRQTYVCVNKTESLARRSVNNYNNQKICNTGRYEKKHIEKYVIDVLYKLQHDKEYLKKIKKDDNIIDITPLKKEIEIIDKKINRLNDLYINDLIDLPKLKKDIEELNHLKDDYNKAIKLNYLDKKNEDSLGMLMDNLDIRKSSYDVQSRIVKQLIDRVEVTMDNIDIIFKF

SEQ ID NO: 11846 - protein, 470 aa, Unknown
  Description of Unknown: Integrase A414 sequence
  PF07508,G3DSA:1.10.10.2600,SSF53041,PS51737,cd00338, PTHR30461:SF21,PF00239,PS51736,SM00857,G3DSA:3.40.50.1390, PTHR30461
MMNRGGPTVRADIYVRISLDRTGEELGVERQEESCRELCKSLGMEVGQVWVDNDLSATKKNVVRPDFEAMIASNPQAIVCWHTDRLIRVTRDLERVIDLGVNVHAVMAGHLDLSTPAGRAVARTVTAWATYEGEQKAERQKLANIQNARAGKPYTPGIRPFGYGDDHMTIVTAEADAIRDGAKMILDGWSLSAVARYWEELKLQSPRSMAAGGKGWSLRGVKKVLTSPRYVGRSSYLGEVVGDAQWPPILDPDVYYGVVAILNNPDRFSGGPRTGRTPGTLLAGIALCGECGKTVSGRGYRGVLVYGCKDTHTRTPRSIADGRASSSTLARLMFPDFLPGLLASGQAEDGQSAASKHSEAQTLRERLDGLATAYAEGAISLSQMTAGSEALRKKLEVIEADLVGSAGIPPFDPVAGVAGLISGWPTTPLPTRRAWVDFCLVVTLNTQKGRHASSMTVDDHVTIEWRDVAE

SEQ ID NO: 11847 - protein, 470 aa, Unknown
  Description of Unknown: Integrase A415 sequence
  PF07508,SSF53041,PS51737,cd00338,PTHR30461:SF21,PF00239,PS51736 ,SM00857,G3DSA:3.40.50.1390,PTHR30461
MTISGGTDEALFYFRISLDATGERLGVERQEPPCLELCRSKGFTPGKAYIDNDLSATKEGVVRPEFEALLRDLKLRPRPVIVWHTDRLVRVTKDLERVISTGVNVYAVHAGHFDLSTPAGRAVARTLTAWAQYEGEQKALRQKEANLQRAQMGKPWWPRRPFGLEKDGELNEPEALSLRKAYADLLSGASLTDLAADLNAAGHTTNKGGAWTSTSLRPVLMNARNAAIRTYDGEEIGPANWKAIVPEETWRAAVRLLSSPSRKTGGGGKRLHLMTGVAKCSVCDSDVKVEWRGKKGEPTAYTVYACRGKHCLSHRQKWVDDRVETLVLERLSQEDAAAVWAVDNDTELADVREEVVTMRERLEAFAEDYADGAISRAQMQAGSARVREKLEAAEAQMAYLAAGSPLGELIASNDVEKTWESLTLDRKRAVIEAMTRKVTLYPRGRGIRSHRPEDCQVEWVDERPRLSAVS

SEQ ID NO: 11848 - protein, 470 aa, Unknown
  Description of Unknown: Integrase A416 sequence
  PF07508,G3DSA:1.10.10.2600,SSF53041,PS51737,cd00338, PF00239,PS51736,SM00857,G3DSA:3.40.50.1390,PTHR30461
MSKRAVIYTRVSRDDTGEGQSNQRQEAECRRLTDYRRLDVVAVEADISISASKGLERPAWLRVLGMIERGEVDYVIAYHMDRVTRSMTELEQLIEMCLKYDVGVATVSGDIDLTTDVGRMVARIIGAVARAEVERKSARQKLANAQRAAEGKPHVSGIRPFGYADDHRQVVTIEAQAIRAAAEAALAGESMIGIAESWSKDGLLSARARRGHDKGNRPTKAAWSARGVRNVLVNPRYAGIRLYNGERVGQGDWEPILDVETHLRLVEKLTDPTRRKGTVKTGRVAASLLTAIARCEVCGQTVRASSVRGRQTYACRNSHAHVDRSTADLMTQEWVISRLADPDTLAKLAPSGDDRVDEAKATIEKRREALKTYARLLATGAMDEDQFTEASAVARSEMQEAEAVLTEAGTGDLLAGLDVGSDAVGPQFLALSLARQRGIVEALVDVTLRPASKARKVVTPEHERVVLADR

SEQ ID NO: 11849 - protein, 470 aa, Unknown
  Description of Unknown: Integrase A417 sequence
  PF07508,G3DSA:1.10.10.2600,SSF53041,PS51737,cd00338,PF00239, PS51736,SM00857,G3DSA:3.40.50.1390,PTHR30461
MSKRAVIYTRVSRDDTGEGQSNQRQEAECRRLTDYRRLDVVAVEADISISASKGLERPAWLRVLGMIERGEVDYVIAYHMDRVTRSMTELEQLIEMCLKYDVGVATVSGDIDLTTDVGRMVARIIGAVARAEVERKSARQKLANAQRAAEGKPHVSGIRPFGYADDHRQVVTIEAQAIRAAAEAALAGESMIGIAESWSKDGLLSARARRGHDKGNRPTKAAWSARGVRNVLVNPRYAGIRFYNGERVGQGDWEPILDVETHLRLVEKLTDPTRRKGTVKTGRVAASLLTAIARCEVCGQTVRASSVRGRQTYACRNSHAHVDRSTADLMTQEWVISRLADPDTLAKLAPSGDDRVDEAKATIEKRREALKTYARLLATGAMDEDQFTEASAVARSEMQEAEAVLTEAGTGDLLAGLDVGSDAVGPQFLALSLARQRGIVEALVDVTLRPASKARKVVTPEHERVILADR

SEQ ID NO: 11850 - protein, 470 aa, Unknown
  Description of Unknown: Integrase A418 sequence
  PF07508,G3DSA:1.10.10.2600,SSF53041,PS51737,cd03768, PTHR30461:SF3,PF00239,PS51736,SM00857,G3DSA:3.40.50.1390, PS00398,PTHR30461
MPIVVYVDEGVSGGAELDKRPDLARLMREWQPGDVVLFWKLDRLARSMVHFVDIMRLAEKAGVALVSIADNIDLSTDEGKFLAHILATFAEFERSQIRSRTANARRHMIKVGRWTGGRVPYGLKAAPHPDGVGKTLVRDPFAVAIIRRIYELVMGVNHPEGKGLAITTIAASLQAEGVPSPRVHTSTKANPAPAAWSSKAIRVIMESPTVVGHDTDPYTGRVIRGEDGKPVQVWAPALTVEEQAQVLERIGPSVKRAKAGDRHWLYGVAVCGVCGGNMKRTNGGKFQPDVVIFRCRGTLKAPHGNVSVRAEELARWVDAKVLERLGPGQAVKREFVEGTGPAGDLERLKEYLEELEEDRKAGMYSAPGAIERFRQSYAETTRQIAELEANPPTEPGWQLVPTGRTFAEEWAAKPLAERGRYLFDAEASVAVRPPEVKRTVEPLDKRCTLDLGELEDMALELESVVADAME

SEQ ID NO: 11851 - protein, 470 aa, Unknown
  Description of Unknown: Integrase A419 sequence
  PF07508,SSF53041,PS51737,cd00338,PF00239,PS51736,SM00857,G3DSA: 3.40.50.1390,PTHR30461
MGSYCQFMRAIIYCRVSSDPHARGKSVTEQEADCRATSKAHGWDIGEVLVDNDRGASRYSRKDRPAYRRLAELLAPGDVLVTWEASRAQRDLSAYLQLRDLCAERGVLWSYSGRTYDLARGDDRFTTGLDALLSEKEVEVTRERVLRSMRANAAAGRPHGKLPYGYMIVRDPHTGKTLDRVANPDTAPTFREAVQRVLDGDSLYAVCQDFNARGVPAPRPRRDGTPAKWIPVTLRKILESPTYAGLRLSNGEVIGQATWEPLISMEEHERLKALFADPHRLTHRGSEPQWLLAGIARCGVCGATVKRIKSRGVQTYTCRDGFHTARMVTTVEDYVVEAMMRRLEGQDLVGQIDSDNAEYASAVEAVRALRQRIDSFTDAAADGEVTPTALARIEAKLLPQIERAEGRVRALAHSPAVAKIAGAGARERWEALTVRDRRDLVRALVDVQIHRVGKGRRNVPIGEGIGLTWL

SEQ ID NO: 11852 - protein, 470 aa, Unknown
  Description of Unknown: Integrase A420 sequence
  PF07508,SSF53041,PF13408,PS51737,cd00338, PTHR30461:SF3,PF00239,PS51736,SM00857,G3DSA:3.40.50.1390, PTHR30461
MRVIGYVRLSRASREESTSVVRQRDIITRTASARDLDLVGIVEDVDVSATKSRLDRPGLDEVRARVRAGEADAVLVWRLDRIARSVVDFGTLLDDGLDIISATEPLDTASPMGRAMAEVLQVFARLEAKTIGLRVAASQEHLRKIGRWPGGVLPYGYRAVPHPEGAGRALEPDPAESAVVRRMADECLSGRPVYAIAQGLNADGIPPRRASSWSPTSVQRILRSNAVLGRVKVRGDLLRDDAGVPVQVWAPLLDVDEVERLRALTDWSPIPGRSAATAAGKRRKASRLLSGLLYCPGCGGPLVARTRRDTALYSCGASARGRACPGGVAVEADRVEAEVARRFLAAFGRLEVVEARESSAPVAGLAAVEEAIRDTTDALRDPAADVPVLVDRLTSLRAERDRLAALPSAPTVALVETGESFATAWDRLDVAGRRRMLTAAGLEVEIGRGLRGRWTPDRIQARVAGQDLPV

SEQ ID NO: 11853 - protein, 470 aa, Unknown
  Description of Unknown: Integrase A421 sequence
  PF07508,G3DSA:1.10.10.2600,SSF53041,PF13408,PS51737,cd03768, PTHR30461:SF3,PF00239,PS51736,SM00857,G3DSA:3.40.50.1390, PTHR30461
MHQAIEGYSIEQQRDSLTKYCEAMEWNIYDIYIDAGFSGGKLERPAMDKLIREAEAGKFDTVAVYKLDRLSRSVQDTLHLIRDVFKEHDIDFVCLQENIDTKSAMGNLFLTLLSAIAEFEREQITERMAMGRHGRAKSGKSMMWARPAYGYRYDRESQTVSVVQSEAMIVKRIYKEYLEGKSVSQIKNDLNSEGHITKEKPWVYKRITYILQSRVYTGVNEYKGEIYDGKHEAIIDTETFELTQMEFAKRQQQTKDKKNNPRPFQAKYMLSGLARCGYCKAPLKLRLGAVRKDGTRAMVYDCHNRWNRKVTYLTIYNDNKQCTESGRYQKADLEAYVLDKIKELQLNPDTIREKMDLNEKPTANTEEIKKQIAKINQQIDKLNDLYLNDLITVEKLKERAGKLKKERELLEVELSKNSDHLFKAKKKQLNDLLMNKDIDSMTYEEQRNLVKMLIYKVDVTKEDINIIFDF

SEQ ID NO: 11854 - protein, 470 aa, Unknown
  Description of Unknown: Integrase A422 sequence
  PF07508,SSF53041,PS51737,cd00338,PF00239, PS51736,SM00857,G3DSA:3.40.50.1390,PTHR30461
MSKRAVIYTRVSRDDTGEGRSNDRQEAECRRLTDYKRLDVVAVEADISISAYSGKARPAWKRVLNMVRAGEVDYVIAYHMDRMTRSMLDLEELILLCEEHNVGIATAVGDIDLTSDMGRMVARILAAVARAEVERKSARQKLANAQRAAEGKPHVSGIRPFGYGDDHLTLIPEEADAIRDAARRALAGETMISIAKSWTEAGLISARARRGHDKGKRATEAGWSARGVRNVLISPRYAGIRTYNGEPVGEGDWEPILDRETHLALVDTLGDPARRKGAVKMGRRPTSLLTAFALCEVCDGPVRASAIRGRQTYTCRAGHGHADRAIADAEVSAATIALLASPQWMTLIVPSGDERVEEAKAEVDDLKLKLKTYAELLANDVMDVEQFTQATATARAKLKGAEELLSRAGMGPMFVGLSLGTPAVADQWEGLGLDRQRAIVQGLLSVKVRRKAKGMSFEDQIVVEPRYVAA

SEQ ID NO: 11855 - protein, 469 aa, Unknown
  Description of Unknown: Integrase A423 sequence
  PF07508,G3DSA:1.10.10.2600,SSF53041,PS51737,cd03768, PTHR30461:SF3,PF00239,PS51736,SM00857,G3DSA:3.40.50.1390 ,PTHR30461
MYYERSYLRSCQVSSYEQATEGYSIHEQERKLKAFCEVQNWNEFKVFTDAGVSGGSMNRPALKRIMDNLEYYDLVLVYKLDRLTRNVKDLLEMLETFEKYNVAFKSATEVFDTTTAIGKLFITMVGAMAEWERATIRERALFGSRAAVREGNYIREAPFCYDNVDGKLVPNEHKWVIDYLVEQFKHGVSGNEIARQMNLKKINVPKVKKWNRTSIIRLMKNPVLRGHTKYGDMYIENTHEPVLSESDYKRIIDIIENKTHRSKVKHHAIFRGVLTCPQCHNKLHLYAGKITDKKGYSYEVRRYKCDTCSKDKNVQTISFNESEVEDKFIELLKTYDMNKFKVDIVEESTPKVDYDIDKIMKQREKLTRSWSLGYIEDDEYFSLMDETKEILDKVERAGVEIESTQTVTNEQLNMIDSILIKGWSKLNVEQKEELILSTVKEIVFDFVPRKDNENGKVNTLDIREITFKF

SEQ ID NO: 11856 - protein, 468 aa, Unknown
  Description of Unknown: Integrase A424 sequence
  PF07508,G3DSA:1.10.10.2600,SSF53041,PS51737,cd00338, PTHR30461:SF3,PF00239,SM00857,G3DSA:3.40.50.1390,PTHR30461
MRAIIYNRVSSDPTGRGRSVADQEAENRAVCERNGWTIGEVLTDNDRSATRFATRDRPEYRRLTEILRRGDVLVTWEASRAQRDLEAYVALRNLCAERGVMWCYSGKVYDLTVGDDRFVTGLDALLAEKEAEQTRERIMRGHRSNLAAGGAHGHVPFGYRIVRDATTGRPLRRVPDETTAPLVQDAARRVLAGESVRSIVADLKVRTPGKPWSTSTLRRMLMNPTYAGYRTHHGEIACKGTWEPLITQEDHDRLVALFGSRRGVPRGAAPKYLLTGIAVCGVCGGKLIMRQQGSVAAAKKRADGKLWFYGCEYGHVGRDRAKVDDAVTRVVVALLSDPGELAKLAEPVDDEPAVDDGDDVAELRQRLADAVDAYDAGKISIEMLARIEARLQPRIEAAEGRSKARFVSPVVAQVAAALDPAAAWAALQLEEKREFLRATMHIEVQRVRSRWELGVEAYPLRMASRIDA

SEQ ID NO: 11857 - protein, 468 aa, Unknown
  Description of Unknown: Integrase A425 sequence
  PF07508,G3DSA:1.10.10.2600,SSF53041,PS51737,cd00338,PF00239, PS51736,SM00857,G3DSA:3.40.50.1390,PTHR30461
MRAIIYNRVSSDPTGRGRSVADQETENRAICERNGWTIGEVLTDNDRSATRFATRERPEYRRLTEILQRGDVLVTWEASRAQRDLEAYVALRNLCAERGVLWCYSGKVYDLTVGDDRFVTGLDALLAEKEAEQTRERIMRGHRTNLAAGGAHGHVPFGYRIVRDPTTGRPLQRVPDEATAPLVQEAARRVLAGESVRSIVADLKVRTPGKPWSTSTLRRMLMNPTYAGYRTHRGEIARKGTWEPLIAQDDHDRLVALFGSRRTVPRGAAPKYLLTGIAVCGVCGGRLIMRQQGSVPAAKKRADGKLWFYGCEGGHVGRDREKVDDAVTRVVVALLSNPDELAKLAEPSDATPAGDDVDDVAELRQRLTDAVDAYDAGKLSIEMLARIEARLQPRIEAAEERSKARYLSPVVAQVAAAPDSAGAWSALTLADKREFLRATMHIEVQRVRSRWELGVEVYPLRMAPHADA

SEQ ID NO: 11858 - protein, 468 aa, Unknown
  Description of Unknown: Integrase A426 sequence
  PF07508,G3DSA:1.10.10.2600,SSF53041,PS51737,cd00338, PF00239,PS51736,SM00857,G3DSA:3.40.50.1390,PTHR30461
MRAIIYNRVSSDPTGRGRSVADQETENRAICERNGWTIGEVLTDNDRSATRFATRERPEYRRLTEILQRGDVLVTWEASRAQRDLEAYVALRNLCAERGVLWCYSGKVYDLTVGDDRFVTGLDALLAEKEAEQTRERIMRGHRTNLAAGGAHGHVPFGYRIVRDPTTGRPLQRVPDEATAPLVQEAARRVLAGESMRSIVADLKVRTPGKPWSTSTLRRMLMNPTYAGYRTHRGEIARKGTWEPLIAQDDHDRLVALFGSRRTVPRGAAPKYLLTGIAVCGVCGGRLIMRQQGSVPAAKKRADGKLWFYGCEGGHVGRDREKVDDAVTRVVVALLSNPDELAKLAEPSDETPAGDDVDDVAELRQRLTDAVDAYDAGKLSIEMLARIEARLQPRIEAAEERSKARYLSPVVAQVAAAPDPAGAWAALTLADKREFLRATMHIEVRRVRSRWELGVEVYPLRMAPHADA

SEQ ID NO: 11859 - protein, 468 aa, Unknown
  Description of Unknown: Integrase A427 sequence
  PF07508,G3DSA:1.10.10.2600,SSF53041,PS51737,cd00338, PTHR30461:SF3,PF00239,PS51736,SM00857,G3DSA:3.40.50.1390 ,PTHR30461
MRAIIYNRVSSDPTGRGRSVADQETENRAICERNGWTIGEVLTDNDRSATRFATRERPEYRRLTEILQRGDVLVTWEASRAQRDLEAYVALRNLCAERGVLWCYSGKVYDLTVGDDRFVTGLDALLAEKEAEQTRERIMRGHRTNLAAGGAHGHVPFGYRIVRDPTTGRPLQRVPDEAAAPLVQEAARRVLAGESVRSIVADLKVRTPGKPWSTSTLRRMLMNPTYAGYRTHRGEIARKGTWEPLITQDDHDRLVALFGSRRTVPRGAAPKYLLTGIAVCGVCGGRLIMRQQGSVPAAKKRADGKLWFYGCEGGHVGRDREKVDDAVTRVVVALLSNPDELAKLAEPSDEAPAGDDVDDVAELRQRLTDAVDAYDAGKLSIEMLARIEARLQPRIEAAEERSKARYLSPVVAQVAAAPDPAGAWAALTLADKREFLRATMHIEVQRVRSRWELGVEVYPLRMAPHTDA

SEQ ID NO: 11860 - protein, 468 aa, Unknown
  Description of Unknown: Integrase A428 sequence
  PF07508,G3DSA:1.10.10.2600,SSF53041,PS51737,cd00338, PF00239,PS51736,SM00857,G3DSA:3.40.50.1390,PTHR30461
MRAIIYNRVSSDPTGRGRSVADQETENRAICERNGWTIGEVLTDNDRSATRFATRERPEYRRLTEILQRGDVLVTWEASRAQRDLEAYVALRNLCAERGVLWCYSGKVYDLTVGDDRFVTGLDALLAEKEAEQTRERIMRGHRTNLAAGGAHGHVPFGYRIVRDPTTGRPLQRVPDEAAAPLVQEAARRVLAGESVRSIVADLKVRTPGKPWSTSTLRRMLMNPTYAGYRTHRGEIARKGTWEPLITQDDHDRLVALFGSRRTVPRGAAPKYLLTGIAVCGVCGGRLIMRQQGSVPAAKKRADGKLWFYGCEGGHVGRDREKVDDAVTRVVVALLSNPDELAKLAEPSDETPAGDDVDDVAELRQRLTDAVDAYDAGKLSIEMLARIEARLQPRIEAAEERSKARYLSPVVAQVAAAPDPAGAWAALTLADKREFLRATMHIEVRRVRSRWELGVEVYPLRMAPHTDA

SEQ ID NO: 11861 - protein, 468 aa, Unknown
  Description of Unknown: Integrase A429 sequence
  PF07508,G3DSA:1.10.10.2600,SSF53041,PS51737,cd00338,PF00239, PS51736,SM00857,G3DSA:3.40.50.1390,PTHR30461
MRAIIYNRVSSDPTGRGRSVADQETENRAICERNGWTIGEVLTDNDRSATRFATRERPEYRRLTEILQRGDVLVTWEASRAQRDLEAYVALRNLCAERGVLWCYSGKVYDLTVGDDRFVTGLDALLAEKEAEQTRERIMRGHRTNLAAGGAHGHVPFGYRIVRDPTTGRPLQRVPDEATAPLVQEAARRVLAGESMRSIVADLKVRTPGKPWSTSTLRRMLMNPTYAGYRTHRGEIARKGTWEPLIAQDDHDRLVALFGSRRTVPRGAAPKYLLTGIAVCGVCGGRLIMRQQGSVPAAKKRADGKLWFYGCEGGHVGRDREKVDDAVTRVVVALLSNPDELAKLAEPSDETPAGDDVDDVAELRQRLTDAVDAYDAGKLSIEMLARIEARLQPRIEAAEERSKARYLSPVVAQVAAAPDPAGAWAALTLADKREFLRATMHIEVQRVRSRWELGVEVYPLRMAPHADA

SEQ ID NO: 11862 - protein, 468 aa, Unknown
  Description of Unknown: Integrase A430 sequence
  PF07508,G3DSA:1.10.10.2600,SSF53041,PS51737,cd00338, PTHR30461:SF3,PF00239,SM00857,G3DSA:3.40.50.1390,PTHR30461
MRAIIYNRVSSDPTGRGRSVADQEAENRAVCERHGWTIGEVLTDNDRSATRFATRDRPEYRRLTEILRRGDVLVTWEASRAQRDLEAYVALRNLCAERGVLWCYSGKVYDLTVGDDRFVTGLDALLAEKEAEQTRERIMRGHRSNLAAGGAHGHVPFGYRIVRDATTGRPLRRVPDETTAPLVQDAARRVLAGESVRSIVADLKARTPGKPWSTSTLRRMLMNPTYAGYRTHHGEIACKGTWEPLITQEDHDRLVALFGSRRGVSRGAAPKYLLTGIAVCGVCGGKLIMRQQGSVPAAKKRADGKLWFYGCEHGHVGRDRAKVDDAVTRVVVALLSDPGELAKLAEPVDDAPVVDDGDDVAELRQRLADAVDAYDAGKISIEMLARIEARLQPRIEAAEERNKARFVSPVVAQVAAALDPAAAWGALQLEEKREFLRATMHIEVQRVRSRWELGVEVYPLRMASRIDA

SEQ ID NO: 11863 - protein, 466 aa, Unknown
  Description of Unknown: Integrase A431 sequence
  PF07508,SSF53041,PS51737,cd00338,PF00239,PS51736, SM00857,G3DSA:3.40.50.1390,PTHR30461
MRRMRAIIYCRVSSDPHARGKSVSEQEVDCRATAKAHGWDVGEVLVDNDRGASRYSRKDRPAYRRLAELLAPGDVLVTWEASRAQRDLSAYLQLRDLCAERGVLWSYSGRTYDLARGDDRFTTGLDALLSEKEVEVTRERVLRSMRANAAAGRPHGKLPYGYMIVRDPHTGRTLDRVANPDTAPTFREAVQRVLDGDSLYAVCQDFNARGVRAPRPRRDGTPAKWIPVTLRKILESPTYAGLRSHNGEVIGEATWEPLLSMEEHERLKALFADPHRLTHRGSEPQWLLAGIARCGVCGATVKRIKSRGIQTYTCRAGFCAARMVTTVDDYVTEAVMRRLEGQDLVGQIDSDNAEYATAVEAVRALRQRLDSFTDAAAEGEVTPSALARIEAKLLPQIERAEGRARALAHSPAVAKIAGTGARERWDALAVRDRRDLVRALVDVQIHRVGKGRRNVPIGEGIGLTWL

SEQ ID NO: 11864 - protein, 465 aa, Unknown
  Description of Unknown: Integrase A432 sequence
  PF07508,G3DSA:1.10.10.2600,SSF53041,PF13408,PS51737, cd00338,PTHR30461:SF3,PF00239,PS51736,SM00857, G3DSA:3.40.50.1390,PS00397,PTHR30461
MKLRAAIYVRVSTMEQAEEGYSISAQTEKLKSYANAKDYQVVKVFTDPGYSGAKLERPGLQNMIKSIESKEIDVVLVYKLDRLSRSQKNTLFLIEDVFLKNHVQFTSMQESFDTSTSFGRAMIGILSVFAQLERDAITERMQMGAKERAKAGMWRGGPQSRLPFGYRYIDGVLLVDDYEAMIVKYMYTEFIKGTPLTKIQSKVAAKFPVKETLIYPSIMKNILQNNIYIGKIKYAGETYEGLHEHILDTETYDKAQQLWEHRNTNKKKYFESKYLLSGILYCGHCGGKMASTGAGLLKSGERVTDYICYSKKGTPSHMVVDRNCPSKRHRVNRLDPKIVELLKTITFEEMQKDNSFTDNTTTIKSEIESLDTKISKLLDLYQDGLVPIDVLNDRISKLNDDKELLQETLISQKKQIHPEEIAKNIQTAKDFDWANSDSAAKRAMVRALINKVELTNEDMKIEWNI

SEQ ID NO: 11865 - protein, 465 aa, Unknown
  Description of Unknown: Integrase A433 sequence
  PF07508,G3DSA:1.10.10.2600,SSF53041,PS51737, cd03768,PTHR30461:SF3,PF00239,PS51736, SM00857,G3DSA:3.40.50.1390,PS00397,PTHR30461
MAVGIYIRVSTEEQAKEGYSISAQREKLKAYCQVQDWNDFRFYVDEGISAKDTNRPQLQLMLQHIKEGMIDTVLVYRLDRLTRSVVDLYKLLELFGKHNCTFKSATEVYDTSTAMGRLFITLVAALAQWERENLAERVRMGQIQKAREGQYSAKAPFGFDKDENERLIINEDEKRVILDMIDKIKEGYSIRQLADYLNNSGIPPIRGYQWHIASILSILKNPALYGAVKWRDEIIEGAHEGIITKKEYQHLLKLLESRQNFKKRETYSIFIFQMKIICPQCGNRLASERTRYYRKRDNKIVESNQYRCQACTLNKRKSIGVSERKMEKAFVRYMNEFKIEYTPELPKKENDEREKIQAQLMKIEHQRAKYQKAWANDFITDEEFSALMKETRSIYEELTHKLETLQPEEEQTVDKEKIKRIVTNFKLNWSYLSPDEKRQFINTFVESIQFEKQDGTVQILDVNFY

SEQ ID NO: 11866 - protein, 465 aa, Unknown
  Description of Unknown: Integrase A434 sequence
  PF07508,G3DSA:1.10.10.2600,SSF53041,PF13408,PS51737, cd00338,PF00239,PS51736,SM00857,G3DSA:3.40.50.1390, PTHR30461
MRAVLYLRQSVAREDSISLELQETAGREYCKQRGYTITAVEADPGISGRTWKRPAVLRVMGMIESKEADVIVLWKWSRLSRSRLDWAVAADKVESAGGRIESATEPLDVSTSAGRLARGMLTEFAAFESERIGDIWKETHERRVRQGLPANGKPRFGYQYTKGEGFSPDPITGPVLADLYRRYLSGQSVYSLVKYLNDGPIRPVTGYGVSSDGLWSARTLRRILDQGFGAGFITRHGERIPGVHEPVITAAEWEEYLSRRETRRVNRTSERSPYLLSGLIRCSCGSRMNAGQFGADRKPKYRCKASADKQTHSGGYVMTDYVERAVFEWLTEVAADVDAAAGQAAKMTKQTKAAGDQSAKIARQLLKLDARLDQLTNKMLDGTIPQATYERLRDENLDQRKTLEKALHDASTTVSKPAAIIAPELLKAWPVLPVESRRDILSRLIEYVEVSPGRPRAKVVVRPRW

SEQ ID NO: 11867 - protein, 464 aa, Unknown
  Description of Unknown: Integrase A435 sequence
  PF07508,G3DSA:1.10.10.2600,SSF53041,PS51737,cd00338,PF00239 ,SM00857,G3DSA:3.40.50.1390,PTHR30461
MSSRYEGRRAVIYTRVSKDRAGGRSVAEQEAECRIVCQREGWSVADVLSDNDVGASRWSKGDRPNYDRLSRILQPGDVLVTWEASRAQRDLAAYNDLRQLCTERDVLWCYSGRVFDLTRSDDRFMTLLDIGLAEKEVDQTRERIMRTLRANLQAGKPHGIRPYGYRSIRDPDTGKPIGREPDPVEGPIVRGIVDRFLSGVPLRRIAIDLNASGVKPQRAEEWTASLLGKMLQKPAYAGLLTHHGEIVGPGTWPAIITEDEHYRIMAILKDPARRTQRGTSPKSLVTNIAVCGKCGSTVRRKTKAGRTVYVCRDIGCVTMTASDVDEYVEEWMFKLLSDPRVHRRVSQQGDSKASADALAKIDGIRARMDEYAVEAAKGDISPRAFALMEKQWLTEIAELEQVANQALIHPRLADLTGPYVEAVWADMDLDLQRDIVRSTLEVTLYPQKLQREQDKPPIEVLWRT

SEQ ID NO: 11868 - protein, 464 aa, Unknown
  Description of Unknown: Integrase A436 sequence
  PF07508,G3DSA:1.10.10.2600,SSF53041,PF13408,PS51737, cd03768,PTHR30461:SF3,PF00239,PS51736,SM00857, G3DSA:3.40.50.1390,PS00397,PTHR30461
MKRAALYIRVSTMEQAKEGYSIPAQTDKLKAFAKAKDMAVAKVYTDPGFSGAKMERPALQEMISDIQNKKIDVVLVYKLDRLSRSQKNTLYLIEDVFLKNNVDFISMQESFDTSTPFGRATIGMLSVFAQLERDTITERMHMGRTERAKQGYYHGSGIVPLGYDYVHGELIINDYEAQIIQEIYDLYVNQGKGQQYITKRMVAKYPDKVKTLTIVKYALTNPLYIGKISWDGKVYDGHHSPIIDKSMYDKAQEIIARMAQKGGEQHGNQLGLLLGITYCGKCGAKVFRYVSGGKKYRYNYYMCRSVKKMLPSLVKDWNCKQPSLRQEVVEKKVIDSLKSLDFKKIERELKQVENKTKSKITTINNQISKKHNEKQKILDLYQYGTFDVTMLNERMKKIDNEINALTANIANLEGTKSESLINKLETLKTFNWETETTENKILIIKEFVERIELFDDEVIIKYKF

SEQ ID NO: 11869 - protein, 463 aa, Unknown
  Description of Unknown: Integrase A437 sequence
  PF07508,G3DSA:1.10.10.2600,SSF53041,PS51737, cd00338,PTHR30461:SF3,PF00239,PS51736, SM00857,G3DSA:3.40.50.1390,PS00397,PTHR30461
MRVAIYVRVSTDEQAKEGFSIPAQRERLRAFCESQGWEIVQEYIEEGWSAKDLNRPQMQRLLKDIKKGNIDIVLVYRLDRLTRSVLDLYLLLQTFEKYNVAFRSATEVYDTSTAMGRLFITLVAALAQWERENLAERVKFGIEQMIDEGKKPGGHSPYGYKFDKDFNCTIIEDEANTVRMIYRMYCDGYGYRSIADRLNELGVKPRIAKEWNHNSVRDILTNDIYIGTYRWGNKVVLNNHPPIISESLFRKAQKEREKRGVDRTRVGKFLLTGLLYCGNCDGHKMQGSFDKREQKTYYRCLKCNRITNEKNILEPLLDEIQLLITSKEYFMSKFTDQYDHQEMIDVSALTKELEKIKRQKEKWYDLYIDENNPIPKEELFAKINELNKKEEEIYSKLSEVELEDKEPVEEKYNRLSKMLDFKKQFEQANFFTKKELLLSIFERVVIYREKGKFKKITLDYTLK

SEQ ID NO: 11870 - protein, 463 aa, Unknown
  Description of Unknown: Integrase A438 sequence
  PF07508,G3DSA:1.10.10.2600,SSF53041,PS51737,cd03768, PTHR30461:SF3,PF00239,PS51736,SM00857,G3DSA:3.40.50.1390, PTHR30461
MKVAIYTRVSSAEQANEGYSIHEQKRKLISFCEVNDWDRYEVFSDPGVSGGSMKRPSLQKLFDRLEEFDLVLVYKLDRLTRNVRDLLEMLEVFEKNNIAFKSATELFDTTSAIGKLFITMVGAMAEWERETIRERSLIGARAAVRSGKYIKVQPFCYDLVDQKLKPNQYAEYIRFIVDKLLSGKSANEVVRLLESKKKPPGITKWNRKTVLGWMRNPILRGHTKHGDLLIKNTHEPIISEDEHSKMLDIIDKRTHKSKTKHNSIFRGVIECPQCQNKLYLVSSIQKRANGGSYEVRRYTCATCHKNKEVKDVSFNESEIEREFINTLLKKGTDNFMVNIPKPKDYDIENNKEKILEQRANYTRAWSLGYIKDEEYFVLMDETDKLLKDIEEKESPRINIELNEQQIRSVKNLLIKGFKMATAENKEELITSTVDLIKIDFIPRRLNKEGNINTVKINEIHFKY

SEQ ID NO: 11871 - protein, 463 aa, Unknown
  Description of Unknown: Integrase A439 sequence
  PF07508,SSF53041,PS51737,cd00338,PF00239,PS51736,SM00857,G3DSA:3 .40.50.1390,PTHR30461
MRAIIYCRVSSDPHARGKSVSEQEVDCRATAKAHGWDVGEVLVDNDRGASRYSRKDRPAYRRLAEILSPGDVLVTWEASRAQRDLSAYLQLRDLCAERGVLWSYSGRTYDLARGDDRFTTGLDALLSEKEVEVTRERVLRSMRANAAAGRPHGKLPYAYMIIRDPHTGRTLDRVANPDTAPTFREAVQRVLDGDSLYAVCQDFNARGVPAPRPRRDGTPAKWIPVTLRKILESPTYAGLRSHNGEVIGEATWEPLISREEHERLKALFADPHRLTHRGSEPQWLLAGIARCGVCGATVKRIKSRGIQTYTCRSGFCAARMVTTVDDYVTEAVMRRIEGQDLVGQIDSDNAEYAAAVDAVRALRQRLDSFTDAAAEGEVTPAALARIEAKLLPQIERAEGRVRALAHSPAVAKIAGTGARERWEALTVRDRRDLVRALVDVQIHRVGKGRRNVPIGEGIGLTWL

SEQ ID NO: 11872 - protein, 463 aa, Unknown
  Description of Unknown: Integrase A440 sequence
  PF07508,SSF53041,PS51737,cd00338,PF00239, PS51736,SM00857,G3DSA:3.40.50.1390,PTHR30461
MRAIIYCRVSSDPHARGKSVTEQEADCRATSKAHGWDIGEVLVDNDRGASRYSRKDRPAYRRLAETLAPGDVLVTWEASRAQRDLSAYLQLRDLCAERGVLWSYSGRTYDLARGDDRFTTGLDALLSEKEVEVTRERVLRSMRANAAAGRPHGKLPYGYMIVRDPHTGKTLDRVANPDTAPTFREAVQRVLDGDSLYAVCQDFNARGVPAPRPRRDGTPAKWIPVTLRKILESPTYAGLRLSNGEVIGQATWEPLISMEEHERLKALFADPHRLTHRGSEPQWLLAGIARCGVCGATVKRIKSRGVQTYTCRDGFCAARMVTTVEDYVVEAMMRRLEGQDLVGQIDSDNAEYASAVEAVRALRQRLDSFTDAAADGEVTPAALARIEAKLLPQIERAEGRVRALAHSPAVAKIAGAGARERWEALTVRDRRDLVRALVDVQIHRVGKGRRNVPIGEGIGLTWL

SEQ ID NO: 11873 - protein, 463 aa, Unknown
  Description of Unknown: Integrase A441 sequence
  PF07508,SSF53041,PS51737,cd00338,PTHR30461:SF21,PF00239,PS51736, SM00857,G3DSA:3.40.50.1390,PTHR30461
MVYLRQSEDRADDGLGVDRQREECMRLLTSRGWTLQREYVDNDVSATKSKPRPQFEEMMKAVDAGEVDVIVSRHLDRLLRRLAELERTLERCAPVGAAIITASDGIDTSTDGGRTTARILASVAQGEIERKSARQLSQARQAAKAGKWVGGRRPFGYEADGMTIRDCEADLVRQGYADILAGESLAEVARRWNTAGMTGPQYGKPWTFTTVREVLTNARHAGLRRHGPTQAEIRRNPEVGIVAKAEWPPLVDEMTWRAAVRIIADPSKRRGPTRGYGMLTGVCECGVCGAPVRRGTARRGIPAYKCETGKHVSRRCELVDMYVSGVVLRVLKRPDAVDLWTPERPDAADLLSKVDVLRSRIEDIGEDYADGLIDRAEFRAMRERAMSNLAEVEGMIAAAGATSPLSIVASADIDADWLAMSIAQKRALISALCTVVLLPAGQGARKFDTQTVVFRPRNPAVQM

SEQ ID NO: 11874 - protein, 463 aa, Unknown
  Description of Unknown: Integrase A442 sequence
  PF07508,SSF53041,PS51737,cd00338,PF00239, PS51736,SM00857,G3DSA:3.40.50.1390,PTHR30461
MRAIIYCRVSSDPHARGKSVSEQEVDCRATAKAHGWDVGEVLVDNDRGASRYSRKDRPAYRRLAETLAPGDVLVTWEASRAQRDLSAYLQLRDLCAERGVLWSYSGRTYDLARGDDRFTTGLDALLSEKEVEVTRERVLRSMRANAAAGRPHGKLPYGYMIVRDPHTGRTLDRVANPDTAPTFREAVQRVLDGESLYAVCQDFNARDVPAPRPRRDGTPAKWIPVTLRKILESPTYAGLRSHNGEVIGEATWEPLISREEHERLKALFADPHRLTHRGSEPQWLLAGIARCGVCGATVKRIKSRGIQTYTCRAGFCAARMVTTVDDYVTEAVMRRLEGQDLVGQIDSDNSEYATAIDAVRALRQRLDSFTDAAAEGEVTPSALARIEAKLLPQIERAEGRVRALAHSPAVAKIAGTGARERWEALTVRDRRDLVRALVDVQIFRVGKGRRNVPIGEGIGLTWL

SEQ ID NO: 11875 - protein, 463 aa, Unknown
  Description of Unknown: Integrase A443 sequence
  PF07508,SSF53041,PS51737,cd00338,PF00239,PS51736,SM00857, G3DSA:3.40.50.1390,PTHR30461
MRAIIYCRVSSDPHARGKSVSEQEVDCRATAKAHGWDVGEVLVDNDRGASRYSRKDRPAYRRLTETLAPGDVLVTWEASRAQRDLSAYLQLRDLCAERGVLWSYSGRTYDLARGDDRFTTGLDALLSEKEVEVTRERVLRSMRANAAAGRPHGKLPYGYMIVRDPHTGRTLDRVANPDTAPTFREAVQRVLDGESLYAVCQDFNARGVPAPRPRRDGTPAKWIPVTLRKILESPTYAGLRSHNGEVIGEATWEALISMEEHERLKALFADPHRLTHRGSEPQWLLAGIARCGVCGATVKRIKSRGIQTYTCRDGFCAARMVTTVEDYVVEAMMRRLEGQDLVGQIDSDNVEYAAAVDAVRALRQRLDSFTDAAAEGEVTPAALARIEAKLLPQIERAEGRVRALAHSPAVAKIAGAGARERWDALAVRDRRDLVRALVDVQIHRVGKGRRNVPIGEGIGLTWL

SEQ ID NO: 11876 - protein, 463 aa, Unknown
  Description of Unknown: Integrase A444 sequence
  PF07508,G3DSA:1.10.10.2600,SSF53041,PS51737,cd03768, PTHR30461:SF3,PF00239,PS51736,SM00857,G3DSA:3.40.50.1390, PS00397,PTHR30461
MTVGIYIRVSTEEQVRDGFSISAQREKLKAYCVAQDWDKFKFYVDEGVSAKDTNRPQLSIMLDHIKKGLINTVLVYRLDRLTRSVMDLYKLLDTFDKYNCAFKSATEVYDTSTAMGRMFITIVAALAQWERENLGERVRMGQLEKARQGEYSAKAPFGFDKNEHSKLIINLEESKVVLDMVRKIEEGYSIRQLADHLDGYTKPIRGYKWHIRTVLDILSNHAMYGAIRWSNEIIENAHPGIIKKDRFMKVQQLLSSRQNFKKRKTTSIFIFQMKLLCPNCGNHLTCERVMYHRKKDNQDIEHNRYRCQACVLNKKKAFSSSEKKIEVSFLNYVEKYRFKQVPEFQTEDNEIDILKKQLSKVERQREKFQKAWSNDLMTDEEFANRMKETKQALESIKEKLKSLSPNKNEDIDDDVIKEIINNIKSNWSHLSSDEKKQFINMFIESIKIDKKDGVTEVLDIEFY

SEQ ID NO: 11877 - protein, 463 aa, Unknown
  Description of Unknown: Integrase A445 sequence
  PF07508,G3DSA:1.10.10.2600,SSF53041,PS51737, cd03768,PTHR30461:SF3,PF00239,PS51736, SM00857,G3DSA:3.40.50.1390,PS00397,PTHR30461
MTVGIYIRVSTEEQVRDGFSISAQREKLKAYCIAQDWNSFKFYVDEGISAKDTNRPQLNTMLEHIKQGLINTVLVYRLDRLTRSVMDLYKLLDTFDKYNCAFKSATEVYDTSTAMGRMFITIVAALAQWERENLGERVRMGQLEKARQGEYSAKAPFGFDKNEHSKLIINPEESKVVLDMVGKIEEGYSIRQLADHLDSYIKPIRGYKWHIRTILNILSNHAMYGAIRWSNEIIENAHPGIITKDRFMKVQQLLSSRQNFKKRKTTSIFIFQMKLLCPNCGNHLTCERVRYHRKKDNKDIEHNRYRCQACVLNKKKAFSSSETKIEKAFLDYIDDYRFTKVPEFKKEDDEKEILKKKLSKIERQREKFQKAWSNDLMTDEEFAERMKETKNTLEEIKSELNKLGLSQNEKIDSETVRRIVNDIKNKWSLLSSLEKKQFMNLFVKNIQLKKINEKNIVVNITFY

SEQ ID NO: 11878 - protein, 463 aa, Unknown
  Description of Unknown: Integrase A446 sequence
  PF07508,G3DSA:1.10.10.2600,SSF53041,PS51737,cd00338, PF00239,PS51736,SM00857,G3DSA:3.40.50.1390,PTHR30461
MRAIIYCRVSSDPHARGKSVSEQEVDCRATAKAHGWDVGEVLVDNDRGASRYSRKDRPAYRRLTETLAPGDVLVTWEASRAQRDLSAYLQLRDLCAERGVLWSYSGRTYDLARGDDRFTTGLDALLSEKEVEVTRERVLRSMRANAAAGRPHGKLPYGYMIVRDPHTGRTLDRVANPDTAPTFREAVQRVLDGDSLYAVCQDFNDRGVPAPRPRRDGTPAKWIPVTLRKILESPTYAGLRSHNGEVIGEATWEPLISREEHERLKALFADPHRLTHRGSEPQWLLAGIARCGVCGATVKRIKSRGIQTYTCRDGFCAARMVTTVEDYVVEAVMRRLEGQDLVGQIDSDNAEYATAVDAVRALRQRLDSFTDAAAEGEVTPAALARIEAKLLPQIERAEGRVRALAHSPAVAKIAGAGARERWEALAVRDRRDLVRALVDVEIHRVGKGRRNVPIGEGIGLTWL

SEQ ID NO: 11879 - protein, 463 aa, Unknown
  Description of Unknown: Integrase A447 sequence
  PF07508,SSF53041,PS51737,cd00338,PF00239,PS51736, SM00857,G3DSA:3.40.50.1390,PTHR30461
MRAIIYCRVSSDPHARGKSVSEQEADCRATAKAHGWDVGEVLVDNDRGASRYSRKERPAYRRLAEILSPGDVLVTWEASRAQRDLSAYLQLRDLCSERGVLWSYSGRTYDLARGDDRFTTGLDALLSEKEVEVTRERVLRSMRANAAAGRPHGKLPYGYMIVRDPHTGQSIERVPNPDTAPTFREAAQRILDGESLYAVCNDFNDRGVPAPRPRRDGTPAKWIPVTLRKILESPTYAGLRWTHGEVIGPATWEPLISMEEHERLKALFADPNRLTHRGSEPQWLLAGIARCGVCGATVKRIKSRGVQTYMCRDKFCACRKVTTVEDYVVEAMMRRLEGQDLVGQIDSDNSEYAAAIDAVRALRQRLDSFTDAAAEGEVTPAALARIEAKLLPQIERAEGRVRALAHSPAVAKIAGTGARERWELLSVRDRRDLVRALVDVQIFRVGKGRRNVPIGEGIGLTWL

SEQ ID NO: 11880 - protein, 463 aa, Unknown
  Description of Unknown: Integrase A448 sequence
  PF07508,SSF53041,PS51737,cd00338,PF00239, PS51736,SM00857,G3DSA:3.40.50.1390,PTHR30461
MRAIIYCRVSSDPHARGKSVSEQEVDCRATAKAHGWDVGEVLVDNDRGASRYSRKDRPAYRRLAETLAPGDVLVTWEASRAQRDLSAYLQLRDLCAERGVLWSYSGRTYDLARGDDRFTTGLDALLSEKEVEVTRERVLRSMRANAAAGRPHGKLPYGYMIVRDPHTGRTLDRVANPDTAPTFREAVQRVLDGESLYAVCQDFNARDVPAPRPRRDGTPAKWIPVTLRKILESPTYAGLRSHNGEVIGEATWEPLISREEHERLKALFADPHRLTHRGSEPQWLLAGIARCGVCGATVKRIKSRGIQTYTCRAGFCAARMVTTVDDYVTEAVMRRLEGQDLVGQIDSDNSEYATAIDAVRALRQRLDSFTDAAAEGEVTPSALARIEAKLLPQIERAEGRVRALAHSPAVAKIAGTGARERWDALTVRDRRDLVRALVDVQIFRVGKGRRNVPIGEGIGLTWL

SEQ ID NO: 11881 - protein, 463 aa, Unknown
  Description of Unknown: Integrase A449 sequence
  PF07508,SSF53041,PS51737,cd00338,PF00239,PS51736,SM00857, G3DSA:3.40.50.1390,PTHR30461
MRAIIYCRVSSDPHARGKSVTEQEADCRATAKAHGWEIGEVLVDNDRGASRYSRKDRPAYRRLAEILAPGDVLVTWEASRAQRDLSAYLQLRDLCSERGVLWSYSGRTYDLARGEDRFTTGLDALLSEKEVEVTRERVLRSMRANAAAGRPHGKLPYGYMIVRDPHTGQSIERVPNPETAPTFREAAQRVLDGESLYAVCNDFNARGVPAPRPRRDGTPAKWIPVTLRKILESPTYAGLRWTHGEVIGPATWEPMISMEEHERLKALFADPHRLTHRGSEPQWLLAGIARCGVCGATVKRIKSRGSQTYTCRDGFCAARLVTTVDDYVTEAVMRRLEGQDLVGQIDSDNAEYAAAIDAVRALRQRLESFTDAAADGEVTPAALARIEAKLLPQIERAEGRVRALAHSPAVAKIAGTGARERWELLAVRDRRDLVRALVDVQIFRVGKGRRNVPIGEGIGLTWL

SEQ ID NO: 11882 - protein, 462 aa, Unknown
  Description of Unknown: Integrase A450 sequence
  PF07508,G3DSA:1.10.10.2600,SSF53041,PF13408,PS51737, cd00338,PTHR30461:SF3,PF00239,PS51736,SM00857, G3DSA:3.40.50.1390,PTHR30461
MGKSITVIPAKKVQTSVLHQDRKKIKVAAYCRVSTDQEEQLSSYENQVNYYREFISKHEDYELVDIYADEGISATNTKKRDAFNRLIQDCRAGKVDRILVKSISRFARNTLDCIKYVRELKELGVGVTFEKENIDSLDSKGEVLLTILSSLAQDESRSISENATWGIRKKFERGEVRVNTTKFMGYDKDENGRLIINPQQAETVKFIYEKFLEGYSPESIAKYLNDNEIPGWTGKANWYPSAIQKMLQNEKYKGDALLQKTFTVDFLTKKRVQNDGQVNQYYVENSHEAIIDEETWETVQLEMARRKTYRDEHQLKSYIMQSEDNPFTTKVFCGACGSAFGRKNWATSRGKRKVWQCNNRYRIKGVEGCYSSHLDEATLEQIFLKALELLSENIDLLDGKWEKILAENRLLDKHYSMALSDLLRQEQIDFNPSDMCRVLDHIRIGLDGEITVCLLEGTEVDL

SEQ ID NO: 11883 - protein, 462 aa, Unknown
  Description of Unknown: Integrase A451 sequence
  PF07508,G3DSA:1.10.10.2600,SSF53041,PF13408,PS51737,cd00338, PTHR30461:SF3,PF00239,PS51736,SM00857,G3DSA:3.40.50.1390, PTHR30461
MGKSITVIPAKKVQNIVQHQVRKKINVAAYCRVSTDQDEQLSSYENQVNYYRDYISKHEDYELVDIYADEGISATNTKKRDAFNRLIQDCRAGKVDRILVKSISRFARNTLDCIKYVRELKELGVGVTFEKENIDSLDSKGEVLLTILSSLAQDESRSISENATWGIRKKFERGEVRVNTTKFMGYDKDDNGRLIINPQQAETVKFIYEKFLEGYSPESIAKYLNDNEIPGWTGKANWYPSAIKKMLQNEKYKGDALLQKTFTVDFLTKKRVQNDGQVNQYYVENSHEAIIDKDTWELVQLELERRKAYREEHQLKSYIMQNDDNPFTTKVFCAECGSAFGRKNWATSRGKRKVWQCNNRYRVKGQIGCQNNHIDEETLEKAVVIAVELLSENVDLLHGKWNKILEENRPLEKHYCTKLAEMINKTSWEFDSYEMCQVLDSITISEDGQISVKFLEGTEVDL

SEQ ID NO: 11884 - protein, 462 aa, Unknown
  Description of Unknown: Integrase A452 sequence
  PF07508,SSF53041,PF13408,PS51737,cd00338, PF00239,PS51736,SM00857,G3DSA:3.40.50.1390,PTHR30461
MRAIIYCRVSSDPNARGKSVAEQESECRDTAASHGWTVGQVLIDNDRGASRYSRKDRPAYRKLNEILSPGDVLVTWEASRAQRDLQAYLQLRDLCSERGVLWCYSGRVYDLARGDDRFVTGLDALLSEKEVEQTRERVLRSVRANAAAGRPHGKLPYGYMIVRDPDTGQPMDRVPNPDTAPVVREIVTRVLAGESLYSLCRELNDRGIPGPRPKRDGSKSQWIPVTMRKIIESPTYAGLRTHQGQVVGRATWEPLVTMDEHERMKGLLADPRRLTQRGSEPRWLLSGIVRCGVCGSKMNRLKNRGCDSYVCKNGSHTSRKIETIDTYVTEAVIRRLEGQELVGQIDDDDAEYAAAVEAVRALQQRLDAFADSAADGELSPAALARVESRLRPQLEAAEARMRALVQSPVVAQMAGDGARERWERLDLHSRRELIRALVDIRIHQVGVGRRGLIGEGVEFTWL

SEQ ID NO: 11885 - protein, 462 aa, Unknown
  Description of Unknown: Integrase A453 sequence
  PF07508,G3DSA:1.10.10.2600,SSF53041,PF13408,PS51737,cd00338, PF00239,PS51736,SM00857,G3DSA:3.40.50.1390,PTHR30461
MRAIIYCRVSSDPKMRERSVQEQEIDCRAVASANGWDVGEVLIDNDRGASRYSRGDRPAYRRLAEILQPGDVLVTWEASRAQRDLGAYLQLRTLCEQRGVPWSYAGKLHDLTRGDDRFVTGLDALLSEKEVEQTRERVLRSVRANAAAGRPHGKLPYGYMIVRDPDTGQPVDRVPNPDTAPIVREIVTRVLAGDSLYSLCRELNERGVPGPRPKRDGSKSQWIPVTMRKIIESPTYAGLRTHQGQIVGPATWEPLVTMDEHERVKGLLADPRRLTQRGSEPRWLLSGIVRCGVCGSKMNRLKNRGCDSYVCKNGSHTSRKIETIDAYVTEAVIRRLEGQELVGQIDDDDAEYAAAVEAVRALQQRLDAFADSAADGELSPAALARVESRLRPQLEAAEARMRALVQSPVVAQMAGDGARERWERLDLHSRRELIRALVDIRIHQVGIGRRGLIGEGVEFTWL

SEQ ID NO: 11886 - protein, 462 aa, Unknown
  Description of Unknown: Integrase A454 sequence
  PF07508,G3DSA:1.10.10.2600,SSF53041,PF13408,PS51737, cd00338,PTHR30461:SF3,PF00239,PS51736,SM00857, G3DSA:3.40.50.1390,PTHR30461
MGKSITVIPAKKVQTSVQHQVRKKVNVAAYCRVSTDQDEQLSSYENQVNYYRDYISKHEDYELVDIYADEGISATNTKKRDAFNRLIQDCRAGKVDRILVKSISRFARNTLDCIKYVRELKELGVGVTFEKENIDSLDSKGEVLLTILSSLAQDESRSISENATWGIRKKFERGEVRVNTTKFMGYDKDESGRLIINPQQAETVKFIYEKFLEGYSPESIAKYLNDNEIPGWTGKANWYPSAIQKMLQNEKYKGDALLQKTFTVDFLTKKRVQNDGQVNQYYVENSHEAIIDKDTWELVQLELDRRKDYREEHQLKAYIIQNDDNPFTTKVFCKACGSAFGRKNWTTSRGKRKVWQCNNRYRVKGQIGCQNNHIDEETLEKAVVMAVELLSENVDLLHGKWNKILEENRPLEKYYSMKLAGIINKPSWEFDSYEMCQVLDSITISEDEQISVNFLEGTEVDL

SEQ ID NO: 11887 - protein, 461 aa, Unknown
  Description of Unknown: Integrase A455 sequence
  PF07508,G3DSA:1.10.10.2600,SSF53041,PS51737,cd03768, PTHR30461:SF3,PF00239,PS51736,SM00857,G3DSA:3.40.50.1390, PTHR30461
MKVAIYTRVSTLEQKEKGHSIEEQERKLRAYSDINDWKIHKVYTDAGYSGAKKDRPALQEMLNEIDNFDLVLVYKLDRLTRSVKDLLEILELFENKNVLFRSATEVYDTTSAMGRLFVTLVGAMAEWERTTIQERTAMGRRASARKGLAKTVPPFYYDRVNDKFVPNEYKKVLRFAVEEAKKGTSLREITIKLNNSKYKAPLGKNWHRSVIGNALTSPVARGHLVFGDIFVENTHEAIISEEEYEEIKLRISEKTNSTIVKHNAIFRSKLLCPNCNQKLTLNTVKHTPKNKEVWYSKLYFCSNCKNTKNKNACNIDEGEVLKQFYNYLKQFDLTSYKIENQPKEIEDVGIDIEKLRKERARCQTLFIEGMMDKDEAFPIISRIDKEIHEYEKRKDNDKGKTFNYEKIKNFKYSLLNGWELMEDELKTEFIKMAIKNIHFEYVKGIKGKRQNSLKITGIEFY

SEQ ID NO: 11888 - protein, 461 aa, Unknown
  Description of Unknown: Integrase A456 sequence
  PF07508,G3DSA:1.10.10.2600,SSF53041,PS51737,cd03768, PTHR30461:SF3,PF00239,PS51736,SM00857,G3DSA:3.40.50.1390, PTHR30461
MKVAIYTRVSTLEQKEKGHSIEEQERKLRAYSDINDWKIHKVYTDAGYSGAKKDRPALQEMLNEIDNFDLVLVYKLDRLTRSVKDLLEILELFENKNVLFRSATEVYDTTSAMGRLFETLVGAMAEWERTTIQERTAMGRRASARKGLAKTVPPFYYDRVNDKFVPNEYKKVLRFAVEEAKKGTSLREITIKLNNSKYKAPLGKNWHRSVIGNALTSPVARGHLVFGDIFVENTHEAIISEEEYEEIKLRISEKTNSTIVKHNAIFRSKLLCPNCNQKLTLNTVKHTPKNKEVWYSKLYFCSNCKNTKNKNACNIDEGEVLKQFYNYLKQFDLTSYKIENQPKEIEDVGIDIEKLRKERARCQTLFIEGMMDKDEAFPIISRIDKEIHEYEKRKDNDKGKTFNYEKIKNFKYSLLNGWELMEDELKTEFIKMAIKNIHFEYVKGIKGKRQNSLKITGIEFY

SEQ ID NO: 11889 - protein, 461 aa, Unknown
  Description of Unknown: Integrase A457 sequence
  PF07508,G3DSA:1.10.10.2600,SSF53041,PS51737,cd03768,PTHR30461:SF3 ,PF00239,PS51736,SM00857,G3DSA:3.40.50.1390,PTHR30461
MKVAIYTRVSTLEQKEKGHSIEEQERKLRAYSDINDWKIHKVYTDAGYSGAKKDRPALQEMLNEIDNFDLILVYKLDRLTRSVKDLLEILELFENKNVSFRSATEVYDTTSAMGRLFVTLVGAMAEWERTTIQERTAMGRRASARKGLAKTVPPFYYDRVNDKFVPNEYKKVLRFAVEEAKKGTSLREITMKLNNSKYKAPLGKNWHRSVIRSALISPVARGHLVFGDIFVENTHEAIISEEEYKEIKQRISEKTNSTIVKHNAIFRSKLLCPNCNQKLTLNTVKHTPKNKEVWYSKLYFCVNCKNTKNKNACNIDEREVLKQFYNYLKQFDLTSYKTKNQPKETEDVGIDIEKLRKERARCQTLFIEGMMNKDEAFPIISRIDQEIRDYENRKSDNKSKSFDYEKIKNFKYSLLNGWELMEDELKTEFIKMAIKNIHFEYVRGIKGKRQNSLRITGIEFY

SEQ ID NO: 11890 - protein, 461 aa, Unknown
  Description of Unknown: Integrase A458 sequence
  PF07508,G3DSA:1.10.10.2600,SSF53041,PF13408,PS51737, cd03768,PTHR30461:SF3,PF00239,PS51736,SM00857, G3DSA:3.40.50.1390,PS00397,PTHR30461
MNVAIYCRVSTLEQKEHGYSIEEQERKLKQFCEINDWNVADVFVDAGFSGAKRDRPELQRMMNDIKRFDLILVYKLDRLTRNVRDLLDLLEIFEQNNVAFRSATEVYDTSTAMGRLFVTLVGAMAEWERETIRERTQMGKLAALKKGIMLTTPPFYYDRVDNKFVPNKYKEIVLFAYEEALKGKSAKSIARKLNNSDIPPPNNRKWEDRSITRALRSPFTRGHFEWGGVYLENNHEPIITEEMYEKVKDRLEERTNTKKVKHTSIFRSKLVCPTCHNKLTMNTHKVTLKDRVYYNKHYYCNNCKETPNVKPVYIRAEEVERVFYEYLQHQDLTQYEVVEDTEEKEVAIDINKVMQQRKRYHKLYANGLMNEDELAELIEETDAAIEEYKKQNENKEVKQYSDEDITEYKSLLLEMWEISSDEEKAEFIQMAIKNIFIEYVLGKNDNKKKRRSLKIKDIEFY

SEQ ID NO: 11891 - protein, 461 aa, Unknown
  Description of Unknown: Integrase A459 sequence
  PF07508,G3DSA:1.10.10.2600,SSF53041,PS51737, cd03768,PTHR30461:SF3,PF00239,PS51736, SM00857,G3DSA:3.40.50.1390,PS00397,PTHR30461
MNVAIYCRVSTLEQKEHGYSIEEQERKLKSFCEINDWTVSDVFVDAGFSGAKRDRPELQRMMNNIKRFDLVLVYKLDRLTRNVRDLLDLLEIFEQNNVAFRSATEVYDTSTAMGRLFVTLVGAMAEWERETIRERTQMGKLAALKKGIMLTTPPFYYDRVDNKFVPNKYKEVVLFAYEEALKGKSAKSIARKLNNSDIEPPNNRKWEDRSITRALRSPFTRGHFEWGGVYLENNHEPIITEEMYEKVKDRLEERTNTKKIKHVSIFRSKLVCPTCHNKLTMNTHKVNLKDRVYYNKHYYCNNCKETPNLKPVYIRAEEVERVFYEYLQHKDLTQYEVVEDTEEKEVAIDINKVMQQRKRYHKLYANGLMNEDELAELIEETDAAIEEYKKQNENKEVKQYSDEDITEYKSLLLEMWDISSDEEKAEFIQMAIKNIFIEYVLGKNDNKKKRRSLKIKDIEFY

SEQ ID NO: 11892 - protein, 460 aa, Unknown
  Description of Unknown: Integrase A460 sequence
  PF07508,G3DSA:1.10.10.2600,SSF53041,PF13408,PS51737, cd00338,PTHR30461:SF3,PF00239,PS51736,SM00857, G3DSA:3.40.50.1390,PTHR30461
MKCAIYRRVSTDEQAEKGFSLENQLLRLQAFAESQGWEVVHDYMDDGYSGKNMNRPQIKRMLHDLKSNKFDIVLVYRLDRFTRSVKDLNDLLEVFKEHEVDFKSATESIDTATATGRMILNMMVSTAQWERETISERVKDVVRKKKDLGLISTGYPPYGYAMNDGVISQVPHEVEIVKFVFEKAKVYGFQKISKLLNEQGLVTRNGTKWLISTASRIAHNPFYSGEMRYKRDGETSTVPINVEGYEPVITKEEHKEVLKAIKKRNRNQTRAKSNEVYPFSGIVLCPECGHPMKGTRVSSRGYYYKYYRCDRASDHFCNGKLIRYEKLDKAFAEYIHDAFQIDRIEIKEETNTKDIQREIKRCKSKIERLKDLYVDGDISKKKYKNDVGELNEKIYDLEQKLLSAENKISHDHIRENLKRLSEFWGLIDDNTKMESIRGVFDTITVEIQGNDVVITDHTLL

SEQ ID NO: 11893 - protein, 460 aa, Unknown
  Description of Unknown: Integrase A461 sequence
  PF07508,G3DSA:1.10.10.2600,SSF53041,PF13408,PS51737,cd03768, PTHR30461:SF3,PF00239,PS51736,SM00857,G3DSA:3.40.50.1390, PS00397,PTHR30461
MKKVKRTALYIRVSTTEQAQEGYSIGEQKERLEQYVKAMGWIISGEYIDPGFSGSNTDRPALNKLIDEINQHDIVLVYKLDRLSRSQKDTMLLIEDVFLKNDVDFVSMSESFDTSTPFGRAAIGLLATFAQLERENIKERMTMGMRGRAKKGYWKGTNRPPIGYDYIDGNLIINDYEAMQIRELYSIAANGIPGMNYNVRNMARYLSEKYTNKYGNWSDHSGISYTIHNKVYIGFVKYNDDFYPGQHQPIVDNKLFEKANARLDSYLSQFGEHVTYNKYMLSGITYCGICGKPYYRRNSQTKLNGIKKEYGYYSCEGRKSNVQNKCPSKIFQQKELEQSVVNQIQKLKYHDFKSETIQDNTSILLNQVKALDIKQERLIDLYSIGSISKDQINDRIKALNSEREKIKTLLSRPKKLNTSEILSISSQIEESDYSTKCDMVHTLVDKVIIDGNQTRIYWRF

SEQ ID NO: 11894 - protein, 459 aa, Unknown
  Description of Unknown: Integrase A462 sequence
  PF07508,G3DSA:1.10.10.2600,SSF53041,PS51737,cd03768, PTHR30461:SF3,PF00239,PS51736,SM00857,G3DSA:3.40.50.1390, PTHR30461
MTEIASTKARKRCAVYCRVSSDERLDQEFNSIDAQKEAGHAFIASQRAEGWIAVADDYDDPGYSGGNTERPALKRLMADIQRGLIDIVVVYKIDRLTRSLADFSKMVEVFERQGVSFVSVTQQFNTTTSMGRLTLNILLSFAQFEREVTGERIRDKIAAAKKKGLWMGGVPPLGYDVANRQLVINEAEAAVVRRIFEEMLSIGSPTQIAARLTAEGITTKAWTTQDGRVRTGTRIDKKYIHKVLRNRIYLGELSSRGQWYPGVHEPIIERQLWDQVHAVLARDSHARSVETKIRSRTDALLRGLLYAPSGERMYPTYSRKNGRKYHYYVSKSESRFGAPGKSYERLPAGEIEAAVVAQIRTVLTSPESIAAVVRHVQRQGAPIDEATVVMAMGRLNDVWDQLFPVEQHRIANLMIERIDLVHTAEMQGIRVKWRELGWDALIGEFAPRSIGAELLEVEA

SEQ ID NO: 11895 - protein, 458 aa, Unknown
  Description of Unknown: Integrase A463 sequence
  PF07508,G3DSA:1.10.10.2600,SSF53041,PS51737,cd03768, PTHR30461:SF3,PF00239,PS51736,SM00857, G3DSA:3.40.50.1390,PTHR30461
MKVAIYTRVSTLEQKEKGHSIEEQERKLRAYSDINDWTIQGVYVDAGYSGAKTDRPELNRLKENLSKIDLVLVYKLDRLTRNVKDLLDLLEIFERENVSFRSATEVYDTSTAMGRLFVTLVGAMAEWERETIRERAMMGKQAAIRKGMILTPPPFYYDRVDNKYIPNKYKDVVVWAYEEVKKGNSAKGIARKLNASDIPPPNGIQWEDRTITRALRSPLSKGHYFWGDIFIENSHEPIITDEMYNEIKERLNERVNAKTITHTSVFRGKLICPNCNGRLCLNTSYRKLKRGDVIHKNYYCNNCKVNKSGAFSFTEKEALKVFYDYLSKLDLSKYKAKEKEDKKIVTIDINKVMEQRKRYHKLYANGMMQEEELFELIKETDEKISEYEKQKERVPKKRLDVSKIKNFKNILLDSWNAFTLEDKEDFIKMAIKSIEIEYIHVKRGKTKHSIKIKNIDFY

SEQ ID NO: 11896 - protein, 458 aa, Unknown
  Description of Unknown: Integrase A464 sequence
  PF07508,G3DSA:1.10.10.2600,SSF53041,PS51737,cd03768, PTHR30461:SF3,PF00239,PS51736,SM00857,G3DSA:3.40.50.1390, PTHR30461
MNYERSYLRSCQVSTLEQKEHGYSIEEQERKLKSFCEINDWSVSDVFIDAGFSGAKRDRPELQRMMNDIKRFDLVLVYKLDRLTRNVRDLLDLLEVFEQNNVAFRSATEVYDTSTAMGRLFVTLVGAMAEWERETIRERVMMGKRAAIKQGMILTPPPFYYDRVDNTYIPNDYKKVVLWAYDEVMKGNSSKAIARKLNDSDIPPPNGKRWEDRTITRALRNPITRGHYTWGDVFIENSHEPIITEEMYQQIKERLEERINTKIVSHVSVFRGKFICPRCGGTLTMNTATRKRKKGYVTYKTYYCNTCKTKKQSFGFSENEALRVFRDYLSKLDLDKYEVKTKQKDDVVTIDIDKIMEQRKRYHKLYAKGLMQEEELFELIKETDETIAEYEKQKELVPRKSLDIDKIKKFKNALLESWKIFSLEDKADFIKMAIKSIDIDYVKLKNRHSIKINDIEFY

SEQ ID NO: 11897 - protein, 458 aa, Unknown
  Description of Unknown: Integrase A465 sequence
  PF07508,G3DSA:1.10.10.2600,SSF53041,PS51737,cd03768, PTHR30461:SF3,PF00239,PS51736,SM00857, G3DSA:3.40.50.1390,PTHR30461
MNYERSYLRSCQVSTLEQKEHGYSIEEQERKLKSFCKINDWSVSDVFIDAGFSGAKRDRPELQRMMNDIKRFDLVLVYKLDRLTRNVRDLLDLLEVFEQNNVAFRSATEVYDTSTAMGRLFVTLVGAMAEWERETIRERVMMGKRAAIKQGMILTPPPFYYDRVDNTYIPNDYKKVVLWAYDEVMKGNSSKAIARKLNDSDIPPPNGKRWEDRTITRALRSPITRGHYTWGDVFIENSHEPIITEEMYQQIKERLEERINTKIVSHVSVFRGKFICPRCGGTLTLNTVTRKRKKGYVTYKTYYCNTCKAKKESFGFSENEALRVFRDYLSELDLDKYKVKTKQNDDVVTIDIDKIMEQRKRYHKLYAKGLMQEEELFELIKETDETIAEYEKQKELVPRKSLDIDKIKKFKNALLESWEIFSLEDKADFIKMAIKSIDIEYVKLKNRHSIKINDIEFY

SEQ ID NO: 11898 - protein, 458 aa, Unknown
  Description of Unknown: Integrase A466 sequence
  PF07508,G3DSA:1.10.10.2600,SSF53041,PS51737,cd03768, PTHR30461:SF3,PF00239,PS51736,SM00857,G3DSA:3.40.50.1390, PTHR30461
MNYERSYLRSCQVSTLEQKEHGYSIEEQERKLKSFCKINDWSVSDVFIDAGFSGAKRDRPELQRMMNDIKRFDLVLVYKLDRLTRNVRDLLDLLEVFEQNNVAFRSATEVYDTSTAMGRLFVTLVGAMAEWERETIRERVMMGKRAAIKQGMILTPPPFYYDRVDNTYIPNDYKKVVLWAYDEVMKGNSSKAIARKLNDSDIPPPNGKRWEDRTITRALRNPITRGHYTWGDVFIENSHEPIITEEMYQQIKERLEERINTKIVSHVSVFRGKFICPRCGGTLTMNTATRKRKKGYVTYKTYYCNTCKTKKQSFGFSENEALRVFRDYLSKLDLDKYEVKTKQKDDVVTIDIDKIMEQRKRYHKLYAKGLMQEEELFELIKETDETIAEYEKQKELVPRKSLDIDKIKKFKNALLESWKIFSLEDKADFIKMAIKSIDIDYVKLKNRHSIKINDIEFY

SEQ ID NO: 11899 - protein, 458 aa, Unknown
  Description of Unknown: Integrase A467 sequence
  PF07508,G3DSA:1.10.10.2600,SSF53041,PS51737,cd03768, PTHR30461:SF3,PF00239,PS51736,SM00857, G3DSA:3.40.50.1390,PTHR30461
MNYERSYLRSCQVSTLEQKEHGYSIEEQERKLKSFCEINDWSVSDVFIDAGFSGAKRDRPELQRMMKDIKKFDLVLVYKLDRLTRNVRDLLDLLEIFEQNNVAFRSATEVYDTSTAMGRLFVTLVGAMAEWERETIRERVMMGKRAAIKQGMILTPPPFYYDRVDNTYIPNDYKKVVLWAYDEVMKSNSSKAIARKLNDSDIPPPNGKRWEDRTITRALRSPITRGHYTWGDVFIENSHEPIITEEMYQQIKERLEERINTKIVSHVSVFRGKFICPRCGGTLTLNTTTRKRKKGYVTYKTYYCNTCKGKKESFGFAENEALRVFHDYLSKLDLEKYKVKTKQKDNVVTIDIDKIMEQRKRYHKLYAKGLMQEEELFELIKETDETIAEYEKQKELAPRKMLNVDKIKKFKSVLLESWEIFSLEDRADFIKMAIKSIDIEYVKLKNRHSIEIKDIEFY

SEQ ID NO: 11900 - protein, 458 aa, Unknown
  Description of Unknown: Integrase A468 sequence
  PF07508,G3DSA:1.10.10.2600,SSF53041,PS51737,cd03768, PTHR30461:SF3,PF00239,PS51736,SM00857,G3DSA:3.40.50.1390, PTHR30461
MNYERSYLRSCQVSTLEQKEHGYSIEEQERKLKSFCEINDWSVSDVFIDAGFSGAKRERPELQRMMKDIKRFDLVLVYKLDRLTRNVRDLLDLLEIFEQNNVAFRSATEVYDTSTAMGRLFVTLVGAMAEWERETIRERVMMGKRAAIKQGMILTPPPFYYDRVDNTYIPNDYKKVVLWAYDEVLKGVSSKAIARKLNDSDIPPPNGKKWEDRTITRALRSPIARGHYTWGDVFIENSHEPIITEEMYQQIKERLEERINTKIVSHVSVFRGKFICPKCGGTLTLNTVTRKRKKGYVTYKTYYCNTCKTRKQSFGFAENEALRVFRDYLSKLDLEKYKVKTKQKDDVVTIDIDKIMEQRKRYHKLYAKGLMQEEELFELIKETDETIAEYEKQKELVPRKSLDIDKIKKFKNALLESWKIFSLEDKADFIKMAIKSIDIDYVKLKNRHSIKINDIEFY

SEQ ID NO: 11901 - protein, 458 aa, Unknown
  Description of Unknown: Integrase A469 sequence
  PF07508,G3DSA:1.10.10.2600,SSF53041,PS51737,cd03768, PTHR30461:SF3,PF00239,PS51736,SM00857, G3DSA:3.40.50.1390,PTHR30461
MNYERSYLRSCQVSTLEQKEHGYSIEEQERKLKSFCEINDWSISDVFIDAGFSGAKRDRPELQRMMKDIKRFDLVLVYKLDRLTRNVRDLLDLLEIFEQNNVAFRSATEVYDTSTAMGRLFVTLVGAMAEWERETIRERVMMGKRAAIKQGMILTPPPFYYDRVDNTYIPNDYKKVVLWAYDEVLKGVSSKGIARKLNDSDIPPPNGKRWEDRTITRALRSPITRGHYTWGDVFIENSHEPIITEEMYQQIKERLEERINTKIVSHVSVFRGKFICPRCGGTLTMNTATRKRKKGYVTYKTYYCNTCKGKKESFGFAENEALRVFRDYLSKLDLDKYEVKTKQKDDVVTIDIDKVMEQRKRYHKLYAKGLMQEEELFELIKETDETIAEYEKQKELVPRKTLDVDKIKKFKNVLLESWKIFSSEDKADFIKMAIKSIDIEYVKFKNRHSIKINDIEFY

SEQ ID NO: 11902 - protein, 458 aa, Unknown
  Description of Unknown: Integrase A470 sequence
  PF07508,G3DSA:1.10.10.2600,SSF53041,PS51737,cd03768, PTHR30461:SF3,PF00239,PS51736,SM00857,G3DSA:3.40.50.1390, PTHR30461
MNYERSYLRSCQVSTLEQKEHGYSIEEQERKLKSFCEINDWSVSDVFIDAGFSGAKRERPELQRMMKDIKRFDLVLVYKLDRLTRNVRDLLDLLEIFEQNNVAFRSATEVYDTSTAMGRLFVTLVGAMAEWERETIRERVMMGKRAAIKQGMILTPPPFYYDRVDNTYIPNDYKKVVLWAYDEVLKGVSSKAIARKLNDSDIPPPNGKKWEDRTITRALRSPIARGHYTWGDVFIENSHEPIITEEMYQQIKERLEERINTKIVSHVSVFRGKFICPKCGGTLTLNTVTRKRKKGYVTYKTYYCNTCKTRKQSFGFAENEALRVFRDYLSKLDLEKYKVKTKQKDDVVTIDIDKIMEQRKRYHKLYAKGLMQEEELFELIKETDETIAEYEKQKELVPRKTLDIDKIKKFKNVLLESWEIFSLEDKADFIKMAIKSIDIEYVKLKNRHSIKINDIEFY

SEQ ID NO: 11903 - protein, 456 aa, Unknown
  Description of Unknown: Integrase A471 sequence
  PF07508,SSF53041,PS51737,cd00338,PF00239, PS51736,SM00857,G3DSA:3.40.50.1390,PTHR30461
MADQLETARKFSADRGYDVVAEHSDNDISAFRGADRPGYQRVLKLARERKIDRVIVYQLTRMTRNRGERAEFIDAFHACKVNVSEAQGGDYDLSTAAGRSWVDIQGALATWESEIKSERVTAAAARRARSGRPSGDLGYGWIKHGTGASATWTEHPHEAEVVREIVDRLLAGETLRGITQSLNDRGEPAPKSASWGKTSVKKLALRESNVALRIHHRGQADEERFDGCWPALVDRAKHEKVGALLREPARQTNGTKRPGARKHLLSWGIGECGVCGGMLRVATKRGRYGRPLDLYVCDANNGCVGRSEPAVDNLVKTVAIKRLSRPDALEWLLGDDDEARRWAERVDELNRRLADAADAFADGAITGEQLRRITAKLQPDLDDALERARESAGALNVDVLRPLAGPEAAQRWDDMEMAQRRAVLEALGLRVIIDRTRRGPGFDPSSVRFVWGRSAD

SEQ ID NO: 11904 - protein, 455 aa, Unknown
  Description of Unknown: Integrase A472 sequence
  PF07508,G3DSA:1.10.10.2600,SSF53041,PF13408,PS51737, cd00338,PTHR30461:SF3,PF00239,PS51736,SM00857, G3DSA:3.40.50.1390,PS00397,PTHR30461
MANEIKQVALYIRVSTDQQAKHGDSLDEQQHTLNEYVRQQGNMRVFKTYIDDGISGQKLYRDEFQKLLDDVKKGKIDTILFTKLDRWFRNLRHYLNIQEILDKNNVTWLAVTQPFFNTETAMGRSFVNQSMGFAELEAQMTSERIRAVFDNKIRKGEVVSGKVPLGYDIKDKHLVPNEKAEIVKEIFQYYLETGSMRATVRHLENHFSMTRDYQSVRQMLTNRKYIGELRDNKNFCEPIIDRDVFERVQLQLSKNIRMNKKRDYMFTGLLVCSECGCNYSATAVISRYVRKDGTTNPNERHLYRCTKNRNNVKKCSNKKGIYETTLENFLLENIEKQAEELSVKMQQESEVKKTKNTNDKIKKKIDRLKKAYLNEVITLEEYKKDREELEALLIPEQDNKISKIDLNSLHNYSTAEFRDGYKQLTVSEKSSLWRQVIKNIVVYPDGNLKINFLGY

SEQ ID NO: 11905 - protein, 455 aa, Unknown
  Description of Unknown: Integrase A473 sequence
  cd00569,G3DSA:1.10.10.60,SSF46689,PF02796
MSGSHNIKLTLEQRQKLVRMHSEGTTVVDLAEQFGVSRPTVYNVLEKMGKTNHKKIDFYVDKKSENKEEMNPSPTILDEIKTTNFLGITIDTEGGTSNPKIRKTLDKSFKLLDVVEFVKVTKFKLNTVMFDYFWQVVVGKSRLHVSTAVLEWFGYLGEYRKQKEAFLKILRRNEISYRELTKKDKEIELYPTIKEELQTVNEGAQACSKFLIMEPDDLKMAIMQLKTKNGHTIRQYYIDLEKLLKMYTEYTLYFNHREAQRKITGLEEMMVKMDLERKQEREVDRQLILRQEQYMRSLGISLEEVKDQNEELLDNNKGLKKNVKGLRSEVKDVKRKLGIAVEDRAPLPVDEEIQERFVLIKRNDEQHYQYYTIRAQHGYTERRIKIQRVLFPQLEILLDFKANPNSKSLYNRIKKELKIKSVQFSGNNIDLEGSEVIEEELIEEMKVINDQKYNI

SEQ ID NO: 11906 - protein, 455 aa, Unknown
  Description of Unknown: Integrase A474 sequence
  PF07508,G3DSA:1.10.10.2600,SSF53041,PF13408,PS51737, cd00338,PTHR30461:SF3,PF00239,PS51736,SM00857, G3DSA:3.40.50.1390,PTHR30461
MKCAIYRRVSTDEQAEKGFSLENQLLRLQAFAESQGWEVVHDYMDDGYSGKNMNRPQIKRMLHDLKSNKFDIVLVYRLDRFTRSVKDLNDLLEVFKEHEVDFKSATESIDTATATGRMILNMMVSTAQWERETISERVKDVVRKKKDLGLISTGYPPYGYAMNDGVISQVPHEVEIVKFVFEKAKVYGFQKISKLLNEQGLVTRNGTKWLISTASRIAHNPFYSGEMRYKRDGETSTVPINVEGYEPVITKEEHKEVLKAIKKRNRNQTRAKSNEVYPFSGIVLCPECGHPMKGTRVSSRGYYYKYYRCDRASDHFCNGKLIRYEKLDKAFAEYIHDAFQIDRIEIKEETNTKDIQREIKRCKSKIERLKDLYVDGDISKKKYKNDVGELNEKIYDLEQKLLSAENKISHDHIRENLKRLSEFWGLIDDNTKMESIRGVFDTITVENTRERRLYH

SEQ ID NO: 11907 - protein, 453 aa, Unknown
  Description of Unknown: Integrase A475 sequence
  PF07508,G3DSA:1.10.10.2600,SSF53041,PF13408,PS51737,cd03768, PTHR30461:SF3,PF00239,PS51736,SM00857,G3DSA:3.40.50.1390, PS00397,PTHR30461
MTKAAIYIRVSTQDQVENYSIEVQRERIRAYCTAKGWDIYDEYIDGGYSGSNLDRPDIKRLLNDLKKIDVVVVYKLDRLSRSQRDTLELIEEHFLKNNVDFVSITETLDTSTPFGKAMIGILSVFAQLERETIAERMRMGHIKRAENGLRGNGGDYDPSGYTRVDGHLILKPDEAKHIKRAFDLYEQYHSITRVQEVLKEEGYTVWRFRRYRDILSNILYIGRVTFSGKEYKGQHEPIISSEQFKRVQVLLKRHKGHNAHKAKQSLLSGLITCSCCGEKYVAYSTGKSKDVESKRYYYYICRAKRFPSEYDERCMNKTWSRKKLEEVIFDELKNLTVKQSVSQKKEKKINYEKLIKDIDKKMERLLDLFTNTTNISRQLLETKMDKLNSEKEHLILKQQSYEQEFSISKDMITTINESLETMDFRAKQVMINTFIQEIHIDHDVVDIIWRWRF

SEQ ID NO: 11908 - protein, 452 aa, Unknown
  Description of Unknown: Integrase A476 sequence
  PF07508,G3DSA:1.10.10.2600,SSF53041,PF13408,PS51737, cd00338,PTHR30461:SF3,PF00239,PS51736,SM00857, G3DSA:3.40.50.1390,PS00397,PTHR30461
MLRVALYIRVSTEEQALNGDSIRTQIEALEQYSKENDFNIVGKYIDEGCSATNLKRPNLQRLLRDVEKDKVDLVLMTKIDRLSRGVKNYYKIMETLEKHKCDWKTILENYDSSTAAGRLHINIMLSVAENEAAQTSERIKFVFQDKLRRKEVISGTIPIGYKIENKHLVIDKEKKYIVKAIFDEYEKSGSVRTLIETINNLHGELYSYNKIKNILRNELYIGIYNKRGFYVEDYCEPIISKKQFKQIQRILEKNKKTTPNKNIHYHIFSGLLKCKECGYTLKGNSSNVGEKLYLSYRCSTFYLNKNCVHNVTHNEKHIENYLLTNLKPQLHKHMVKLEAQNEKIRRNKKSNKKDEKKKIMKKLDKIKDLYLEDLIDKETYRKDYEKLQSQLDNITEEQESQIIDTSHIKKFLDIDINEMYSDLSRVERRRFWLSIIDYIEIDNNKNITINFI

SEQ ID NO: 11909 - protein, 452 aa, Unknown
  Description of Unknown: Integrase A477 sequence
  PF07508,G3DSA:1.10.10.2600,SSF53041,PF13408,PS51737, cd03768,PTHR30461:SF3,PF00239,PS51736, SM00857,G3DSA:3.40.50.1390,PS00397,PTHR30461
MKAAIYIRVSTQEQVENYSIQAQTEKLTALCRSKDWDVYDIFIDGGYSGSNMNRPALNEMLSKLHEIDAVVVYRLDRLSRSQRDTITLIEEYFLKNNVEFVSLSETLDTSSPFGRAMIGILSVFAQLERETIRDRMVMGKIKRIEAGLPLTTAKGRTFGYDVIDTKLYINEEEAKQLQLIYDIFEEEQSITFLQKRLKKLGFKVRTYNRYNNWLTNDLYCGYVSYKDKVHVKGIHEPIISEEQFYRVQEIFTRMGKNPNMNRDSASLLNNLVVCSKCGLGFVHRRKDTMSRGKKYHYRYYSCKTYKHTHELEKCGNKIWRADKLEELIINRVNNYSFASRNVDKEDELDSLNEKLKIEHAKKKRLFDLYINGSYEVSELDSMMNDIDAQINYYESQIEANEELKKNKKIQENLADLATVDFDSLEFREKQLYLKSLINKIYIDGEQVTIEWL

SEQ ID NO: 11910 - protein, 452 aa, Unknown
  Description of Unknown: Integrase A478 sequence
  PF07508,G3DSA:1.10.10.2600,SSF53041,PF13408,PS51737, cd03768,PTHR30461:SF3,PF00239,PS51736,SM00857, G3DSA:3.40.50.1390,PS00397,PTHR30461
MKAAIYIRVSTQEQIENYSIQAQTEKLTALCRSKDWDVYDIFIDGGYSGSNMNRPALNEMLSKLHEIDAVVVYRLDRLSRSQRDTITLIEEYFLKNNVEFVSLSETLDTSSPFGRAMIGILSVFAQLERETIRDRMVMGKIKRIEAGLPLTTAKGRTFGYDVIDTKLYINEEEAKQLQMIYDIFEEEKSITTLQKRLKKLGFKVKSYSSYNNWLTNDLYCGYISYADKVHTKGVHEPIISEEQFYRVQEIFSRMGKNPNMNRDSASLLNNLVVCGKCGLGYVHRRKDTVSRGKKYHYRYYSCKTYKHTHELEKCGNKIWRADKLEELIIDRVNNYSFASRNVDKEDELDSLNEKLKTEHTKKKRLFDLYISGSYEVSELDAMMSDIDAQINYYEAQIEANEELKKNKKIQENLADLATVDFDSLEFREKQLYLKSLINKIYIDGEQVTIEWL

SEQ ID NO: 11911 - protein, 451 aa, Unknown
  Description of Unknown: Integrase A479 sequence
  PF07508,G3DSA:1.10.10.2600,SSF53041,PF13408,PS51737, cd03768,PTHR30461:SF3,PF00239,PS51736, SM00857,G3DSA:3.40.50.1390,PS00397,PTHR30461
MTKAAIYIRVSTQDQIENYSIEVQRERIRAFCKAKNWDIYDEYIDGGYSGSNLERPGIKKLITDLKNIDAVVVLKLDRLSRSQRDTLELIEEHFLKNKVDFVSITETLDTSTPFGKAMIGILSVFAQLERETIAERMRMGHVKRAENGLRGNGGDYDPAGYTRKDGQLIIKEDEATHIKRVFDLYEQYYSITKVQEVLKEEGYPIWRFRRYRDILSNTLYIGRVTFSGKEYEGQHEPIVTSEQFKRVQTLLKRHKGHNAHKAKQSLLSGLIACSCCGENYVAYSTGKSKDTESKRYYYYICRAKRFPAEYEERCMNKTWSRKKLEEVVISELKSLTEEKKQTNKKEKKVNYEKLIKDIDKKMERLLDLFMNTTNISKNLLEQQMEKLNLEKEKLLLKQQRSEEESISHEVTLTAIDDAFETLDFKEKQVIINNFIEKIYINQNNVKIIWRF

SEQ ID NO: 11912 - protein, 450 aa, Unknown
  Description of Unknown: Integrase A480 sequence
  PF07508,G3DSA:1.10.10.2600,SSF53041,PF13408,PS51737, cd03768,PTHR30461:SF3,PF00239,PS51736,SM00857, G3DSA:3.40.50.1390,PS00397,PTHR30461
MLEVCMKIAVYVRVSTLEQAESGYSIGEQTEKLTAYCRVKDWQVAKIYTDPGFSGSSLDRPAMQQLIGDCKLGVFDAVLVYKLDRLSRSQKDTLYLIEDVFNAYNIHFMSLSENFDTSTPFGKAMIGLLSVFAQLEREQIKERMQMGKLGRVKAGKISAWSNVPFGYTKVKDSYDVDPLRADIVRRIYADYLAGKSITKIMKELNREGHIGKGVAWSYRTVRQVLGNVTYTGRIIFKGQVYDGLHTGIISKADWDEVQRVLKIRQLDQARKSNNPRPFQARYMLSGLLKCHYCGATLAIAKSHTKNGPLWRYVCPTRHANKYHRNNAARYRIPPVNCELTYKYKDDLEEAVLREVKKVALDPDAVVASQDDGQPKIDKQAIKAQLAKIKRQQAKLVDLYLLSDDLMLTSFTIGPKSLKSKLMLSRHNLSMMPKRPTPLKRRRPMLHRLIS

SEQ ID NO: 11913 - protein, 450 aa, Unknown
  Description of Unknown: Integrase A481 sequence
  cd00569,G3DSA:1.10.10.60,SSF46689,PF02796
METKPRLTVEQRTNVVKKYQDGCSVAEITREFKISRPTVYKILSKVNLTSKNEIFSEKEDGNKDMENTTFLGVNIDTINGPFDFKIKKALKRSLKLLNVVEFIKVTKFNLNLVMFDYFWQVVVGNRSTLVGRPVLEWFGYEGEYFKQRQNFKKMLRNNSIQYRELTQNDNEIELYPTVKQELQELNAGAQACAKFLIMEPDDLKMAIMQLKTKNGDTIRQYYIDLEKLLKLYVEYTLYFNHRESQRKITNLEEMMADMRLDMKEERKIREEDREKDRELIQQQTQYMRSLGISLEEVKDQNEELLDNNRGLKKEVKKVQYKLGIAVEDRAPLPVNEDKQERFILLKRNDNEHFQYYTIRAQHKYTERRIKVQKTLFPHLQILLDFMANPNSKSLYVRIKDTLKTKNVQFNGNNIDLEGSEVTEEELLEEMKVINDQKYKILKLSPKKVFD

SEQ ID NO: 11914 - protein, 449 aa, Unknown
  Description of Unknown: Integrase A482 sequence
  G3DSA:1.10.10.60,SSF46689
MEITTGNKSRLTKEERQAVFQMRCNNVPITQIANKFKVSRPTIYSIIEMERKNQTKNDFFFEKEDLNKDMSNLISSEIKTTFLGVTIDTENGSSNPKINKALNTSLDLLDIVQFIKVTKFKINSVMFDYFWQVVVGNQCTLVGTVVLEWFGYEGEYRKQRQNFKKMLSNNNISYSELSYKDKEIELYPAIQEELQLLPHDGARACSKFLVMKPRDLKMAIMQLKTKNGHTIRDYYIDLEELLKMYTEYTLYFNHRKAQYKITNLEKMMVDLKLTNKNIEESNRRQEQYMRSLGISLEEVKDQNEILIEKSEILENQNNGLKKQNQNIQRKLGIAVEDRAPLPVDEKKQERFILIKRNDSEHFQYYTIRAQHGYTERRIKVQKTLFPHLQILLDFQANPNSKSLYTRIKDTLKAKNVQFSGNNIDLTESEVSEEELVEEMKVINDQRYNV

SEQ ID NO: 11915 - protein, 446 aa, Unknown
  Description of Unknown: Integrase A483 sequence
  G3DSA:1.10.10.60,SSF46689,PF02796
METVKPRLTLCDRTEVIKLYNGGVPVIKISEQFKVSRPTIYKIVEEVKKDQKKIDFFILKEDENKDIMEPNIENLKVNFLGIKIDPENGSEDPRINKALSKGHQLLDIMEFIKVTKFKLNMVMFDYFWQSVVGNRPSLMTMTIFQWFGYEGEYYTQKQNFKKMLKNNDIRYDELSINDDNIYQYAGIKEELQMISNKGARQNAKFIIMEPKNLKRAIMQLKTKNGHIIRDYYIDLEELLKLYVEYTLYFNHRTSQRKITNLEQMMAKMDLDREKDRELLLRQEQYMRSLGISLEEVKDQNEELLNNNKGLKKNVKGLRFEVRDVKRKLGIAVEDRAPLPVDEKKQERFVLIKRNDNEHYQYYTIQAQHGYTERRIKVQRVLFPHLQILLDFTANPNSKTLYVRIKDTLKAKNVQFSGNNIDLEGSEVTEEELIEEMKVTSESKRNI

SEQ ID NO: 11916 - protein, 446 aa, Unknown
  Description of Unknown: Integrase A484 sequence
  PF07508,G3DSA:1.10.10.2600, SSF53041,PS51737,cd00338,PTHR30461:SF3,PF00239, PS51736,SM00857,G3DSA:3.40.50.1390,PTHR30461
MSGSVDPFDTPGLGPWLKRDRLDDWDILVAWKLDRIARRAIAINRVFHLCQEHDKTLVCISDNIDLSTWVGRLIANVIAGVAEGELEAIRERTLASHRKLRELGRWPGGRPAYGYKAVENENGPGWKLVHDEYSATIMREIVDRTLQGEAGNAIAQDLQARGVLPPAEYRRQMNGEKLRGGEWMGQVIRKMLKSRTLLGHVTHQQVTVINEKEGTPILKGEPLVSLEEWEELQAMLGGSSRPKNHNRSTGASPMLDVALCGECGKPLHLRTQRTERKTKVHVHRYYYCPDKHGQAIRAEIVERTVEEQFLDMFGDKPAMERVFREGENHEIEIKQAIQSIEALTPLLGAATSGTVLKSLTDQISAISNRVTYLESLPKAESGYILRATGKTYREEWESRDEQGRRSLLKRSGVTVTFLLQGKTRTTEGALQTEIKFPGDVEERLAS

SEQ ID NO: 11917 - protein, 444 aa, Unknown
  Description of Unknown: Integrase A485 sequence
  cd00569,G3DSA:1.10.10.60,PF02796
MIRPRLTKEQRNEIVNLYTSGTPIVQLSRQFKVTRPTIYNVIESQGNTNHKKIDFYSEKVDENKDMSELNFTVKTDFLGVTIDTENGSSNPKINKALSASFQLLDIMEFVKVTKFKLNMTMFDYFWQVVVGNQSTLVGRLVLEWFGYDGEYFKQKQNFKKMLKNNNIQYHELTKDNKEIEQYPTFQQELQLLPHNGARTCSKFLIMQPKDLKMAIMQLKTKNGHIIREYYIDLEELLKLYTEYTLYFNHRESQRKITDLEQMMADLKVTNKNIEESNKKLEESNQRQEQYMRSLGISLEEVKDQNEELLDSNITLKQEVKKVQHKLGIAVKDRAPLPVDEDKQERFVLIKRNDPDYYPYYTIRAQEGYTNRKLRVEQLHFPNLEVLLDFKCNPNSKSLYTRIKENLKAEGVIFKGNNIDLEDSHTTEKEFIKKMKVINNQKLYV

SEQ ID NO: 11918 - protein, 444 aa, Unknown
  Description of Unknown: Integrase A486 sequence
  SSF53041,PS51737,cd00338,PF00239,PS51736, SM00857,G3DSA:3.40.50.1390,PTHR30461
MKRAVIYTRVSRDDTGEGQSNQRQERECRRLTDYKRLDVVAVEQDISVSAFSGKERPAWKRVLDMVRAGEVDYVIAYHMDRMTRSMTDLEELIVLCEEHGVGIATAVGEIDLTSDMGRMVARILAAVARAEVERKSARQKLANAQRAAEGKPHSGGQRPFGYARDHMTVVEDEAVLIKTGAERALAGEPLISISKDWGMTARGVKNVLTNPRYAGIRMYLGERVGEAEWPAILDLEVHLRLVEALTDPARTKGTVKMGRTPTSLLTGLAACSVCKGKVRGSSVRGRLTYACRSSHAHIDRADVDTLALGAVINRLSSPAWVETLAPAGDDRLAKAKLVAEEKREALKMYARLLASGAMDEEQFTEASRVARDAMKEAEQTLSQAADGAALSGLDLGTDRVEKQLLALPLARQRGIVEQLLTIEILPQVKSRLAPLSSVERVIIS

SEQ ID NO: 11919 - protein, 444 aa, Unknown
  Description of Unknown: Integrase A487 sequence
  cd00569,G3DSA:1.10.10.60,SSF46689,PF02796
MQGSYKNKLTSEQRNTIVQMFNDGVPVFTLAKQFEISRPTVYNVLEKAGNTNHKKIEFYVGKSDKNKEEMEIISEKFENIILNGTNTPSKTNFLGITIDTENGSNNPKVRKALNASFNLLDITQFVKVTKFKLNMTMFDYFWQVVVGNTRVHLVSRVLEWFGYTGEIKEQRKNFIRMLKRNGIEYTELTQKDKEIELYPTIQEEVQLLPSNVTNSKFLIMEPDDLKMAIMQLKTKNGHIIRQYYIDLEKLLRVYTEYTLYFNHREATRKITDLEQTMRELKESNQRQEKYMRSLGIQLEDVKDQNEVLIDNNKDLKKEVKKVQHKLGIAVVDRAPLPLSEDKQERFVLIKRNDDEYYSYYTIRAQYKYTERRIKTQRLLFPNLEILLDFKANPNSKTLYTRIKEKLVGAGVLFEGNNIEIEGTKVTQDELIEEMKVTSNQKYNV

SEQ ID NO: 11920 - protein, 444 aa, Unknown
  Description of Unknown: Integrase A488 sequence
  SSF53041,PS51737,cd00338,PF00239,PS51736, SM00857,G3DSA:3.40.50.1390,PTHR30461
MKRAVIYTRVSRDDTGEGQSNQRQERECRRLTDYKRLDVVAVEQDISVSAFSGKERPAWKRVLDMVRAGEVDYVIAYHMDRMTRSMTDLEELIVLCEEHGVGIATAVGEIDLTSDMGRMVARILAAVARAEVERKSARQKLANAQRAAEGKPHSGGQRPFGYARDHMTVVEGEAVLIKTGAERALAGEPLISISKDWGMTARGVKNVLTNPRYAGIRMYLGERVGEAEWPAILDLEVHLRLVEALTDPARTKGTVKMGRTPTSLLTGLAACAVCKGKVRGSSVRGRLTYACRSSHAHIDRADVDTLALGAVINRLSSPAWVETLAPAGDDRLAKAKLVAEEKREALKMYARLLASGAMDEEQFTEASRVARDAMKEAEQTLSQAADGAALSGLDLGTDRVEKQLLALPLARQRGIVEQLLTIEILPQVKSRLAPLSSVERVIIS

SEQ ID NO: 11921 - protein, 444 aa, Unknown
  Description of Unknown: Integrase A489 sequence
  SSF53041,PS51737,cd00338,PF00239,PS51736, SM00857,G3DSA:3.40.50.1390,PTHR30461
MKRAVIYTRVSRDDTGEGQSNQRQERECRRLTDYKRLDVVAVEQDISVSAFSGKERPAWKRVLDMVRAGEVDYVIAYHMDRMTRSMTDLEELIVLCEEHGVGIATAVGEIDLTSDMGRMVARILAAVARAEVERKSARQKLANAQRAAEGKPHSGGQRPFGYARDHMTVVEDEAVLIKAGAERALAGEPLISISKDWGMTARGVKNVLTNPRYAGIRMYLGERVGEAEWPAILDLEVHLRLVEALTDPARTKGTVKMGRTPTSLLTGLAACSVCKGKVRGSSVRGRLTYACRSSHAHIDRADVDTLALGAVINRLSSPAWVETLAPAGDDRLAKAKLVAEEKREALKMYARLLASGAMDEEQFTEASRVARDAMKEAEQTLSQAADGAALSGLDLGTDRVEKQLLALPLARQRGIVEQLLTIEILPQVKSRLAPLSSAERVIIS

SEQ ID NO: 11922 - protein, 444 aa, Unknown
  Description of Unknown: Integrase A490 sequence
  SSF53041,PS51737,cd00338,PF00239,PS51736, SM00857,G3DSA:3.40.50.1390,PTHR30461
MKRAVIYTRVSRDDTGEGQSNQRQERECRRLTDYKRLDVVAVEQDISVSAFSGKERPAWKRVLDMVRAGEVDYVIAYHMDRMTRSMTDLEELIVLCEEHGVGIATAVGEIDLTSDMGRMVARILAAVARAEVERKSARQKLANAQRAAEGKPHSGGQRPFGYARDHMTVVEDEAVLIKTGAERALAGEPLISISKDWGMTARGVKNVLTNPRYAGIRMYLGERVGEAEWPAILDLEVHLRLVEALTDPARTKGTVKMGRTPTSLLTGLAACSVCKGKVRGSSVRGRLTYACRSSHAHIDRADVDTLALGAVINRLSSPAWVETLAPAGDDRLAKAKLVAEEKREALKMYARLLASGAMDEEQFTEASRVARDAMKEAEQTLSQAADGAALSGLDLGTDRVEKQLLALPLARQRGIVEQLLTIEILPQVKSRLAPLSSAERVIIS

SEQ ID NO: 11923 - protein, 440 aa, Unknown
  Description of Unknown: Integrase A491 sequence
  SSF53041,PS51737,cd00338,PF00239,PS51736,SM00857,G3DSA:3.40.50. 1390,PTHR30461
MIYTRVSRDDTGEGQSNQRQERECRRLTDYKRLDVVAVEQDISVSAFSGKERPAWKRVLDMVRAGEVDYVIAYHMDRMTRSMTDLEELIVLCEEHGVGIATAVGEIDLTSDMGRMVARILAAVARAEVERKSARQKLANAQRAAEGKPHSGGQRPFGYARDHMTVVEDEAVLIKTGAERALAGEPLISISKDWGMTARGVKNVLTNPRYAGIRMYLGERVGEAEWPAILDLEVHLRLVEALTDPARTKGTVKMGRTPTSLLTGLAACSVCKGKVRGSSVRGRLTYACRSSHAHIDRADVDTLALGAVINRLSSPAWVETLAPAGDDRLAKAKLVAEEKREALKMYARLLASGAMDEEQFTEASRVARDAMKEAEQTLSQAADGAALSGLDLGTDRVEKQLLALPLARQRGIVEQLLTIEILPQVKSRLAPLSSAERVIIS

SEQ ID NO: 11924 - protein, 440 aa, Unknown
  Description of Unknown: Integrase A492 sequence
  SSF53041,PS51737,cd00338,PF00239,PS51736, SM00857,G3DSA:3.40.50.1390,PTHR30461
MIYTRVSRDDTGEGQSNQRQERECRRLTDYKRLDVVAVEQDISVSAFSGKERPAWKRVLDMVRAGEVDYVIAYHMDRMTRSMTDLEELIVLCEEHGVGIATAVGEIDLTSDMGRMVARILAAVARAEVERKSARQKLANAQRAAEGKPHSGGQRPFGYARDHMTVVEGEAVLIKTGAERALAGEPLISISKDWGMTARGVKNVLTNPRYAGIRMYLGERVGEAEWPAILDLEVHLRLVEALTDPARTKGTVKMGRTPTSLLTGLAACAVCKAKVRGSSVRGRLTYACRSSHAHIDRADVDTLALGAVINRLSSPAWVETLAPAGDDRLTKAKVLVEEKREALKVYARLLASGAMDEEQFTEASRVARDAMKEAEQTLSQAADGAALSGLDLGTDRVEKQLLALPLARQRGIVEQLLTVEILPQVKSRLAPLSSAERVIIS

SEQ ID NO: 11925 - protein, 440 aa, Unknown
  Description of Unknown: Integrase A493 sequence
  SSF53041,PS51737,cd00338,PF00239,PS51736, SM00857,G3DSA:3.40.50.1390,PTHR30461
MIYTRVSRDDTGEGQSNQRQERECRRLTDYKRLDVVAVEQDISVSAFSGKERPAWKRVLDMVRAGEVDYVIAYHMDRMTRSMTDLEELIVLCEEHGVGIATAVGEIDLTSDMGRMVARILAAVARAEVERKSARQKLANAQRAAEGKPHSGGQRPFGYARDHMTVVEDEAVLIKAGAERALAGEPLISISKDWGMTARGVKNVLTNPRYAGIRMYLGERVGEAEWPAILDLEVHLRLVEALTDPARTKGTVKMGRTPTSLLTGLAACSVCKGKVRGSSVRGRLTYACRSSHAHIDRADVDTLALGAVINRLSSPAWVETLAPAGDDRLAKAKLVAEEKREALKMYARLLASGAMDEEQFTEASRVARDAMKEAEQTLSQAADGAALSGLDLGTDRVEKQLLALPLARQRGIVEQLLTIEILPQVKSRLAPLSSAERVIIS

SEQ ID NO: 11926 - protein, 439 aa, Unknown
  Description of Unknown: Integrase A494 sequence
  G3DSA:1.10.10.60,SSF46689,PF02796
MQGNYKNKLTQQQRKNIVQMYNEGIPVFTLSKQFEVSRPTIYNVLEKAGNTTHKKIEFYIEKENKNKEEMEPKIEIIKTNFLGVTIDIENGSNNPQVLKALNSSFKLLDVVEFVKVTKFKLNLTMFDYFWQVVIGNTRVHLASRVLEWFGYEGEIKEQRKNFIRMLKRNNIDYQELTQKDKESSQYPTIQEELQLLPSNVTNSKFLLMEPDDIKMAIMQLKTKNGHTIRQYYIDLEKLLKLYTEYTLYFNHREATRKITDLEQTMRRLEESNQRQEKYMRSLGISLEEVKDQNEELLDDNKGLKKNVKGLRSEVKDVKRKLGIAVEDRAPLPANEDKQERFVLIKRNDDQHFQYYIIRAQNGYTTSRIKIQKVLFPHLEILLDFKANPNSKSLYNRIKEELKIKSVQFNGNNIDLEGSEVTEEELMEEMKVINDQKYNV

SEQ ID NO: 11927 - protein, 438 aa, Unknown
  Description of Unknown: Integrase A495 sequence
  G3DSA:1.10.10.60,PF02796
METKNVKHRLTLEEYTSVYDKYEQGMSVSKLSEKFKISRPTVYTILEKVRKDQKKNEFFIKNEEENKDNEIMTSNNTNFLGIVIDTENGSNNPKINKALNASFDLLDIMKFVEVTKFKLNTTMFDYFWQVVVGNRRVHLSPMVLTWFGYEGEIKEQKKAFIKMLQRNEIEYYQLTQKDQEIELYSTIKTEIAKMPSCDAVKSKFLIMAPNDIKMAIMQLKTKNGHTIRQYYIDIEELLKLYTEYTLYFNHRESQRKITNLEKMMTDMKLERQKDRELIQQQTQYMKSLGISLEEVKDQNEELLDETRGLKKQNKKIQHKLGIAVEDRAPQPEDESKRERFVLIKRNDPEYYLYYTIRAQEGYTTRKLKFEKANFPNLEVLLDFKCNPNSKTLYNRIKENLKVKNVTFKGNNIDLEGSEVDENKLVEEMKVINDSKRDI

SEQ ID NO: 11928 - protein, 438 aa, Unknown
  Description of Unknown: Integrase A496 sequence
  G3DSA:1.10.10.60,SSF46689,PF02796
MEPKQRLLPNQKLDIIKMYQNGYTVAQLTREFKVSRPTVYKILSQVNFEPKNENFFENVEQDKEMENTTFLGVTIDTEGGPRDFKVKKALKRSASLLDIIQFVEVTKFKLNMVMFDYFWQVMIGNRSSHITRPILEWFGYDGEYYTQRQNFTRMLKRNNISFNELISSDQEIKLYPTIQQELATYNEGAQACAKFLVMEPDDLKMAIMQLKTKNGDKIRQYYIDLEKLLKLYTEYTLYFNHREATRKITSLEKMMANMNLNLEEERKTREIERQKDRELIQQQTKYMRSLGISLEEVKDQNDELLDNNRGLKKEVKKVQHKLGIAVEDRAPQPEDESKRERFVLIKRNDPEYYPYYTIRAQEGYTTRKLKIENANFPNLEVLLDFKCNSKTLFNRIKENLKEKNVTFKGNNIDLEGSIIDEQELVEEMKVINDSKRDV

SEQ ID NO: 11929 - protein, 437 aa, Unknown
  Description of Unknown: Integrase A497 sequence
  cd00569,G3DSA:1.10.10.60
MELSNKFKLTPAQREDIVKKYTNGTSVLSISKEYNVSRQTVYTIIEKVKYPHKKNDFFINKLEDNKVYENMTSSTTNFLGITIDTENGSTNPKVRKALDTSFKLLDITQFIEVTKFKLNMVMFDYFWQVVVGQVTGVHLHSSILEWFGYEGLIKDQKKSFIKMLQRNTINYKQLTEKDEEIKLYPTIQEELQLIPTNVKHTKFIIMEPDDLKMAIMQLKTKNGHIIRQYYIDLEKLLKMYTEYTLYFNHRESQRKITNLEQMMADIKLERQKDREIMLRQEQYMRSLGISLEEVKDQNETLIDNNTTLKKEVKKVQHKLGIAVEDRAPLPADESKRERFVLIKRNDSDYYPYYTIRAQEGYTIRKLKTEKLHFPNLEVLLDFKCNPNSKSLYTRIKENLKSKGVTFKGNNIDLEDSEVDEEKLVEEMKATDSSKRDI

SEQ ID NO: 11930 - protein, 434 aa, Unknown
  Description of Unknown: Integrase A498 sequence
  cd00569, G3DSA:1.10.10.60,SSF46689,PF02796
METKPRLTIEQRANVFKKYQDGCSVAEITREFKISRPTVYKILSKVNLTSKNEIFSEKEDGNKDMDSSTTFLGVNIDTINGPFDFKIKKALKRSLKLLDIMEFVEITKFKLNMVMFDYFWQVVVGNRSSPVGRPVLEWFGYEGEYFNQKKCFKKMLKNNAIQYRELTQGDKEIDEYPTIQQELQELNSGAQACSKFLIMEPDDLKMAIMQLKTKNGDTIRQYYIDLEKLLKLYVEYTLYFNHRESQRKITNLEEMMAKMDLDMKIREETRELEREKDRQYMRSLGISLEEVKDQNEELLDNNKGLKKNVKDIKRKLGIAVEDRAPLPVDEDKQERFVLLKRNDDQHYQYYTVRAQYGYTERKIKTNRLLFPQLEILLDFTAHPNSKSLYNRIKVELKTRNVQFNGNNIDLEGSEVTQEELIEEMKVINDQKYEI

SEQ ID NO: 11931 - protein, 434 aa, Unknown
  Description of Unknown: Integrase A499 sequence
  G3DSA:1.10.10.60,SSF46689
MQGSYKNKLTLEQRNTIVQMFNDGVPVFTLSKQFEVSRPTVYNILEKAGNMNHKKIEFYIPKSNKNKEEMKPISEKIILSDTNTPFKTNFLGVTIDPENGSSNPKIRKALNASTQLLDIIEFVKVTKFKLNMTMFDYFWQVVVGNTRVHLVSRVLEWFGYEGEIKEQRKNFIRMLKRNGIEYHELTQKDKEIEMYPTIQEELQLLPKNVTNSKFLLMEPDDIKMAIMQLKTKNGHIIRQYYIDLEKLLKMYTEYTLYFNHREATRQITDLQQTMRELRESNQRQEQYMRSLGISLETVKDQNEELLGDNKEIKRKLGIAVKDRAPLPVNKDKQERFVLLKRNDDEYYPYYTIRAQEGYTERRIKTQKVLFPNLEILLDFKANPNSKTLYTRIKEKLKDSGVLFEGNNIEIEGSEVTEKELIDEMKVINDSKRNL

SEQ ID NO: 11932 - protein, 434 aa, Unknown
  Description of Unknown: Integrase A500 sequence
  PF07508,G3DSA:1.10.10.2600,SSF53041,PS51737,cd03768, PTHR30461:SF3,PF00239, PS51736,SM00857, G3DSA:3.40.50.1390,PS00397,PTHR30461
MNVAIYVRVSTLEQKEHGHSIEEQERKLKSFCEINDWNESDVFVDAGFSGAKRDRPELQRMMNDIKRFDLVLVYKLDRLTRNVRDLLDFLEIFEQNNVAFRSATEVYDTSTAMGRLFVTLVGAMAEWERETIRERVMMGKRAAIKQGMILTPPPFYYDRVDNTYIPNDYKKVVLWAYDEVLKGVSSKGIARKLNDSDIPPPNGKRWEDRTITRALRSPITRGHYTWGDVFIENSHEPIITEEMYQQIKERLEERINTKIVSHVSVFRGKFICPKCGGTLTMNTATKKRKKGYVTYKTYYCNTCKGKKESFGFAENEALRVFRDYLSKLDLGKYEVKTKQKDDVVTIDIDKIMEQRKRYHKLYAKGLMQEEELFELIKETDETIAEYEKQKELVPKKTLDIDKIKNSKMYCWNHGKYSRWMIKQISLRWPLSLST

SEQ ID NO: 11933 - protein, 431 aa, Unknown
  Description of Unknown: Integrase A501 sequence
  cd00569,G3DSA:1.10.10.60
MELSNKFKLTPAQREDIVKKYTNGTSVVSISKEYNVSRQTVYTIIEKVKYPHKKNDFFINKLEDNKVYENMTSSTTNFLGITIDTENGSTNPKVRKALDTSFKLLDITQFIEVTKFKLNMVMFDYFWQVVVGNQCLHVSTLILNWFGYEGDYRKQKESFIKILKRNTIEYRELTQKDKEIKMYPTIQEELQLLPHDAAKSRSKFLIMAPHDLKMAIMQLKTKNGHIIRQYYIDLEELLKVYTEYTLYFNHRESQRKITNLEQMMADIKLERQKDREIMLRQEQYMRSLGITLEEVKDQNEVLIDDNKEVKRKLGIAVEDRAPLPADESKRERFVLIKRNDPDYYPYYTIRAQEGYTIRKLKTEKLHFPNLEVLLDFKCNPNSKSLYTRIKENLKSKGVTFKGNNIDLEDSEVDEEKLVEEMKATDSSKRDI

SEQ ID NO: 11934 - protein, 430 aa, Unknown
  Description of Unknown: Integrase A502 sequence
  cd00569,G3DSA:1.10.10.60,SSF46689,PF02796
MSGSHNIKLTFDQRQTIAKLHASGTTVVALSEQFGVSRPTVYKILEKMETKVEKEPYSIISTNLLGIIIDTKNGPTNPKINKALNASFKLLDITKFIEITEFKLNMVMFDYFWQIVVGQVTGLHVSTSILQWFGYQGEYKAQKDAFLRILKRNNISYQELTQKDKEIEMYPTIQEELQLIPSNVKHSKFLIMEPDDLKMAIMQLKTKNSNIIRQYYIDLEKLLKMYTEYTLYFNHYESNRKISTLEESMSQLNLTISKQEQIMIRQEQYMHSLGISLEEVKDQNDELLDKTTYLTKQNTGLQTEVKKVQYKLGIAVEDRAPLPLDEDKQERFVLIKRNNNEYYSYYTIRAQYKYTERRIKAQKVLFPNLEILLDFKANPNSKSLYTRIKDELKAKGVQFSGNNIDLEDSEVTEEKLMEEMKVINDQKYNV

SEQ ID NO: 11935 - protein, 430 aa, Unknown
  Description of Unknown: Integrase A503 sequence
  cd00569, G3DSA:1.10.10.60,SSF46689,PF02796
MSGSHNIKLTFDQRQTIAKLHASGTTVVALSEQFGVSRPTVYKILEKMEKKVEKEPYSIISTNLLGIIIDTKNGPTHPKINKALNASFKLLDITKFIEITEFKLNMVMFDYFWQIVVGQVTGLHVSTSILQWFGYTGEYKAQKDAFLRILKRNNISYQELTQKDKKIEMYPTIQEELQLIPSNVKHSKFLIMEPDDLKMAIMQLKTKNGNTIRQYYIDLEKLLKMYTEYTLYFNYYESNRKISTLEESMSQLNLTISKQEQIMIRQEQYMHSLGISLEEVKDQNDELLDKTTYLTKQNTGLQTEVKKVQYKLGIAVEDRAPLPLDEDKQERFVLIKRNNNEYYPYYTIRAQYKYTERRIKTQKVLFPNLEVLLDFKANPNSKSLYTRIKDELKAKGVQFNGNNIDLEESEVTEKELMEEMKVINDQKYNV

SEQ ID NO: 11936 - protein, 430 aa, Unknown
  Description of Unknown: Integrase A504 sequence
  PF07508,G3DSA:1.10.10.2600,SSF53041,PF13408,PS51737, cd00338,PTHR30461:SF3,PF00239, PS51736, SM00857,G3DSA:3.40.50.1390,PTHR30461
MSTDQEEQLSSYENQVNYYREFISKHEDYELVDIYADEGISATNTKKRDAFNRLIQDCRAGKVDRILVKSISRFARNTLDCIKYVRELKELGVGVTFEKENIDSLDSKGEVLLTILSSLAQDESRSISENATWGIRKKFERGEVRVNTTKFMGYDKDENGRLIINPQQAETVKFIYEKFLEGYSPESIAKYLNDNEIPGWTGKANWYPSAIQKMLQNEKYKGDALLQKTFTVDFLTKKRVQNDGQVNQYYVENSHEAIIDEETWETVQLEMARRKTYRDEHQLKSYIMQSEDNPFTTKVFCGACGSAFGRKNWATSRGKRKVWQCNNRYRIKGVEGCYSSHLDEATLEQIFLKALELLSENIDLLDGKWEKILAENRLLDKHYSMALSDLLRQEQIDFNPSDMCRVLDHIRIGLDGEITVCLLEGTEVDL

SEQ ID NO: 11937 - protein, 430 aa, Unknown
  Description of Unknown: Integrase A505 sequence
  PF07508,G3DSA:1.10.10.2600,SSF53041,PF13408,PS51737, cd00338,PTHR30461:SF3,PF00239,PS51736,SM00857, G3DSA:3.40.50.1390,PTHR30461
MSTDQEEQLSSYENQVNYYREFISKHEDYELVDIYADEGISATNTKKRDAFNRLIQDCRAGKVDRILVKSISRFARNTLDCIKYVRELKELGVGVSFEKENIDSLDSKGEVLLTILSSLAQDESRSISENATWGIRKKFERGEVRVNTTKFMGYDKDDNGRLIINPQQAETVKFIYEKFLDGYSPESIAKYLNDNEIPGWTGKANWYPSAIQKMLQNEKYKGDALLQKTITVDFLTKKRVQNDGQVNQYYVENSHEAIIDKDTWELVQLELERRKAYREEHQLKSYIMQNDDNPFTTKVFCAECGSAFGRKNWATSRGKRKVWQCNNRYRVKGQIGCQNNHIDEETLEKAVVIAVELLSENVDLLHGKWNKILEENRPLEKHYCTKLAEMINKTSWEFDSYEMCQVLDSITISEDGQISVKFLEGTEVDL

SEQ ID NO: 11938 - protein, 430 aa, Unknown
  Description of Unknown: Integrase A506 sequence
  PF07508,G3DSA:1.10.10.2600,SSF53041,PF13408,PS51737,cd00338, PTHR30461:SF3,PF00239,PS51736,SM00857,G3DSA:3.40.50.1390 ,PTHR30461
MSTDQEEQLSSYENQVNYYREFISKHEDYELVDIYADEGISATNTKKRDAFNRLIQDCRAGKVDRILVKSISRFARNTLDCIKYVRELKELGVGVTFEKENIDSLDSKGEVLLTILSSLAQDESRSISENATWGIRKKFERGEVRVNTTKFMGYDKDENGRLIINPQQAETVKYIYEKFLEGYSPESIAKYLNDNEIPGWTGKANWYPSAIQKMLQNEKYKGDALLQKTFTVDFLTKKRIANDGQVNQYYVENSHEAIIDKDTWELVQLELARRKAYREEHQLKSYIMQNDDNPFTTKVFCKECGSAFGRKNWTTSRGKRKVWQCNNRYRVKGQIGCQNNHIDEETLEKAVVMAVELLSENVDLLHGKWNKILEENRPLEKHYSTKLAEVINKPSWEFDSYEMCQVLDSITISEDGQITVRFHEGTEVDL

SEQ ID NO: 11939 - protein, 430 aa, Unknown
  Description of Unknown: Integrase A507 sequence
  PF07508,G3DSA:1.10.10.2600,SSF53041,PF13408,PS51737, cd00338,PF00239,PS51736,SM00857,G3DSA:3.40.50.1390, PTHR30461
MERHAMQLILEKAKKRELQMVLFKSIHRLARDLKDALEIKEILIANGIRLVTIEEGYDSHYEGKNDMKFEMFAMFASQYPKTLSVSISAALSAKVRRGEHTGGRLPFGYSDRDKKYVINEEEAEIVREIYDMYSKGIGYIGITKILNERGVPSKTGGKWQMSSVQRIIKNPIYKGDYILNQYTTVKISGRKKQIKNPEEKWTIFKNHHPAIVSEEQWELVNRPRSAKKRRPALWNEFRGIMFCAHCGSAMQVVYSAKKNKNGTKEEWRYLKCSRYKRYGRDECVRHAPIQYREFREFILDNLKEKEKQLETEFNLNEEISNADKKNKLQREIQRIEEKRKKLIDLYMEELIEKEEFLSRRNELEKIIKEKEVQFVSMEDKNEVKRTQDEFRKAFALLDESKNLYEEFKRIIDRIEIFENGDIKIVYRIEM

SEQ ID NO: 11940 - protein, 430 aa, Unknown
  Description of Unknown: Integrase A508 sequence
  PF07508,G3DSA:1.10.10.2600,SSF53041,PF13408,PS51737, cd00338,PTHR30461:SF3,PF00239,PS51736,SM00857,G3DSA:3. 40.50.1390,PTHR30461
MSTDQEEQLSSYENQVNYYREYISKHEDYELVDIYADEGISATNTKKRDAFNRLIQDCRAGKVDRILVKSISRFARNTLDCIKYVRELKELGVGVTFEKENIDSLDSKGEVLLTILSSLAQDESRSISENATWGIRKKFERGEVRVNTTKFMGYDKDENGRLIINPQQAETVKFIYEKFLEGYSPESIAKYLNDNEIPGWTGKANWYPSAIQKMLQNEKYKGDALLQKTFTVDFLTKKRVQNDGQVNQYYVENSHEAIIDKDTWELVQLELARRKAYREEHQLKSYIMQNDDNPFTTKVFCKECGSAYGRKNWTTSRGKRKVWQCNNRYRVKGQSGCQNNHIDEETLEKAVVMAVELLSENVDLLHGKWNKILEENRPLEKHYSTKLADMINKPSWEFDSYEMCQTLDSITIVEDGQITVRFLEGTEVEL

SEQ ID NO: 11941 - protein, 430 aa, Unknown
  Description of Unknown: Integrase A509 sequence
  PF07508,G3DSA:1.10.10.2600,SSF53041,PF13408,PS51737, cd00338,PTHR30461:SF3,PF00239,PS51736,SM00857, G3DSA:3.40.50.1390,PTHR30461
MSTDQEEQLSSYENQVNYYREFISKHEDYELVDIYADEGISATNTKKRDAFNRLIQDCKAGKVDRILVKSISRFARNTLDCIKYVRELKELGVGVTFEKENIDSLDSKGEVLLTILSSLAQDESRSISENATWGIRKKFERGEVRVNTTKFMGYDKDENGRLIINPQQAETVKYIYEKFLEGYSPESIAKYLNDNEIPGWTGKANWYPSAIQKMLQNEKYKGDALLQKTFTVDFLTKKRIANDGQVNQYYVENSHEAIIDKDTWELVQLELARRKAYREEHQLKSYIMQNDDNPFTTKVFCKECGSAFGRKNWTTSRGKRKVWQCNNRYRVKGQIGCQNNHIDEETLERAVVMAVELLSENVDLLHGKWNKILEENRPLEKHYSTKLAEMINKPSWEFDSYEMCQVLDSITISEDGQISVKFLEGTEVDL

SEQ ID NO: 11942 - protein, 430 aa, Unknown
  Description of Unknown: Integrase A510 sequence
  PF07508,G3DSA:1.10.10.2600,SSF53041,PF13408,PS51737,cd00338, PTHR30461:SF3,PF00239,PS51736,SM00857,G3DSA:3.40.50.1390, PTHR30461
MSTDQEEQLSSYENQVNYYRDYISKHEDYELVDIYADEGISATNTKKRDAFNRLIQDCRAGKVDRILVKSISRFARNTLDCIKYVRELKELGVGVTFEKENIDSLDSKGEVLLTILSSLAQDESRSISENATWGIRKKFERGEVRVNTTKFMGYDKDENGRLIINPGQAETVKFIYEKFLEGYSPESIAKYLNDNEIPGWTGKANWYPSAIQKMLQNEKYKGDALLQKTFTVDFLTKKRVQNDGQVNQYYVENSHEAIIDKDTWELVQLELARRKDFREEHQLKAYIIQNDDNPFTTKVFCKACGSAFGRKNWTTSRGKRKVWQCNNRYRVKGQIGCQNNHIDEETLEKAVVMAVELLSENVDLLHGKWNKILEENRPLEKHYCTKLAEMINKPLWEFDSYEMCQVLDSITISEDGKISAKFLEGTEVDL

SEQ ID NO: 11943 - protein, 430 aa, Unknown
  Description of Unknown: Integrase A511 sequence
  PF07508,G3DSA:1.10.10.2600,SSF53041,PF13408,PS51737, cd00338,PTHR30461:SF3,PF00239,PS51736,SM00857, G3DSA:3.40.50.1390,PTHR30461
MSTDQEEQLSSYENQVNYYREFISKHEDYELVDIYADEGISATNTKKRDAFNRLIQDCKAGKVDRILVKSISRFARNTLDCIKYVRELKELGVGVTFEKENIDSLDSKGEVLLTILSSLAQDESRSISENATWGIRKKFERGEVRVNTTKFMGYDKDENGRLIINPQQAETVKYIYEKFLEGYSPESIAKYLNDNEIPGWTGKANWYPSAIQKMLQNEKYKGDALLQKTFTVDFLTKKRIANDGQVNQYYVENSHEAIIDKDTWELVQLELARRKAYREEHQLKSYIMQNDDNPFTTKVFCKECGSAFGRKNWTTSRGKRKVWQCNNRYRVKGQIGCQNNHIDEETLEKAVVMAVELLSENVDLLHGKWNKILEENRPLEKHYSTKLAEVINKPSWEFDSYEMCQVLDSITISEDGQISVKFLEGTEVDL

SEQ ID NO: 11944 - protein, 430 aa, Unknown
  Description of Unknown: Integrase A512 sequence
  PF07508,G3DSA:1.10.10.2600,SSF53041,PF13408,PS51737,cd00338, PTHR30461:SF3,PF00239,PS51736,SM00857,G3DSA:3.40.50.1390 ,PTHR30461
MSTDQEEQLSSYENQVNYYRDYISKHEDYELVDIYADEGISATNTKKRDAFNRLIQDCRAGKVDRILVKSISRFARNTLDCIKYVRELKELGVGVTFEKENIDSLDSKGEVLLTILSSLAQDESRSISENATWGIRKKFERGEVRVNTTKFMGYDKDENGRLIINPGQAETVKFIYEKFLEGYSPESIAKYLNDNEIPGWTGKANWYPSAIQKMLQNEKYKGDALLQKTFTVDFLTKKRVQNDGQVNQYYVENSHEAIIDKDTWELVQLELARRKDFREEHQLKAYIIQNDDNPFTTKVFCKACGSAFGRKNWTTSRGKRKVWQCNNRYRVKGQIGCQNNHIDEETLEKAVVMAVELLSENVDLLHGKWNKILEENRPLEKHYCTKLAEMINKPLWEFDSYEMCQVLDSITISEDGQISAKFLEGTEVDL

SEQ ID NO: 11945 - protein, 429 aa, Unknown
  Description of Unknown: Integrase A513 sequence
  cd00569,G3DSA:1.10.10.60,SSF46689,PF02796
MIRPRLNKEQRNEVIEKYTQGIPIAHISRQFKVTRPTIYNVIESQGNTSHKKIDFYVDKLEKNKDMSTSEIKTNFLGVAIDTENGSNNPKIRKALDNSFKLLDIMEFVKITKFKLNMVMFDYFWQVVIGNHSTLIGSMVLEWFGYTGEYKKQRQNFKKMLSNNNICYDELTHKNIDHELYPIIQHELSGMSNCDIVKSKFLIMEPDDLKMAIMQLKTKNGHTIRQYYIDLEKLLKMYVEYTLYFNHRESQRKITNLEQMMGDMKLEREKDRQYMRSLGITLEEVRDQNDELLDNNRGLKKDVKEVKRKLGIAVKDRAPQPDDESKRERFVLIKRNDPEYYPYYTIRAQEGYTTRKLKFEKENFPNFEVLLDFKFNPNSKTLFNRIKENLRTKGVIFDRNNIDLEEAEIDEEKLIEEMKVINDQKLNIRI

SEQ ID NO: 11946 - protein, 429 aa, Unknown
  Description of Unknown: Integrase A514 sequence
  G3DSA:1.10.10.60,SSF46689
MTLYPIHKLTLDERQNIIDLYNSGTTIAYLSRQFKVSRPTIYSIIQKRLNDQKEIDFYTAKIEENKDLNMENPTTNFLGITIDSENSSSNPKINKALNKSLSLLNIIQFIEVTKFKINSVMFDYFWQVVVGNHSVHLVTMIFDWFGYEGENKEQKRNFKKMLKNNNISYRELTHKDNEIELYPSIKKELSKMATCDIVKSKFLIMEPKDLKMAIMQLKTKNGHTIRQYYIDLEELLKLYTEYTLYFNHRESQRKITDLEKMMADMNLTMQRQEKYMQSMGIQLEDVKDQNEELLDKTRGLKKQNKQIQRKLGIAVEDRAPQPEDESKRERFILMKRNNDEYYPYYTIRAQDGYTTRKIKIQKNYFPDLEILLDFKCNPNSKTLYNRIKENLKTKGVEFTGNNIDLRESQVLEEELIKEMEVINDQRYNV

SEQ ID NO: 11947 - protein, 429 aa, Unknown
  Description of Unknown: Integrase A515 sequence
  cd00569, G3DSA:1.10.10.60,SSF46689,PF02796
MSGSHNIKLTLDQRQTIAKLHASGTTVVALSEQFGVSRPTVYKILEKMETKVEKEPYSIISTNLLGIVIDTKNGPMNPKINKALNASFKLLDITKFIEITEFNLNMVMFDYFWQIVVGNTHVHLARRILEWFGYEGEYFEQKRLFQRMLKRNNISYQELTQKDKEIEMYPTIQEELQLIPSNVKNSKFLIMEPDDLKMAIMQLKTKNSNIIRQYYIDLEKLLKMYTEYTLYFNHYESNRKISTLEESMSQLNLTISKQEQIMIRQEQYMHSLGISLEEVKDQNDELLDKTTYLTKQNTGLQTQVKKVQYKLGIAVEDRAPLPLDEDKQERFVLIKRNNNEYYPYYTIRAQYKYTERRIKAQKILFPNLEILLDFKANPNSKSLYTRIKDELKAKGVQFSGNNIDLEDSEVTEEKLMEEMKVINDQKYNV

SEQ ID NO: 11948 - protein, 429 aa, Unknown
  Description of Unknown: Integrase A516 sequence
  PF07508,G3DSA:1.10.10.2600,SSF53041,PS51737,cd00338, PTHR30461:SF21,PF00239,SM00857, G3DSA:3.40.50.1390, PTHR30461
MEVGQVWVDNDLSATKKNVVRPDFEAMIASKPQAIVCWHTDRLIRVTRDLERVIDLGVNVHAVMAGHLDLSTPAGRAVARTVTAWATYEGEQKAERQKLANIQNARLGKPYTPGIRPFGYGEDHMTVVTAEADAIRDGAKMILDGWSLSAVARYWEELKLQSPRSTAAGGKGWSLRGVKKVLTSPRYVGRSSYLGEVVGDALWPPILDPDVYYGVVAILNNPDRFSGGPRTGRTPGTLLSGIGQCGYDDCKDTVGGRGYRGVLVYGCKDTHTRTPRSIADARASNATLARLMFPDFLPGLLASGQTESGESAASMHAEAQTLRERLDGLATAYAEGAINLSQMTAGSEALRKKLEVVESELVGSAGIPPFDPVAGVAGLISGWPDLPLPTRRAWVDFCCVVTLNPQRGRHLSNMTVDDHVTIEWRDVAE

SEQ ID NO: 11949 - protein, 429 aa, Unknown
  Description of Unknown: Integrase A517 sequence
  cd00569,G3DSA:1.10.10.60,SSF46689
MSGSHNIKLTLTQRQTIARLHSEGTTVVALAEQFGVSRPTIYKILGKMETKIEKEPYSIISTNLLGIVIDTKNGSNNPKINKALNASFKLLDIMEFVKITKFKLNMVMFDYFWQVVVGNTRSHLGSRVLEWLGYEGEDKVQKRKFIEMLKRNGISYQELTQKDKEIEMYPTIQEELQLLPSNIKNSKFLIMEPDDLKMAIMQLKTKNGDIIRQYYIDLEKLLKMYTEYTLFFNHYESERKISTLEESMSQLNLTISRQEHIMLQQTQYMRSLGISLEEVKDQNEVLIDQNDELLDNNRGLKKEVKKVQRKLGIAVEDRAPLPEDVDKQERFVLIKRNDDQHFQYYTIRAQCKYTERKIKAQKMLFPHSEVLLDFKANPNSKTLYDRIRDSLKAKNVVFKGNNIDIEDAEIDEQELIDEMKVINDQRYNI

SEQ ID NO: 11950 - protein, 429 aa, Unknown
  Description of Unknown: Integrase A518 sequence
  PF07508,G3DSA:1.10.10.2600,SSF53041, PF13408,PS51737,cd00338,PTHR30461:SF3,PF00239, PS51736,SM00857,G3DSA:3.40.50.1390,PTHR30461
MSTDQDEQLSSYENQVRYYQDYIRQNPLYELVDIYADEGISGTNTKKRTEFNRLIGDCRKGKVDRIIVKSISHFSRNTLDCLKYVRELKELGIGVTFEKENIDSLDAKGEVLLTILSSLAQDESRSISENATWGIRKKFERGEVRVNTTKFVGYDKGENGNLIINEEQAKIVRRIFRDFLQGETPESIARTLKEEGVPGWNGKVNWYPTTIQRMLQNEKYMGDALLQKTYTVDFLTKKRSENQGQVNQYYIEGNHEAIINKEEWELVQLEVDRRNQFRQDNHINFYIIQCEQNPFTCKVFCKECGGLFGRKNWTTSRGKRPVWQCNNRYKVKGVQGCTNRHIDEETLQQAFLRAIEILHENKGQLLGKWAIFDEEQKLEKYHAAQLKELLDSEQEAFDGRKMCQVLEKITLGEDGSITIKFLEGTEVNL

SEQ ID NO: 11951 - protein, 428 aa, Unknown
  Description of Unknown: Integrase A519 sequence
  PF07508,G3DSA:1.10.10.2600,SSF53041,PF13408,PS51737,cd00338, PTHR30461:SF3,PF00239,PS51736,SM00857,G3DSA:3.40.50.1390 ,PTHR30461
MSTDQDEQLSSYENQVNYYRDFISKHEDYELVDIYADEGISATNTKKRDAFNRLIQDCRDGKVDRILVKSISRFARNTLDCIKYVRELKDLGIGVTFEKENIDSLDSKGEVLLTILSSLAQDESRSISENATWGIRKRFERGEVRVNTTKFMGYDKDKDGNLIINREQAEVVRYIYERFLKGYTPESIARDLNDRDVPGWSGKANWYPSSILKMLQNEKYKGDALLQKTYTVDFLTKKRTENDGQVNQFYVANNHEGIIDHEMWETVQLEIARRKAFREEHGIPFYHLQNEDNPFMTKVFCAECGDAFGRKNWTTSRGKRKVWQCNNRYRVTGVMGCSNNHIDEEMLEKAFMEAVSILKDYKADVLDKLEKLSKGDNLLNKHYAKFMKQLLDLDHYDCTIMCQVLDNITISESGQITVTFLEGTEVDL

SEQ ID NO: 11952 - protein, 427 aa, Unknown
  Description of Unknown: Integrase A520 sequence
  PF07508,SSF53041,PS51737,cd00338,PTHR30461:SF3, PF00239,PS51736,G3DSA:3.40.50.1390,PTHR30461
MIVAYRVDRLTRSIRHLQQLVHWAEDHKKLIVSATEAHFDTTSPFAAVVIALMGTVAQMELEAIKERNRSAAHFNIRAGKYRGSLPPWGYMPARVDGEWRLLVDPVQRERILEVYHRVVDNHEPLHQIAHDLNQRGLPSPKDYFAKLQGREPKGREWSATALKRSLISEAMLGYATLNGKTVRDDDGAPLVRAEPILTREQLESLRAELVKADRAKPAVSTPSLLLRVLFCAVCGEPAYKFTGGGRRNSRYRCRSWGWAQRCGNGTVAMAEWDAFCEEQVLDLLGDAERLEKVWVAGSDSAVELAEVNAELVDLTSLIGSPAYRVGSPQREALEARIAALAARQEELEGLEARPSGWEWRETGQRFADWWGQQDTSGKNTWLRSMNVRLTFDVRGGLTRTIDFGDLQEYEQHLRLGSVVEQLHAGMS

SEQ ID NO: 11953 - protein, 426 aa, Unknown
  Description of Unknown: Integrase A521 sequence
  cd00569,G3DSA:1.10.10.60,SSF46689,PF02796
MLRPRLNKEQRNEVINLYTQGIPIAHISRQFKVTRPTIYNVIESQGNTSHKKIDFYFEKKGENKDMSELQKINFLGVDIDTENGSSNPKIRKALNASFNLLDITQFIEVTKFKLNTTMFDYFWQVVVGNTRVHLATRVLEWFGYEGELREQKRLFLRMLKRNNISYKELTQKDKEIELYPTIQEELQLIPSNITNSKFVIMEPRDLKMAIMQLKTKNGHIIRDYYIDLEELLKMYVEYTLYFNHREASRKITNLEQMMVDMKLERERDRQYMRSLGITLEEVRDQNDELLDNNRGLKKEVKKVQHKLGIAVEDRAPLLEDESKRERFVLIKRNDPEYYPYYTIRAQEGYTTRKLKFEKTNFPNLEVLLDFKCHPNSKTLFNRIKENLKTKNVVFKGNNIDLEEAKIDEQELVEEMKVINDQKLDIK

SEQ ID NO: 11954 - protein, 425 aa, Unknown
  Description of Unknown: Integrase A522 sequence
  PF07508,SSF53041,PS51737,PTHR30461:SF3,PF00239, PS51736,G3DSA:3.40.50.1390,PTHR30461
MAYRVDRLTRSIRHLQQLVHWAEDHKKLVVSATEAHFDTTTPFAAVVIALMGTVAQMELEAIKERNRSAAHFNIRAGKYRGSLPPWGYLPTRVDGEWRLVPDPVQRERILEVYHRVVDNHEPLHLVAHDLNRRGVLSPKDYFAKLQGREPQGREWSATALKRSLISEAMLGYATLNGKTVRDDDGAPLVRAEPILTREQLEALRAELVKTSRAKPAVATPSLLLRVLFCAVCGEPAYKFTGGGRKNARYRCRSWGWAQRCGNGTVAMAEWDAFCEEQVLDLLGDSERLEKVWVAGSDSAVELAEVNAELVDLTSLIGSPAYRVGSPQREALDARIAALAARQEELEGLEARPSGWEWRETGQRFGDWWREQDISGKNAWLRSMNVRLTFDVRGGLTRTIDFGDLQEYEQHLRLGSVVERLHAGMS

SEQ ID NO: 11955 - protein, 424 aa, Unknown
  Description of Unknown: Integrase A523 sequence
  G3DSA:1.10.10.60,PF02796
MKRVNKLNKQDKESIFDLYLKGYTITGLCKQFNVSRPTIYKVINVGKEEEQNDFCVDIKEESKGKIMTNTNFLGLTIDAENGPKDRRICKVLNQGFKLLDIMEFIKATKFDLNMIMFDYFWQVVVGNQWVHLHPLVLEWFGYEGEIKEQRKNFIKMLKRNNIPYQELTRTNKEIELYPTIKDELSLLPHDAARACIKFLIMCPKDLKMAIMQLKTKNGNAIREYYINLEELLKLYVEYTLYFNHRESQRKITDLEQMMADLKLSNKRQEQYMRSLGISLEEVKDQNDSLLGETKDLKKQNNTIQRKLGIAVEDRAPLPEDKKKRERFLLLKLNDPEYLPYYTIRAQYAYTLTKLKNYRTWYPNLEVLLDFKCNPNSKTLYVRIKESLKAKGVVFDGNNIDLKDAIEEEELLEEMKVINEQKYDV

SEQ ID NO: 11956 - protein, 421 aa, Unknown
  Description of Unknown: Integrase A524 sequence
  PF07508,G3DSA:1.10.10.2600,SSF53041,PF13408, PS51737,cd03768,PTHR30461:SF3,PF00239,PS51736, SM00857,G3DSA:3.40.50.1390,PTHR30461
MQQLIKDADTGLYDAVLVYKLDRLSRSQKDTLYLIEDVFQKNNIHFISLSENFDTSTAFGKAMIGILSVFAQLEREQIKERMSMGRVGRAKSGKIMEFNNPAFGYEVDGDNYKVDPLRAEIVKRIYKMYLSGTSINKIKETLNLEGHIGNKKNWSDTRIRYILSNPTYLGKIRYDGKTYDGKFSPIIDEETFNKTQNELKERQTATYKRFNMKLRPFQSKYMLSGLLRCGYCGATLFVNSYVYNGKRKLRYNCPSTYKSKQKTRTYKIMDPNCPFKLVYAKDLEPAVINEIKNLALNPQSIQKPVKKKPDIDVEAIQKELAKVRKQQQRLIDLYVISDDVNIDNISKKSADLKLQEETLKKQLAPLEEPNDDDKIVAFNEILAQIKDIDSLDYDKQKFIVKKLIKKIDVWNDNKIKIHWNI

SEQ ID NO: 11957 - protein, 419 aa, Unknown
  Description of Unknown: Integrase A525 sequence
  G3DSA:1.10.10.60,SSF46689,PF02796
MSSHKLTIEEHQTIIDLYNNGTTISYLSRQFKVSRPTIYTILNKVRNDHKEIDFYVDKLDENKDMDSNTNVTNFLGITIDNENGSNNRKINKALNSSFKLLDIIKFVEVTKFKINTLMFDYFWQVIVGNITYTPVSISVLEWFGYTGEYYKQRQNFKKMLKNNNIPYRELTQKDKEIELYPTIQEELQLIPTNVKHSKFLIMEPKDLKMAIMQLKTKNGHIIRKYYIDLEELLKAYTEYTLYFNHRESLRKITGLEQKMTEMTQYMRSLGISLEEVKDQNQELLGKTKGLKKQNKLIQRKLGIAVEDRAPQPEDESKRERFVLIKRNDPEYYPFYIIRAQEGYTKRKLKSEKNNFPNLEVLLDFKCSPNSKSLYTRIKENLKIKNVTFINNNIDLEDASMTEEELIEEMKVINESKREI

SEQ ID NO: 11958 - protein, 418 aa, Unknown
  Description of Unknown: Integrase A526 sequence
  G3DSA:1.10.10.60,PF02796
MNFKYYNEIIDKIVALKQQGIGSRQIAKQLNIGKSTVNQYYSAWIELEDSNKEIITDTEQEDKTFEDNLNVLCEHPDYSVSNLAKRLRHAHRANNQLRKIQREIADTDFNFKEMLVGIEKAVDKVQVSKYSPRVYPAVASKQNGAVEVLFSDWQIGKVAQHYNTEIGIRALEDYGQQVRTFILDKQRTKNVDKVVFASLGDIVEDHMKHGIQSAVACDTGLSEQISNAIVYIWEYVLEPILQLGVPVEFVGIAGNHGSSQHKGMDIYKAGLYSYDYAIYTALKQLAKVGKYDNITFNIPHGAFGHVEIYGNTVIYEHGYFNSATEKSMSDQMKKRGQQIKKHVEYFRIGDMHHVCSYDCHKMVLNGAFFGVDTAATEYSGVLGFSSIPAQVIMWHEPEDNIGKSSVKEFKTIQLAIVE

SEQ ID NO: 11959 - protein, 418 aa, Unknown
  Description of Unknown: Integrase A527 sequence
  G3DSA:1.10.10.60,PF02796
MNFKYYNEIIDKIVALKQQGIGSRQIAKQLNIGKSTVNQYYSAWIELEDSNKEIITDTEQEDKTFEDNLNVLCEHPDYSVSNLAKRLRHAHRANNQLRKIQREIADTDFNFKEMLVGIEKAVDKVQVSKYSPRVYPAVASKQNGIVEVLFSDWQIGKVAQHYNTEIGIRALKDYGQQVRTFILDKQRTKNVDKVVFASLGDIVEDHMKHGIQSAVACDTGLSEQISNAIVYIWEYVLEPILQLGVPVEFVGIAGNHGSSQHKGMDIYKAGLYSYDYAIYTALKQLAKVGKYDNITFNIPHGAFGHTEIYGNTVIYEHGYFNSATEKSMSDQMKKRGQQIKKHVEYFRIGDMHHICSYDCHKMILNGAFFGVDTAATEYSGVLGFSSVPSQVIMWHEPEDNIGKSSVKEFKTIQLAIVE

SEQ ID NO: 11960 - protein, 415 aa, Unknown
  Description of Unknown: Integrase A528 sequence
  G3DSA:1.10.10.60,SSF46689
METKKKLTTQQRLDIIKFYQEGTTIIQLSSDFKVSRPTIYNILKKANLTSQNEIFYKNQNINKDMEDNTTFLGVSIDTINGPYDFKIKKALKCSASLLDITQFIQITKFKLNMTMFDYFWQVMVGNRSSLVGRPILEWFGYEGEYFNQKKCFKKMLKNNAIEFRELTQEDKEIDQYPAIQQELQELNQGARTCAKFLIMEPDDLKMAIMQLKTKKGDIIRQYYIDLEKLLKLYVEYTLYFNHRESQRKITDLEYKMDEMTKYMRSLGISLETVKDQNEELLDKNNELLDDNKEVKRKLGIAVKDRAPLPDDKKKQERFVLLKRNDEDYMPYYTIRAQDSYTTRRLRTQNELFPNLQILLDFKANPNSKSLYIRIKDKLKDLGVTFEGNNIDLNGVIEEEKLIEEMKVINDAKKNI

SEQ ID NO: 11961 - protein, 413 aa, Unknown
  Description of Unknown: Integrase A529 sequence
  PF07508,G3DSA:1.10.10.2600,SSF53041, PF13408,PS51737,cd00338,PF00239,PS51736, SM00857,G3DSA:3.40.50.1390,PTHR30461
MSVKKIRVNKQKHKQRICAYIRVSTTNGSQLESLENQKHYFENLYSNRDDIDFVGVYHDRGISGSKDNRPNFQAMIENCRKGMIDIIHTKSIARFARNTVTVLEISRELKAIGVDIFFEEQNIHTLSSEGEVMLSVLASIAEDELRSMSGNQRWAFQKKFQRGELVINTKRFLGYDIDENGELIINPEEALIVRKIFALYLEGYGTHRIAKLLNEKGVATVTGAKWHDTTIRQMLSNEKYNGSVLLQKYFHDGVNGPKKLNQGELEQYLIEDNHEAIISMEDWQAVQVKLNSRRWQQGRNKTYKFTGLLKCQHCGSTLKRQVSYKKKIVWCCSKYIKEGKATCQGMRVPEVDISNWEITSPVTVIERDRNGEKYYSYTGQESADQCSSSGQEENQSSRILPSVHRPRRAAIKL

SEQ ID NO: 11962 - protein, 413 aa, Unknown
  Description of Unknown: Integrase A530 sequence
  PF07508,G3DSA:1.10.10.2600,SSF53041,PF13408, PS51737,cd00338,PF00239,PS51736, SM00857,G3DSA:3.40.50.1390,PTHR30461
MSVKKIRVNKQKNKQRICAYIRVSTTNGSQLESLENQKQYFINLYSNRDDIDFVGVYHDRGISGSKDNRPNFQAMIENCRKGMIDVIHTKSIARFARNTVTVLEISRELKAIGVDIFFEEQNIHTLSSEGEVMLSVLASIAEDELRSMSGNQRWAFQKKFQRGELVINTKRFLGYDLDENGELIINPEEALIVRQIFALYLEGYGTHRIAKLLNEKGVATVTGAKWHDTTIRQMLSNEKYNGSVLLQKYFHDGVNGPKKLNQGELEQYFIEDNHEAIISMEDWQTVQAKLNRRRWQQGRNKTYKFTGLLKCQHCGSTLKRQVSYKKKIVWCCSKYIKEGKAACQGMRVPEVDISNWTVTSPVKVIERDRDGEKYYSYSSQESADQYSSSGQEENQSSRILSSVHRPRRTAIKL

SEQ ID NO: 11963 - protein, 413 aa, Unknown
  Description of Unknown: Integrase A531 sequence
  PF07508,G3DSA:1.10.10.2600,SSF53041,PF13408,PS51737, cd00338,PF00239,PS51736,SM00857,G3DSA:3.40.50.1390, PTHR30461
MSVKKIRVNKQKHKQRICAYIRVSTTNGSQLESLENQKHYFENLYSNRDDIDFVGVYHDRGISGSKDNRPNFQAMIENCRKGMIDIIHTKSIARFARNTVTVLEISRELKAIGVDIFFEEQNIHTLSSEGEVMLSVLASIAEDELRSMSGNQRWAFQKKFQRGELVINTKRFLGYDIDENGELIINPEEALIVRKIFALYLEGYGTHRIAKLLNEKGVATVTGAKWHDTTIRQMLSNEKYNGSVLLQKYFHDGVNGPKKLNQGELEQYLIEDNHEAIISMEDWQAVQVKLNSRRWQQGRNKTYKFTGLLKCQHCGSTLKRQVSYKKKIVWCCSKYIKEGKAACQGMRVPEVDISNWEITSPITVLERDRNGEKYYSYSGQESADQRSSSGQEENQGSRILSSVHRPRRTAIKL

SEQ ID NO: 11964 - protein, 413 aa, Unknown
  Description of Unknown: Integrase A532 sequence
  PF07508,G3DSA:1.10.10.2600,SSF53041,PF13408,PS51737, cd00338,PF00239,PS51736,SM00857, G3DSA:3.40.50.1390,PTHR30461
MSVKKIRVNNQKHKQRICAYIRVSTTNGSQLESLENQKQYFENLYSNRDDIDFVGVYHDKGISGSKDNRPNFQAMIENCRKGMIDVIHTKSIARFARNTVTVLEISRELKAIGVDIFFEEQNIHTLSSEGEVMLSVLASIAEDELRSMSSNQRWAFQKKFQRGELVINTKRFLGYDVDENGELIINPEEALIVRQIFALYLEGYGTHRIAKLLNEKGVGTVTGAKWHDTTIRQMLSNEKYNGSVLLQKYFHDGVNGPKKLNQGELEQYFIEDNHEPIISMEDWQTVQEKLNSRRWQQGKNKTYKFTGLLKCQHCGSTLKRQVSYKKKIVWCCSKYIKEGKAACQGMRVPEVDISNWTVTSPVKVIERDRDGEKYYSYSGQESAEHRSTSGQKENQCSRILPSVHRSRRTAIKL

SEQ ID NO: 11965 - protein, 413 aa, Unknown
  Description of Unknown: Integrase A533 sequence
  PF07508,G3DSA:1.10.10.2600,SSF53041,PF13408,PS51737, cd00338,PF00239,PS51736,SM00857,G3DSA:3.40.50.1390, PTHR30461
MSVKKIRVNRQKHRKRVCAYIRVSTTNGSQLDSLENQKQYFEKLYSNRDDIDFIGVYHDRGISGSKDNRPNFQAMIEDCCRGKIDVIHTKSIARFARNTVTVLEISRELKAIGVDIFFEEQNIHTLSSEGEVMLSVLASIAEDELRSMSGNQRWAFQKKFQRGELVINTKRFLGYDVDENGELIINPEEALIVREIFALYLAGNGTHRIAKQLNEKGVATVTGAKWHDTTIRQMLSNEKYKGSVLLQKYFHDGVNGPKKLNQGELEQYLIEDNHEAIISKEDWQVVQDKLNSRGWQQGRNKTYKFTGLLKCQYCGSTLKRQVSYKKKIVWCCSKYIKEGKVACQGMRVPEVDISNWEINSPVTVIERDRNGEKYYSYSGQESADQRFSSGQEENQGSRILSSVHRPRRTAIKL

SEQ ID NO: 11966 - protein, 413 aa, Unknown
  Description of Unknown: Integrase A534 sequence
  PF07508,G3DSA:1.10.10.2600,SSF53041,PF13408,PS51737, cd00338,PF00239,PS51736,SM00857, G3DSA:3.40.50.1390,PTHR30461
MSVKKIRVNRQKHRKRVCAYIRVSTTNGSQLESLENQKQYFENLYSNRDDIDFVGVYHDRGISGSKDNRPNFQAMIEDCRKGMIDIIHTKSIARFARNTVTVLEISRELKAIGVDIFFEEQNIHTLSSEGEVMLSVLASIAEDELRSMSGNQRWAFQKKFQRGELVINTKRFLGYDVDENGELIINPEEALIVREIFALYLAGNGTHRIAKQLNEKGVATVTGAKWHDTTIRQMLSNEKYKGSVLLQKYFHDGVNGPKKLNQGELEQYLIEDNHEAIISKEDWQAVQDKLNSRRWQQGRNKTYKFTGLLKCQHCGSTLKRQVSYKKKIVWCCSKYIKEGKAACKGMRVPEVDISNWTVTSPVTVIERDRDGEKYYSYSSQESADQYSSSGQEENQGSRILSSVHRPRRTAIKL

SEQ ID NO: 11967 - protein, 413 aa, Unknown
  Description of Unknown: Integrase A535 sequence
  PF07508,G3DSA:1.10.10.2600,SSF53041,PF13408,PS51737, cd00338,PF00239,PS51736,SM00857,G3DSA:3.40.50.1390, PTHR30461
MSVKKIRVNRQKHRKRVCAYIRVSTTNGSQLDSLENQKQYFENLYSNRDDIDFMGVYQDRGISGSKDKRPDFQAMIEECRKGKIDVIHTKSIARFARNTVTVLEISRELKAIGVDIFFEEQNIHTLSSEGEVMLSVLASIAEDELRSMSGNQRWAFQKKFQRGELVINTKRFLGYDIDENGELIINPEEAFIVRQIFALYLEGYGTHRIAKLLNEKGVATVTGAKWHDTTIRQMLSNEKYNGSVLLQKYFHDGVNGPKKLNQGELEQYLIEDNHEAIISKEDWQTVQDKLNSRRWQQGRNKTYKFTGLLKCQHCGSTLKRQVSYKKKIIWCCSKYIKEGKVACQGMRVPEVDISNWVITSPVTVIERDGNEEKYYSYSGQESEDQRSSSGQEENQGSRILSSVHRPRRTAIKL

SEQ ID NO: 11968 - protein, 413 aa, Unknown
  Description of Unknown: Integrase A536 sequence
  PF07508,G3DSA:1.10.10.2600,SSF53041,PF13408,PS51737, cd00338,PF00239,PS51736,SM00857, G3DSA:3.40.50.1390,PTHR30461
MSVKKIRVNKQKHKQRICAYIRVSTTNGSQLESLENQKQYFENLYSNRDDIDFVGVYHDRGISGSKDNRPNFQAMIEDCRKGMIDIIHTKSIARFARNTVTVLEISRELKAIGVDIFFEEQNIHTLSSEGEVMLSVLASIAEDELRSMSGNQRWAFQKKFQRGELVINTKRFLGYDLDENGELIINPEEALIVRQIFALYLEGHGTHRIAKLLNEKGVATVTGAKWHDSTIRQMLSNEKYNGSVLLQKYFHDGVNGPKKLNQGELEKYFIEDNHEAIISMEDWQTVQDKLSSRRWQKGRNKTYKFTGLLKCQHCGSTLKRQVSYKKKIVWCCSKYIKEGKVTCQGMRVPEVDISNWEITSPVTVIERDRNGEKYYSYTGQESADQCSSSGQEENQSSRILPSVHRPRRAAIKL

SEQ ID NO: 11969 - protein, 413 aa, Unknown
  Description of Unknown: Integrase A537 sequence
  PF07508,G3DSA:1.10.10.2600,SSF53041,PF13408,PS51737, cd00338,PF00239,PS51736,SM00857,G3DSA:3.40.50.1390, PTHR30461
MAVRLIKAKQDHKKQRICAYVRVSTTNSSQLDSLENQKTYFETLYANREDVDFLGVYYDKGISGAKEKRPNFQAMLEVCRQGQIDLIHTKSISRFARNTMTVLEVSRELKVLGVGIYFEEQNINTLSNEGEVMLSVLASLAEEELESMSTNQRWAFQKKFQRGEVVINTKRFMGYDVDVDGELVINEAEAQIVRRIFHLYLDGMGLHRIAKLLNEEGVTTVSNAKWHDTTVGHMLRNEKYKGAALLQKTYLDGVNGKRRLNQGEVAQYLIEDNHEPIVSKEVWQAVQHKLDSNTWKQGPNKHYLFTSMLRCQYCGSTLKRQVSYKKQIVWCCSKYIKEGKASCQGMRVPEKAIEEWKLKTPVTVIERTEYGQKHYSYSSQENAADGHPSASHQNQSGRLLSGVHRPRRTAIKL

SEQ ID NO: 11970 - protein, 413 aa, Unknown
  Description of Unknown: Integrase A538 sequence
  PF07508,G3DSA:1.10.10.2600,SSF53041,PF13408,PS51737, cd00338,PF00239,PS51736,SM00857, G3DSA:3.40.50.1390,PTHR30461
MSVKKIRVNRQKHRKKVCAYIRVSTTNGSQLESLENQKQYFENLYSNRDDIDFVGVYHDRGISGSKDNRPNFQAMIENCRKGMIDIIHTKSIARFARNTVTVLEISRELKAIGVDIFFEEQNIHTLSSEGEVMLSVLASIAEDELRSMSGNQRWAFQKKFQRGELVINTKRFLGYDIDENGELIINPEEAFIVRQIFALYLEGYGTHRIAKLLNEKGVATVTGAKWHDTTIRQMLSNEKYNGSVLLQKYFHDGVNGPKKLNQGELEQYLIEDNHEAIISKEDWQTVQDKLNSRRWQQGRNKTYKFTGLLKCQHCGSTLKRQVSYKKKIIWCCSKYIKEGKVACQGMRVPEVDISNWVITSPVTVIERDGNEEKYYSYSGQESEDQRSSSGQEENQGSRILSSVHRPRRTAIKL

SEQ ID NO: 11971 - protein, 413 aa, Unknown
  Description of Unknown: Integrase A539 sequence
  PF07508,G3DSA:1.10.10.2600,SSF53041,PF13408,PS51737, cd00338,PTHR30461:SF3,PF00239,PS51736,SM00857, G3DSA:3.40.50.1390,PTHR30461
MAVRLIKAKSEQKKQRVCAYVRVSTTNSSQLDSLENQKTYFETLYANSEDVDFLGVYYDKGISGAKEKRPSFQAMLEACRQGQIDLIHTKSISRFSRNTMTVLEVSRELKVLGVGIYFEEQNINTLSNEGEVMLSVLASLSEEELESMSTNQRWAFQKKFQRGEMVSNTKRFMGYDVDDDGELVINEAEAQIVRRIFHLYLDGMGMHRIAKLLNEEGVPTVSNAKWHNTTVGHMLRNEKYKGAALLQKTYLHGVNGKRRLNQGKVAQYLIEDNHEPIVSKEVWQAVQDKLDSNTWKQGPNKHYRFTSMLRCQYCGSTLKRQVSYKKQIVWSCSKYIKEGKASCQGMRVPEKAIEDWRLKTPVTVIERNEYGQKHYSYSSQENAVDSHPSASHQNQSGRLLSSVHRPRRTAIKL

SEQ ID NO: 11972 - protein, 413 aa, Unknown
  Description of Unknown: Integrase A540 sequence
  PF07508,G3DSA:1.10.10.2600,SSF53041,PF13408,PS51737, cd00338,PF00239,PS51736,SM00857, G3DSA:3.40.50.1390,PTHR30461
MSVKKIRVNKQKHKQRICAYIRVSTTNGSQLESLENQKHYFENLYSNRDDIDFVGVYHDRGISGSKDNRPNFQAMIENCRKGMIDIIHTKSIARFARNTVTVLEISRELKAIGVDIFFEEQNIHTLSSEGEVMLSVLASIAEDELRSMSGNQRWAFQKKFQRGELVINTKRFLGYDIDENGELIINPEEALIVRKIFALYLEGYGTHRIAKLLNEKGVATVTGAKWHDTTIRQMLSNEKYNGSVLLQKYFHDGVNGPKKLNQGELEQYLIEDNHEAIISMEDWQAVQVKLNSRRWQQGRNKTYKFTGLLKCQHCGSTLKRQVSYKKKIVWCCSKYIKEGKAACQGMRVPEVDISNWTVTSPVKVIERDRDGEKYYSYSGQESADQRSTSGQKESQCSRILPSVHRPRRTAIKL

SEQ ID NO: 11973 - protein, 412 aa, Unknown
  Description of Unknown: Integrase A541 sequence
  PF07508,G3DSA:1.10.10.2600,SSF53041,PF13408,PS51737, cd00338,PTHR30461:SF3,PF00239,PS51736,SM00857, G3DSA:3.40.50.1390,PTHR30461
MRIVRRIQPMMTPQKPKLRVAAYARVSDSRLHHSLSTQVSYYSRLIQSHPDWELVGVYYDEGISGKEQSNRQGLQDLLKACDDGKIDRILTKSIARFGRNTVDLLSTVRVLRQKNIGITFEKEGIDSLSSEGELMLTLLASVAQEESHNISENLRWQIKKKFEQGQPHTPQDIYGYRWNGENYVIEPDEAKVVRQVFQWFLDGDNAPMITKKLNEQGVLTRLGNPFTVSSVREFFKQEAYFGRLVLQKTYREPFSRNPKRNNGQKNKYIVEDAHEAIVSKSYFDVVLQEKERRYKVMYQESHMHKGTFRELIECSHCGKIMITRVDSKKVHRTIRYCCRTRDRFGTSSCPSKTLSEKRILATFEDKIGFKPDKNWVTENIKKVIYDSSVGLITVFPIKGRKYELKVRKEHFL

SEQ ID NO: 11974 - protein, 412 aa, Unknown
  Description of Unknown: Integrase A542 sequence
  PF07508,G3DSA:1.10.10.2600,SSF53041,PF13408,PS51737,cd00338, PTHR30461:SF3,PF00239,PS51736,SM00857,G3DSA:3.40.50.1390, PTHR30461
MRTVRLIQPRMTPQKPKLRVAAYARVSDSRLHHSLSTQVSYYSRLIQSHPDWELVGVYYDEGISGKEQSNRQGLQDLLKACDDGKIDRILTKSIARFGRNTVDLLSTVRVLRQKNIGITFEKEGIDSLSSEGELMLTLLASVAQEESHNISENLRWQIKKKFEQGQPHTPQDIYGYRWNGENYVIEPDEAKVVRQVFQWFLDGDNVPMITKKLNEQGVLTRLGNPFTVSSVREFFKQEAYFGRLVLQKTYREPFSRNPKRNNGQKNKYIVEDAHEAIVSKSYFDVVLQEKERRYKVMHQESHMHKGTFRELIECSHCGKIMITRVDSKKVHRTIRYCCRTRDRFGTSSCPSKTLSEKRILATFEDKIGFKPDKNWVTENIKKVIYDSSVGLITVFPIKGRKYELKVRKEHFL

SEQ ID NO: 11975 - protein, 412 aa, Unknown
  Description of Unknown: Integrase A543 sequence
  PF07508,G3DSA:1.10.10.2600,SSF53041,PF13408,PS51737, cd00338,PTHR30461:SF3,PF00239,PS51736,SM00857, G3DSA:3.40.50.1390,PTHR30461
MRIVRRIQPMMTPQKPKLRVAAYARVSDSRLHHSLSTQVSYYSRLIQSHPDWELVGVYYDEGFSGKEQSNRQGLQDLLKACDDGKIDRILTKSIARFGRNTVDLLSTVRVLRQKNIGITFEKEGIDSLSSEGELMLTLLASVAQEESHNISENLRWQIKKKFEQGQPHTPQDIYGYRWNGENYVIEPDEAKVVRQVFQWFLDGDNAPMITKKLNEQGVLTRLGNPFTVSSVREFFKQEAYFGRLVLQKTYREPFSRNPKRNNGQKNKYIVEDAHEAIVSKSYFDVVLQEKERRYKVMYQESHMHKGTFRELIECSHCGKIMITRVDSKKVHRTIRYCCRTRDRFGTSSCPSKTLSEKRILATFEDKIGFKPDKNWVTENIKKVIYDSSVGLITVFPIKGRKYELKVRKEHFL

SEQ ID NO: 11976 - protein, 411 aa, Unknown
  Description of Unknown: Integrase A544 sequence
  PF07508,G3DSA:1.10.10.2600,SSF53041,PF13408,PS51737,cd00338, PTHR30461:SF3,PF00239,PS51736,SM00857,G3DSA:3.40.50.1390, PTHR30461
MRTVRRIQPIKSPCKPRFKVAAYARVSDSRLHHSLSTQISYYNRLIQAHPDWELVGIYYDEGISGKEQSNRQGFLNLIKDCEDGKIDRIITKSIARFGRNTVELLTTVRQLRLKNIGVTFEKENIDSLSSEGELMLTLLASVAQEESQNLSENIRWRIQKKFEKGIPHTPQDMYGYRWDGEQYQIEPNEAKVIRKVFKWYLDGDSVQQIVDKLNQEQVLTRLGNPFTVASIREFFKQEAYFGRLVLQKTYREAFSRNPKRNKGQRNKYIIENAHEPIVTKEYFDLVLHEKERRNQLMHQESHLNKGIFRDKISCSECGCLMIVKVDSKQVNKTVRYYCRTRNRFGASSCSCRTLGEKRLLASFKSKLGIVPDKEWVENNIKHIEYDFGYRILRVTPVKGRKYLIEIREGRY

SEQ ID NO: 11977 - protein, 411 aa, Unknown
  Description of Unknown: Integrase A545 sequence
  PF07508,G3DSA:1.10.10.2600,SSF53041,PF13408,PS51737, cd00338,PTHR30461:SF3,PF00239,PS51736,SM00857, G3DSA:3.40.50.1390,PTHR30461
MRTVRRIQPIKSPCKPRFKVAAYARVSDSRLHHSLSTQISYYNRLIQAHPDWELVGIYYDEGISGKEQCNRQGFQNLIKDCDDGKIDRIITKSIARFGRNTVELLTTVRQLRLKNIGVTFEKENIDSLSSEGELMLTLLASVAQEESQNMSENIKWRVQKKFEKGIPHTPQDMYGYRWDGEQYQIEPNEAKVIRKVFKWYLEGDSVQQIVDKLNQEQVLTRLGNPFTVASIREFFKQEAYFGRLVLQKTYRESFSRNPKRNKGQRNKYIIENAHEPIVTKEYFDLVLHEKERRYQLMSQESHLNKGIFRDKISCSECGCLMIVKVDSKQVNKTIRYYCRTRNRFGASSCSCRTLGEKRLLASFKSKLGIVPDKEWVENNIKHIDYDFGQRIIWVIPVKGRKYPIEIREGRY

SEQ ID NO: 11978 - protein, 411 aa, Unknown
  Description of Unknown: Integrase A546 sequence
  PF07508,G3DSA:1.10.10.2600,SSF53041,PF13408,PS51737,cd00338, PTHR30461:SF3,PF00239,PS51736,SM00857,G3DSA:3.40.50.1390, PTHR30461
MRTVRRIQPIKSPCKPRFKVAAYARVSDSRLHHSLSTQISYYNRLIQAHPDWELVGIYYDEGISGKEQSNRQGFQNLIKDCDDGKIDRIITKSIARFGRNTVELLTTVRQLRLKNIGVTFEKENIDSLSSEGELMLTLLASVAQEESQNMSENIKWRVQKKFEKGIPHTPQDMYGYRWDGEQYQIEPNEAKVIRKVFKWYLEGDSVQQIVDKLNQEQVLTRLGNPFTVASIREFFKQEAYFGRLVLQKTYRESFSRNPKRNKGQRNKYIIENAHEPIVTKEYFDLVLHEKERRYQLMSQESHLNKGIFRDKISCSECGCLMIVKVDSKQVNKTIRYYCRTRNRFGASSCSCRTLGEKRLLASFKSKLGIVPDKEWVENNIKHIDYDFGQRIIWVIPVKGRKYPIEIREGRY

SEQ ID NO: 11979 - protein, 407 aa, Unknown
  Description of Unknown: Integrase A547 sequence
  PF07508,G3DSA:1.10.10.2600,SSF53041,PF13408,PS51737, cd00338,PF00239,PS51736,SM00857,G3DSA:3.40.50.1390, PTHR30461
MKPGKIRVCAYARVSTMTEKQQESLTNQQAYYNHFYHNKKDVDFIGVYYDQGISGKLAKRPGFQQMLEDCRAGKIDVIHTKSISRFARNTELLLAVSRELKTIQVDIFFEEQNLHTLSNEGEVMLTVLASYAEEELRNMSENQRWAFQKKFQRGELVINTKRFLGYDKDENGELIINPEEAKIVKRIYNLYLSGMGVHVIAKLFNEEKLSTVDGGKWYSSTITNILKNEKYKGDAILQKYYFAEIKAKQRLNQGQVQQYLLTDNHEAIVSREDWEAVQKRLKQKRKAKLSIDYNRRYPLSGLLKCEHCGSTLKRQKYYKGKVVWVCSKYIREGKASCIGMRVPDSAVQDWSIDEPTVVKEENISGKKHYSYSCQENYTSRAESTHSENPDGGLLPSVHRPRRTAIKL

SEQ ID NO: 11980 - protein, 405 aa, Unknown
  Description of Unknown: Integrase A548 sequence
  SSF53041,PS51737,cd00338,PF00239,PS51736, SM00857,G3DSA:3.40.50.1390,PTHR30461
MAVEQDISVSAFSGKERPAWKRVLDMVRAGEVDYVIAYHMDRMTRSMTDLEELIVLCEEHGVGIATAVGEIDLTSDMGRMVARILAAVARAEVERKSARQKLANAQRAAEGKPHSGGQRPFGYARDHMTVVEDEAVLIKTGAERALAGEPLISISKDWGMTARGVKNVLTNPRYAGIRMYLGERVGEAEWPAILDLEVHLRLVEALTDPARTKGTVKMGRTPTSLLTGLAACSVCKGKVRGSSVRGRLTYACRSSHAHIDRADVDTLALGAVINRLSSPAWVETLAPAGDDRLAKAKLVAEEKREALKMYARLLASGAMDEEQFTEASRVARDAMKEAEQTLSQAADGAALSGLDLGTDRVEKQLLALPLARQRGIVEQLLTIEILPQVKSRLAPLSSAERVIIS

SEQ ID NO: 11981 - protein, 403 aa, Unknown
  Description of Unknown: Integrase A549 sequence
  G3DSA:1.10.10.60,SSF46689,PF02796
MPRPSIQNVLDLRRDEVLELLGRGIPAEDVAKKFGVSRRTLYRWLERQGLTVQKIREEYQKLKEERERRKRERLAAIGEIPEDFEKFVEIEEVRKFLDWLKARRVTTAVDIVRTLHRVCLDLGIHPMLLLEDEGKEKLTSLLAKYNEMYKKWTVESIKANLRLWYKFNEKMPPAILSLEAYKSNMAHLAWFNVSDRAVILETAFRLLDKEQFDKVRAALLFLFYTGSRAEALTNVRFEAREVQVDGKRITAIIAITREKGRHGKKQWEKPLHPVIYEKYIKGRLPFSQAELKWLRRVLKAIYREALKGQESSVKYEYAMKHVIHIWRHTAAMSMLHATDWNVGLVAEILGWESPDILLKIYGRMPPEWKIAQALGVTVERPPFRFVYGNEEERLKELRILELP

SEQ ID NO: 11982 - protein, 403 aa, Unknown
  Description of Unknown: Integrase A550 sequence
  PF07508,G3DSA:1.10.10.2600,SSF53041, PF13408,PS51737,cd00338,PTHR30461:SF3,PF00239, PS51736,SM00857,G3DSA:3.40.50.1390,PTHR30461
MKTVTKIQQRVSPFQSKKKVAAYIRVSHSNLEHSFSNQVSYYNDFIQNKREWEFVGVYADFAISGKSQKERPEFRRLISDCRNGKINCILTKSISRFGRNTLELLETVRELRRLEIEVVFEKENIRTLSVDGELLLTLLASFAQEESTSLSQNIKWRVKERFKQGLPYIPQAIYGYRWNGEKYIIKPHEAEIVRKVFTWYLDGLGVPSIAKKLNDMGETTRLGNIFTKSILYEFFKQEAYFGRLVLQKTYRNDFNRSPKRNTGQRTKYIVDNAHEAIISKELFDKAQAEKKIRSKGRCYRKCYDDAFFKDKVFCQQCGRDMLITKEKKFGYRYNCRTRQQYGISTCPSKTLSERRLVRTVKEQLGDYLGSIQKVMFDSSSNQVTLYFDDDNIQILTLKRGQLK

SEQ ID NO: 11983 - protein, 402 aa, Unknown
  Description of Unknown: Integrase A551 sequence
  PF07508,G3DSA:1.10.10.2600,PF13408,PS51737,PTHR30461:SF3, PTHR30461
MRMSRGELIGFNGCLGYDYHAEDKSLSVNEEEAETVRYIFNRYIEGAGCFVIARELENLGYKTAGGKTKWFDSSVRGIIKNEKYVGDIRAGKTFTVDPISKRRLKNLGEEDQFYIRDHHEPIISREVFDKAHEILNIRAESYKRYERGKSSRNKFTRQYAFSCIMECGYCGARLTRRHWMGKNGYSKIIWQCVTYARKGHKNCPYCKGVAESLIEEAFVKSYQYLFETNRYLIDDFMLKLEQNLSRKNYEKERDELSRKLSDLSKKRNALIDMKLDSVIDDQAYESKYYDLTDKINLAITKLESIEKSIVDDLDEKERLQEIRKVLSNNQTIETFDRKVFESIVSKVIVGGFDAEGNACPYNVTFILKSGLSDYPYTIGMKPEPNEVIPSNNHSPHKENPTC

SEQ ID NO: 11984 - protein, 402 aa, Unknown
  Description of Unknown: Integrase A552 sequence
  PF07508,G3DSA:1.10.10.2600,SSF53041,PF13408,PS51737, cd00338,PTHR30461:SF3,PF00239,PS51736,SM00857, G3DSA:3.40.50.1390,PTHR30461
MKQIKTIQAQKVTTIKRLKVAAYTRVSHTSLLQSLSNQISHYSQMIQANPEWDYVGVYSDSAISGRSQAHRRDFQQLLEDCHKGKIDLILTKSISRFGRNTVELLETVRELKRLGISVRFEKEKIDTLTAEGELLLTLLASMAQEESQSISQNIRWRVKKRFEEGKPYIPQDIFGYRWNGEEYMIEPHEASIVRQVFEWYMEGLSAPKIAKRLDDRGERTRLGNRFTQRVIYNMFDQEAYCGRLILQKTFRDHFSSRSIPNDGQMAKYIVENAHEAIVTPEYFQLVNQEKKRRARRRVSKHDALARLQGKVYCEHCGLDMILTLETKSNQEKRVRYYCRTRDGKGVEACLGRTVTEEQLFQAFGESINIEDIHHISFNSVTNEAKVTYRNGKEKHVIIQKGR

SEQ ID NO: 11985 - protein, 402 aa, Unknown
  Description of Unknown: Integrase A553 sequence
  PF07508,G3DSA:1.10.10.2600,SSF53041,PF13408,PS51737,cd00338, PTHR30461:SF3,PF00239,PS51736,SM00857,G3DSA:3.40.50.1390 ,PTHR30461
MKRIKTIQAQKLTAIKKLKVAAYTRVSHTSLLQSLSNQVSHYSQLIQSNPEWSYVGVYSDSAISGRCQAHRRDFQNLLEDSRKGKIDLILTKSISRFGRNTVELLETVRELKRLGISVRFEKENIDTLTAEGELLLTLLASMAQEESQSISQNIRWRVKKCFEEGKPYIPQDIFGYRWSGEEYVIEPHEASIVRQVFEWYMEGLSAPKIAKRLDARGERTRLGNRFTKRVIYNMFDQEAYYGRLILQKTFRDNFGSRSIPNDGQMAKYIVENAHEAIVTPEFFQQVNQEKKRRAKRRPSKHDALAKLQGKVYCEHCGLDMLLSVETKSNQEKRVRYYCRTRDAKGVEACLGRTITEEQLFQAFGETLKAEDIHHISFNSVTNEAKATYRNGEEKHIIIQKGR

SEQ ID NO: 11986 - protein, 402 aa, Unknown
  Description of Unknown: Integrase A554 sequence
  PF07508,G3DSA:1.10.10.2600,SSF53041,PF13408,PS51737, cd00338,PTHR30461:SF3,PF00239,PS51736,SM00857, G3DSA:3.40.50.1390,PTHR30461
MKQIKTIQAQKVTTIKRLKVAAYTRVSHTSLLQSLSNQVSYYSQMIQANPEWDYVGVYSDSAISGRSQAHRRDFQQLLEDCRKGKVDLILTKSISRFGRNTVELLETVRELKRLGISVRFEKEKIDTLTAEGELLLTLLASMAQEESQSISQNIRWRVKKRFEDGKPYIPQDIFGYRWNGEEYVIEPHEASIVRQVFEWYMEGLSAPKIAKRLDDRGERTRLGNRFTKRIIYNMFDQEAYCGRLILQKTFRDHFGSRSIPNDGQMAKYIVENAHEAIVTPEYFQQVNQEKKRRARRRVSKHDALAKLQGKVYCEHCGLDMILTLETKSNQEKRVRYYCRTRDAKGVEACLGRTVTEEQLFQAFGESINTEDIHHISFNSVTNEAKATYRNGEEKHVIIQKGR

SEQ ID NO: 11987 - protein, 399 aa, Unknown
  Description of Unknown: Integrase A555 sequence
  G3DSA:1.10.10.60,SSF46689
MSKFHSIFDLNTVWILDYENFLKLGMIYIHAFGVVIGFLIGFSKLYSSDGFSKSYGSVLQSAAFFLILNNGILIDQGALRNENKILNGSYYGLVLYSSLAVLVCFNYVLDSLDNPWIHCKRILGIIPVTILLSYFIPELYFISFIDILGFAISIFTFIWSLKSVLKTNKSILFFNLPFLSFLISICFVLDLLGTIFNKKDFFLLAEIIPGSVICYTILLERFFPSLFGKVTFTIQDVSLVKDYKFETIPIIETKEQKKYKYPPRDLLEGIDLTIIQNKMNHFLDIKGFKDEEIRLPDFATDLGLTTHQASNYLNKFIKMSFTDFLNYHRIVEVITFMEKKTDFNLLNIALECGFNSASSFHRSCVKFTGKSPRDLKNYIQSNKGSSFTILQKPKVQSYS

SEQ ID NO: 11988 - protein, 392 aa, Unknown
  Description of Unknown: Integrase A556 sequence
  G3DSA:1.10.10.60,SSF46689
MSIDTLGIDDEIVLTTIANINAHYKEKRKFVDIAKMQDIAPDILTVRFLNQGLETPTHYLKELRKDLAKRLVFEGELSLEEIAKTLSYDKTSNFYVWYLSVFGERPTKVRARMGLKSKRPSLGLVNAVISSIVENIDLNPHLYKDVNVLINDSIYTTTYIRQKFIELHGVTPRAYLLNKQLEYVAEQIKNHGYKETRLLEMTIYNAPTGLNKAFKAKYGMTTSEFGESKSIGMWAKVHGENVWILPSLMEEIIDNVTENLLENRPHLTELRELYGVNTSSWERMFTLYTGMLPSKARLFIRLEIVVYFLQNTRWKFSKILRKVGSDYEYDIRRYLMANYGLTPAEIRKHKGPLTRRNKTKQFVRFVKTNADLCIREDDIRLGKIKETELCTL

SEQ ID NO: 11989 - protein, 392 aa, Unknown
  Description of Unknown: Integrase A557 sequence
  G3DSA:1.10.10.60,SSF46689
MSIDTLGIDDEIVLTTIANINAHYKEKRKFVDIAKMQNIAPDVLTVRFLNQGLETPTHHLKELRKDLAKRLVSDGELSLEEIAKTLGYDKTSNFYVWYLSVFGERPTKVRARMGLKSKRPSLGVVDAVISSIVEKIDLNPYLYKDVNVLINDSVYTTTYIRQKFIELHGVTPRAYLLNKQLEYVAEQIKTHGYKETRLLEMTIYNAPTGLNKAFKAKYGMTTSEFGESKSIGMWAKVHGENVWILPSLMEEIVDNVTENLLENRPHLTELREFYGVNTSSWERMFTLYTGMLPSKARLFIRLEIVVYFLQNTRWKFSKILRKVGSDYEYDIRRHLMANYGLTPAEIRKHKGPLTRRNKTKQFVRFVKTNADLCIREDDIRLGKIKETELCTL

SEQ ID NO: 11990 - protein, 392 aa, Unknown
  Description of Unknown: Integrase A558 sequence
  G3DSA:1.10.10.60,SSF46689
MSIELPIAEDPITALTFKNIEKYYKEKRKFTDIAKLQKTCPNAITKRFENQGFETPTHYLKELRKELAKTLVTEGKLSLSEIAETLGYDKTMNFYVWYQSVFGERPTKVRARMGLKSKTPSSGVIDAIAKSIATKIDLNPNFYKDVTELMEEHGYSNVYIKRKFIEMYGKTPRAHLLDRQLEYVADQIKTHGYKEARLMGMTMHNAPTGLNKAFKAKYGMTTSDYGESLSIGTWAKVHGENVWVMPSLMDEILDNVTENLLDDRLNLYQLREFYGLNSHSWERMFTLYTGMLPSKVRQCIRLELIVYFLQNTRWKFTKILRKVGSDYEYDVRRQLTENYGLTPVEIRKLKGPLTRRYNTEQFIRFVKTNADLCIREDDIRLGKIEVTEPCTL

SEQ ID NO: 11991 - protein, 370 aa, Unknown
  Description of Unknown: Integrase A559 sequence
  PF07508,G3DSA:1.10.10.2600,SSF53041,PS51737,cd00338, PF00239,PS51736,SM00857,G3DSA:3.40.50.1390,PTHR30461
MVRRNSKITRQQKKIRDAFVSERTVEIIPAKREFTDVKTKKLRVAAYCRVSTFDESQSGSFELQKQTYTERINSNPDWIMAGIYADQGASGTSIKRREQFQQMLHDCRCGKIDLIIVKSVSRFARNQLDFISIYRELKALSPPVGIYIEDINLNTLDTNSEFILGIMAIVAQGESEQKSASITWSVIERFKRGIPMIPTHNLLGYTKDQYGRVVIDETEAKIVRLIYDSYIEGMTASEIASTLMTNHIPTVTGLERWTSLAVYNILRNEKYKGEIIMQKTYTVDCFSHKTRKNNGEKPKYRLKNGIPSIIPESRWDLVQELLKQPRRKSKSTSEIFVPKLYIKKLKSGKLRDFVVLDPSWKSEDIHEVFK

SEQ ID NO: 11992 - protein, 370 aa, Unknown
  Description of Unknown: Integrase A560 sequence
  PF07508,G3DSA:1.10.10.2600,SSF53041,PS51737,cd00338, PTHR30461:SF3, PF00239,PS51736,SM00857, G3DSA:3.40.50.1390,PTHR30461
MVRRNSKITRQQKKIRDAFISERTVEIIPAKREFTDVKTKKLRVAAYCRVSTFDESQSGSFELQKQTYTERINSNPDWIMAGIYADQGASGTSIKRREQFQQMLHDCRSGKIDLIIVKSVSRFARNQLDFISIYRELKALSPPVGIYIEDINLNTLDTKSEFILGIMAIVAQGESEQKSASITWSVIERFKRGIPMIPTHNLLGYTKDQYGRVVIDETEAKIVRLIYDSYIEGMTASEIASTLMTNHIPTVTGLERWTSLAVYNILRNEKYKGEIIMQKTYTVDCFSHKTRKNNGEKPKYRLKNGIPSIIPESRWDLVQELLKQPRRKSKSTSEIFVPKLYIKKLKSGKLRDFVVLDPSWKSEDIHEVFK

SEQ ID NO: 11993 - protein, 367 aa, Unknown
  Description of Unknown: Integrase A561 sequence
  PF07508,G3DSA:1.10.10.2600,SSF53041,PF13408,PS51737, cd00338,PTHR30461:SF3,PF00239,PS51736,SM00857, G3DSA:3.40.50.1390,PTHR30461
MIQAHPDWELVGIYYDEGISGKEQSNRQGFLNLIKDCEDGKIDRIITKSIARFGRNTVELLTTVRQLRLKNIGVTFEKENIDSLSSEGELMLTLLASVAQEESQNLSENIRWRIQKKFEKGIPHTPQDMYGYRWDGEQYQIEPNEAKVIRKVFKWYLDGDSVQQIVDKLNQEQVLTRLGNPFTVASIREFFKQEAYFGRLVLQKTYREAFSRNPKRNKGQRNKYIIENAHEPIVTKEYFDLVLHEKERRNQLMHQESHLNKGIFRDKISCSECGCLMIVKVDSKQVNKTVRYYCRTRNRFGASSCSCRTLGEKRLLASFKSKLGIVPDKEWVENNIKHIEYDFGYRILRVTPVKGRKYLIEIREGRY

SEQ ID NO: 11994 - protein, 361 aa, Unknown
  Description of Unknown: Integrase A562 sequence
  PF07508,G3DSA:1.10.10.2600,SSF53041,PS51737,cd00338, PTHR30461:SF3,PF00239,PS51736,SM00857,G3DSA:3.40.50.1390 ,PTHR30461
MKKVITIQATPSIIRSSSDDFSLKKRRVAGYARVSTDHEDQATSYESQMRYYSEYINGRDDWEFVKMYSDEGISGTNTKLRTGFKAMVEDALNGKIDLIITKSVSRFARNTVDSLTTVRQLKEVGVEIYFEKENIWTLDSKGELLITIMSSLAQEESRSISENVTWGLRKQFAEGKVHFPYTNVLGFKAGEDGAIVVDQDEAKTVRYIFQQALIGKSPYHIAKDLTEQGILSPSGKSHWNATTIKRMLRNEKYKGDALLQKTYTIDFLTKKKNINRGELPQYYVENNHEAIVDRETFDAVQQVLDNKGRKSSTTIFSSKLVCGDCGHFFGSKVWHSTSKYRRVIYQCNDKYKSSGKKSIES

SEQ ID NO: 11995 - protein, 360 aa, Unknown
  Description of Unknown: Integrase A563 sequence
  PF07508,G3DSA:1.10.10.2600,SSF53041,PS51737,cd00338, PTHR30461:SF3,PF00239,PS51736,SM00857,G3DSA:3.40.50.1390, PTHR30461
METNKQNEIRNAYEHSAQVQCIPASIKKTTEHSEEDPLVVAPYCRVSTDNKDQLASYELQCQYYKEYVSKHPGWRLYDIYADEGISGTSVKKRTDFLRMIDDCKAGKIDMIIVKNIARFARNVVDCVATVRMLKALDKPVAVYFEDIAINTLTQTGELLMVVMAAIAQGESEAKSESVKWGFQKRFEKGLPKLADLYGYTRDKRLLEIYEPEANVVRLIYQMFYDDKTIPEICYILNQQGIPSPRGGQWTYSTVKTILTNEKYSGDVLMQKTVTVDIFSHRSIRNDGRANQFFIQGYHEAIIPRELWLEVQQILKGENVVPVPSVDEVADLSASDVPRILDGFFVIKPRKDGNNEYLRQL

SEQ ID NO: 11996 - protein, 358 aa, Unknown
  Description of Unknown: Integrase A564 sequence
  PF07508,G3DSA:1.10.10.2600,SSF53041,PS51737,cd03768, PTHR30461:SF3,PF00239,PS51736,SM00857, G3DSA:3.40.50.1390,PTHR30461
MRKVAIYSRVSTINQAEEGYSIQGQIEALTKYCEAMEWKIYKNYSDAGFSGGKLERPAITELIEDGKNNKFDTILVYKLDRLSRNVKDTLYLVKDVFTANNIHFVSLKENIDTSSAMGNLFLTLLSAIAEFEREQIKERMQFGVMNRAKSGKTTAWKTPPYGYRYNKDEKTLSVNELEAANVRQMFDMIISGCSIMSITNYARDNFVGNTWTHVKVKRILENETYKGLVKYREQTFSGDHQAIIDEKTYNKAQIALAHRTDTKTNTRPFQGKYMLSHIAKCGYCGAPLKVCTGRAKNDGTRRQTYVCVNKTESLARRSVNNYNNQKICNTGRYEKNTSKNMLLMFFINFNTIKNILKK

SEQ ID NO: 11997 - protein, 351 aa, Unknown
  Description of Unknown: Integrase A565 sequence
  G3DSA:1.10.10.60,SSF46689
MDMDAQVHRATYPKIAYRLMERDFSGWDRANMQSAWADAVIRGDLCTPEELMERDTVSIKEWMGVLDIGVDCWAEHFPVLLMTETGIESMGLGAAYLVVAPDMRSVVTGFSLHWPNIDTNLTIDIENAKGGLNFRLYYHTLSGWVGACFNASAIGLFRKALIAVSGLRTGDGHTVTIHCDKPESGYLYEEHLKCPVTWEKRDDGKLGMTFFVPDHVLDRKNPHSDPAMYEYMSETLWQRTTAISKRAGESTSYTSLVRLTLSSSMKIPSQQEVADRHQWSVRSLQQNLKDEGSSWQELLDTEIINRAKVALSGGSSVDAAAASLGISPSNFRRKFKAVTGQTPNKYQANYD

SEQ ID NO: 11998 - protein, 350 aa, Unknown
  Description of Unknown: Integrase A566 sequence
  G3DSA:1.10.10.60,SSF46689
MDLQKICDRISQEFETDIVMGANLLIQMIQRQKITSDTPVQVVPAVKAVPTVQPVQPVQAVPAVQAVQPVQVVPAIKAVPAIQPVQAVQAVSTVQPVKAVQPVQPVQPVQPVQPVQAVQAVSTVQPVKAVQPVQPVQPVQPVQPVQPVQPVQPVQPVQVVQPVQAVQAVQPVQVVPAVRAVPAVQPVQTVQPVQTGNLSQSVQVPEINPVLFSYLVPLIPLIQMYHIAQKNDVPKNPQVQKQDACQPTSDGKFKIPINNTKTIKKSTSEKSTSEKKTIPKKRTSLKYVKRSRLSEKERNLLESQYSKDKYASPEIRDELAKKIGKSPRQIQIWFQNRRCKDRKLFFEKNN

SEQ ID NO: 11999 - protein, 344 aa, Unknown
  Description of Unknown: Integrase A567 sequence
  PF07508,G3DSA:1.10.10.2600,SSF53041, PF13408,PS51737,cd00338,PTHR30461:SF3,PF00239, PS51736,G3DSA:3.40.50.1390,PTHR30461
MDRILVKSISRFARNTLDCIKYVRELKELGIGVTFEKENIDSLDSKGEVLLTILSSLAQDESRSISENSTWGIRKKFERGVVQVNTTNFMGYDKDEKGNLIINHEQANVVRYIFDRFLEGYSPEFISKELRKQEIPGCTGKARWCPSAIWKMLKNEKYKGDALLQKTYTVDFLTKKRIDNDGQVNQYYIENNHEPILDREKWEIVQLEIARRKKFREQHKLQFYIMQKENNPFTTKVFCAECGSAFGRKNWTTSRGKRKVWQCNNRYKIKGQIGCLNNHIDEEMLEKAVMMAVSILKENRELLQSKWNKLIETDSRLKQYYSNRLRDIVSRKNGILMGLKCAGF

SEQ ID NO: 12000 - protein, 342 aa, Unknown
  Description of Unknown: Integrase A568 sequence
  G3DSA:1.10.10.60,SSF46689
MAAITRRRWEKEEDESLVNLVLEKTKKGETLDYIFGLASAKLNRTILACSNRWYDHFHDTYQAELAIVKQGNPTTNDYSGPWTAHDEERLLENMVSFLIQDLGVIDSLKRSAQILKRSLQSCSNRWYNNVLKKNKLTVENMVAQGKKAAAMIKEESEVQEKVQDPQQKENRTFKNQRGLLTQKQLDGWSPEKRFEFYKMMRLAEICGHNLDDILALAAVTYNKSKSECEMTWENYFKDDEILKAMFEKEQNEKAENEVREEQSTMELEDVIPEDYTIKVEEDSTQKEVITEAVMNPEEILGLVKSLIARNKELEAEVKELRGIRVKKEEYEAILVKIQSLVK

SEQ ID NO: 12001 - protein, 340 aa, Unknown
  Description of Unknown: Integrase A569 sequence
  G3DSA:1.10.10.60,SSF46689,PF02796
MVTFETVMEIKILHKQGMSSRAIARELGISRNTVKRYLQAKSEPPKYTPRPAVASLLDEYRDYIRQRIADAHPYKIPATVIAREIRDQGYRGGMTILRAFIRSLSVPQEQEPAVRFETEPGRQMQVDWGTMRNGRSPLHVFVAVLGYSRMLYIEFTDNMRYDTLETCHRNAFRFFGGVPREVLYDNMKTVVLQRDAYQTGQHRFHPSLWQFGKEMGFSPRLCRPFRAQTKGKVERMVQYTRNSFYIPLMTRLRPMGITVDVETANRHGLRWLHDVANQRKHETIQARPCDRWLEEQQSMLALPPEKKEYDVHLDENLVNFDKHPLHHPLSIYDSFCRGVA

SEQ ID NO: 12002 - protein, 337 aa, Unknown
  Description of Unknown: Integrase A570 sequence
  SSF53041,cd00338,PTHR30461:SF3,PF00239,PS51736, SM00857,G3DSA:3.40.50.1390,PTHR30461
MKTAIIYCRQSNKKNSRHGMVSNMSMKELSLDSQEEMCKLFCNTNGYNILKIIRETTSGRDMTRMEQLQEIINKMSPGQTLIVYDTTRFSRNTLQALSILDKFDKKNIHIYSVSEKCGYDTTQDRNIMRMLLSKSELESDQISDRIKRSVEFRKSKGIKIGQSTFGYESFYDNNGMRKERINSQEMQIIDQINKYLSNNKNYNYIAQQLNRQKKFYREKEWTAQNLKYVINTFKKKQILNSEQKNCSHHMDEKEDCNQYDDNGDEDNEDYQVSETENETENDEKDKEYKDTTYYNLKRKNPSDNDDIIEQKNKKQKITYEPLRRSERIKNMEEKLNN

SEQ ID NO: 12003 - protein, 330 aa, Unknown
  Description of Unknown: Integrase A571 sequence
  PF07508,G3DSA:1.10.10.2600,SSF53041,PF13408,PS51737, PTHR30461:SF3,PF00239,PS51736, G3DSA:3.40.50.1390, PTHR30461
MIEDVFIKNGIEFLSLQENFDTSTPFGKAMIGLLSVFAQLEREQIKERMQLGKLGRAKAGKSMMWAKTSYGYDYHKETGTMTINPVQALAIKFIFESYLSGRSITKLRDDLNEKYPKEKPWNYRAVRVILDNPVYCGYNQYLGEIYKGNHEPIISKETYDKTQEELKIRQRTALENLNPRPFQAKYMLSGIAQCGYCLAPLKIIMGVKRKDGSRFKKYECHQRHPRKLRGVTTYNDNKKCDSGFYYKDDLEAYVLQEVNKLQHDSEYLETIFSDNRKESIDRESYQKQIRELSKKLSRLNDLYIDDRITLEELQSKSSEFLSMRALLEKS

SEQ ID NO: 12004 - protein, 328 aa, Unknown
  Description of Unknown: Integrase A572 sequence
  G3DSA:1.10.10.60,SSF46689
MLITKKTHTRSANMSYNHLTLTERARIEVLRQENYSLRSIARKLKRSVSTISREISRNNLNQSYQAETAQKNYETKRKLCGRPTRFTPELGNIIKYYLKCHWSPEQIVGRLLQNQICFKTIYRWINSNMINFELISCLRQKGKRQKPKETRGKFNIGRPISQRPKEIKKRNTFGHWEADTIVSSRGKSKGCIATFAERKSRYYYCVLMPDRSSNSMETAINNLIKHLPKGAVKTITVDRGKEFSCYQNIENQFNINVYFADPYSAWQRGTNENTNGLLREFFPKKTDLAKVNQEQLNYALDSINYRPRKCLNWKFPYEVLCDELLHLN

SEQ ID NO: 12005 - protein, 328 aa, Unknown
  Description of Unknown: Integrase A573 sequence
  G3DSA:1.10.10.60,SSF46689
MLITTKTHTRSANMSYNHLTLTERARIEVLRQENYSLRSIARKLKRSVSTISREISRNNLNQSYQAKTAQKNYETKRKLCGRPTRFTPELGNIIKYYLKCHWSPEQIVGRLLQNQICFKTIYRWINSNMINFELISCLRQKGKRQKPKETRGKFNIGRPISQRPKEVKKRNTFGHWEADTIVSSRGKSKGCIATFAERKSRYYYCVLMPDRSSNSMETAINNLIKHLPKDAVKTITVDRGKEFSCYQNIENQFNINVYFADPYSAWQRGTNENTNGLLREFFPKKTDLAKVNQEQLNYALDSINYRPRKCLNWKFPYEVLCDELLHLN

SEQ ID NO: 12006 - protein, 323 aa, Unknown
  Description of Unknown: Integrase A574 sequence
  G3DSA:1.10.10.60,SSF46689
MSGIYKISFNGNNKRDCYIGQAQDFTARMYNHRHHLRRGTHFAPKLQRAYDENGHENMRVEILELCEVEVLTQREQHYLDTIKPRYNPTLIASEPPMRGKAHSDDAKQRISDAVRKFSHKQELAIVSSHIGLGFSTTTIALQFGCSEPTIRTILRKHGIDTGASRRPKGRAKKAGRKVKFDAAQEQAIARSYQSGKSTAEVAQEFGCSQPTVVKMLDKLGIERRRGQFNETEQQDIVRQYKNGKTTEDIAAQYGCNHSTIGDELRRAGVELRGRGRKRLLTDKQERQALALRDKGRSVSEVAAKFGCSPQAMRNILNKHRESA

SEQ ID NO: 12007 - protein, 314 aa, Unknown
  Description of Unknown: Integrase A575 sequence
  PF07508,G3DSA:1.10.10.2600, SSF53041,PS51737,cd00338,PF00239,PS51736, SM00857,G3DSA:3.40.50.1390,PTHR30461
MNERKDIVENVTVIQKQRAIKDYAVGIYARVSTSHKAQMDSLSAQVSGLTRLAAVHRTWFVADIFIDVASAKTGSTRSEFNRMINECEHGNLDIILTKSLSRFGRDAKEGLEAIRRIRAAGKRIIFEKDKIDTETVKDELLISIIEACDQAENDWRSENIRLGLKYRAEDGTSGLYNRACYGYKKDKNGMLIIDEEEARVVRRIYDWYLEGYSIGGIIDKLEEKKIKTSKGKERWSKRAIESTLTREKYTGDVAIADPGGSENRYLYKQHHEGIISKEQFKAVQLEMELRSNVEIGEDGKARRKSKKYSSKILK

SEQ ID NO: 12008 - protein, 313 aa, Unknown
  Description of Unknown: Integrase A576 sequence
  PF07508,G3DSA:1.10.10.2600,SSF53041,PS51737, cd00338,PTHR30461:SF3,PF00239,PS51736, SM00857,G3DSA:3.40.50.1390,PTHR30461
MKTVKKIQQIRPVKNKKLRVAAYARVSHSELLQSLSNQVSYYSELIQNHSEWEYKGVYVDSAITGRNIKQRKEYQRLIQDCKEGKIDVILTKSISRFGRNTIDLLKTIRELRRLNVSVRFEKENIDTMTTDGELLLTLLVSIAEEESKAIGQNIKWRVKEKFQQGLPHSPQDMYGYRWQEDAYVIEPHEASIIQQIYEWYLNGYSPTQIAKILNEKREKTRKGNAFTRSVIHNILSQDTYTGRLILQKTYRVAHKGRSVMNQGEHTKYIVEQAHEPIISKEQFEEVQQVKATRSNHYQKGAKHGEKDCHHRSS

SEQ ID NO: 12009 - protein, 309 aa, Unknown
  Description of Unknown: Integrase A577 sequence
  G3DSA:1.10.10.60,SSF46689
MIYRISMVSCTLLHNYKFVVYMFTFPNGKSYIGRTCDFTRRLRTHLKKSSGCKYVRNCFNKYGRGSVDITILKKGLKGAYLANQWEKFFIASFDTLAPKGLNMTPGGDGVCFTQEICDKISKALKGRKLSKEHRLACSIAHKKRWATYTISEYTRNKLRNVNKGRKFTKEHCLNISKARKALNIRLTAEQKQHLRNINMGKKMDPEVVRRTVAKRIANGNHLHTQATKDRIAYAKRGISLSEEHKQNLRIGHQNSTFDHSTKRKYKDEEILRVLKECDQDRNKAASILNVHYNTVFRCLKRNNLTKICS

SEQ ID NO: 12010 - protein, 307 aa, Unknown
  Description of Unknown: Integrase A578 sequence
  G3DSA:1.10.10.60,SSF46689
MTKEVWGEIEGYPNHKISSLGRLKSFGVKKEGVIINGFVDKDGYRRHFMRYKNKSKNKLAHRLVAETFIPNPENKTQVNHKDGNKLNNKVDNLEWCNCQENITHACKTGLRKNKGEHNIKSKLKGYEVNQIKHALSSGVKPKDLAKEYGVTRSTIYDIKNKKTWFGYNENLEIKLLSNNAILPKRANDFDSGLDLYVSETTTIKAGETKAVKTDVAINLPHGYEAQVRPRSGKSLKTKLRVALGTIDQTYNKEIGIITDNIGDEDIAVEKGERLAQLVVAPVAYPTPKQVDWFENESDRGAYGSTGE

SEQ ID NO: 12011 - protein, 307 aa, Unknown
  Description of Unknown: Integrase A579 sequence
  G3DSA:1.10.10.60,SSF46689
MVLWEEAVNEKDPSNKLRLIALIYGLQIFSFLLLRPILRSILRIGLSFSFLKYILFAVFTSITFLISFEEFWSLTFFGGILTFAVALFLSAESSFVIFKQKLGFRPHFFSLIPLSLGFIFFGNVLANLFLNGNLNYLSYLVYDIILIFIFKKYRRTQDLKPDKSPDDLQINPLADIISKQSAPRDTLFLRDRDLANLESRLESFIKEKLFLKPNLSQGDLADYLGLSRYETSRYLNLYKRVSFYDLINKLRIQEAQKLIAENISNLTQIASLTGFGSYATFFKAYLKFAGSIPKNALDERKRDRFES

SEQ ID NO: 12012 - protein, 305 aa, Unknown
  Description of Unknown: Integrase A580 sequence
  G3DSA:1.10.10.60,SSF46689
MKRGIEVNIIKSFNNTIDYLETVLDDEIDEKKVAQLSGYSYSMVSRLFSILTETTLSEYLRSRRLTEAAVILRDTDEKIIDVAFKFGYESSDSFGTAFKNFHGFTPSEVRNGKPFKLVSRVQLSLSVRGGRSMNITIQKKKAFTVAGINENSINSSLCSGIWGKLFSKVSHEEISKFGTGESVGVCHDILNLDNHDVLESNTISYMAGYIVNDVDKARSIGLDVLEVEEAEYAVVELIGSVPDCIHNGWKYALEVSSLSMGMFISGKPDFDIIIEGDMDSKDYKMELWIPITKAKKIPVNLSDTF

SEQ ID NO: 12013 - protein, 305 aa, Unknown
  Description of Unknown: Integrase A581 sequence
  PF07508, G3DSA:1.10.10.2600,SSF53041,PS51737,cd00338,PTHR30461:SF3, PF00239,PS51736,SM00857,G3DSA:3.40.50.1390,PTHR30461
MKQIRKIIQIRLPEQKKLKVAAYARVSHTRLLQSLSNQVSYYNQIIGKNPEWEFKGVYVDEVISGRNASKRKEYQRLLSDCRKGEVDIILTKSISRFGRNTVELLKTIRELKQLNISVRFEKENIDTLTTDGELLLTLLSTLAEEESKAISENIKWKVKKQFEQGLPYIKQDMYGYRFKETKYEIEPREAEVVKQVYAWYLEGEQPTFIARKLNEQGIKTRKGNRFSRSIIHRILGQEAYTGTLVLQKTYHVGHKGRSVENKGERTKYIVENAHEAIISREMFEEVQQEKARRSLHNKKKEGRHD

SEQ ID NO: 12014 - protein, 304 aa, Unknown
  Description of Unknown: Integrase A582 sequence
  PF07508,G3DSA:1.10.10.2600,SSF53041,PS51737, cd03768,PTHR30461:SF3,PF00239,PS51736, SM00857,G3DSA:3.40.50.1390,PTHR30461
MYSKTHKRCDVLLCSILTQNWSKKQMSKKAAIYTRVSTTNQAEEGYSIDEQIDKLKMYCEAMDWKVSEIYTDAGFSGSKLTRPGMEKMITDIGLKKFDTVIVYKLDRLSRSVRDTLYLVKDVFTKNEIDFISLSESIDTSSAMGSLFLTILSAINEFERENIKERMTMGKIGRAKSGKSMMWAKTAFGYSHNQETGILEINPLEASIVEQIFNEYLKGTSITKLRDKLNEDGHIAKELPWSYRTIRQTLDNPVYCGYIKYKNNTFEGLQSSDLSDILLLLPNLSLLLPNLTCVSKLDTSCIHFV

SEQ ID NO: 12015 - protein, 298 aa, Unknown
  Description of Unknown: Integrase A583 sequence
  PF07508,PS51737,PTHR30461
MSLRAYGWTNDGKIVESEADEIRSWARHVIDGGAIRPLVAELNERGVATVTGKSWAAPTITRALTAPRMVGLRERNGELEDAPIEPILDRDTWDEVVAILTDPARKKFASRKNPPTLLAGILQCGRCGRNLHATGPSYACSARYGGCGEISTSQRLADTEVTERVLIRITGDEWLTALSDARRESAETFETTIAEAENRMVHLAEVFGEGGNQQAFDAGVAKAREVAEEARGRIALLDATAALPATVTDAEVVEWWADAPIDTRRQVIRVVVDHIDVRAKADAEPGAGVGDRMHFHWA

SEQ ID NO: 12016 - protein, 298 aa, Unknown
  Description of Unknown: Integrase A584 sequence
  PF07508,PS51737,PTHR30461
MSLRAYGWTNDGKIVESEADEIRSWAQHVIDGGAIRPLVAELNERGVATVTGKSWAAPTITRALTAPRMVGLRDRNGELEDAPIEPILDRDTWDEVVAILTDPARKKFASRKNPPTLLAGILQCGRCGRNLHATGPSYACSARYGGCGEISTSQRLADTEVTERVLIRITGDEWLTALSDARRESAETFETTIAEAENRMVHLAEVFGEGGNQQAFDAGVAKAREVAEEARGRIALLDATAALPATVTDAEVVEWWADAPIDTRRQVIRVVVDHIDVRAKADAEPGAGVGDRMHFHWA

SEQ ID NO: 12017 - protein, 298 aa, Unknown
  Description of Unknown: Integrase A585 sequence
  PF07508, PS51737,PTHR30461
MSLRAYGWTNDGKIVESEADEIRSWARHVIDGGAIRPLVAELNERGVATVTGKSWAAPTITRALTAPRMIGMRERDGELEDAPIEPILDRETWDEVVAILTDPARKKFASRKNPPTLLAGILRCGRCGRNLHATGPSYACSARYGGCGEISTSQRLADTEVTERVLIRITGDEQLEQIREARERTAGHYEQQIAEAEDRITHLADVFGSGAQHREAFDTGVGSAQQVIDAGRAQLALIHTFAAVEHVTEDEVAAWWSDAPLDVRRDVIRVVIDHIDVRAKADAEPGAGVGDRMHFHWA

SEQ ID NO: 12018 - protein, 298 aa, Unknown
  Description of Unknown: Integrase A586 sequence
  PF07508,PS51737,PTHR30461
MSLRAYGWTNDGKIVESEADEIRSWARHVIDGGAIRPLVAELNERGVATVTGKSWAAPTITRALTAPRMVGLRERNGELEDAPIEPILDRDTWDEVVAILTDPARKKFASRKNPPTLLAGILQCGRCGRNLHATGPSYACSARYGGCGEISTSQRLADTEVTERVLIRITSDEWLTALSDARRESAETFETTIAEAENRMVHLAEVFGEGGNQQAFDAGVAKAREIAEEARGRIALLDATAALPDTVTDAEVVEWWADAPIDTRRQVIRVVVDHIDVRAKADAEPGAGVGDRMHFHWA

SEQ ID NO: 12019 - protein, 298 aa, Unknown
  Description of Unknown: Integrase A587 sequence
  PF07508,PS51737,PTHR30461
MSLRAYGWTNDGKIVESEADEIRSWARHVIDGGAIRPLVAELNERGVATVTGKSWAAPTITRALTAPRMVGLRERDGELEDAPIEPILDRDTWDEVVAILTDPARKKFASRKNPPTLLAGILRCGRCGRNLHATGPSYACSARYGGCGEISTSQRLADTEVTERVLIRITGDEWLTALSDARRESAETFETAIAEAENRMVHLAEVFGEGGNQQAFDAGVAKAREVAEEARGRIALLDATAALPDTVTDAEVVEWWADAPIDTRRQVIRVVVDHIDVRAKADAEPKAGVGDRMHFHWA

SEQ ID NO: 12020 - protein, 298 aa, Unknown
  Description of Unknown: Integrase A588 sequence
  PF07508,PS51737,PTHR30461
MSLRAYGWTNDGKIVDSEADEIRSWAQHVIDGGAIRPLVADLNDRGVATVTGKSWAAPTITRALTAPRMIGMRERDGELEDAPIEPILDRETWDEVVAILTDPARKKFASRKNPPTLLAGLLRCAKCGRNLHATGPSYACSARYGGCGEISASQRLADNEVTERVLIRITGDEWLAALSDARRESAETFETTIAEAENRIVHLAEVFGEGGNQQAFDAGVAKAREVAEEARGRIALLDATAALPAAVTDAEIVQWWTDAPIDTRRQVIRVVVDHIDVRAKADAEPGAGVGDRMHFHWA

SEQ ID NO: 12021 - protein, 298 aa, Unknown
  Description of Unknown: Integrase A589 sequence
  PF07508,PS51737,PTHR30461
MSLRAYGWTNDGKIVESEADEIRSWARHVIDGGAIRPLVAELNERGVATVTGKSWAAPTITRALTAPRMVGLRERNGELEDAPIEPILDRDTWAEVVAILTDPARKKFASRKNPPTLLAGILQCGRCGRNLHATGPSYACSARYGGCGEISTSQRLADTEVTERVLIRITGDEWLTALSDARRESAETFETTIAEAENRMVHLAEVFGEGGNQQAFDAGVAKAREVAEEARGRIALLDATAALPATVTDAEVVEWWADAPIDTRRQVIRVVVDHIDVRAKADAEPGAGVGDRMHFHWA

SEQ ID NO: 12022 - protein, 286 aa, Unknown
  Description of Unknown: Integrase A590 sequence
  SSF53041,cd00338,PTHR30461:SF3,PF00239,SM00857, G3DSA:3.40.50.1390,PTHR30461
MTNHTKYTTNPIDTIYVYTRVSTKAQHDKHSFKNQIFSCQQYLNECYPNHQNVSLKYSDIGSNYNDKNILYGLNELIKKLPNNSLIIVSDISRLGRNYKHTQRIFKKVQRTNSFIMSVHGNICYGINERMDKEFRNIAKISKKDSDLKAYYAKATHNRIKAAGGYPGGRTPYGYKTIRDNDNIPFLHENNQERTIINKMIEYEINEYTHKEIADALNANSILNRKNLWTQKSVKNILDRENQKYKPIHISSYNTRQYALNTEYPFNSNTDITTTRPFKRRHSISST

SEQ ID NO: 12023 - protein, 283 aa, Unknown
  Description of Unknown: Integrase A591 sequence
  PF07508,G3DSA:1.10.10.2600,SSF53041,PS51737,cd03768, PTHR30461:SF3,PF00239,PS51736,SM00857,G3DSA:3.40.50.1390, PS00397,PTHR30461
MNKVAIYVRVSTTNQADEGYSIDEQIDKLKAYCEIKDWVVYKVFTDAGFTGSNIERPAMTKLISAAKKKQFDTILVYKLDRLSRSQKDTLYLIEEIFIKNGIDFLSLSENFDTSSAFGKAMIGILSVFAQLEREQIKERMMLGKVGRAKSGKTMMWAHPAYGYTYNKETSSLDIVPAEAALIKKIYELYIKGKSISKLRDYLNDNKIFVNKSVPWSHRTISYALTNPVYCGMIRYEGKLYDGLHEPIITKELFNKTQEVLAERRMEASKKILDLSNQNICYQE

SEQ ID NO: 12024 - protein, 275 aa, Unknown
  Description of Unknown: Integrase A592 sequence
  SSF53041,cd00338,PF00239,PS51736,SM00857, G3DSA:3.40.50.1390,PTHR30461
MAKNKQTAIAYYRVSTAKQGAEGNGIEAQRAAVERLVDTHHFKIAAEFTEVESGTRKRRPELVKALAACREQQATLLIAKIDRLARNVAFIATLMESGVGFKCADMPEIDKFTIHILAAVAEREAELISARTEEALSVVKAKLGEGSHVSKSGRTIEKLGAPDTRIGAAAAGKSHPLAADQYAQSIAKDIDCACAKGKPESLRDLAEILTGRGVPTRQQWWLKSQTTRVDPARKARVQAAVWHPSSVRNVLKRLQSLEKLPESAAFLVVREDAAA

SEQ ID NO: 12025 - protein, 273 aa, Unknown
  Description of Unknown: Integrase A593 sequence
  PF07508,SSF53041,cd03768,PF00239,PS51736, SM00857,G3DSA:3.40.50.1390,PTHR30461
MILLGDTLYIKEKHHPRGFLIMSTVRHIAYRRVSTVQVRNGKAQSTERQMHNLGIDFDLEFEDHVTGTKFEARKQLQECLNTLQKEDHLHIHSIDRLARNTKDLLSIVEDLIARKVVVHFHKEGLVFGGDSDPMQAAIGQVLLSVIGAIHTFQATMIQESVKEGLRVAKSKGIKLGGANPKWKESMEKNKHNHKTTRLSEESKIKRSPVTQMIKDMIDYSQNRLTLDEIASNLNNKGITTSQGKSFSKATVSRIIKQDGLDYKKKNKYTTISA

SEQ ID NO: 12026 - protein, 266 aa, Unknown
  Description of Unknown: Integrase A594 sequence
  G3DSA:1.10.10.60,SSF46689
MSQCAASPNCSKTPSKFKRGMCGAHHRAYLRRARDEGVWRGHVPAGPVQEHLKALADAGVSAQRVSWVTGLSLNTLLQIPERESLWSTTADKIFAVRVDGNFREGGRGMIPVLGSRRRLQSLHSRGFTVAHLAERLGMSVTATTRILRPDDPRSVDRVESGTARKIDALWRELQLAAPPQGPACTKARRRAAKLGWPDPLAWEENEIDDPRARPRIDPTHLTKGRLEEYKKLRDQGLTKKEIAKRFNLNESTLYDWINRQKAKGNL

SEQ ID NO: 12027 - protein, 266 aa, Unknown
  Description of Unknown: Integrase A595 sequence
  G3DSA:1.10.10.60,SSF46689
MSQCAASPNCSKTPSKFKRGMCGAHHRAYLRRARDEGVWRGHVPAGPVQEHLKALADAGVSAQRVSWVTGLSLNTLLQIPERETLWSTTADKILAVRVDGNFREGGRGMIPVLGSRRRLQSLHSRGFTVVHLAERLGMSITATTRILRPDDPRSVDRVESGTARKIDALWRELQLAAPPQGAACTKARRRAAKLGWPDPLAWEENEIDDPRARPRIDPTLLTKGRLEEYKRLRDEGLTKKEIAKRFGLNESTLYDWINRQKKKGNL

SEQ ID NO: 12028 - protein, 266 aa, Unknown
  Description of Unknown: Integrase A596 sequence
  G3DSA:1.10.10.60,SSF46689
MSQCAASPNCSKTPSKFKRGMCGAHHRAYLRRARDEGVWRGHVPAGPVQEHLKALADAGVSAQRVSWVTGLSLNTLLQIPERESLWSTTADKIFAVRVDGNFREGGRGMIPVLGSRRRLQSLHSRGFTVAHLAERLGMSVTATTRILRPDDPRSVDRVESGTARKIDALWRELQLAAPPQGPACTKARRRAAKLGWPDPLAWEENEIDDPRARPRIDPTLLTKGRLEEYKKLRDQGLTKKEIAKRFNLNESTLYDWINRQKAKGNL

SEQ ID NO: 12029 - protein, 266 aa, Unknown
  Description of Unknown: Integrase A597 sequence
  G3DSA:1.10.10.60,SSF46689
MSQCAASPNCSKTPSKFKRGMCGAHHRAYLRRARDEGVWRGHVPAGPVQEHLKALADAGVSAQRVSWVTGLSLNTLLQIPERETLWSTTADKILAVRVDGNFREGGRGMIPVLGSRRRLQSLHSRGFTVAHLAERLGMSITATTRILRPDDPRSVDRVESGTARKIDALWRELQLAAPPRGAACTKARRRAAKLGWPDPLAWEENEIDDPRARPRIDPTLLTKGRLEEYKRLRDEGLTKKEIAKRFGLNESTLYDWINRQKKKGNL

SEQ ID NO: 12030 - protein, 266 aa, Unknown
  Description of Unknown: Integrase A598 sequence
  G3DSA:1.10.10.60,SSF46689
MSQCAASPNCSKTPSKFKRGMCGAHHRAYLRRARDEGVWRGHVPAGPVQEHLKALADAGVSAQRVSWVTGLSLNTLLQVSERETLWSTTADKILAVRVDGNFREGGRGMIPVLGSRRRLQSLHSRGFTVAHLAERLGMSITATTRILRPDDPRSVDRVESGTARKIDALWRELQLAAPPQGAACTKARRRAAKLGWPDPLAWEENEIDDPRARPRIDPTLLTKGRLEEYKRLRDEGLTKKEIAKRFGLNESTLYDWINRQKKKGNL

SEQ ID NO: 12031 - protein, 266 aa, Unknown
  Description of Unknown: Integrase A599 sequence
  G3DSA:1.10.10.60,SSF46689
MSQCAASPNCSKTPSKFKRGMCGAHHRAYLRRARDEGVWRGHVPAGPVQEHLKALADAGVSAQRVSWVTGLSLNTLLQIPERETLWSTTADKILAVRVDGNFREGGRGMIPVLGSRRRLQSLHSRGFTVVHLAERLGMSITAATRILRPDDPRSVDRVESGTARKIDALWRELQLAAPPQGAACTKARRRAAKLGWPDPLAWEENEIDDPRARPRIDPTLLTKGRLEEYKRLRDEGLTKREIAKRFGLNESTLYDWINRQKAKGNL

SEQ ID NO: 12032 - protein, 266 aa, Unknown
  Description of Unknown: Integrase A600 sequence
  G3DSA:1.10.10.60,SSF46689
MSQCAASPNCSKTPSKFKRGMCGAHHRAYLRRARDEGAWRGHVPAGPVQEHLKALADAGVSAQRVSWVTGLSLNTLLQIPERESLWSTTADKIFAVRVDGNFREGGRGMIPVLGSRRRLQSLHSRGFTVAHLAERLGMSVTATTRILRPDDPRSVDRVESGTARKIDALWRELQLAAPPQGPACTKARRRAAKLGWPDPLAWEENEIDDPRARPRIDPTHLTRGRLEEYKKLRDQGLTKKEIAKRFNLNESTLYDWINRQKAKGNL

SEQ ID NO: 12033 - protein, 266 aa, Unknown
  Description of Unknown: Integrase A601 sequence
  PF07508,G3DSA:1.10.10.2600,SSF53041,PS51737, cd00338,PTHR30461:SF3,PF00239,PS51736, SM00857,G3DSA:3.40.50.1390,PS00397,PTHR30461
MKVAIYVRVSTTLQAEIGYSIDEQRAKLEAFCSLKEWMPYKVYTDRGISGSTINRPALNCLIDDALNHLFDCVLVYDLKRLSRSQRDTLYLIEEIFEKNNIAFVSLTENFDTSTAFGKAIVGILSAFGQLEREQIKERMQLGKIGRAKTGKPMTWSDKFCPFGYAYIDDEYKTNEYSRWVKYIFDRFLAGDTINTIANDMTSRKILNKKWHYTTVKWILENPVYTGKIRWRGKLYQGNHKAIISQEAYDLAQKMIPATKRSPNILK

SEQ ID NO: 12034 - protein, 262 aa, Unknown
  Description of Unknown: Integrase A602 sequence
  SSF53041,cd00338,PTHR30461:SF3,PF00239,PS51736, SM00857,G3DSA:3.40.50.1390,PS00397,PTHR30461
MTTQSTLTVARAYVRVSTESQTLSGHSLETQETRIKDYCTYKKLNLIKVYCDSGISAKEMTKRPALLQLLEDAKKGEVIIVSDLSRLSRSTKDSLTILESLREKGVQLCCLNPDIDFTTSTGMFTFTILAAINKMERERIAYNVSVNLQRLSQEGHLRSSPPFAFRFVAKDKPFEPVPEQQEVILKIIEFFKEDPCISRVVDKLNEEGYNKVLNLNKKTITKERKFTRYLVTTILVDYNVIEPSESMKGRKSIEERIKSRSE

SEQ ID NO: 12035 - protein, 260 aa, Unknown
  Description of Unknown: Integrase A603 sequence
  G3DSA:1.10.10.60,SSF46689
MNNTNYSKNAGTALDAGMALDADMALDADMALAADGLVKLASSFRNNHLSSIALASSFGNNHPSENIQPIATPFLLYQTVSQNYPKLHLRNYPDLHLRNYPDLHLRNYPDLHLRFDNASLYAMQKICTSTPNASKENISLQQARPVLPISLAASDQAGRFMQSIASITENSHKNNSLSDFGRTVETPKKHTKINNTSRMILLSVYDKNKYISRAIKKQLAHRTGLTEKQIQNWFQNKRTSDKIKAENDKFMKSVTQKMNN

SEQ ID NO: 12036 - protein, 257 aa, Unknown
  Description of Unknown: Integrase A604 sequence
  PF07508,G3DSA:1.10.10.2600,SSF53041,PS51737,cd00338,PF00239, PS51736,SM00857,G3DSA:3.40.50.1390,PTHR30461
MSVKKIRVNKQKHKQRICAYIRVSTTNGSQLESLENQKHYFENLYSNRDDIDFVGVYHDRGISGSKDNRPNFQAMIENCRKGMIDIIHTKSIARFARNTVTVLEISRELKAIGVDIFFEEQNIHTLSSEGEVMLSVLASIAEDELRSMSGNQRWAFQKKFQRGELVINTKRFLGYDLDENGELIINPEEALIVRQIFALYLEGYGTHRIAKLLNEKGVATVTGAKWHDSTIRQMLSNEKYNGFGLIAEVFSRWCEWS

SEQ ID NO: 12037 - protein, 255 aa, Unknown
  Description of Unknown: Integrase A605 sequence
  G3DSA:1.10.10.60,SSF46689
MKNNNKWSIEEEQQLANIVLSCMQNKKKLIEALREAEKEIPNRTFSACQTKWTDKVKFEYAEQIKEIKEKINAEKDIELKKHEMRKEKNKQENINKRKEKKFKSKEKNKTKKEVKIEKKKGRINTWSLEEDTILANSVLSYLQYRNSASQGIVVASRKLPNRSLEACKARWNTALRHEYRQQVSNIKAIKSKQWTGKEDSILLRGLEENSRNRVSFEQAIRYVNAELIKLGYDRSLSACKARWATIKYDYPYIMY

SEQ ID NO: 12038 - protein, 254 aa, Unknown
  Description of Unknown: Integrase A606 sequence
  PF13408,G3DSA:3.40.50.1390
MSTDQDEQLSSYENQVNYYRDFISKHEDYELVDIYADEGISATNTKKRDALLQKTYTVDFLTKKRTENDGQVNQFYVANNHEGIIDNEMWETVQLEIARRKAFREEHGIPFYHLQNEDNPFMTKVFCTECGDAFGRKNWTTSRGKRKVWQRNNRYRITGVMGCSNNHIDEEMLEKAFMKAVNILQDHKADVLDKLERLRKGDNLLHKHYAKFMKQLLDIDHFDCTIMCQVLDNITISESGQITVAFLEGTEVDL

SEQ ID NO: 12039 - protein, 253 aa, Unknown
  Description of Unknown: Integrase A607 sequence
  PF07508,G3DSA:1.10.10.2600,SSF53041, PS51737,cd00338,PF00239,PS51736,SM00857, G3DSA:3.40.50.1390,PTHR30461
MNIRKIEAKNNNRKKRICAYVRVSTTNGSQLDSLENQKVYFEKLYAERDDVEFLGVFCDKGISGSKYDRPDFQTMLDACRKGQIDVIHTKSISRFARDLINVLEISRELKTLGIDIFFEEQNIHTLSNEGEVVLTVLASLAEEELQSMSGNQRWSFRRKFQKGELLINAKRFLGYDLNEKGELVINKAEAQIVRTIFYSYLEGMGTHRIAKKLNEGKVPTVTGKKWYDSTIRNILKNENTKDLYYFKNTFMMV

SEQ ID NO: 12040 - protein, 252 aa, Unknown
  Description of Unknown: Integrase A608 sequence
  G3DSA:1.10.10.60,SSF46689
MTRGKCRRSGCSNLTRSSGGKAFCDKHRKAMGPTGYVDPAPAIEHLNLLHERGMSWDAISEVLGMSRRGTQLVRLGKSTRMQAKTVQRILGIPVPEKFVDEGMCPVNPIGARRRIGALMALGHSHRDISKAAGIHQNQLWRVFRNDSIRSSTARAISDVFGWMQFETGGSIRSKRWAQEHGYPTPFSWEENEIDDPRARPRIDPTLLTKGRLEEYKRLRDEGLTKKEIAKRFGLNESTLYDWINRQKAKGNL

SEQ ID NO: 12041 - protein, 252 aa, Unknown
  Description of Unknown: Integrase A609 sequence
  G3DSA:1.10.10.60,SSF46689
MTRGKCRRSGCSNLTRSSGGKAFCDKHRKAMGPTGYVDPAPAIEHLNLLHERGMSWDAISEVLGMSRRGTQLVRLGKSTRMQAKTVQRILDIPVPEKFVDEGMCPVNPIGARRRIGALMALGHSHRDISKAAGIHQNQLWRVFRNDSIRSSTARAISDVFGWMQFETGGSIRSKRWAQEHGYPTPFSWEENEIDDPRARPRIDPTLLTKGRLEEYKRLRDEGLTKKEIAKRFGLNESTLYDWINRQKKKGNL

SEQ ID NO: 12042 - protein, 251 aa, Unknown
  Description of Unknown: Integrase A610 sequence
  G3DSA:1.10.10.60,SSF46689
MKYGKCRRPNCQNSTRSRGSNALCEKHLRTRPRGYVDPAKAVEHLNALHDKGMTWDAISDVLGMSRHALQRVRLGKTPRMQARTVQRILEVPIPGAPVAVGMAYVPSIGSRRRVGALMALGHARPDICRISGVHSSQMYTLFKKDVIRATTAKAVSDAFNRMQFETGSSIRSKKWAEAHGYPTPFSWEESEIDDPRARPRIDPTLLTKGRLEEYKKLRDQGLTKKEIAKRFNLNESTLYDWINRQKAKGNL

SEQ ID NO: 12043 - protein, 251 aa, Unknown
  Description of Unknown: Integrase A611 sequence
  SSF53041,cd00338,PTHR30461:SF3,PF00239, PS51736,SM00857,G3DSA:3.40.50.1390,PS00397, PTHR30461
MRAFAYVRVSTEEQADSGHSIELQPARITSYCQTYGLELVDVITDPGVSGSTPLARRAGGRELLRRLEAGEAEGVVVVRLDRLFRDALDGLQFFARSRAVVHSVAERIDTGSPAGRLQLTILLATAQYERDIAAARATENTRGLRAAGRVYGSTPYGCVAIAGQLYRDPATWAQRELICEWRANGLPLQAIRERLREDRVQAPGGGTWWSKSTLSNLIATHHDLAHLPELPAHGAPADTARPDVEDSCATA

SEQ ID NO: 12044 - protein, 251 aa, Unknown
  Description of Unknown: Integrase A612 sequence
  G3DSA:1.10.10.60,SSF46689
MKYGKCRRPNCQNSTRSRGSNALCEKHLRTRPRGYVDPAKAVEHLNALHDKGMTWDAISDVLGMSRHALQRVRLGKTPRMQARTVQRILEVPIPGAPVAVGMAYVPSIGSRRRVGALMALGHARPDICRISGVHSSQMYTLFKKDVIRATTAKAVSDAFNRMQFETGSSIRSKKWAEAHGYPTPFSWEESEIDDPRARPRIDPTLLTKGRLEEYKRLRDEGLTKKEIAKRFGLNESTLYDWINRQKAKGNL

SEQ ID NO: 12045 - protein, 250 aa, Unknown
  Description of Unknown: Integrase A613 sequence
  SSF53041,PF00239,SM00857,G3DSA:3.40.50.1390, PTHR30461
MKQVNQVLSQVFPYVFNNIPENIKYAAIYCRKSNAGAGNELSFSVQKNICETFCKERNLEIICCVIETISGKNMNQMVELNELLQQIQKDTVIVVCDVTRFSRNVLQGLQAIDKLLKKDSTIYAVCNCCCYNDKYIDRHQFRSLLNQAELEHDQITDRINRSVKHRRRIGHKIGKAKYGYEIYYDNKGIRREKKHKLEQKTVSTIRRLLNSGKKLSDIVDYLNNANDANNDFRGKEWNTSRVKYVSKSSV

SEQ ID NO: 12046 - protein, 248 aa, Unknown
  Description of Unknown: Integrase A614 sequence
  SSF53041,PS51737,cd00338,PTHR30461:SF3,PF00239, PS51736,SM00857,G3DSA:3.40.50.1390,PTHR30461
MRVLGRLRLSRSTEESTSIERQREIVTAWAQSNGHTLVGWAEDVDVSGAIDPFDTPSLGPWLDERRGEWDILCAWKLDRLGRDAIRLNKLFGWCQEHGKTVASCSEGIDLSTPVGRLIANVIAFLAEGEREAIRERVTSSKQKLREVGRWGGGKPPFGYMGVPNPDGQGHILVVDPVAKPVVRRIVDDILDGKPLTRLCTELTEERYLTPAEYYATLKAGAPRQKAEPDETPAKWRQPALRGRGLHHL

SEQ ID NO: 12047 - protein, 243 aa, Unknown
  Description of Unknown: Integrase A615 sequence
  SSF53041,cd00338,PF00239,SM00857,G3DSA:3.40.50.1390
MIKKYVVYSRQSKKSGMKGQMTLETADAIIRHFLNTQGEEGVDYEVVKVFKEVSSSYGSKSANRINFNEAYELCKQNGYTLLVSTASRLARNTAFGAKIIEEIDVVIASNPTASKTMKNIMLVLAEDESIQQSERRRATYQAKKEKCKKLGIKCEWGGNSEKWREKYFANKAAGKHSTTKLFKPSPQKDKLVVDIKTAISYGSPKSFVELADKLNKNEVFTLGNKPWNGRSLATFSKRNGIEL

SEQ ID NO: 12048 - protein, 241 aa, Unknown
  Description of Unknown: Integrase A616 sequence
  G3DSA:1.10.10.60,SSF46689
MYPVDKESRIRLMEDLDKWINEHYLEKVTVKDLSHQLGVFIPDVYRLFAEQRNTTPGEYLRRKRLVKAKALLESGIRPTLAGAHVGYSHFQSFVKEYKAYFKRHPREDYSDTLEVPTMDSYSKETMDRYYPSELREKILNYLRKNIKVNFNYADVEKKFGLPDRSLSEMFEHYYGKSYREWRKDTRMKLAKELLHKNPSVKISDLATTVGSCSATYLRKQYQEVYGVNIVELRETLRGVRV

SEQ ID NO: 12049 - protein, 241 aa, Unknown
  Description of Unknown: Integrase A617 sequence
  G3DSA:1.10.10.60,SSF46689
MYPVDKESRIRLMEDLDKWINEHYLEKVTVKDLSHQLGVFIPDVYRLFAEQRNTTPGEYLRRKRLVKAKALLESGIRPTLAGAHVGYSHFQSFTKEYKAYFKRHPREDYTDSLEVPTMDSYSKETMDRYYPNELREKILNYLLKNIKVNFNYADVEKKFGLPDRSLSEMFEHYYGKTYREWRKDTRMKLAKELLHKNPSIKITDLATTVGSCSATYLRKQYQEVYGVNIVELRETLRGACV

SEQ ID NO: 12050 - protein, 241 aa, Unknown
  Description of Unknown: Integrase A618 sequence
  SSF53041,PF00239,PS51736, SM00857,G3DSA:3.40.50.1390,PTHR30461
MSQLGAIYCRKSSVGKYAIKELSLNVQNDVCKEYCVKNNISVQEDMRIAETVSAREMSKMVELEKLIKKLGENAVLVVSNVSRFSRNVQQAIPVLELLRKNNIFVHSVNDNCRYDNDFNNRHHFRQMLSQAEFESDQISDRANKSIESRRKKGCKIGKSRFGYESFYDKNGLRRERENKAEQLVLELLTVYKERGHSARECAIFLNEKNCTFRKKEWNAVRVNYVLRSVDSGGEKKELGGV

SEQ ID NO: 12051 - protein, 240 aa, Unknown
  Description of Unknown: Integrase A619 sequence
  PF07508,SSF53041,cd00338,PF00239,PS51736, SM00857,G3DSA:3.40.50.1390,PTHR30461
MAKKYVTYKRVSTKRQGESGLGLEAQQRDLKLYFDTYAGEDFEVLGEFTDVDSGTNDSRVEYLKALEMVKSEGATLIVAKLDRISRKVSTIACLIEEIDFKVASMPNADKFQLHLYAALSEQERDFISLRTKAALSVKKSQGVLLGGANPKQRASFQANRLNHKSYRNNQKALEKAQPIVSEVTKMVEYSKDGLTQQEITDNLNSKGIKTASGKEWTVANVSKLIKKHGIPYKKKSRWNK

SEQ ID NO: 12052 - protein, 240 aa, Unknown
  Description of Unknown: Integrase A620 sequence
  G3DSA:1.10.10.60,SSF46689
MSAVCYFILIKKPISFQFLKDFLILNYGDVLLLKHSEHECLKMYSDKYIEFELNDNTVRNYLLCSNNLGNQSLDKCPHLLKKSFAYPDLLIRMIDNISDQNHIHSDFREAVTFSLLSIFNDVDNFRAFLTSGMPTFSGKVRSIFLSDVSKHWKLRDLTDYLYMSESLIKKKLLLENTSFSKLLLDTRMAFAIKLLKQNHSVKQVSESCGFSSTSYFVCLFRQYYNCTPREYAKHQLLSGK

SEQ ID NO: 12053 - protein, 238 aa, Unknown
  Description of Unknown: Integrase A621 sequence
  SSF53041,cd03768,PF00239,PS51736,SM00857, G3DSA:3.40.50.1390,PTHR30461
MTIYAYKRCSTNEDKQDTARQLYGKTFDEVVIEYASGKNEKGRPLFKELKDKLLSGDELHFNDLSRAGRNTKELLSTIEDLVDRNVKVVFHTENLTFVSGGQDPMAGAMSKMLLTMLASVNELFLTQTKIAVKQGLERVRQESPEKLSKNRDSQWHKTFTENRAKGLHKYQTTKVSRTNDKQLLLVNRVKSMISDSNGQLTQKQMCEKLTLEGFTNSNGGVISQGSLAKLIKKYNLNS

SEQ ID NO: 12054 - protein, 237 aa, Unknown
  Description of Unknown: Integrase A622 sequence
  SSF53041,cd00338,PF00239,SM00857,G3DSA:3.40.50.1390,PTHR30461
MDNKKYVAYYRASTESQRDGIGLEVQKSSVEAFVKSYGGTIVEEVSEIISGGAQVREGFDKALELCKKHSAVLLVHRIDRLSRAGFMTIAKLEEKGVPFIEADSPHDSEFSKNIKFLIAKEEKDKTQRRVKDALGQIKANIESDGYHITKAGDRITSLGNPQNLSDMARERSKVIRKAKAIANENNRRAYAMASRMKSNKSTLKQIADYLNKNGFETSKGNKFYPIQVSNLIKLYEN

SEQ ID NO: 12055 - protein, 237 aa, Unknown
  Description of Unknown: Integrase A623 sequence
  PF07508,G3DSA:1.10.10.2600,SSF53041,cd03768,PTHR30461:SF3, PF00239,PS51736,SM00857,G3DSA:3.40.50.1390, PTHR30461
MQSEEGISLDTQLKKIQDYCSYKGFELFNKIYKDEGLSGKNMERPELKKLLDDVQKDDYVIIYELSRLSRNTRDALNILEQINNKGGFLICLNPDIDFSSPAGKMMYTVLSAFHQLERETTSQRVSMNMKNLSKQNLLRSRPPFGYKFISKDKPMIEDEEQQKVVKVIKEKYEELKNITAVTEYLNSNGYNKCFKKEGQKFYVQTVKNILSDYGVINTNRKKISDKFLDTRKNAIKQ

SEQ ID NO: 12056 - protein, 235 aa, Unknown
  Description of Unknown: Integrase A624 sequence
  G3DSA:1.10.10.60,SSF46689
MKAEFRDKLFKDTLKWIDNNFHRSIRAKDIGDQLGMSMNNVTDLFRRQLDTTPGEYLRVVRMKHAKQLLMKGVRPTSVYKQTGYSSYRAFTRVYQIHFGVQPSQDYHYFMGVITEPMATPQMDTLYPFALRKRIVDYVKDNIQCNYTLRDLESRFKLPGSCLGEMFVHYYDQTYTDWRKSLRMRMASDLIRDNPKIDVTRIHGQLGICSFQYFVTLFKQHYRTHPQSYANAFKRK

SEQ ID NO: 12057 - protein, 235 aa, Unknown
  Description of Unknown: Integrase A625 sequence
  G3DSA:1.10.10.60,SSF46689
MQQSFREQLFQDTLKWVDKNFHRTIRAKDIGDQLGMSMNGVTDLFRRQLDTTPGAYLRGVRMRHAKQLLMNGVKPTSVYKECGYSSHRAFTRVYQESFSTTPTEEYTFYAGVITEPISVPQMDVLYPESLRESIKKFVTENIQCNYTLRDLESRFKLPGSCLGEMFEHYYGMTYTDWRKSLRMKIASDLIRENPKIDVTSIHGQIGICSFQYFVTLFKQQFRTHPQTYANSFKSK

SEQ ID NO: 12058 - protein, 235 aa, Unknown
  Description of Unknown: Integrase A626 sequence
  SSF53041,cd00338,PF00239, SM00857,G3DSA:3.40.50.1390,PTHR30461
MWKIGAIRLSDSAAEKARQMFILKDYFKKHNITDVQYVEDIGTSGGVPILDRPNLGSVLKKAPKGTTVYVSDISRLGRLDYDMMKFRDDKNFKLVVCNNPEITEDKNRIMFGVNAIMSDQYRRDLSVKQKEKCQEMQASIVDKGYYITKSTNRKMTKLGVHGFMDKARAKASQSRKEKANFYIGQIRIHLEDAQNHSESLLGMANYLNARSVKTSRNSCWSASTVKRALDRLQTL

SEQ ID NO: 12059 - protein, 234 aa, Unknown
  Description of Unknown: Integrase A627 sequence
  G3DSA:1.10.10.60,SSF46689
MTDHELALQIQDYVKEIYMKPRPSNLVYTKFNMSGPVMGRFLERLNHPSIKVMLVEARMERAKELLAQDMVNVPGIHTHVGYSTRNSFERRFKDHVGMSPAVYRKKIQEQQTEQEHMTYSKRVNEVTQNELRKYLIKHFREPELTLNRVQDVFNLSKDEIQEIIGIVYNCTFEERLLTMRLEEVGNLLVKTTRTPRQLSTECGFVSYHYFVGQFTKRFTVGPKHYRQLKLIKAI

SEQ ID NO: 12060 - protein, 233 aa, Unknown
  Description of Unknown: Integrase A628 sequence
  SSF53041,cd03768,PF00239,PS51736,SM00857, G3DSA:3.40.50.1390,PS00398, PTHR30461
MSQLDTPTARQPVLYGYARVSKQKQNLTTQIRLLNKAGCKQIFYEKISGAKDKKVELGKLISVLQKGDVVVVAHLDRLGRNLVTTLRTIEQINNKGASIKALDFNLDSGTAMGDLMIKFMAFFAELERYFAKMRSEERLANLTKKQRSSLGRKAVLDKKTIKKYYQQYLDRKTTVAAITEKLGITRASFYNALKRYNIKTYVQSHLDGDINDPSFKYGKLHFKRVRGKVQCKY

SEQ ID NO: 12061 - protein, 233 aa, Unknown
  Description of Unknown: Integrase A629 sequence
  SSF53041,cd03768,PF00239,PS51736,SM00857, G3DSA:3.40.50.1390,PTHR30461
MSRNISYKRVSTTHQSCDRQLAGLGITFDIEFSDKLSGKNTNRPQLQECMSVITEGDVLWVHSIDRLARNVEDLRGIVFDLMDKGATVKFVKEGLEFTGSQDEAMKASMSKMLLTLLGAVAEFERSLITSRVREGVQQAKLKGKKIGGSNPQWKQSYTTNRAAGKHSTTKDFKPSPQKEKLIVDIKTAISYSSPKTFVELADKLNQNGVMTLSNKVWDGKSLAVFAKRNEIKL

SEQ ID NO: 12062 - protein, 233 aa, Unknown
  Description of Unknown: Integrase A630 sequence
  PF07508,SSF53041,cd00338,PTHR30461:SF3,PF00239, SM00857,G3DSA:3.40.50.1390,PTHR30461
MKVVLYRRLSKEDKTKNQHGLDSQLADINYYLNTLDSYEIIGDFSEFISGGADKKLELNKAIALCEKEGATLVVAKLDRLSRRVSQIALYMEGSVKFKVALMPSAENLQLHIYAALAEEERASIRDRTKRGCAAAKAKGILSGRASPNYGMNSGNGTKNIDKIIAERKQAALEKSMYVVPEIKKALKYLGKRPTQQKVATFLNDANIPTPSGRGSWKQSTVQRVLERHNINLF

SEQ ID NO: 12063 - protein, 233 aa, Unknown
  Description of Unknown: Integrase A631 sequence
  SSF53041,cd00338,PTHR30461:SF3,PF00239,SM00857,G3DSA:3.40.50. 1390,PTHR30461
MKVVLYRRLSKEDKTKNQHGLDSQLTDINYYLNTLDSYEIIGDFSEFISGGADKKLELNKAIALCEKEGATLVVAKLDRLSRRVSQIALYMEGSVKFKVALMPSAENLQLHIYAALAEEERASIRDRTKRGCAAAKAKGILSGRASPNYGMNSGNGTKNIDKIIAERKQAALEKSMYVVPEIKKALKYLGKRPTQQKVATFLNDANISTPSGRGSWKQSTVQRVLERHNINLF

SEQ ID NO: 12064 - protein, 233 aa, Unknown
  Description of Unknown: Integrase A632 sequence
  G3DSA:1.10.10.60,SSF46689
MSDKKSKELKKLKSAAKKYCLEPNASELVLKKTLFSLPKVIKMFRDAGEGSLYDYITHLKMLEAKKLLDDTDLNLTSISRAIGYADRKSLRENFIKQFGMYPLDYRNRPKTNDLAWDLFKSHPKLTVQRQTFLLDHVKKHYKDSDLSIQTLSDRFRLTHQDIDLIINHHYGSGLKQLLLDLRLNQAHAKLPNYYKSVRQLAEELGFLDFNYFVVKFERKYGMGPRRYQQHARL

SEQ ID NO: 12065 - protein, 233 aa, Unknown
  Description of Unknown: Integrase A633 sequence
  G3DSA:1.10.10.60,SSF46689
MSDKNSREFKKLKNAAKKYCLEPNASELVLKKTGISPTRVIKLFRDAGEGSLYDYITHLKMLEAKKLLDDTDLNLTSIARAIGYTNHKTLRENFIKQFGTYPLNYRNRPKTSDLAWGLFKSHPKLTVQRQTFLLDHVKKHYKDTGLSIQTLSDRFRLTHQEIELIINHHYGFGLKQFVLDLRLNQAHAKLPNYYKSVRQLAEELGFLDFSYFVVKFEKKYGMGPKRYQQHTRL

SEQ ID NO: 12066 - protein, 233 aa, Unknown
  Description of Unknown: Integrase A634 sequence
  G3DSA:1.10.10.60,SSF46689
MFDKKSRELKKLKDAAKKYCLETDATELVLKKTGFSRTKVLKMLRDANEGSLYDYITLLRMLEAKKLIDTTDLEITAISRAVGYTKPKSLRENFVKLFGITPVDYRHRPKTEDHAWKLFKKHPKLTVQRQTYLLDYVKKHYNDPEVSVHVLADRFRLTHQEIELIIKHHTGEDFKTHLLNFRLNQAHGRLPNHLKPIKELALKLGFRDFNYFVVKFENKYGMGPKRFRQLSRL

SEQ ID NO: 12067 - protein, 231 aa, Unknown
  Description of Unknown: Integrase A635 sequence
  SSF53041,PF00239, SM00857,G3DSA:3.40.50.1390,PTHR30461
MKVIIYKRLSKEDRTKTQHGFNSQQRDIDFYLSDVEHKVIGTFQEFVSGGEDSKPELKKAMELCRTEGATLVVAKLDRLSRRVSQVAAYMEGDVKFKVAALPQADNFQLHLYAALSEQERTMIRQRVKAGLDAAKAKGVKLGGASDKWQKSYNRSKSKHVSKTNHIKSQESWESKRSQIEGVLKIMGRNKISLTYKNISSNMNDMNIKTATGGKFTPSQALRALSYLNITR

SEQ ID NO: 12068 - protein, 230 aa, Unknown
  Description of Unknown: Integrase A636 sequence
  SSF53041,cd00338,PF00239,SM00857,G3DSA:3.40.50.1390,PTHR30461
MVALNDESKNGYIYCRQSKKLKKSNSLLNQHKICKKYCEKNKIKVKKTKKEHKSGRFFKNKASLMELRNKMVSGDTLVVYRISRLSRNYEKGWNFIKTLKENNIKVVSVDENINSFDNINEFQEKLKSSEDYSNELSDRINKINRCLRHKGWHFGYVPYGYERYFTLNNVRKMRPNNTEQYVIKLINRLRKNKKSYKEISKFLNKKRLLFRKKYWDSIMVGTVYRKHNKK

SEQ ID NO: 12069 - protein, 229 aa, Unknown
  Description of Unknown: Integrase A637 sequence
  SSF53041,cd00338,PTHR30461:SF3,PF00239,SM00857, G3DSA:3.40.50.1390,PTHR30461
MTAALIYCRISTDRQTTLLAQEDACRAYCGRRGLVVRKVVSEIVTAYSGRHLAEQRIEVPRGVRHVICYDVSRMGRLSDDAAFVREHLARGVQFHFVSENIVSRAADDAGFREVQQRLRLAQHESEQLSNRIRNGKMVKDSKIRSLLALIHGGANDNLIRNFVLRNFNRVVVDSLVGLPEFELCARLNRYRLYCSRRWTPASLRRFCERPAAGAGATELLSASLSELKF

SEQ ID NO: 12070 - protein, 229 aa, Unknown
  Description of Unknown: Integrase A638 sequence
  G3DSA:1.10.10.60,SSF46689
MNNIYHSNDTDIVLAADALVKLARGTINHTNIQPTTTIQPTTTIQPTTTIQPTTAPFILYRAIRLGFDNASTPNTSNANIFNNTKNITPEQNYPTLQSYPMMQNYPTLQSYPVMQNYPVMQSYPMLPTPLSASEQAKSFMEKMTSITKDPRKKNEAPNSRRTLEAPKKKLTKINKKKLLILLSEYDINKYPSRATKKILAERTGLTEKQVYNWLQNKRASDKKQSMMNS

SEQ ID NO: 12071 - protein, 229 aa, Unknown
  Description of Unknown: Integrase A639 sequence
  SSF53041,cd00338,PTHR30461:SF3,PF00239, SM00857,G3DSA:3.40.50.1390,PTHR30461
MTAALIYCRISTDRQTTLLAQEDACRAYCGRRGLVVRKVVSEIVTAYSGRHLAEQRIEVPRGVRHVICYDVSRMGRLSDDAAFVREHLARGVQFHFVSENIVSRAADDAGFREVQRRLRLAQHESEQLSNRIRNGKMVKDSKIRSLLALIRGGANDNLVRNYVLRNFNRVVVDSLVGLPEFELCARLNRYRLYCSRRWTPASLRRFCERPAAGAGATELLSASLSELKF

SEQ ID NO: 12072 - protein, 228 aa, Unknown
  Description of Unknown: Integrase A640 sequence
  SSF53041,PF00239,PS51736,SM00857,G3DSA:3.40.50.1390,PS00397
MSSKNVKETAKFVAPGRARKILGISDATLRRWAETKKIESFITPSGRRLYNVENLFGVVRPPTDDAIIPRGSKSFLYARVSSSKQRDDLQRQIDFLKEKHPDFEVVSDIASGINWQRKGLRKLLDLSSAGGVERIVVAERDRLCRFAFELVEYVFSINGTIVEVVGSEESSPEQELQEDLLSIVQVFCCRRNGKRRYKGKKKDENPEESCDRNSNHKDSSDKITETTD

SEQ ID NO: 12073 - protein, 228 aa, Unknown
  Description of Unknown: Integrase A641 sequence
  SSF53041,cd03768,PF00239,PS51736,SM00857, G3DSA:3.40.50.1390,PTHR30461
MRNIGYLRVSTDNGSQKTDRQLHDVGVDFHKIFEDKASGSSINNRPQFVEMLDYLQENDTVHIQSNDRCFRNVKEMLGFVEDMLERKINIRLHTENLHFVHDGNEMMLAQSKLMLTQLAAFSEFFLTQNRVAIKQGIKAAKNRGVLFGAANPKYRESFEKSKAAGLHKTPVRKVAQPELLARIRQMVGDSNNSLTQMEMTSKLNAEGWTSARGKVLSQGMISKLLKEI

SEQ ID NO: 12074 - protein, 228 aa, Unknown
  Description of Unknown: Integrase A642 sequence
  SSF53041,PF00239,PS51736,SM00857,G3DSA:3.40.50.1390, PS00397
MKKKNNKNADNEVNKKKEVGKKLMGGKEASRILGVHQRTLYQWEEKGKIDTIRTPGGKRLYNVEKYLREQGLTIEENNDVYDTDLDALDKKKGKLRISYARVSSRGQKDDLERQKRLIKEKYPDHILIEDMGSGMNFNKRGLRKIIKLAIEGRVEELVVAYKDRLTRVGYELIEDLIKEYSGGRITIIEKKDELEPEESLVYDVLQIMNIFVAKMNGLRKYRKKEEKK

SEQ ID NO: 12075 - protein, 227 aa, Unknown
  Description of Unknown: Integrase A643 sequence
  SSF53041,cd00338,PF00239,PS51736,SM00857, G3DSA:3.40.50.1390,PTHR30461
MKAYIYCRLSGRRGSVNSQTEECIKYCKSKGWEVAETFEQITSSRNMKNKNLLETIVDKMSNGDILVVYSVDRFSRNMLGGLQILEKMERKGVTIYSVFENLTYSTTSEKFNFRNLLNFAEFETDQISSRTKRGKKRKIDQTVDQTTNPIAVKTPKKTKANDKPKETKPNNKIVENASVNDNDNDFPYKTVDTISDETKEIKTQVSKKKKLETKFMQKQLNNYFKTK

SEQ ID NO: 12076 - protein, 226 aa, Unknown
  Description of Unknown: Integrase A644 sequence
  SSF53041,PF00239,PS51736,SM00857,G3DSA:3.40.50.1390,PS00397
MCLTIIHLHISIWTLSSSWDSKGLIPTTRTPTGISLYDVEFIAPTVKFTRGKAKNSGRRVIYARVSSTKQKADLERQIQLLSEKFPGHKVIRDIGSGINWSRPGLKTLLRYCLDGSIREVVVAHRDRLSRLGFELLKFLIEEAGGKLVVLSESQTEQGVDEFRPESELGEDLLSIVHIFSCRHYGRRKYGKGRRKSTETQETNQEGSKDEGQGGGSEMQEGKDTSE

SEQ ID NO: 12077 - protein, 226 aa, Unknown
  Description of Unknown: Integrase A645 sequence
  SSF53041,cd03768,PF00239,PS51736,SM00857, G3DSA:3.40.50.1390,PS00397,PTHR30461
MRHIGYLRVSTISQVTDRQLHDVGVDFHKTFEDKASGSSINNRPQFVEMLDYLQENDTVHIQSNDRCFRNVKEMLGFVEDMLERKINIRLHTENLHFVHDGNEMMLAQSKLMLTQLAAFSEFFLTQNRVAIKQGIKAAKAKGTLFGSANPKYKETHQRNKAAGLHKTPVRKVAQPELLARIRQMVSDSNNTLTQMEMTVKLNAEGWTSARGKALSQGMISKLLKEL

SEQ ID NO: 12078 - protein, 226 aa, Unknown
  Description of Unknown: Integrase A646 sequence
  SSF53041,cd03768,PF00239,PS51736,SM00857, G3DSA:3.40.50.1390,PS00397,PTHR30461
MRHIGYLRVSTQDQSVSRQLHDVGVDFHKTFEDKASGASINNRPQFVEMLDYLQENDTVHIQSNDRCFRNVKEMLGFVEDMLERKINIRLHTENLHFVHDGNPMMLAQSKLMLTQLAAFSEFFLSKSREDCRQGIKAAKAKGTLFGAANPKYRESFEKSKAAGLHKTPVRKVAQPELLARIRQMVNDSNGSLTQMEMTAKLNAEGWTSARGKVLSQGMISKLLKEL

SEQ ID NO: 12079 - protein, 226 aa, Unknown
  Description of Unknown: Integrase A647 sequence
  SSF53041,cd03768,PF00239,PS51736,SM00857,G3DSA:3.40.50.1390, PS00397,PTHR30461
MRHIGYLRVSTISQQVDRQLHDVGVDFHKIFEDKASGASINNRPQFVEMLDYLQENDTVHIQSNDRCFRNVKEMLGFVEDMLERKINIRLHTENLHFVHDGNEMMLAQSKLMLTQLAAFSEFFLTQNRVAIKQGIKAAKAKGTLFGSANPKYRKSFEKNKAAGLHKTPVRKVAQPELLARIRQMVNDSNGNLTQMEMTAKLNAEGWTSARGKVLSQGMISKLLKEI

SEQ ID NO: 12080 - protein, 225 aa, Unknown
  Description of Unknown: Integrase A648 sequence
  SSF53041,cd03768,PTHR30461:SF3,PF00239,PS51736, SM00857,G3DSA:3.40.50.1390,PS00397,PS00398,cd00569, PTHR30461,SSF46689,PF02796
MRDPLDKGTLDIVTGGMRIGYARVSTVDQNLELQHDALARAGCVQVYEEKASGKSKDGRPELANMMRALRKGDTLIVWRLDRLGRSLVDLVQLVDELAGRGVAFESLSEKIDTSTAQGRMFFGFIAAMAQYQRDVISENTLAGLKAARARGRNGGRPAALDDAAIKEIRVLMKSPDISMASIAKRYGVSKPTLYNSLKRAEKKGAEKPSRKRTSANSSRSRSNTR

SEQ ID NO: 12081 - protein, 224 aa, Unknown
  Description of Unknown: Integrase A649 sequence
  G3DSA:1.10.10.60,SSF46689
MDLQKACDRISQEFETDIIMGANLLVQMIQSQRITSNTPVQTVQPVQPVQPVQSVQSVQSVQSVQSVQPVQPVQPVQPVQPVRVPEINPVLFSYLIPLIPFIQMYHIAQKDVVPKNPQVQKQDVSQFTPDGKFKIPINKTKTIKKSTSEKKTSPKKKTTSQQIKRVRLSDEERNILESQYSKNNFPSPEIRDELAKKIGKTPRQVQIWFQNKRCKDRKNLEKNN

SEQ ID NO: 12082 - protein, 223 aa, Unknown
  Description of Unknown: Integrase A650 sequence
  SSF53041,cd00338,PF00239,SM00857,G3DSA:3.40.50.1390,PTHR30461
MKKFVVYSRLSKQKKGEAQYGMESQENDIRYFLDSVPDAEVIGQFSEYYSGKGDWKQRKELVKAVEMCKATGATLLVAKVDRLGRNNASVATLLEMIDVKIAIMPDADKMVIQLLSVLAEQEVRGIADRIKKGLAVAKSKGVLLGSANPKTAAARRKGKMEYNSVKADAFAETFRERLEILRDLNTPYKTIAEKFNSKKIATARGGKWDAKTVSRLCARLNIK

SEQ ID NO: 12083 - protein, 223 aa, Unknown
  Description of Unknown: Integrase A651 sequence
  cd00569,G3DSA:1.10.10.60
MLCRGCSKEIEPDYRYGNTHLKKCRNCAKLDYHARYKRVKEKAFIEIKGTTPAEVKRLSNESDYVLSSKGDIWKLTNNGYRKLKGKVNKTGYHVIYISPSDPAIPFAGKNGGEYYVHRVVATLFIANPNNLPVVNHLDGNPINNDFSNLEWCTQKRNAQHACDTGLSPIGDKLPQSKLTAEKVKVIKDRLHKGEPITSIAEDYGVHRETVGAIKRGISWKHVK

SEQ ID NO: 12084 - protein, 222 aa, Unknown
  Description of Unknown: Integrase A652 sequence
  PF07508,SSF53041,cd00338,PF00239, PS51736,SM00857,G3DSA:3.40.50.1390,PTHR30461
MNKRYVGYTRVSTDKQGKEGYGSADQLQTINEFVKNDELLQVFQEEESGSRNDRPQLTQALELCKKEKATLVIARLDRLSRNLAFTASLMESKIEFVCCDMPSVNKFTIQVLAAVAEQYLDTLRKNTKSALAQAKKRGVVLGNTKNLKQAARKGNVKKKLLADEKARSVNNIILDLKKYGVTTLSEIAKALNARGIPTVRNGEWYPSTVRNYVNRCSSNVHL

SEQ ID NO: 12085 - protein, 221 aa, Unknown
  Description of Unknown: Integrase A653 sequence
  PF07508,SSF53041,cd03768,PF00239,PS51736, SM00857,G3DSA:3.40.50.1390, PTHR30461
MKRYVGYTRVSTDKQGKEGYGSADQLQTINEFVKDGELINVYQEQESGSKNDRPELNKALADCKKHNAILVIPRLDRLSRNLAFTASLMESKLEFVCCDMPSVNKFTIQVLAAVAEQYLDTLRKNTKSALAQAKKRGVVLGNTKNLKQAARKGNAKKKLLADEKARSVNNIILDLKKYGVTTLSEIAKALNARGIPTVRNGEWYPSTVRNYVNRCSVNVHL

SEQ ID NO: 12086 - protein, 220 aa, Unknown
  Description of Unknown: Integrase A654 sequence
  SSF53041,cd00338,PF00239,SM00857,G3DSA:3.40.50.1390, PTHR30461
MKFVLYHRLSKKKQQGNQYGIESQEADIQRFLDSQENYTIVGSFAEFYSGKGDWKQRRELVKAVNLCKETGATLVVAKVDRLGRNTASVATLLEMINVRIATMPSAENMIINILAVLAEEEARAISDRVKKSLKVAKAKGTLLGAANPKYKRTDYTKTEEAKRSKEFALSLKDSLVAYRACKTPYMTIAKHLNESGKRTIRGSLFDAKAVQRLCAKLNIK

SEQ ID NO: 12087 - protein, 220 aa, Unknown
  Description of Unknown: Integrase A655 sequence
  SSF53041,cd00338,PF00239,SM00857,G3DSA:3.40.50.1390,PTHR30461
MKFVLYHRLSKKKQQGNQYGIESQEADIQRFLDSQENYTIIGSFAEFYSGKGDWKQRRELVKAVNLCKETGATLVVAKVDRLGRNTASVATLLEMINVRIATMPSAENMIINILAVLAEEEARAISDRVKKSLKVAKAKGTLLGAANPKYKRTDYTKTEEAKRSKEFALSLKDSLVAYRACKTPYMTIAKHLNESGKRTIRGSLFDAKAVQRLCAKLNIK

SEQ ID NO: 12088 - protein, 219 aa, Unknown
  Description of Unknown: Integrase A656 sequence
  SSF53041,PF00239,PS51736,SM00857,G3DSA:3.40.50.1390,PS00397
MNTYKPKDFAEMIGVSVKTLQRWDNEGKLKAYRNPSNRRYYTHNQYVEYMGKIVQDKDKRKTIIYARVSSNSQKDDLKNQVEFLKQYANAKGMIVDEIFEDVGSGLNYNRKKWNKLLEDCMLGAIKTIIVSHKDRFIRFGFDWFERFVKSNGVELIVVNNESLSPQEEMIQDLISIIHVFSCRIYGLRKYKKKIKEDDEIVKSLQSGDKTNSRTKYKNS

SEQ ID NO: 12089 - protein, 217 aa, Unknown
  Description of Unknown: Integrase A657 sequence
  SSF53041,cd03768,PF00239,PS51736,SM00857, G3DSA:3.40.50.1390,PS00397,PTHR30461,PF02796
MIYGYIRVSSDKQTVENQRFEISNFCKINELTIDDWIEETISGTKNYTKRQLGRLLRKVRKDDIIICSELSRLGRNLFMIMEILNICMTKGCKVWTIKDNYRLGEDIQSKVLAFAFGLSAEIERNLISQRTKEALARKKAEGAMLGHRRGFRCRLNPKCANKHDYIVKELDKGTEKTFIAKNLKVSKGTLYRYLVYTGIYFPANCQQEGWKNHGIYH

SEQ ID NO: 12090 - protein, 217 aa, Unknown
  Description of Unknown: Integrase A658 sequence
  SSF53041,PF00239,PS51736,SM00857,G3DSA:3.40.50.1390,PS00397
MNKRMLSIGQASKLLGVTIQTLRNWDKKDLLKPDELTKGGERRYKLESLRRINRSTVFNQDELKTIAYARVSSHDQQDDLIRQVQVLELYCARCGFNYEVIQDLGSGMNYYKKGLTKLLNLILDNQVKRLVLTHKDRLLRFGAELVFSICEAKEVEVVIINKGDENVRFEEELAKDVLEIITVFSARLYGSRSKKNKKLLDEMQEVITNNVSYLNHA

SEQ ID NO: 12091 - protein, 217 aa, Unknown
  Description of Unknown: Integrase A659 sequence
  SSF53041,PF00239,PS51736,SM00857,G3DSA:3.40.50.1390,PS00397
MNKRMLSIGQASKLLGVTIQTLRNWDKKDLLKPDELTKGGERRYKLESLRRINRSVVFNQDELKTIAYARVSSHDQQDDLIRQVQVLELYCAKCGFNYEVIQDLGSGMNYYKKGLTKLLNLILDNQVKRLVLTHKDRLLRFGAELVFSICEAKEVEVVIINKGDENVRFEEELAKDVLEIITVFSARLYGSRSKKNKKLLDEMQEVITNNVSYLNHA

SEQ ID NO: 12092 - protein, 215 aa, Unknown
  Description of Unknown: Integrase A660 sequence
  PF07508,SSF53041,PF00239,SM00857,G3DSA:3.40.50.1390, PTHR30461
MNKIVALVRVSTDKQDVNNQKFAIEKKYPGYDIAWFEEPGISGAKLLRNRPVFQDAVKTAKKLGVPLVAYSMSRLGRTYEVGQFLEDNKGKIKLDILDTPILDDAIAGFHVAINRMERINISNRTKAALARLKAEGVNLGNLTNLAEVRVRGHATIKANADKYAKDIKDIIEGIKLSGVKTFQGIADALNNRGVKTYKDRSWYPTTVKNVLERGC

SEQ ID NO: 12093 - protein, 215 aa, Unknown
  Description of Unknown: Integrase A661 sequence
  cd00569,G3DSA:1.10.10.60
MITYTCDSCTAPITGPVRLSANDGTEKHFCSPICLSVWWNGQGHGEPRKPIEPRRPQPPALATLPPPQPRTRRARPLTPEQDTEILRRYNDGEPVPALAAEFDVAQPTIYKALTRARSAAPQARDALAEVVGLTRQVVDRVVDAAEAAAPVEAPAPAPVAKPQTQQRKPTAPVTARCRDCPRTWNLTGRVLKMTIDLHEHQRGHVVDIEEGALDA

SEQ ID NO: 12094 - protein, 214 aa, Unknown
  Description of Unknown: Integrase A662 sequence
  SSF53041,PF00239,PS51736,SM00857,G3DSA:3.40.50.1390,PS00397
MDGYISGSKVKELLNVSDWTLRHWADTGKIKSIRTPGGQRRYDISTFRASKRDHEVEDNRKIICYARVSSRGQKDDLQRQIGFLERHCPEGIVITDIASGINWKRKGLASILELSVQGDIREVVVAARDRLCRFAFELLERMLALHDVRITVLDSEGCSPEQELSDDLLGIVQIFCCRRNGKRRYIRRPDPFFSTPQNAEDKDEPHENPETDAE

SEQ ID NO: 12095 - protein, 213 aa, Unknown
  Description of Unknown: Integrase A663 sequence
  G3DSA:1.10.10.60,SSF46689
MNIIKSFNNTIDYLETVLDDEIDEKKVAQLSGYSYSMFSRLFSILTETTLSEYLRSRRLTEAAVILRDTDEKIIDVAFKFGYESSDSFGTAFKNFHGFTPSEVRNGKPFKLVSRVQLSLSVRGGRSMNITIQKKKAFTVAGINENSINSSLCSGIWGKLFSKVSHEEISKFGTGESVGVCHDILNLDNHDVLESNTISYMAGYIVNDGIKQEA

SEQ ID NO: 12096 - protein, 212 aa, Unknown
  Description of Unknown: Integrase A664 sequence
  SSF53041,PF00239,PS51736,SM00857,G3DSA:3.40.50.1390,PS00397
MENHEVMISIGDTAKELGVSVKTIRRWANAGKLRFERSPSGHRRFFLADIKRITPRDFNKLEDRVTINYARVSSHDQKDDLTRQIQVLEAFSGTNGWQFETIQDLGSGLNYNKKGLQKLLKRIMKGDVGRLVVTHKDRLLRFGSELVFAMCEEYETEVVIINKSAEEITFEQELVTDMIELITVFSARLYGSRSRKNKKLLDNVAKAVQESS

SEQ ID NO: 12097 - protein, 209 aa, Unknown
  Description of Unknown: Integrase A665 sequence
  SSF53041,PF00239,PS51736,SM00857,G3DSA:3.40.50.1390
MYSIGEFSRIIGVTRTTLRNWDKTNKLKPILLESGHRRYTDEHLSKIKHIDSDDKLNIVYCRESTKSQKKSLDLQIENIKQFCLKQGISIDKCISEFGSGLNFKRRGFLEILNLAINGKIDRLIIYYKDRLCRFGFEMFEELSKKYNFKIIVVDNTETKSRDKEFADDIIAIIHFFSMRLYESRTYKKNLKDAEESIQKSKRRNINRYK

SEQ ID NO: 12098 - protein, 209 aa, Unknown
  Description of Unknown: Integrase A666 sequence
  SSF53041, cd03768,PF00239,PS51736,SM00857,G3DSA:3.40.50.1390, PS00397,PTHR30461
MSISTNFPGIITSLSKALPGVKEPPLNRRTLYGYARVSSRVQHLKVQKDCLMSMGVKEKNIFTDKESGYKEDRKGLKSLCKKMGSGSILFIHATDRLFRHVGHYVKLIYDFNNRGIRIFTYSGQELSFYNEATLITGIQITLAQHERTVISLRTNAPTLERKSGRRKRLYSDKVLRLILEKRNNGQSIRSISRDVDIPSSTLHDLLKNL

SEQ ID NO: 12099 - protein, 207 aa, Unknown
  Description of Unknown: Integrase A667 sequence
  SSF53041,PF00239,PS51736,SM00857,G3DSA:3.40.50.1390,PS00397
MINLNFLGGKQTAKLLGVHQRTLYLWESKNKIETIRSPGGKRFYNVQKYLFDKGLSLDENNCIKKIEEIKTKENTRLKICYARVSSRSQKDDLERQKKLLREMYPSYELIEDVGSGINLIKRGLLKIIDHIIKGQIEELVIVHRDRLVRYGYDLLDYMIKKYSKGKITIINNKNEEISSEKKMVEDVLQIMNVFVAKMNGQRKYKKK

SEQ ID NO: 12100 - protein, 207 aa, Unknown
  Description of Unknown: Integrase A668 sequence
  SSF53041,PF00239,PS51736,SM00857,G3DSA:3.40.50.1390, PS00397
MLCYSSYMSKLSISEAAKLKGVSVSTLRRWETEGKLIPERTASGHRRYDLAQLLGIKPDLSYTIGYCRVSSHDQKEDLERQKQVVELFCAQNGWQFEIIEDLGSGLNYSKKGLKRLIRLIVDSKLERLVLTHKDRLLRFGSELIFSLCEHFGTEIVIINRTEDSTFEEDLAQDVLEIITVFSARLYGTRSHKNKKIIEELKEVAVRL

SEQ ID NO: 12101 - protein, 207 aa, Unknown
  Description of Unknown: Integrase A669 sequence
  SSF53041,PF00239,PS51736,SM00857,G3DSA:3.40.50.1390,PS00397
MLCYSSYMSKLSISEAAKLKGVSVSTLRRWETEGKLIPERTASGHRRYDLAQLLGIKPDLSYTIGYCRVSSHDQKEDLERQKQVVELFCAQNGWQFEIIEDLGSGLNYSKKGLKRLIRLIVDSKLERLVLTHKDRLLRFNSELIFSLCEHFGTEIVIINRTEDSTFEEDLAQDVLEIITVFSARLYGSRSHKNKKIIEELKEVAVRL

SEQ ID NO: 12102 - protein, 207 aa, Unknown
  Description of Unknown: Integrase A670 sequence
  SSF53041,PF00239,PS51736,SM00857,G3DSA:3.40.50.1390,PS00397
MLCYSSYMSKLSISEAAKLKGVSVSTLRRWETEGKLIPERTASGHRRYDLAQLLGIKPDLSYTIGYCRVSSHDQKEDLERQKQVVELFCAQNGWQFEIIEDLGSGLNYSKKGLKRLIRLIVDSKLERLVLTHKDRLLRFGSELIFSLCEHFGTEIVIINRTEDSTFEEDLAQDVLERITVFSARLYGTRSHKNKKIIEELKEVADRL

SEQ ID NO: 12103 - protein, 206 aa, Unknown
  Description of Unknown: Integrase A671 sequence
  SSF53041,cd03768,PF00239,PS51736,SM00857, G3DSA:3.40.50.1390,PTHR30461
MLIMKVLGYCRCSTNEEKQDIDRQIRDIKQLAKAHGHELSNKNIFTEYESGAKIDRIELNRMLDSLGEGDIIISTEVSRISRSTKQLINILELVKEKKNKLILGWFVVDCTKGSLDAMTEGMLKMMGVFAEMERAMTSDRVKSGMANAKAKGKNIGRPKTSIDSIPNIFLKHYSKYKNKEINISEFSRLCNMSRTTIYKYIKLLED

SEQ ID NO: 12104 - protein, 205 aa, Unknown
  Description of Unknown: Integrase A672 sequence
  SSF53041,PF00239,PS51736,SM00857,G3DSA:3.40.50.1390,PS00397
MDEYLGGKEASKILGVHQRTLMNWDRKGLIETKRTPGNKRLYNIKKFIGKNNYKLKCKSEECDIKVEEISQKINISYVRVSTYGQKDDLERQKIYMENKYPKNKIISDIGSGINFNRKGLLKIIELAVAGKINKIYIAHKDRLARFGYELIDFIVKKYSKGEIIIINKEEEIEPEEEMVKDILQIMNVFTAKMNGLRKYKKSKYL

SEQ ID NO: 12105 - protein, 202 aa, Unknown
  Description of Unknown: Integrase A673 sequence
  SSF53041,PF00239,PS51736,SM00857,G3DSA:3.40.50.1390,PS00397
MSKLTISEAAKLKGVSVSTLRRWESEGKLIPERTVNGHRRYTISQLLGVKENLSYTVGYCRVSSHDQKKDLERQKEVVELFCAQNGWQVEIIDDLGSGLNYNKKGLKRLIRLIVDSKVERLVLTHKDRLLRFGSELIFSLCEQFGTEVVIINRTEDSTFEEDLAQDVLEIITVFSARLYGSRSHKNRKIVEELRDVATRIQD

SEQ ID NO: 12106 - protein, 202 aa, Unknown
  Description of Unknown: Integrase A674 sequence
  SSF53041,cd03768,PTHR30461:SF3,PF00239,PS51736, SM00857,G3DSA:3.40.50.1390,PS00397,PS00398,cd00569, PTHR30461,SSF46689,PF02796
MAILIGGGAVSEGQLLGYARVSTDHQSLDQQTDALTAAGVDVGRVYSDRFTGASTSEQRPGLAALLDYAREGDVIVVVGIDRLGRNAAEVMLTIRDLGQRGIVLRSLREGIDTSNATGRMIAGVLASLAELELELQRERRAAAIAARKARNIPVGRPRVLRPDQVALAKRMRDAGEPVPVIAETLGVSRATLYRTLAEDGSK

SEQ ID NO: 12107 - protein, 200 aa, Unknown
  Description of Unknown: Integrase A675 sequence
  SSF53041,PF00239,PS51736,SM00857,G3DSA:3.40.50.1390,PS00397
MNDKLIPRREVLETLKIHYQTLNNMVKRKEIEVVKIGTKYVYNLDKYLRVHGIQKLNKKKLCYCRVSSYKQKEDLDRQIKYMSDKFPTYELIKDIGSSLNFERQGLQKILDYAIKGEVEELVIAYKDRLARIGYELIELMITKYSNGKIIILEKSEEETPDEELVKDILSIMNVYVAKINGLRKYKTLIKKEIMDKQPKK

SEQ ID NO: 12108 - protein, 199 aa, Unknown
  Description of Unknown: Integrase A676 sequence
  SSF53041,PF00239,PS51736,SM00857,G3DSA:3.40.50.1390
MELMSIGKFAKRVGVNVVTLRRMEAKGEFLPAHVSSGGTRYYSTDQLKYFGKKRNAHKLAVGYCRVNTPSQKDDLENQVNNVKSYMIAKGYQFEIIKDIGSGINYKKKGLKELIDKINNQEVSRVVILYKDRLIRFGFELIEYLCQINNVELEIIDHSEKSKEEELTDDLIQIITVFANRLYGQRSKKTKRLIEEVKKQ

SEQ ID NO: 12109 - protein, 199 aa, Unknown
  Description of Unknown: Integrase A677 sequence
  SSF53041, cd03768,PF00239,PS51736,SM00857,G3DSA:3.40.50.1390, PS00397,PTHR30461
MLVGYARVSTKSQSLQPQIDALENEGVERIFTDVASGADPEREGLAEAFEFMRSGDTFVVFRLDRFGRSLKDLLKRIEQLEERGVEFRSIADGLRTDSASGKLVFHVVGAIAQFERNLIKQRTREGLDAARAEGRVGGRKKAIQYSDMPILSRLIRADDVTTEQIAERFDVTRKTIYAYVAPDGTWRDEEYIRRREREQ

SEQ ID NO: 12110 - protein, 199 aa, Unknown
  Description of Unknown: Integrase A678 sequence
  G3DSA:1.10.10.60,SSF46689
MIRVNDEAFKRATSCDLQYDSAELRYVGMSNPIVSRIATTVAISLVQHPPCALLVDSLATTLSIAVLNEITGRPRKEMSGALCPKRKQRVIEYIEANIGDPITLSELASVAALSPHHFSRSFRRTFGVSPVRYVWTRRIDMAKRLMRYSALPLAAVALTCGFSSQSHFSTAFRVATGVTPAAYMRTITDIARPRDSRAT

SEQ ID NO: 12111 - protein, 199 aa, Unknown
  Description of Unknown: Integrase A679 sequence
  SSF53041,PF00239,PS51736,SM00857,G3DSA:3.40.50.1390
MKNIGNSYKTRKTACEMLGISYPTLYKLAEKGEIDTIMIGKQQLYNVNTYFTKIKSINPNKKNICYCRVLNKKHKNDLNEQIKSMTSLYPDYEIISDIGSGMDYERAGLMKILDYAIKGEIENVVISNKDKLVKFGYELIENIIKLYSNGKIVVLNTPNETTQPDEISKEITAILNAYPATTGLKKHKQALIDELTNKK

SEQ ID NO: 12112 - protein, 199 aa, Unknown
  Description of Unknown: Integrase A680 sequence
  SSF53041,PF00239,PS51736,SM00857,G3DSA:3.40.50.1390, PS00397
MDKYISRKEVLSVLKIHYHTLYRMIDRNEIQTVKVGSKILFNLDKYLRDQGIKTQKRKICYCRVSSSKQKEDLLRQIKYMKTKYPSYEIISDIGSSLNFERKGLQEIIDIAIKGDIDVLVITYKDRLARIGYELIESIIQRYSNGKIEIINSSEEETPEEEMTKDIITIMNVYVAKINGLRKYKKKLTDTIKNGKNNIK

SEQ ID NO: 12113 - protein, 199 aa, Unknown
  Description of Unknown: Integrase A681 sequence
  SSF53041,PF00239,PS51736,SM00857,G3DSA:3.40.50.1390,PS00397
MKSKEVLQLLGVSRVTLYKYVKNGTIKVTELDNGTYDYDQKSVFKLMKKDNRKNVLYARVSTYKQKNDLENQVQQLIDYCTKEEIKYDNVYKEISSGIDLNRTEFSKILDDIIHYRIANIYITYKDRLTRLSFTTLETIFQKFGTQIIIINNLDIDKNNDNEVFDELISLIHIFSTSMYSNRRKRKLHIVNKDLELFDE

SEQ ID NO: 12114 - protein, 198 aa, Unknown
  Description of Unknown: Integrase A682 sequence
  SSF53041,cd03768,PTHR30461:SF3,PF00239,PS51736, SM00857,G3DSA:3.40.50.1390,PS00397,PS00398, PTHR30461,SSF46689
MVKSKGCIFMIFGYCRVSSKVQIDNNSLEQQEQEIKRHYSDAKIFREQHTGSTTHRPIFEEMVKQMRDGDKLVVTKLDRLARNATEGINLIQNLFDSGISVHVLNVGLLENTTLGKFFITTLLAVAEMERNLILERTFAGKEIAKQNPNFREGRPKKYTKMQMEHALELLKTNSYTQVERMTGISKSTLQRAKRKQED

SEQ ID NO: 12115 - protein, 198 aa, Unknown
  Description of Unknown: Integrase A683 sequence
  SSF53041,PF00239,PS51736,SM00857,G3DSA:3.40.50.1390, PS00397
MSKYITGKKASEMLKVHQRTLHNWDRKGIIDTIRGPGGRRLYNVKKYLEEYEDDIDIDTEEDEQEDNEKMKIAYVRVSTHGQKDDMQRQIKYMKKHYPNHKIIQDIGSGINFNRKGLRKIIKWAIEGNVKELVVAYKDRLTRFGFELIEDLIKEYSGGTIKIINKEKEIEPEIELAKDVLQIMNVFTAKMNGMRKYKS

SEQ ID NO: 12116 - protein, 197 aa, Unknown
  Description of Unknown: Integrase A684 sequence
  SSF53041,cd03768,PTHR30461:SF3,PF00239,PS51736, SM00857,G3DSA:3.40.50.1390,PS00397,PS00398, cd00569, PTHR30461,G3DSA:1.10.10.60,SSF46689,PF02796
MLIGYVRVSTNDQNTDLQRNALVCAGCEQIFEDKLSGTRTDRPGLKRALKRLQKGDTLVVWKLDRLGRSMKHLISLVGELRERGINFRSLTDSIDTSSPMGRFFFHVMGALAEMERELIIERTMAGLAAARNKGRIGGRPPKLTKAEWEQAGRLLAQGIPRKQVALIYDVALSTLYKKHPAKRTHIENDDRINQIDR

SEQ ID NO: 12117 - protein, 197 aa, Unknown
  Description of Unknown: Integrase A685 sequence
  cd00569,G3DSA:1.10.10.60
MITYTCDSCTAPITGPVRLSANDGGEKHFCSPICLSVWWNGQGHGEAHKPIEPRRPQPPAQPRTRRARPLTPEQDTEILRRYNDGEPVPALAAEFDVAQPTIYKALTRARSAAPQARDALAEVVGLTRQVVDRVVAAPTPVAKPAPQQRKLTAPVTARCRDCPRTWNLTGRVLKMTIDLHEHQRGHVVDVEEGALDA

SEQ ID NO: 12118 - protein, 197 aa, Unknown
  Description of Unknown: Integrase A686 sequence
  SSF53041,cd03768,PTHR30461:SF3,PF00239, PS51736,SM00857,G3DSA:3.40.50.1390,PS00397,PS00398, cd00569,PTHR30461,G3DSA:1.10.10.60,SSF46689,PF02796
MLIGYVRVSTNDQNTELQRNALECAGCELIFEDKISGTKSDRPGLKKLLRTLSEGDTLVVWKLDRLGRNMRHLVILVEELRERGVNFRSLTDAIDTSTPMGRFFFHVMGALAEMERELIVERTRAGLEAARAKGRIGGRRPKLSTSEWEQAGRLLAAGESRQRVALIFDIGLSTLYKKFPSSATKNKLCHPLTNRDK

SEQ ID NO: 12119 - protein, 197 aa, Unknown
  Description of Unknown: Integrase A687 sequence
  G3DSA:1.10.10.60,SSF46689
MGRFLEKHNHPSVKEMLVEARMGHAKHLLSLDMINPLTIHDEVGYGARASFERRFKDYTGMSPTDYRKSIICKVKDGDRETYPKRINEVTQNELRKYLIRHFREPELTLTRVQDDFNLSKEEVQEIMKIVYDSTFEERLVTMRLEEAAKLLFKPKLTPRQIATECGFVSYHYFVVQFTKRYDVGPKQYRQLKLINAI

SEQ ID NO: 12120 - protein, 196 aa, Unknown
  Description of Unknown: Integrase A688 sequence
  SSF53041,cd03768,PF00239,PS51736,SM00857, G3DSA:3.40.50.1390,PS00397,PS00398,PTHR30461
MLYGYARVSTQEQETHAQTDALAKAGVGFIFAEKRSGGSMSQRPQLEALLQQLSPGDTVVVYKLDRIARSLKDLLTIIERIEEKGAQFRSLTESLDTSTPAGRMIFHIVGAFAEFERELIRERTRVGMAAAAKRGVKLGRHYAMSREDEAEALRMWYSGQWTKTAIARQFNTHISSVKRAIKRHEVSLQTSLLDAA

SEQ ID NO: 12121 - protein, 196 aa, Unknown
  Description of Unknown: Integrase A689 sequence
  SSF53041,cd03768,PF00239,PS51736,SM00857, G3DSA:3.40.50.1390,PS00397, PS00398,PTHR30461
MLYGYARVSTQEQETHAQTDALFRAGVGFIFSEKRSARSTVGRPQLEKLLRTLKPGDQVIVYKLDRIARSLKDLLRIIERIEEKGAQFRSITESLDTTTPAGRMLFHMVGAFAEFERELIRERTIAGMEAAVRRGVKLGRHYAMSREDEAEALRLWHQGTMTKSAIARMYGVHMSSIKRAIKRHQESVQPSLLDAA

SEQ ID NO: 12122 - protein, 196 aa, Unknown
  Description of Unknown: Integrase A690 sequence
  SSF53041,cd03768,PF00239,PS51736,SM00857, G3DSA:3.40.50.1390,PS00397,PS00398,PTHR30461
MLYGYARVSTQEQETHAQTDALSKAGVGFIFSEKKSGGTTAGRPELEKMLRILKHGDQVVVYKLDRIARSLKDLLRIIERIEEKGAQFRSLTESLDTTTPAGRMLFHMVGAFAEFERELIRERTRAGMAAAVQRGVKLGRHYALSPEDEAEALRLWFAGQMTKTAIARQFGTHISSIRRAIKRHQERQQPSLLDAA

SEQ ID NO: 12123 - protein, 196 aa, Unknown
  Description of Unknown: Integrase A691 sequence
  SSF53041,PF00239,PS51736,SM00857,G3DSA:3.40.50.1390,PS00397
MKPAEFSNRIGVSEQTLRNWDKSGKLIAKRTKGNHRFYTEDDYNDYMGISNKNQKKSYIYARVSTRNQKDDLEDQIDFLRQYTNAKGIIVDDCLTDIGSGMNYKREKWNELLDMVMQDKVDNIYVSYKDRFVRFGFEWFEQLCKKHQTNLIVVNNEETSPNQEVVDDLIAIIHVFSCRVYGLRKYKKKVGDDFKCK

SEQ ID NO: 12124 - protein, 195 aa, Unknown
  Description of Unknown: Integrase A692 sequence
  SSF53041,cd03768,PTHR30461:SF3,PF00239, PS51736,SM00857,G3DSA:3.40.50.1390,PS00397, PS00398,cd00569,PTHR30461,G3DSA:1.10.10.60, SSF46689,PF02796
MLIGYVRVSTNDQNTDLQRNALVCAGCEQIFEDKLSGTKTDRPGLKRALKRLQKGDTLVVWKLDRLGRSMKHLISLVGELRERGINFRSLTDSIDTSSPMGRFFFHVMGALAEMERELIVERTLAGLAAARARGRTGGRRPKLTKEQHEQIARLIKNGHDRKQLAIIYGIGTSTIYRYHPAGESSGTIEKSQKTK

SEQ ID NO: 12125 - protein, 195 aa, Unknown
  Description of Unknown: Integrase A693 sequence
  SSF53041,cd03768,PF00239,PS51736,SM00857, G3DSA:3.40.50.1390,PTHR30461,G3DSA:1.10.10.60,SSF46689,PF02796
MIVMAKVGYRRVSSRDQHLDRQLSGVALDKMFDEKCSAKTVNRPVWQDCLNYLREGDELHIHSLDRVCRSGAGDAVKIVESLTAKGITVEFHKEGMRFNNVMTATQKGVLAIIASIAQMERELIAERREEGIIKAKEKGKKFGRPRAEVSVEEIMALRNQGLSMDAIARRLAVGRATLYRIINVTTEDHHGNACF

SEQ ID NO: 12126 - protein, 195 aa, Unknown
  Description of Unknown: Integrase A694 sequence
  SSF53041,PF00239,PS51736,SM00857,G3DSA:3.40.50.1390,PS00397
MSKYVSGKKASEILKVHQRTLHNWDRKGIIDTIRGPGGRRLYNVKKYLEEYEDDVDIISDDEENDDKLKIAYVRVSTNEQKDDLQRQIKYMKKHYPNHKIIEDIGSGINFNRKGLRKIIKWAIEGKIKEVVVAYKDRLTRFGFELIEDLIKEYSEGKIKVINKENKEEPEIELAKDVLQIMNVFTAKMNGLRKYK

SEQ ID NO: 12127 - protein, 194 aa, Unknown
  Description of Unknown: Integrase A695 sequence
  SSF53041,PF00239,PS51736,SM00857,G3DSA:3.40.50.1390,PS00397
MLRPKEVCQRLGISYATLREYVKKGYIKPVILQSGKWRFKEEDVERLMGIVRKRKVVLYARVSSNTQKDDLINQVKYLEENVKDYDQVITDIGSGLNMKRKGFIKLLKMILNNEVSKVVVAYPDRLVRFGFEILEEVCKAHNCEIVVINKEDKTPEQELIEDLISILVSFSGKLYGMRSHKYEKVKKCVEELKA

SEQ ID NO: 12128 - protein, 194 aa, Unknown
  Description of Unknown: Integrase A696 sequence
  SSF53041,PF00239,PS51736,SM00857,G3DSA:3.40.50.1390, PS00397
MLKPKEVCQKLGISYRTLQSYVKKGYIKPVILQSGKWRFKEEDVERLMGVVRKRKVVLYARVSSNTQKDDLINQVKYLEENVKDYDQVITDIGSGLNMKRKGFLKLLRMILNNEVSKVVIAYPDRLVRFGFEIIEEACKAHNCELVVLNKEDKTPEQELIEDLISILVSFSGKLYGMRSHKYEKVKKCVEELKA

SEQ ID NO: 12129 - protein, 193 aa, Unknown
  Description of Unknown: Integrase A697 sequence
  SSF53041,cd03768,PTHR30461:SF3,PF00239,PS51736, SM00857,G3DSA:3.40.50.1390,PS00397,PS00398, cd00569, PTHR30461,G3DSA:1.10.10.60,SSF46689,PF02796
MLIGYVRVSTNDQNTDLQRNALVCAGCEQIFEDKLSGTRTDRPGLKRALKRLQKGDTLVVWKLDRLGRSMKHLISLVGELRERGINFRSLTDSIDTSSPMGRFFFHVMGALAEMERELIIERTMAGLAAARNKGRIGGRPPKLTKAEWEQAGRLLAQGIPRKQVALIYDVALSTLYKKHPAKRAHIENDDRIN

SEQ ID NO: 12130 - protein, 193 aa, Unknown
  Description of Unknown: Integrase A698 sequence
  SSF53041,cd03768,PTHR30461:SF3,PF00239,PS51736, SM00857,G3DSA:3.40.50.1390,PS00397,PS00398,cd00569, PTHR30461,G3DSA:1.10.10.60,SSF46689,PF02796
MQYGYARVSTFDQNLELQLEALRSSGCDRIFEDKISGAKSKRPGLDKLIKVLRPGDTVVVWKLDRMGRSLIHLVELLNFFLSNNIEFISVTEGIKISTSIGRFAYTMLSAAAELERENIIERTRAGLAVARANGRIGGRRSKLTPEQWEQAGRLLAQGVPRKQVALIYDVALSTLYKKHPAKRTCIESNAQTN

SEQ ID NO: 12131 - protein, 193 aa, Unknown
  Description of Unknown: Integrase A699 sequence
  G3DSA:1.10.10.60,SSF46689
MSDKSKRTFNRWTSSEEELLKKLYKKNITLNDIADFFPNRTNKQVRAKYDYMFKTKKKHVKPSKRWSEEEEQILKDNYDIEWPELMKLLPRRSRTSIKKKLFQLDLHRPTRKITEEIEERIIELAKTHATSDIVKLTNLSNKSVYDVLNKYNVKAVNKNQWIATDVDIEDEIDLSVTFTLNKNGIRGGIIDEN

SEQ ID NO: 12132 - protein, 193 aa, Unknown
  Description of Unknown: Integrase A700 sequence
  G3DSA:1.10.10.60,SSF46689
MPHQILTSEKIVQAGVNIIEADKVLTFSTIAHNLGTHSQALYVYFDSQKQLSYAIVGWAVTQVIESLKTKVFGHSGKQAIIIFATELRSIALKHIQLSRFVLTVQRDDQNPEVQTAFENLRDLLHRLINSIFYDSDNRILASRCIRDLIVGDILNVGSGWFADPTISPDDSFQESLNLCLTIIIQNENKNKNK

SEQ ID NO: 12133 - protein, 191 aa, Unknown
  Description of Unknown: Integrase A701 sequence
  SSF53041,PF00239,PS51736,SM00857,G3DSA:3.40.50.1390, PS00397
MPKYVRRKEVLEVLKVHYQTLYRMEEKGLIEVKRTNGGHRLYNLEKYLRDNGLDNKEKKGVCYCRVSSKKQIKDLNRQVEYMEKKYPDYMIIKDIGSGINMERKGLLQLIRMAIDGEISEVVVTYKDRLVRFGFELIEWIIKTYSNGQIKIIHKREEETPEEEITRDILQIMNVYVAKINGKRSGKLKAKK

SEQ ID NO: 12134 - protein, 191 aa, Unknown
  Description of Unknown: Integrase A702 sequence
  SSF53041,PF00239,PS51736,SM00857,G3DSA:3.40.50.1390,PS00397
MPKYVRRKEVLEVLKVHYQTLYRMEEKGLIEVKRTNGGHRLYNLEKYLRDNGLDNKEKKGICYCRVSSKKQIKDLNRQVEYMEKNYPEYEIIKDIGSGINMERKGLLQLIQMAIDGEISEVVVTYKDRLARFGFELIEWIIKTYSNGQIKIIHKREEETPEEEITRDILQIMNVYVAKINGKKSGKLKAKK

SEQ ID NO: 12135 - protein, 191 aa, Unknown
  Description of Unknown: Integrase A703 sequence
  SSF53041,PF00239,PS51736,SM00857,G3DSA:3.40.50.1390,PS00397
MPKYVRRKEVLEVLKVHYQTLYRMEEKGLIEVKRTNGGHRLYNLEKYLRDNGLDNKEKKGICYCRVSSKKQIKDLNRQVEYMEKNYPDYKIIKDIGSGINMERKGLLQLVRMAIDGEISEVVVTYKDRLARFGFELIEWIIKTYSGGQIKIIHKREEETPEEEITRDILQIMNVYVAKINGKISGKLKAKK

SEQ ID NO: 12136 - protein, 191 aa, Unknown
  Description of Unknown: Integrase A704 sequence
  G3DSA:1.10.10.60,SSF46689
MRKRWNKEEDKELLSYILKFVEEGNSLREAVKLASEEINRTFESCYARWNNFLRIEYEDRLETAKSSAKENGNVFYEKWTSDDDEMLADIILNEISNGSSTRKAVNASAKKLNRSFTSCYNRWQTVVSKRFEQKFVFKDCENESNNDLENLKERFLLLENNFHNVLEQNEKIIAQNEELFKMLQKEKGTNS

SEQ ID NO: 12137 - protein, 191 aa, Unknown
  Description of Unknown: Integrase A705 sequence
  SSF53041,PF00239,PS51736,SM00857, G3DSA:3.40.50.1390,PS00397
MPKYVRRKEVLEVLKVHYQTLYRMEEKGLIEVKRTNGGHRLYNLEKYLRDNGLDNKEKKGICYCRVSSKKQIKDLNRQVEYMEKNYPEYEIIKDIGSGINMERKGLLQLIRMAIDGEISEVVVTYKDRLARFGFELIEWIIKTYSNGQIKIIHKREEETPEEEITRDILQIMNVYVAKINGKRSGKLKAKK

SEQ ID NO: 12138 - protein, 191 aa, Unknown
  Description of Unknown: Integrase A706 sequence
  SSF53041,PF00239,PS51736,SM00857,G3DSA:3.40.50.1390,PS00397
MPKYVRRKEVLEVLKVHYQTLYRMEEKGLIEVKRTNGGHRLYNLEKYLRDNGLHNKEKKGICYCRVSSKKQIKDLNRQVEYMEKNYPEYEIIKDIGSGINMERKGLLQLIRMAIDGEISEVIVTYKDRLARFGFELIEWIIKTYSNGQIKIIHKREEETPEEEITRDILQIMNVYVAKINGKISGKLKAKK

SEQ ID NO: 12139 - protein, 190 aa, Unknown
  Description of Unknown: Integrase A707 sequence
  SSF53041,PF00239,PS51736,SM00857,G3DSA:3.40.50.1390,PS00397
MSKYMGGKEASSVLGVHQRTLYQWDKKGWIKTIRTKGGKRLYDVGSYLADKDEESKEDHKLSICYVRVSSNSQKDDLERQIKFMKKKYPNHTIIKDISSGINMNRKGLNKIIDLAIEGRIKEVVVAYKDRLAIFGFSLIERLIETYSDGKIVVVRKKENQEPQEELIEDMMDVMNVFTARRNGSRKYSNK

SEQ ID NO: 12140 - protein, 190 aa, Unknown
  Description of Unknown: Integrase A708 sequence
  SSF53041,PF00239,PS51736,SM00857,G3DSA:3.40.50.1390, PS00397
MSKYMGGKEASSVLGVHQRTLYQWDKKGWIKTIRTKGGKRLYDVGSYLADKDEESKEDHKLSICYVRVSSNNQKDDLERQIKFMKKKYPNHTIIKDISSGINMNRKGLNKIIDLAIEGRVKEVVVAYKDRLARFGFSLIERLIEKYSDGKIVVVRKKENQEPQEELMEDMMDVMNVFIARRNGLKKYSNK

SEQ ID NO: 12141 - protein, 190 aa, Unknown
  Description of Unknown: Integrase A709 sequence
  SSF53041,PF00239,PS51736,SM00857,G3DSA:3.40.50.1390,PS00397
MSKYMGGKEASSVLGVHQRTLYQWDKKGWIKTIRTKGGKRLYDVGSYLADKDEESKEDHKLSICYVRVSSNSQKDDLERQIKFMKKKYPNHTIIKDISSGINMNRKGLNKIIDLAIEGRVKEVVVAYKDRLARFGFSLIERLIEKYSDGKIVVVRKKENQEPQEELMEDMMDVMNVFTARRNGSRKYSNK

SEQ ID NO: 12142 - protein, 189 aa, Unknown
  Description of Unknown: Integrase A710 sequence
  SSF53041,cd03768,PTHR30461:SF3,PF00239,PS51736, SM00857,G3DSA:3.40.50.1390,PS00397,PS00398, PTHR30461,SSF46689
MIFGYCRVSSKVQIDNNSLEQQEQEIKRHYSDAKIFREQHTGSTTHRPIFEEMVNQMRDGDKLVVTKLDRLARNATEGINLIQNLFDSGISVHVLNVGLLENTTLGKFFITTLLAVAEMERNLILERTFAGKEIAKQNPNFREGRPKKYTKMQMEHALELLKTNSYTQVEKMTGISKSTLQRAKRKQED

SEQ ID NO: 12143 - protein, 188 aa, Unknown
  Description of Unknown: Integrase A711 sequence
  SSF53041,PF00239,PS51736,SM00857,G3DSA:3.40.50.1390
MTKYVRRKEVLDVLKVHYQTLYRMEEKGLIDVKRTNGGHRLYNLDKYLRVNGLNKKEKINVCYCRISSKKQSSDLDNQIYYMKKKYPNHLIIKDIGSGINMERPGLKKLIKMAIDGELNEVVIAYKDRLARFGYELIEWIINTYSSGEIKIINKKEEETPEEEITKDILQIMNVYVAKINGRRKYKNK

SEQ ID NO: 12144 - protein, 186 aa, Unknown
  Description of Unknown: Integrase A712 sequence
  SSF53041, cd03768,PF00239,PS51736,SM00857,G3DSA:3.40.50.1390, PS00397,PS00398,cd00569,PTHR30461,SSF46689, PF02796
MQGHRIGYVRVSSFDQNPERQLEQTQVSKVFTDKASGKDTQRPQLEALLSFVREGDTVVVHSMDRLARNLDDLRRLVQKLTQRGVRIEFLKEGLVFTGEDSPMANLMLSVMGAFAEFERALIRERQREGIALAKQRGAYRGRKKALSDEQAATLRQRATAGEPKAQLAREFNISRETLYQYLRTDD

SEQ ID NO: 12145 - protein, 186 aa, Unknown
  Description of Unknown: Integrase A713 sequence
  SSF53041,cd03768,PF00239,PS51736,SM00857, G3DSA:3.40.50.1390,PS00397,PS00398,cd00569,PTHR30461, G3DSA:1.10.10.60,SSF46689,PF02796
MTGQRIGYIRVSTFDQNPERQLEGVKVDRAFSDKASGKDVKRPQLEALISFARTGDTVVVHSMDRLARNLDDLRRIVQTLTQRGVHIEFVKEHLSFTGEDSPMANLMLSVMGAFAEFERALIRERQREGIALAKQRGAYRGRKKSLSSERIAELRQRVEAGEQKTKLAREFGISRETLYQYLRTDQ

SEQ ID NO: 12146 - protein, 186 aa, Unknown
  Description of Unknown: Integrase A714 sequence
  SSF53041,cd03768,PTHR30461:SF3,PF00239, PS51736,SM00857,G3DSA:3.40.50.1390,PS00397, PS00398,PTHR30461,G3DSA:1.10.10.60,SSF46689, PF02796
MLIGYVRVSTNEQNTALQRNALESAGCELIFEDKASGKKAERPGLKKVLRMLSRGDTLVVWKLDRLGRSMRHLVVLVEELRDRGINFRSLTDSIDTSTPMGRFFFHVMGALAEMERELIVERTRAGLDAARAEGRIGGRRPKYQEETWQQMRRLLEKGIPRKQVAIIYDVAVSTLYKKFPASSFQS

SEQ ID NO: 12147 - protein, 186 aa, Unknown
  Description of Unknown: Integrase A715 sequence
  SSF53041,cd03768,PTHR30461:SF3,PF00239,PS51736, SM00857,G3DSA:3.40.50.1390,PS00397,PS00398,PTHR30461, G3DSA:1.10.10.60,SSF46689,PF02796
MLIGYVRVSTNEQNTALQRNALESAGCELIFEDKASGKQTERPGLKKVLRMLSRGDTLVVWKLDRLGRSMRHLVVLVEELRDRGINFRSLTDSIDTSTPMGRFFFHVMGALAEMERELIVERTRAGLDAARAEGRIGGRRPKYQEETWQQMRRLLENGIPRKQVAIIYDVAVSTLYKKFPASSFQS

SEQ ID NO: 12148 - protein, 186 aa, Unknown
  Description of Unknown: Integrase A716 sequence
  SSF53041,cd03768,PF00239,PS51736,SM00857, G3DSA:3.40.50.1390,PS00397,PTHR30461
MNIAYVRVSTVEQNEERQLEGLKKYNIEKWFTEKISAKDTNRPQLKAMLEFAREGDTIFVWDFSRLARSTKDLLELVETMEAKGVHFKSIKENLDTSTPTGKLMLTMIGAINEFERNNMLERQREGIAIAKAKGKYKGRKEVNIENFEEHYNRYMKREVSKSALAKELNISRPTLDKLIKEHEEKE

SEQ ID NO: 12149 - protein, 186 aa, Unknown
  Description of Unknown: Integrase A717 sequence
  SSF53041,PF00239,PS51736,SM00857,G3DSA:3.40.50.1390
MGISYRRAWQMYKDGKLPNARQLPTGTIVVIEENEKTIPAPNAVAIYARVSSHENKNNLESQAKRLEDYAIAKGYQIKHVVKEIGSGVNDTRPKLIKLLKQNDYSILLVEHKDRLTRFGFNYLRLLCELQGKQIEVVNSSEEEKEDIVQDFVSVIYSFSAKLYGLRRAKRKTEKIIKEITEEKEDE

SEQ ID NO: 12150 - protein, 186 aa, Unknown
  Description of Unknown: Integrase A718 sequence
  SSF53041, PF00239,PS51736,SM00857,G3DSA:3.40.50.1390,PS00397
MFATLRDAKKHYQCNHKTIWKWADEGIIRTVDTPGGQRRYELTERSKPEKTNYCYCRVSSAKQYDDLERQVESMRTEFPGYRIITDIGSGINWKRKGLKTILESAMHGTCGRVVVAHRDRIARFGFELVEWILRANGADLVVQHKDVDASPATELAEDIIAITTVFACKHYGKRRYAKKSDDIPKS

SEQ ID NO: 12151 - protein, 186 aa, Unknown
  Description of Unknown: Integrase A719 sequence
  SSF53041,cd03768,PTHR30461:SF3,PF00239, PS51736,SM00857,G3DSA:3.40.50.1390,PS00397, PS00398,PTHR30461,G3DSA:1.10.10.60,SSF46689, PF02796
MLIGYIRVSTNDQNTALQRNALESAGCELIFEDKASGKKAERPGLKKVLRILSRGDTLVVWKLDRLGRSMRHLVVLVEELRDRGINFRSLTDSIDTSTPMGRFFFHVMGALAEMERELIIERTRAGLDAARAEGRIGGRRPKYQEETWQQMRRLLEKGIPRKQVAIIYDVAVSTLYKKFPASSFQS

SEQ ID NO: 12152 - protein, 186 aa, Unknown
  Description of Unknown: Integrase A720 sequence
  SSF53041,cd03768,PTHR30461:SF3,PF00239,PS51736, SM00857,G3DSA:3.40.50.1390,PS00397,cd00569,PTHR30461, G3DSA:1.10.10.60,SSF46689,PF02796
MAVIGYIRVSTTDQNSDLQRNALISINCDQIFEDKMSGKTAVRPGLKRALKAVQPGDTLAVWKLDRLGRSVKNLIALISDLHERGAHFRSLTDSIDTSTAMGRFFFHVMSALAEMERELIVERTLAGLAAARAQGRVGGRPAALTQNDREQIGRLLDKGYYRQQLAIIYGVGVSTIYRYFPASKKS

SEQ ID NO: 12153 - protein, 186 aa, Unknown
  Description of Unknown: Integrase A721 sequence
  SSF53041,PF00239,PS51736,SM00857,G3DSA:3.40.50.1390,PS00397
MPKYLGGKQTSEILGVHQRTLYQWEKKGWIKTVRTNGGKRLYDIEPYLKQKEAEKEKLNICYVRVSSNGQKNDLERQIKYMKKKYPQHIIIKDIASGINLNRKGLNKIIDLAIEGKINELVVAYKDRLTRFGFKMIERIIEKYSNGKIKIINKHNIKEPKEELIEDVLQVMNVFVAKMNGMRKYKN

SEQ ID NO: 12154 - protein, 185 aa, Unknown
  Description of Unknown: Integrase A722 sequence
  SSF53041,cd03768,PTHR30461:SF3,PF00239,PS51736, SM00857,G3DSA:3.40.50.1390,PS00397,PS00398,PTHR30461, G3DSA:1.10.10.60,SSF46689,PF02796
MRLFGYARVSTSQQSLDLQVRALKDAGVKANRIFTDKASGSSTDREGLDLLRMKVEEGDVILVKKLDRLGRDTADMIQLIKEFDAQGVAVRFIDDGISTDGDMGQMVVTILSAVAQAERRRILERTNEGRQEAKLKGIKFGRRRTVDRNVVLTLHQKGTGATEIAHQLSIARSTVYKILEDERAS

SEQ ID NO: 12155 - protein, 185 aa, Unknown
  Description of Unknown: Integrase A723 sequence
  SSF53041,cd03768,PTHR30461:SF3,PF00239, PS51736,SM00857,G3DSA:3.40.50.1390,PS00397, PS00398,cd00569,PTHR30461,G3DSA:1.10.10.60, SSF46689,PF02796
MQIGYVRVSTNDQNTDLQRNALNCAGCELIFEDKISGTKSERPGLKKLLRTLSEGDTLVVWKLDRLGRSMRHLVVLVEELRERGINFRSLTDSIDTSTSMGRFFFHIMGALAEMERELIVERTRAGLAAARAQGRVGGRRPKLTPEQWEQAGRLLAAGETRHRVGLLFDVSISTLYKKFPVNQSR

SEQ ID NO: 12156 - protein, 185 aa, Unknown
  Description of Unknown: Integrase A724 sequence
  SSF53041,cd03768,PF00239,PS51736,SM00857, G3DSA:3.40.50.1390,PTHR30461
MVVGYMRVSTAEQNEDRQLVTMKKHNVEKKYQEKISAKDTKRSQLNAMLDFVREGDTIIVHDFSRLARSTKDLLEIVELLEKKHVKLISDKENLDTSTPTGKLMLTMLGAIYEFERTNMLERQREGIAIAKEQGKYKGRKEVKIENFGSYYDRYKTRELNKTQLAKELGVSRPTLDRLIKSHESN

SEQ ID NO: 12157 - protein, 185 aa, Unknown
  Description of Unknown: Integrase A725 sequence
  SSF53041,PF00239,PS51736,SM00857,G3DSA:3.40.50.1390
MRSKDVLKILNVTRVTLTTYVKTGKIKVTKLANGYYDYDDKSIYDFIGHNKKINIIYTRVSTNKQKYDLQRQIDYLNKYCSKNNIIVGKTYSEISSGIDLDRNEFSSMLDDIFKYKVDKIIITDKDRLTRLSFITLENIFKQFGTSIVVASSKKNNDNNELFDELISIMHLFSTKEYSRRKNKKI

SEQ ID NO: 12158 - protein, 185 aa, Unknown
  Description of Unknown: Integrase A726 sequence
  SSF53041,PF00239,PS51736,SM00857,G3DSA:3.40.50.1390
MRSKDVLKILNVTRVTLTTYVKTGKIKVTKLANGYYDYDDKSIYDFIGHNKKINIIYTRVSTNKQKYDLQRQIDYLNKYCLKNNIIVGKTYSEISSGIDLDRNEFSSMLDDIFKYKVDKIIITDKDRLTRLSFITLENIFKQFGTSIVVASSKKNNDNNELFDELISIMHLFSTKEYSRRKNKKI

SEQ ID NO: 12159 - protein, 185 aa, Unknown
  Description of Unknown: Integrase A727 sequence
  SSF53041,cd03768,PTHR30461:SF3,PF00239, PS51736,SM00857,G3DSA:3.40.50.1390,PS00397, PS00398,cd00569,PTHR30461,G3DSA:1.10.10.60, SSF46689,PF02796
MQIGYVRVSTNDQNTDLQRNALNCAGCELIFEDKISGTKAERPGLKKLLRTLSEGDTLVVWKLDRLGRSMRHLVVLVEELRERGINFRSLTDSIDTSTPMGRFFFHIMGALAEMERELIVERTRAGLAAAREQGRIGGRRPKLTPEQWEQAGRLLAAGETRHRVGLLFDVSISTLYKKFPVNQSR

SEQ ID NO: 12160 - protein, 183 aa, Unknown
  Description of Unknown: Integrase A728 sequence
  G3DSA:1.10.10.60,SSF46689
MRHAPEPSACVMVRSPERPKKPSKPWTVEEHQRFLIGLRKFGKGRWKEISTHYVPTRTPTQVASHAQKHHQHKSKDPTKRKRTQSLFDIGLEGFGESPCVTPPEVSEENDPDPVPTLPPKKLPTRPTPTRLFEISPLPALDPYFQQFICVSPALMYHYYMMTRTMCHQTLPARYPLYSNNSDR

SEQ ID NO: 12161 - protein, 183 aa, Unknown
  Description of Unknown: Integrase A729 sequence
  SSF53041,cd03768,PTHR30461:SF3,PF00239, PS51736,SM00857,G3DSA:3.40.50.1390,PS00397,PS00398, cd00569,PTHR30461,G3DSA:1.10.10.60,SSF46689,PF02796
MLIGYARVSTGDQNLDLQKNALIRAECELVFEDMASGKNARRPGLKRALRRLRPGDVLVVWKLDRLGRSVRDLITLVSELQARGVNFRSLTDSIDTSTPAGRFFFHVMSALAEMERELIVERTRAGLAAAREQGRVGGRRRVMTEEVVERCRRMLENGATRQQIADVIGVNVKTLYKYLPAAV

SEQ ID NO: 12162 - protein, 182 aa, Unknown
  Description of Unknown: Integrase A730 sequence
  SSF53041,cd03768,PTHR30461:SF3,PF00239, PS51736,SM00857,G3DSA:3.40.50.1390,PS00397, PS00398,cd00569,PTHR30461,G3DSA:1.10.10.60, SSF46689,PF02796
MQIGYVRVSTNDQNTDLQRQALERAGCEQVFEEKMSGTVANRPALKKLLRTLNAGDTLVVWKLDRIGRNVLHALLMFQQLQEKGINFRSITDGVDLKTASGRYNFRNILSAAQYESDLNSERTLAGLAVARAKGRVGGRRPKFTDEQWREMGERMATGESRQSVSKTYGVGLSTLYKKFPAS

SEQ ID NO: 12163 - protein, 182 aa, Unknown
  Description of Unknown: Integrase A731 sequence
  SSF53041,cd03768,PTHR30461:SF3,PF00239,PS51736, SM00857,G3DSA:3.40.50.1390,PS00397,PS00398,cd00569, PTHR30461,G3DSA:1.10.10.60,SSF46689,PF02796
MIYGYARVSTNHQDTELQLTALKSAGCEKIFEEHASGRKSNRPVLKRLIATMQPGDELVVWKLDRIGRNVLHALLMFQQLQEKGINFRSITDGVDLKTASGRYNFRNILSAAQYESDLNSERTLAGLAVARAKGRVGGRRPKFTDEQWREMGERMAIGESRQSVSKTYGVGLSTLYKKFPAS

SEQ ID NO: 12164 - protein, 182 aa, Unknown
  Description of Unknown: Integrase A732 sequence
  SSF53041,cd03768,PTHR30461:SF3,PF00239, PS51736,SM00857,G3DSA:3.40.50.1390,PS00397, PS00398,cd00569,PTHR30461,G3DSA:1.10.10.60, SSF46689,PF02796
MIYGYARVSTNHQDTELQLTALKSAGCEKIFEEHASGRKSNRPVLKRLIATMQPGDELVVWKLDRIGRNVLHALLMFQQLQEKGINFRSITDGVDLKTASGRYNFRNILSAAQYESDLNSERTLAGLAVARAKGRVGGRRPKFTDEQWREMGERMATGESRQSVSKTYGVGLSTLYKKFPAS

SEQ ID NO: 12165 - protein, 182 aa, Unknown
  Description of Unknown: Integrase A733 sequence
  SSF53041,cd03768,PF00239,PS51736,SM00857, G3DSA:3.40.50.1390,PS00397,cd00569,PTHR30461,G3DSA:1.10.10.60, SSF46689,PF02796
MIFGYARVSTNDQDHQLQLDALNKHGVDEVLTDTMTGSKRDRPGLNRLLDKAREGDTIVIWRFDRLARSTIDLLNLVEELTKKGIHLVSLHEGISTTGATGKLMLTMFGALAEFERNLLIERTMAGIESAKAQGRVGGRPKSLSTEQIAMAKDLVAAGYGKAEVALQMGVSRATLYRNLENA

SEQ ID NO: 12166 - protein, 182 aa, Unknown
  Description of Unknown: Integrase A734 sequence
  SSF53041,cd03768,PF00239,PS51736, SM00857,G3DSA:3.40.50.1390,PS00397,cd00569, PTHR30461,G3DSA:1.10.10.60,SSF46689,PF02796
MIFGYARVSTADQNHQLQLDALEKRGVDEVITDTMTGSKKDRPGLNRLLDKAREGDTIVIWRFDRLARSTIDLLNLVDDLTKRGIHLESLHEGLSTSGATGRLMLTMFGALAEFERALMMERVAAGVESAKAKGRTGGRPKSMTPEQIKMARDLVDAGHNKTEVATQMGVSRATLYRNLETV

SEQ ID NO: 12167 - protein, 182 aa, Unknown
  Description of Unknown: Integrase A735 sequence
  SSF53041,cd03768,PF00239,PS51736,SM00857, G3DSA:3.40.50.1390,PS00397,PS00398,cd00569,PTHR30461, G3DSA:1.10.10.60,SSF46689,PF02796
MIFGYARVSTAEQDNAMQMTALNNAGVDEVISDKMSGTKKDRPGLERLLDKAREGDVIVVWRLDRLGRSMSNLLELVALLSERNITLKSLHENIDFSTANGRLQLHLFMMLAEFERSLLQERVMAGLAQAKAEGRVGGRPKSMTDEQLAMAKALVEAGHSKGEIAKQMNISRSTLYRNLETV

SEQ ID NO: 12168 - protein, 182 aa, Unknown
  Description of Unknown: Integrase A736 sequence
  SSF53041,cd03768,PF00239,PS51736, SM00857,G3DSA:3.40.50.1390,PS00397,cd00569, PTHR30461,G3DSA:1.10.10.60,SSF46689,PF02796
MIFGYARVSTNDQDHQLQLDALNKHGVDEVLTDTMTGSKRDRPGLNRLLDKAREGDTIVIWRFDRLARSTIDLLNLVEELTKKGIHLVSLHEGISTTGATGKLMLTMFGALAEFERNLLIERTMAGIESAKAQGRVGGRPKSLTTEQIAMAKDLVAAGYGKAEVASQMGVSRATLYRNLEKA

SEQ ID NO: 12169 - protein, 182 aa, Unknown
  Description of Unknown: Integrase A737 sequence
  SSF53041,cd03768,PF00239,PS51736,SM00857, G3DSA:3.40.50.1390,PS00397,cd00569,PTHR30461,G3DSA:1.10.10.60, SSF46689,PF02796
MIFGYARVSTADQNHQLQLDALEKRGVDEVITDTMTGSKKDRPGLNRLLDKAREGDTIVIWRFDRLARSTIDLLTLVDDLTKRGIHLESLHEGLSTAGATGRLMLTMFGALAEFERSLMMERVAAGVEAAKAKGRTGGRPKSMTTDQIKMARDLVDAGHNKTEVATQMGVSRATLHRNLETA

SEQ ID NO: 12170 - protein, 182 aa, Unknown
  Description of Unknown: Integrase A738 sequence
  SSF53041,cd03768,PF00239,PS51736, SM00857,G3DSA:3.40.50.1390,PS00397,cd00569, PTHR30461,G3DSA:1.10.10.60,SSF46689,PF02796
MIFGYARVSTADQNHQLQLDALEKRGVDEVITDTMTGSKKDRPGLNRLLDKAREGDTIVIWRFDRLARSTIDLLTLVDDLTKRGIHLESLHEGLSTAGATGRLMLTMFGALAEFERSLMMERVAAGVEAAKAKGRTGGRPKSMTPEQIKMARDLVDAGHNKTEVATQMGVSRATLYRNLETV

SEQ ID NO: 12171 - protein, 180 aa, Unknown
  Description of Unknown: Integrase A739 sequence
  SSF53041,PF00239,PS51736,SM00857,G3DSA:3.40.50.1390, PS00397
MSYVNSKEAQAFFKVSDQTLRRWADNNQIKTKVTPGGHRRFFIPSDDKEKIIYCRVSSSKQKDDLKRQIKFMQKKYPNHKIMSDVGSGINFKRKNFLSLLQQIFQGNVSEVVVASNDRLVRFNYEFFDWLFKQFGCQLISVNKQTEKSPEQELSEDLISIITVFTAKYHGKRKYNFDKKD

SEQ ID NO: 12172 - protein, 180 aa, Unknown
  Description of Unknown: Integrase A740 sequence
  SSF53041,PF00239,PS51736,SM00857,G3DSA:3.40.50.1390,PS00397
MSYVSSKEAQAFFKVSDQTLRRWADNNQIKTKVTPGGHRRFFIPSDDKEKVIYCRVSSSKQKNDLKRQIKFMQKKYPNHKVVSDIGSGVNFKRKNFLSLLQQVFQGDVSEIVVASNDRLVRFNYEFFDWLFKQFGCQLISVNKRTEKSPEQELSEDLISIITVFTAKYHGKRKYNLHKED

SEQ ID NO: 12173 - protein, 179 aa, Unknown
  Description of Unknown: Integrase A741 sequence
  SSF53041,cd00338,PF00239,PS51736,SM00857, G3DSA:3.40.50.1390,PTHR30461
MAKVEIIKANKELSNRNKKGPIEILRVGAYCRVSTDTEDQISSYKSQVAYYDDLIDNNPNWIKVDIYADEAITGTQVTKRTDFQRLINDCMNHEIDIVITKSISRFARNTLDTLKYVRMLKEKNVAVYFEDEKINTLTMDGELLLVVLSSVAQQEVENISANVKKRIKDENESRGAYRI

SEQ ID NO: 12174 - protein, 177 aa, Unknown
  Description of Unknown: Integrase A742 sequence
  SSF53041,PF00239,PS51736,SM00857,G3DSA:3.40.50.1390, PS00397
MSYVSSKEAQAFFKVSDQTLRRWADNNQIKTKVTPGGHRRFFIPSDDKEKVIYCRVSSSKQKDDLKRQIKFMQKKYPNHKVVSDIGSGVNFKRKNFLSLLQQVFQGDVSEIVVASNDRLVRFNYEFFDWLFKQFGCQLISVDKQTEKSPEQELSEDLISIITVFTAKYHGKRKYNLH

SEQ ID NO: 12175 - protein, 177 aa, Unknown
  Description of Unknown: Integrase A743 sequence
  G3DSA:1.10.10.60,SSF46689
MEAVEKKRGPWSEEEDLILMKHMHEYTQQGYNQTDASAIISELHLPQRTAAAVASHFSGELRHEYARAMQLHDMLKDAPEPITLGDTSYDAIIHVLKQKAEEEEKFKLNHITLQEHYDLLQKRYDSLQVEYDDLERRHMELSADHNVFVRALQKAQEPVETVTLPIKNQVDNEEWVD

SEQ ID NO: 12176 - protein, 177 aa, Unknown
  Description of Unknown: Integrase A744 sequence
  G3DSA:1.10.10.60,SSF46689
MARPITDADRRQVRELHAAGKSRNDIARTLDRSPSTVSKIAAQCEPPLTFDRAEQVEAATRVRTADLAARRAALALDLQTDAEKLRAQLWEATQHGEFAGRDGEWRTADLDRPRFPDQRAIVAAVQTAVGTSLRLAPAEGGDDATQVRSMLGALGEALTQAANDDQALDDDRGADGG

SEQ ID NO: 12177 - protein, 177 aa, Unknown
  Description of Unknown: Integrase A745 sequence
  G3DSA:1.10.10.60,SSF46689
MARPITDADRRKVRELHAAGKSRNDIAREISRSPSTVSKIAAAFDPPLSFDRAEQVEAATRVRTADLAARRAALALDLQDDAERLRAQLWEGTTHGEFAGRDGEWHETYLERPRFPDQRAIVAAVQTAVGTSLRLAPAEGGDDAGQVRSMLGALGEALTQAANDDQALDDDGGAGGG

SEQ ID NO: 12178 - protein, 177 aa, Unknown
  Description of Unknown: Integrase A746 sequence
  G3DSA:1.10.10.60,SSF46689
MARPITDADRRQVRELHAAGKSRNDIAREISRSPSTVSKIAAAFDPPLSFDRAEQVEAATRVRTADLAARRAALALDLQDDAERLRAQLWEGTTHGEFAGRDGEWHETYLERPRFPDQRAIVAAVQTAVGTSLRLAPAEGGDDAGQVRSMLGALGEALTQAANDDQALDDDGGAGGG

SEQ ID NO: 12179 - protein, 177 aa, Unknown
  Description of Unknown: Integrase A747 sequence
  G3DSA:1.10.10.60,SSF46689
MARPITAADRRKVRELHAAGESRNAIARALKRSPSTVSKIAGNLDPPLSFDRAEQVEAATRVRTADLASRRAGLALDLQAAAERLLGQLWEPTTHGEFAGREGEWHETHLPQPRFGDQRAIVASVQTAVGTSLRLAPAEGGENAEQVRSMLGALGEALTQAANDDQAHDDDGGDAGG

SEQ ID NO: 12180 - protein, 172 aa, Unknown
  Description of Unknown: Integrase A748 sequence
  SSF53041,cd00338,PF00239,PS51736,SM00857, G3DSA:3.40.50.1390,PS00397,PTHR30461
MVTGLKDYSDCVGYCRVSTQKQFEEGHGLERYIAQLKSWGLNDNQIFWDIESGASDKRKGYNKVLDLIKSGAIKKLIIPCFDRFTRSTLQWEQASLELQKHNVTVMFLDGGSTDLTTPDDLFKMRILAAMSAAVRDKNKFNSSQGHKFRRLNEKAHVACFTHLVQVIYYRKV

SEQ ID NO: 12181 - protein, 172 aa, Unknown
  Description of Unknown: Integrase A749 sequence
  G3DSA:1.10.10.60,SSF46689
MAGTVVDPNENKILLQWLEANREHPYPSTRQKEELAIETGLELKQVNYWFTNVRRRLKIRKSVRRSSPVERSNTKSCVPVRHRSFTTKQVKILTNWARKNWNHPFPCPKEKEQMVAETKLTYDQVQLWFTNWRMRVWKKNREKGIAITEEKKSAGLTGVDSLRTRLSDFRQC

SEQ ID NO: 12182 - protein, 171 aa, Unknown
  Description of Unknown: Integrase A750 sequence
  G3DSA:1.10.10.60,SSF46689
MADDICGHETASGEPCQNPASDGDSCWLDAHGGSANKSGRPSKLSYDRQEKIATAVEGGKSLTSAARMAGVDRTTVYGWIDRGEADKEEGKDNEFTEFYDRLTRAKGHGEDFYFNLALEMAKEDGDHRFIASLMKQRYPDSWGETETGVEATEITVSSDVVEVTEADLQHD

SEQ ID NO: 12183 - protein, 170 aa, Unknown
  Description of Unknown: Integrase A751 sequence
  G3DSA:1.10.10.60,SSF46689
MAARPITDTDREQVKALHAEGMSRNDIARRMKRSPSTVSKLAAEQGLTFERGPEVIAATEARRIDLAARRQALAEQLHQDAEQLRAQLWEPCTIGEFAGREGDWQTADLPRPRFADQRQIMGATATAIQQSLRLQPADGGADAGDVRSMLGSLGEALTGAFADDPGEDGG

SEQ ID NO: 12184 - protein, 170 aa, Unknown
  Description of Unknown: Integrase A752 sequence
  G3DSA:1.10.10.60,SSF46689
MAARPITDTDREQVKALHAEGMSRNDIARRMKRSPSTVSKLAAEQGLTFERGPEVVAATEARRIDLAARRQALAEQLHQDAEQLRAQLWEPCTIGEFAGREGDWQTADLPRPRFADQRQIMGATATAIQQSLRLQPADGGADAGDVRSMLGSLGEALTGAFADDPGEDGG

SEQ ID NO: 12185 - protein, 170 aa, Unknown
  Description of Unknown: Integrase A753 sequence
  G3DSA:1.10.10.60, SSF46689
MAARPITDTDREQVKALHAEGMSRNDIARRMKRSPSTVSKLAAEQGLTFERGPEVVAATEARRIDLAARRQALAEQLHQDAEQLRAQLWEPCTIGEFAGREGDWQTADLPRPRFADQRQIMGATATAIQQSLRLQPADGGADAGDVRSMLGSLGEALTGAFADDPGKDGG

SEQ ID NO: 12186 - protein, 168 aa, Unknown
  Description of Unknown: Integrase A754 sequence
  G3DSA:1.10.10.60,SSF46689
MARKSLYEKLDIETRLPEIEQMARNGYRDIDICKALGISHQTFYNWLEKYPEFAEAVRKGKEVVDAEIENKLLENARGHYYWEETQELMEVRDPITGETKKELVTTKRVLKYVKPDTTAQIFWLKNRRPDVWRDKQHIEHSGEVGVKDLSYLSDEELDKELKELQGDE

SEQ ID NO: 12187 - protein, 167 aa, Unknown
  Description of Unknown: Integrase A755 sequence
  G3DSA:1.10.10.60,SSF46689
MATVVVDGKERSSNYDRHHNKILEAWFDENSEGPYPTLRQKKELANDTGLTLKQVNTWFTNTRKRLKTRRSGTVRRQYFSEDQINILRNWGLNNWKYPYPTPKEKERMADEAKLTYDQVQHWFINWRMRVWRRANRKERPASSETVQVTPVTTGLLRTRLSDFRPLA

SEQ ID NO: 12188 - protein, 166 aa, Unknown
  Description of Unknown: Integrase A756 sequence
  G3DSA:1.10.10.60,PF02796
MRKLTTTDIQEIYVSTQTQKELASQYNVSIPLISNIMNGKIYRRYTSTLKKPQRKKYNREPRFTQEQIINIYTSLEPINTIAKRYSVARETISRIKNDVHYTEFTKELSNPKIHKRIDRLDVIDIYLDDRSAKEIAQEYRTSISTVYNIKNKKCHRNITDELDKDY

SEQ ID NO: 12189 - protein, 165 aa, Unknown
  Description of Unknown: Integrase A757 sequence
  SSF53041,PF00239,PS51736,SM00857,G3DSA:3.40.50.1390,PS00397
MSKYITGKKASEMLKVHQRTLHNWDRKGIIDTIRGPGGRRLYNVKKYLEEYEDDIDIDTEEDEQEDNEKMKIAYVRVSTHGQKDDMQRQIKYMKKHYPNHKIIQDIGSGINFNRKGLRKIIKWAIEGNVKELVVAYKDRLTRFGFELIEDLIKEYSGGTIKTKLS

SEQ ID NO: 12190 - protein, 164 aa, Unknown
  Description of Unknown: Integrase A758 sequence
  SSF53041,cd03768,PTHR30461:SF3,PF00239, PS51736,SM00857,G3DSA:3.40.50.1390,PS00397, PS00398,PTHR30461
MLIGYVRVSTNDQNTDLQRNALECAGCELIFEDKISGTKSDRPGLKKLLRTLSEGDTLVVWKLDRLGRSMRHLVILVEELRERGVNFRSLTDAIDTSTPMGRFFFHMMGALAEMERELIVERTRAGLEAEPKVVLVADDRNSPRVSGSRSDGCWLRGNLVNVWH

SEQ ID NO: 12191 - protein, 163 aa, Unknown
  Description of Unknown: Integrase A759 sequence
  G3DSA:1.10.10.60,SSF46689
MTDICGVETTKGEPCQNPVESCPWHDSDNDVDAGRPTKLTKQREEGIASMIEEGHSQASAARAHGIDPHTLTNWINKGREQDQGIFSDFFSRIARARAYSEQQYVKELRHMADEVNDTNTLRWMLQQRFPESWGESDALGGESEEWNVSSEVVEVVSSTTELE

SEQ ID NO: 12192 - protein, 162 aa, Unknown
  Description of Unknown: Integrase A760 sequence
  cd00569,G3DSA:1.10.10.60
MPYINENIELHGNAKRIEYEIDNNSCWNCTSHSKDSFGYCFITRTGMQGATYIHRYVYTIHNGDIPQDMVIRHKCDNPSCINPSHLEVGTQQENLKDAESRGRAAIKSGSGNIKAKLSEEQVKEIKELLKKGVVQKEIASTYGVGNSTISRIKHNVSWSATK

SEQ ID NO: 12193 - protein, 162 aa, Unknown
  Description of Unknown: Integrase A761 sequence
  cd00569,G3DSA:1.10.10.60
MPYINENIELHGNAKRIEYEIDNNSCWNCTSHSKDSFGYCFITRTGMQGATYIHRYVYTIHNGDIPQDRVIRHKCDNPSCINPSHLEVGTQQENLKDAESRGRAAIKSGSGNIKAKLSEEQVKEIKELLKKGVVQKEIASTYGVGNSTISRIKHNVSWSATK

SEQ ID NO: 12194 - protein, 162 aa, Unknown
  Description of Unknown: Integrase A762 sequence
  G3DSA:1.10.10.60,SSF46689
MTDICGVETTKGEPCQNPVESCPWHNVDEKPDTGRDTKLSLERQEQIATAIEQGKSLTSAARMAGVDRTTVYGWIDRGEADAESGEENVFTEFYHRLTRAKGHGEDFYFELALELARENGDHQFIASLMKQRYPDSWGETETGVSSPDIEISVSEATYETWQ

SEQ ID NO: 12195 - protein, 162 aa, Unknown
  Description of Unknown: Integrase A763 sequence
  G3DSA:1.10.10.60, SSF46689
MTDICGVETTKGEPCQNPAESCPWHDVDEKPDTGRNTKLSLERQEKIASAIEQGKSITSAARMAGVDRTTVYGWLDRGEADIESGKENVFTEFYHRLTRAKGHGEDFYFELALDLARENGDHQFIASLMKQRYPDSWGETETGVSSPDIEISVSEATYETWQ

SEQ ID NO: 12196 - protein, 161 aa, Unknown
  Description of Unknown: Integrase A764 sequence
  G3DSA:1.10.10.60,PF02796
MPYIEEKVKLHGNAKRIEYEINDDGCWNCISHVETKFGHNQITRKGFPLMHVHNYVYRITKGDIPKNNVVRHKCDNPNCINPNHLEIGTQKDNMKDAEIRGRAKIRSGSGNIKAELTEKQVKEIRKLLNEGIMQKDIVNMYGISKSTVSKIKNNILWKNVI

SEQ ID NO: 12197 - protein, 161 aa, Unknown
  Description of Unknown: Integrase A765 sequence
  G3DSA:1.10.10.60,PF02796
MLVPKEKKLIPNELLPPKYQNKGYRMSPNGDVYGVFGKKLKPNDWSPNGFNHPLLFNRNLWYIRATMFVPNPENHKRVVLIGDDVHWLSEKKYREMVNHYLGREAVERVPLKDRGEVLDEMLEKGAKIADIARALGYSRAAIYKYLEKNNYEYKNQKLKRK

SEQ ID NO: 12198 - protein, 158 aa, Unknown
  Description of Unknown: Integrase A766 sequence
  G3DSA:1.10.10.60,SSF46689
MKQRSDCLNDKDVEIVNDSYKRLRELSEDESNAVYLLISGLTVTEVAKAIGVTRQTIYNWMNREHIRKEIDRRKQELTNQGNLLILKDLETYINNIKELASDKSDKRVMLAANQYLINRIYGTPTNTIIQAEDDSGGMGMDTTEIEAAIAKIRIRTKK

SEQ ID NO: 12199 - protein, 158 aa, Unknown
  Description of Unknown: Integrase A767 sequence
  G3DSA:1.10.10.60,SSF46689
MGRRTFFTEHQNQILAMWFDEKSKNSYLNSGQKEELAAEIGLTPKQVETWFSNTRKRLRRPSPRPRSDTRPNFTKEQVKTLSEWVSLNSKYPYPTQKEKNQFVLTTKLTYLQVQNWFINWRTRVWKPNHKKGDSIVITKKIDAPILLRTRLSDFRTSR

SEQ ID NO: 12200 - protein, 157 aa, Unknown
  Description of Unknown: Integrase A768 sequence
  G3DSA:1.10.10.60,SSF46689
MTCNRQPKVVHYRGKSGDTSKAEWARLRKRALALVDEDWKSREVAEELGVSQDTVSKWVERYRRLTHRRGGCFYGPCKEWGCTAGVQTKHGYCTHHTNLRVWCGYRPRVRRAPGPCANAPSCPRLAGTGQGGAKGLCRGCYQRARRALRRVAEEVGL

SEQ ID NO: 12201 - protein, 155 aa, Unknown
  Description of Unknown: Integrase A769 sequence
  G3DSA:1.10.10.60,SSF46689
MPFSISGRKGSEMMAKLDELKQKLTAKQIQAAYLLVENELMESNNEEKRTQDEMANELGINRTTLWEWRTKNQDFIAFKSEVADSFLAEKREQVYSKLMQLILGPQPSVKAMQLYMQRFGLLTDKKVIEGDLGNATRTNAEIEEQLQKLKKLTGE

SEQ ID NO: 12202 - protein, 154 aa, Unknown
  Description of Unknown: Integrase A770 sequence
  G3DSA:1.10.10.60,PF02796
MLNKFEKKEVRTVITGLLTHACGRCTTPNECDDCPIQETMQAMNKQLINDPDWSKKRHNLTTEAYRSLRAKGKQDREICEMFNMTRHQLYRFKKKEKIISDRLTHEDYLEIRRMRKEGRPYKEIAERFGISRGYASEIARGKKFGEVVEMEEAN

SEQ ID NO: 12203 - protein, 152 aa, Unknown
  Description of Unknown: Integrase A771 sequence
  G3DSA:1.10.10.60,SSF46689,PF02796
MQEWVRITSYPNYAVSNEGEVKNINTGCVLRPLTLTKGYLGVRLYHEGNGKTLKIHRLVALAFLSNPDNLPQVNHIDGDKSNNDVTNLEWCSNEYNMRHAADNDLLNKETQFKQKYDPSEFRKCKEEGMTISAIARKFGCKRDTVYRLLRLR

SEQ ID NO: 12204 - protein, 150 aa, Unknown
  Description of Unknown: Integrase A772 sequence
  G3DSA:1.10.10.60,SSF46689
MSNGELFDSGEVDKLEPDKVLAHMNDAVVLARWQGTLNEMASIAEHKLRQLLPDKPDEVPTIARAMVYAICETMGGAVVYIPRGDGLRRAIRDMEIFREWREKNARPDALARKFDLSSQAVYDIIARQRALHRQQEPDLFGYEDAPKRLH

SEQ ID NO: 12205 - protein, 149 aa, Unknown
  Description of Unknown: Integrase A773 sequence
  G3DSA:1.10.10.60,SSF46689
MSELEELRAEVERLRARADECDRCRGHARGDVIEDLALKGHTTPEIAKMLGVDKRTVNYWRKKRGVPGKRVYATGRTEYATPEQIVKLRELLADGASLAEAARTLGLNEGTVRNVHRGEGWTTEESIDHLTTLRRHGHALGTKGRASWT

SEQ ID NO: 12206 - protein, 148 aa, Unknown
  Description of Unknown: Integrase A774 sequence
  SSF53041,PF00239,PS51736,SM00857, G3DSA:3.40.50.1390,PS00397
MEVDYVTTKETCRITGFKAPTLRGWSNVGKVKTTRTLANQWLYDRQSLLSFIDGVNDGIEKEKIIYCRVSSKKQSEHLEHQIEFCKQYYPDHTVITGISSGINFNRKGIQTVLESAMHGDLEELVVAYKDRLCRFGYELIEWIVGRYG

SEQ ID NO: 12207 - protein, 147 aa, Unknown
  Description of Unknown: Integrase A775 sequence
  SSF53041,PF13408,cd00338,PF00239,G3DSA:3.40.50.1390
MLKCQYCGSTLKRQVSYKKKIVWCCSKYIKEGKNSCKGMRVPERDIEDWKLSSPVIVLERIEDGEKHYGYTGQKATANSHISNSEKIRVAAYCRVSTDQDEQLSSYENQVNYYREYILKHEDYELVDIYADEGISATNTKNVMLLTD

SEQ ID NO: 12208 - protein, 146 aa, Unknown
  Description of Unknown: Integrase A776 sequence
  G3DSA:1.10.10.60,SSF46689
MFISLNKEEEKILGTENKKEFTPLKKDKRFNTIKEQQIVTLYEEGAPFKEISKAVKVSTGMIYSVINSYKVEKRNKKSRVSERVAHVLNDVEKTKQLIKDYHFMNVEDIYKKYNIHKNGLYYILDLYNVERKTGSKEEVLNDEQEE

SEQ ID NO: 12209 - protein, 145 aa, Unknown
  Description of Unknown: Integrase A777 sequence
  G3DSA:1.10.10.60,SSF46689
MANPRRMKALEAKLTAQQRKAAYLVVENELLPTKERRTKEEIATEVGVTYKTIWSWTTRNRDFIEYKNAIADDFLETEREAVYSNLMQLIKAPQPSVKAIDLYLRRFGLLTEKQIVTTDTGEGARTDADLEQELGELDELLKDDD

SEQ ID NO: 12210 - protein, 144 aa, Unknown
  Description of Unknown: Integrase A778 sequence
  G3DSA:1.10.10.60,SSF46689
MELPRTVQEIADVIGRERALYLIGQLPKLWVPSQQYHKVILYVPKRIRPNDPLVKILGWSDASKMVQHFGGEMLHPANCEYIYRRFIHSSIKRMHSEGMDAKAIAELLDVSERTVKRHCTDKPHKDTSPANDNTPERLLTAMGQ

SEQ ID NO: 12211 - protein, 144 aa, Unknown
  Description of Unknown: Integrase A779 sequence
  G3DSA:1.10.10.60,SSF46689
MELPRTVQEIADVIGRERALYLIGQLPKLWVPSQQYHKVILYVPKRIRPNDHLVKILGWSDASKMVQHFGGEMLHPANCEYIYRHFIHRSIKRMHGEGMDAKAIAELLEVSERTVKRHCTDKPHKDTSPANDNHQHRLLMTTGQ

SEQ ID NO: 12212 - protein, 143 aa, Unknown
  Description of Unknown: Integrase A780 sequence
  SSF53041,PF00239,PS51736,G3DSA:3.40.50.1390,PTHR30461
MVILNIYYNYIIIVPEISRLGRNMNEVNEIIGICGRKKVMIINIQNKLKLDGSLQTSIMANLYTIFSQMERQLISERTKQGLLIAKQKGHLTGRARGIKKNKLDGKDNEIKKLIDEKKSIRQIAKELNVKHPQLLKYISDKNL

SEQ ID NO: 12213 - protein, 142 aa, Unknown
  Description of Unknown: Integrase A781 sequence
  G3DSA:1.10.10.60,SSF46689
MPNKFDDLSEQQKRAAELLLENDLAPKAEKRKLEDIAEEVGVARKTLWDWRRRNTLFIEYKQHLTTLSLQDAHGELARVLITNLQSSQPSTKMLDLLAKMTPNALAANRQEVVMETNETSNEEVMKRIEELRKMQESVKQDE

SEQ ID NO: 12214 - protein, 142 aa, Unknown
  Description of Unknown: Integrase A782 sequence
  G3DSA:1.10.10.60,SSF46689
MTTAVVNKQGNRPAKYKQSIMARLMELVAEGKTTRECVQELDVSWTTLRKWLKEKNYQDLYRVAQSDQVILNNEKLDIILEDAHKRAKTKDITMTEVKLIELMQKNYHHKNSKLNPTTWGSDKQTMSISDSKGQEFKVEWSK

SEQ ID NO: 12215 - protein, 141 aa, Unknown
  Description of Unknown: Integrase A783 sequence
  SSF53041,PTHR30461:SF3,PF00239, PS51736,PTHR30461,G3DSA:1.10.10.60,SSF46689,PF02796
MPAFEWVHVQLHQQKGMISLSPPTICNSAADMIQLIKEFDAQGVAVRFIDDGISTDGDMGQMVVTILSAVAQAERRRILERTNEGRQEAKLKGIKFGRRRTVDRNVVLTLHQKGTGATEIAHQLSIARSTVYKILEDERAS

SEQ ID NO: 12216 - protein, 141 aa, Unknown
  Description of Unknown: Integrase A784 sequence
  G3DSA:1.10.10.60,SSF46689
MVKIAKGKYKEWLTNEKLDIVAGWAQDGLTNNDIAYNIGINPDTLYTWIKKYPEFSEALKVNKEVADRRVENALYKSAIGFTYEEETVTNQGEVVTVKKYSKPNTTAQIFWLKNRKQEWSDRQEIEHTGTVVFANEDNIPD

SEQ ID NO: 12217 - protein, 140 aa, Unknown
  Description of Unknown: Integrase A785 sequence
  G3DSA:1.10.10.60,SSF46689
MQHDLFEHDPAIRQLIGHIDNIPAPELESRWPRSVVDLIDVLENELKRQNVSNPRELARKQAVALSCFLGGRQFYIPCGDTILTALRDDLLYCQFNGRNMEELRRQYRLSQPQIYQIIARQRKLHTRRHQPDLFSPESPK

SEQ ID NO: 12218 - protein, 140 aa, Unknown
  Description of Unknown: Integrase A786 sequence
  G3DSA:1.10.10.60,SSF46689
MQHDLFEHDPAIRQLIGHIDNIPAPELESRWPRSVVDLIDVLENELKRQNVSNPRELARKQAVALSCFLGGRQFYIPCGDTILTALRDDLLYCQFNGRNMEELRRQYRLSQPQIYQIIARQRKLHTRRHQPDLFSPETPK

SEQ ID NO: 12219 - protein, 140 aa, Unknown
  Description of Unknown: Integrase A787 sequence
  G3DSA:1.10.10.60,SSF46689
MPCGWEAVMSEENQDLFGYKNVSLEEVEKLADDEEHQRWPEAMRQIYCIFKDELVKNETDPKLAVVLLHRICKEFGGVQLYLPRGRQLESEIMNLSIWREFNGANVEELSRKYDKSMQHIYRVVAKMRKIEVKNRQPNLF

SEQ ID NO: 12220 - protein, 140 aa, Unknown
  Description of Unknown: Integrase A788 sequence
  G3DSA:1.10.10.60,SSF46689
MQHDLFEHDPAIRQLIGHIDNIPAPELESRWPRSVVDLIDVLENELKRQNVSNPRELARKQAVALSCFLGGRQFYIPCGDTILTALRDDLLYCQFNGRNMEELRRQYRLSQPQIYQIIARQRKLHTRRHQPDLFSPESQK

SEQ ID NO: 12221 - protein, 140 aa, Unknown
  Description of Unknown: Integrase A789 sequence
  G3DSA:1.10.10.2600,PS51737
MKHTPYGYIIVDGKAVVNEKEAKRLQKICDNYLSGMSFVASAKSVGLKMQHSGVKRLMLNKRYLGDDFYPAILTEGIVNKIEEERARREKALGRDRKKQGKTVRGVVYTKFLIPQIDVKYENPMRQAEYAYSLIGNEVST

SEQ ID NO: 12222 - protein, 138 aa, Unknown
  Description of Unknown: Integrase A790 sequence
  G3DSA:1.10.10.2600,PS51737
MAYIPYGYKIQDGVVTVDEKAAGQVKVFFEKYISGLSLTVAGEQAGIDKTHSVMGRILKNVNYLGNDTYPAIIDKEIFDKAEEVRDKRAKDLGRVVELAAFTSPPPKERFKMRKADNKMPVDPFERAEYLYSLIESEE

SEQ ID NO: 12223 - protein, 138 aa, Unknown
  Description of Unknown: Integrase A791 sequence
  SSF53041,PF00239,SM00857,G3DSA:3.40.50.1390
MEKCTYTRKYKNEDEKGGTPYGYARSSNEDGIKRQIEWLKDKGVKEVYIDKNAKVELNKLLNILKEGDTLITRGIDRITRDIKGLEEIIEFAKNKRVKFVLGDKIIDGINGVDPSIERMSAVLNTFKECEDKIVGIEE

SEQ ID NO: 12224 - protein, 138 aa, Unknown
  Description of Unknown: Integrase A792 sequence
  G3DSA:1.10.10.2600, PS51737
MTHTPYGYRIENGIAVVDEVDAERIKALYQEYIDCKSMRAATKKAGIDKTHSVIGRILKNKVYLGTVYYPQIIDEDIFAKAQEIREHNVRSQNRIGIYRPHPKAEIGAFKIRKTEEKYKDPYKQAEYAYSQILEVANE

SEQ ID NO: 12225 - protein, 136 aa, Unknown
  Description of Unknown: Integrase A793 sequence
  G3DSA:1.10.10.60,SSF46689
MNVSIRAIQAIMENAIEDGKNVRVGNIERALGYYRCSWGEEFSKVTGLTPASYMRYFRMRCICQDLATSKHSLLDIAEYYGRSLSYFCRDFKKLIGMTPGEYRKLNHNGRAVVLHSVFWAYPFLTDFTSFRPLLLK

SEQ ID NO: 12226 - protein, 136 aa, Unknown
  Description of Unknown: Integrase A794 sequence
  G3DSA:1.10.10.60,SSF46689,PF02796
MADILTTKESDMITMLIEGVGITDIAKKLNVTRQTIYNWSNKDNVKAELDRRRRDLSHQGNNLIMKDLTTYVDNIKELANDKSDKRVSLAANQYLLNRIYGSPVGNVVDGKIDNNPVQDINELENELNNFRLKKVK

SEQ ID NO: 12227 - protein, 136 aa, Unknown
  Description of Unknown: Integrase A795 sequence
  G3DSA:1.10.10.60,SSF46689
MNVSIRAIQAIMENAIEEGKNVRVGNIERALGYYRCSWGEEFSKVTGLSPASYMRYFRMRCICQDLATSKHSLLDIAEYYGRSLSYFCRDFKKLTGMTPGEYRNLNHNGRVIVLHSVFSAYPFLTDFTSFRPLLLK

SEQ ID NO: 12228 - protein, 136 aa, Unknown
  Description of Unknown: Integrase A796 sequence
  G3DSA:1.10.10.60,SSF46689
MNVSIRAIQAIMENAIEDGKNVRVGNIERALGYYRCSWGEEFSKVTGLSPASYMRYFRMRCICQDLATSKHSLLDISEYYGRSLSYFCRDFKKLIGMTPGEYRNLNHNGRVIVLHSVFSAYPFLTDFTSFRPLLLK

SEQ ID NO: 12229 - protein, 133 aa, Unknown
  Description of Unknown: Integrase A797 sequence
  G3DSA:1.10.10.60,SSF46689,PF02796
MTMARPTKYDPKFCDEAREMMADGYSTKAFAGYIGVSLSTVYKWMEENPEFSEAIKSAQAAGAFWWEKTLKHVASTGEGNASAAIFGVKNRSQEEWKDKVENDHTSSDGSMSPRGKTLEDFYADEDVPPQSSP

SEQ ID NO: 12230 - protein, 133 aa, Unknown
  Description of Unknown: Integrase A798 sequence
  G3DSA:1.10.10.60,SSF46689
MTHIASEKLEQIQDLLDNQLSHTEIAKRLRVSRNTIRYYFPDTSLSREETLARANAARLDGRRIVRPGETEKFDKCLVCGTDRQQQRRWQKQGIGFKCSFGRSHKYAEYVLPDNPDCRRCQGQKSVHHTCQSN

SEQ ID NO: 12231 - protein, 133 aa, Unknown
  Description of Unknown: Integrase A799 sequence
  G3DSA:1.10.10.60,SSF46689
MTHIASEKLEQIQDLLDNQLSHTEIAKRLRVSRNTIRYYFPDTSLSREETLARANAARLDGRRIVRPGETEKFDKCLVCGTDRQQQRRWQKQGIGFKCSFGRSHKYAEYVLPDNPDCRRCQGQKSVHHTCQNN

SEQ ID NO: 12232 - protein, 132 aa, Unknown
  Description of Unknown: Integrase A800 sequence
  G3DSA:1.10.10.60,PF02796
MAGGRPTLYRPEYCETVIELGKQGDSLAQMAAHFDVSRQTIENWASDHPEFLAALSRAKVHCQAWWEKAGREGMFLGGGGFNAAVWKKSMEARFREDYTERQEVHQTGTMEHKHSIGEMTDEDLAKVIAGEK

SEQ ID NO: 12233 - protein, 132 aa, Unknown
  Description of Unknown: Integrase A801 sequence
  G3DSA:1.10.10.60,SSF46689
MPCGWEAVMSEENQDLFGYKNVSLEEVEKLADDEEHQRWPEAMRQIYCIFKDELVKNETDPKLAVVLLHRICKEFGGVQLYLPRGRQLESEIMNLSIWREFNGANVEELSRKYDKSMQHIYRVVAKNAQDRS

SEQ ID NO: 12234 - protein, 132 aa, Unknown
  Description of Unknown: Integrase A802 sequence
  G3DSA:1.10.10.60,SSF46689
MSEENQDLFGYKNVSLEEVEKLADDEEHQRWPEAMRQIYCIFKDELVKNETDPKLAVILLHRICKEFGGVQLYLPRGRQLESEIMNLSIWREFNGANVEELSRKYDKSMQHIYRVVAKMRKIEVENRQPNLF

SEQ ID NO: 12235 - protein, 132 aa, Unknown
  Description of Unknown: Integrase A803 sequence
  G3DSA:1.10.10.60,PF02796
MFRKNQDYFIDEIGNVTRKDGTIVKPQESPNGLGHPIVLRQNAWRLSALVHKLDNPNNYKHIVEIDGKLHWIKEETYHKMVEALVGRPNVKAPIPKHKRDFIFEQHGSMTITAIAKHLDISRMSVYRILKGA

SEQ ID NO: 12236 - protein, 131 aa, Unknown
  Description of Unknown: Integrase A804 sequence
  G3DSA:1.10.10.60,SSF46689
MADTLHTVPTKPLTKEDRIELGRKAVAINKGEGKPVTQIAREMGISDKTLGYYITVYKKSLRTKKEEMADSLLYPVMRSEKTSLVKVPNEELDKLRSENTDLKEKNAELQRSVKALQNVILILGHQHSEDD

SEQ ID NO: 12237 - protein, 129 aa, Unknown
  Description of Unknown: Integrase A805 sequence
  G3DSA:1.10.10.60, SSF46689
MTEDLFGDLQDDTILAHLDNPAEDASRFPALLAELNDLLRGELSRLGVDPAHSLEIVVAICKHLGGGQVYIPRGQVLDSLIRDLRIWNDFNGRNVSELTTRYGVTFNTVYKAIRRMRRLKYRQYQPSLL

SEQ ID NO: 12238 - protein, 129 aa, Unknown
  Description of Unknown: Integrase A806 sequence
  G3DSA:1.10.10.60,SSF46689
MTEDLFGDLQDDTILAHLDNPAEDTSRFPALLAELNDLLRGELSRLGVDPAHSLEIVVAICKHLGGGQVYIPRGQALDSLIRDLRIWNDFNGRNVSELTTRYGVTFNTVYKAIRRMRRLKYRQYQPSLL

SEQ ID NO: 12239 - protein, 129 aa, Unknown
  Description of Unknown: Integrase A807 sequence
  SSF53041,cd03768,PTHR30461:SF3,PF00239,PS51736, G3DSA:3.40.50.1390,cd00569,PTHR30461,G3DSA:1.10.10.60, SSF46689,PF02796
MRHLVMLTEELREKGINFRSLTDSIDTSTPMGRFFFHVMGALAEMERELIVERTRAGLAAAREKGRIGGRRRIMTPEVVSRAERMLANGATLHQIALVLEVSVKTLYRYIPAEKQQHLRDSVLPETSKP

SEQ ID NO: 12240 - protein, 128 aa, Unknown
  Description of Unknown: Integrase A808 sequence
  SSF46689,PF02796
MSRKRMLSENDVKEILQLRDEGISRRQVSKMYNVAEGTLYLIEKGKLYKDVLKKLGKEHEPIKDRSQIKLNNRKLKEKDIIEIFELLNNNVSKKDIIEQFNISYSLLTNILNGTAYNDIVQKHNLIAK

SEQ ID NO: 12241 - protein, 126 aa, Unknown
  Description of Unknown: Integrase A809 sequence
  G3DSA:1.10.10.60,SSF46689,PF02796
MSSKPKPGFMRPRANRDEMAARIQRVREMLAAGAKVKDIASELDVSRAAVYRIIQDHADLQINRATDPVSLCGTLGRLRATLEAQDRGFLNWIANNRVEGTTVAEFLVSCAVDAYHDETSETAAAA

SEQ ID NO: 12242 - protein, 126 aa, Unknown
  Description of Unknown: Integrase A810 sequence
  G3DSA:1.10.10.60,SSF46689
MKRKELRKVNKKGISKRQQRAIEMLLDIEKDYTKKEIAAKLGISETALYKWFKKEEFVEELNKQSEEFFKRSKNIVNKALLKKIMKGDVSAMRLYYEKENEFVQKHQFSGNFELVIDGNEINDSED

SEQ ID NO: 12243 - protein, 126 aa, Unknown
  Description of Unknown: Integrase A811 sequence
  G3DSA:1.10.10.60, SSF46689
MKRKELRKVNKKGISKRQQRAIEMLLDIEKDYTKKEIAAKLGISETALYKWFKKEEFVEELNKQSEEFFKRSKNIVNKALLKKIMKGDVSAMRLYYEKENEFVQKHQFSGNFELVIDGNEINDSEN

SEQ ID NO: 12244 - protein, 126 aa, Unknown
  Description of Unknown: Integrase A812 sequence
  G3DSA:1.10.10.60,SSF46689,PF02796
MSSKPKPGFMRPRANREEMAARIQRVREMLAAGAKVKDIATDLDVSRAAVYRIIQDHADLQINRATDPVSLCGTLGRLRATLETQDRGFLNWIANNRVEGTTVAEFLIACAVDVYHDETSETAAAA

SEQ ID NO: 12245 - protein, 125 aa, Unknown
  Description of Unknown: Integrase A813 sequence
  G3DSA:1.10.10.60,SSF46689
VAKSNAGRPSKYDDSFLGITEKYLAQGKSVTQLAKHLNVAKSTIYKWAEENKEFSDALNIGREFSQAHWEDKLEDMMFNKEVNSPLVKLYFANRFGWSDKVESKNENANVEKVKSFSEMYGNVKS

SEQ ID NO: 12246 - protein, 124 aa, Unknown
  Description of Unknown: Integrase A814 sequence
  G3DSA:1.10.10.60,SSF46689
MSTNADIFDEKAPEILADLAKHIETQLLAKVKNNEFNSELAKQIGIEVASHIAQSWGGEVIYIPRNLVLLLSERDRKIFNEFNGSNHRELARKYNVSMQWIYQIVKKVTKEEIARRQFDMFGNT

SEQ ID NO: 12247 - protein, 124 aa, Unknown
  Description of Unknown: Integrase A815 sequence
  G3DSA:1.10.10.60,SSF46689
SKSNAGRPSKYDDSFLGVTEKYLAQGKSVTQLAKHLNVAKSTIYKWAEENKEFSDALNIGREFSQAHWEDKLEDMMFNKDVNSPLVKLYFANRFGWSDKVESKNENANVEKVKSFSEMYGNVKS

SEQ ID NO: 12248 - protein, 123 aa, Unknown
  Description of Unknown: Integrase A816 sequence
  G3DSA:1.10.10.60,SSF46689
MKDETFKSKGPELLVDLSLQVAQALIELADIGVDQANQLGREIADRMAGHWGGQNIYFPMGVSYRLSQRDRQIFDEFRGDNHAELARKFGVSLQWIYKIIKAVRREEIAARQRDLFASPTSTD

SEQ ID NO: 12249 - protein, 123 aa, Unknown
  Description of Unknown: Integrase A817 sequence
  G3DSA:1.10.10.60,SSF46689
MKDETFKSKGPELLVDLSLQVAQALIELADIGADQANQLGREIADRMAGHWGGQNIYFPMGVSYRLSQRDRQIFDEFRGDNHAELARKFGVSLQWIYKIIKAVRREEIAARQRDLFASPTSTD

SEQ ID NO: 12250 - protein, 123 aa, Unknown
  Description of Unknown: Integrase A818 sequence
  G3DSA:1.10.10.60,SSF46689
MAKLGRPTKYSDDVGEIVLDLMDKGKSICQVARHLNVCRKTIYNWMDENEDFLHTVTRAKDYSEAYWETEFQKMMYSRDSQPQLVRLYMGSRFGWREQDQTVNDDQATPKSIKVEVIDARQSN

SEQ ID NO: 12251 - protein, 123 aa, Unknown
  Description of Unknown: Integrase A819 sequence
  G3DSA:1.10.10.60,SSF46689
LTKQKIGRPTKYKDEYCDKAIKFLAGGKSVTQLSAHIDVCKDTIYEWAKVHQDFSDALTRGKELSQAHWESELVNMMYNKEVNSPLVKLYFANRFGWSDKTESKNENANVESVKSFSDMYGNS

SEQ ID NO: 12252 - protein, 123 aa, Unknown
  Description of Unknown: Integrase A820 sequence
  G3DSA:1.10.10.60,SSF46689
MSDTIAQATLDIDTLKRGIEVVLDNNSALALENENLRRLADSRYHTIGDLTAQLATAKRAFGDAFVKGIKQSGPTRINRPKLSERDARDIRQAHAGGMKQADLARNYGVNPATISRIVNRVYY

SEQ ID NO: 12253 - protein, 122 aa, Unknown
  Description of Unknown: Integrase A821 sequence
  G3DSA:1.10.10.60,SSF46689
MKKHIEMRLADGATLDDIKADVMQTAINTALVACYGSQTKASELLGINRWTMRKWLSNASKRTYKPFDRVCLDVGNGTAKEMLTESYREAVSQVMSTNNNVTMTAEILKCQRGTIRKYMVKP

SEQ ID NO: 12254 - protein, 122 aa, Unknown
  Description of Unknown: Integrase A822 sequence
  G3DSA:1.10.10.60,SSF46689
MMTDAGTMDPSDTYRDEDWLRSQHNENERSVQEIADDVGVNPSTIYNWLKKHGIATVKQGGPVYEADTKMLRDEPWLRKQYVDKERSIADIAGEVGVSQPTVSQWLDSHGIESPALEEHERD

SEQ ID NO: 12255 - protein, 122 aa, Unknown
  Description of Unknown: Integrase A823 sequence
  G3DSA:1.10.10.60,SSF46689
MTAGRPTKYKEELCKRSVAFLSKGKSVTQLSAHLDVSKSTIYKWAEDHKEYSDALTRGRELSQAHWEGELVDMMYNKEVNSPLVKLYFANRFGWSDKVESKNENANVEKVKSFSEMYGNSST

SEQ ID NO: 12256 - protein, 122 aa, Unknown
  Description of Unknown: Integrase A824 sequence
  G3DSA:1.10.10.60,SSF46689
AKSNAGRPSKYDESFLGITEKYLSQGKSVTQLAKHLNVAKSTIYKWAEENKEFSDALNIGREFSQAHWEDKLEDMMFNKEVNSPLVKLYFANRFGWSDKVESKNENANVEKVKSFSEMYAGK

SEQ ID NO: 12257 - protein, 122 aa, Unknown
  Description of Unknown: Integrase A825 sequence
  G3DSA:1.10.10.60, SSF46689
SKSNAGRPSKYDDSFLGVTEKYLAQGKSVTQLAKHLNVAKSTIYKWAEENKEFSDALNIGREFSQAHWEDKLEDMMFNKDVNSPLVKLYFANRFGWSDKVESKNENANVEKVKSFSEMYAGK

SEQ ID NO: 12258 - protein, 122 aa, Unknown
  Description of Unknown: Integrase A826 sequence
  G3DSA:1.10.10.60,SSF46689
MKKNIEMRLTDGATLNDIKADVMQTAINTALVACHGNQTKASELLGINRWTMRKWLNDASNRTYKLFDRVYLYVGNGTAKEMLTEAYIEAVSQVMQTNNNVTMVAEILKCQRGTVRKYMAKP

SEQ ID NO: 12259 - protein, 122 aa, Unknown
  Description of Unknown: Integrase A827 sequence
  G3DSA:1.10.10.60,SSF46689
MKKHIEMRLADGATLNDIKADVMHTAINAALVACHGNQTAASELLQINRWTMRKWLNDASKSAYKPFDVVCLDVGNSTAKEMLTEAYMEATSQVMQTNNNVTLVAEILKCQRSTVRKYMVKP

SEQ ID NO: 12260 - protein, 122 aa, Unknown
  Description of Unknown: Integrase A828 sequence
  G3DSA:1.10.10.60,SSF46689
MKQSSILAETRHELLDDIAAHTATVLSEHGIDAGLAEQAGHAVADHLANQWRGATLYIPSDYRHQVTKRDLQILSEFNGRNHHALARKYGLTPSSIYKLLKRIQDRKFERDQGKLDLGDGLA

SEQ ID NO: 12261 - protein, 122 aa, Unknown
  Description of Unknown: Integrase A829 sequence
  G3DSA:1.10.10.60,SSF46689
MKQSSILAETRHELLDDIAAHTATVLSEHGIDAGLAEQAGHAVADHLANQWRGATLYIPSDYRHQVTKRDLQILSEFNGRNHHALARKYGLTPSSIYKLLKRIQDRKFEHDQGKLDLGDGLA

SEQ ID NO: 12262 - protein, 122 aa, Unknown
  Description of Unknown: Integrase A830 sequence
  G3DSA:1.10.10.60,SSF46689
MKKHIEMRLADGATLNDIKADVMHSAINTALVACHGNQTAASELLQINRWTMRKWLNDASKRTYKPFEQAALCVGASTAKEMLTGAYMEAVSQVMQTNNNVTLAAEILKCQRGTVRKYMVKP

SEQ ID NO: 12263 - protein, 122 aa, Unknown
  Description of Unknown: Integrase A831 sequence
  G3DSA:1.10.10.60,SSF46689
MASVDDENSDDDTGRQAFNKRQVDIMRNWSNINFRDPYPTRKEKERMAAETKLTYRQVENWFSNWRMRVWLPNSKRQKSSTMDEEVKEPPSSHTEVAISPVVSTPVTPGLLRCRLSDFREAI

SEQ ID NO: 12264 - protein, 121 aa, Unknown
  Description of Unknown: Integrase A832 sequence
  G3DSA:1.10.10.60,SSF46689
MSNGNRLTPEQVKMILSMTREGCSARHIAEVVGCSSRTVVRVRADGDARVMGPELFTPLTQEQKDFARYLLDDGAPYNEVARTLGVSRTTIERNFPGYGWTKRQAAEFTALSKKFRRLEAS

SEQ ID NO: 12265 - protein, 121 aa, Unknown
  Description of Unknown: Integrase A833 sequence
  G3DSA:1.10.10.60,SSF46689
MSNGNRLTPEQVQTILLMTREGWSAKDIGEVVGCSARTVVRVRAAGDARLASPDQFVPLSQEQKDFAQYLLDDGAPYNEVARTLGVSRTTVEKYFPGYGWSKKQAAEFTALVKKFRWLEAS

SEQ ID NO: 12266 - protein, 121 aa, Unknown
  Description of Unknown: Integrase A834 sequence
  G3DSA:1.10.10.60,SSF46689
MPAPHPKRAEVLALARAGMRPVEIARQLEIASPTVNSMITCARAMGQDVPHFQRARPGTGVRGHLRVPLTDVARADLAEAAASRGVSLPVLASRVLEAAAEDGLVAAVLDDADETGGRADG

SEQ ID NO: 12267 - protein, 121 aa, Unknown
  Description of Unknown: Integrase A835 sequence
  G3DSA:1.10.10.60,SSF46689
MSNGNRLTPEQVKTVLAMTRDGFSAKHIGEVIGCSARTVVRVRARGEARVMDPELFTPLTQEQKDFARYLLDDGAPYQEVARTLGVSSTTIEKHFPGRAWTKRQAAEFTALLKKFRRLEAS

SEQ ID NO: 12268 - protein, 121 aa, Unknown
  Description of Unknown: Integrase A836 sequence
  G3DSA:1.10.10.60,SSF46689
MSNGNRLTPEQVQTILLMTREGWSAKHIGEVVGCSARTVVRVRAAGDARLASPDQFVPLSQEQKDFAQYLLDDGAPYNEVARTLGVSRTTVEKYFPGYGWSKKQAAEFRALVKKFRWLEAS

SEQ ID NO: 12269 - protein, 121 aa, Unknown
  Description of Unknown: Integrase A837 sequence
  G3DSA:1.10.10.60,SSF46689
MSNGNRLTPEQVKTVLAMTRDGFSAKHIGEVIGCSARTVVRVRARGEARVMDPELFTPLTQEQKDFARYLLDDGAPYEEVARTLGVSSTTIERHFPGRGWTKRQAAEFTALLKKFRRLEAS

SEQ ID NO: 12270 - protein, 121 aa, Unknown
  Description of Unknown: Integrase A838 sequence
  G3DSA:1.10.10.60,SSF46689
MSNGNRLTPEQVQTILLMTREGWSAKHIGEVVGCSARTVVRVRAAGDARLASPNQFVPLSQEQKDFAQYLLDDGAPYNEVARTLGVSRTTVEKYFPGYGWSKKQAAEFRALVKKFRWLEAS

SEQ ID NO: 12271 - protein, 121 aa, Unknown
  Description of Unknown: Integrase A839 sequence
  G3DSA:1.10.10.60,SSF46689
MSKRWTAEEDKLLAVLMLKYIQGGESVRKSALIASKEMKNRTYEACYTRWTKTLKKKNDSPLKKEDYDKAFITLIIDLFKENQLLSYRLTGLERKYQKIEKKIEIEQKPVRRIGFLIEENE

SEQ ID NO: 12272 - protein, 121 aa, Unknown
  Description of Unknown: Integrase A840 sequence
  SSF46689, PF02796
MSNGNRLTPEQVQTILLMTRERCSAKHIGEVVGCSARTVVRVRAAGDARLASPDQFVPLSQEQKDFAQYLLDDGAPYNEVARTLGVSRTTVKKYFPGYGWSKKQAAEFRALVKKFRWLEAS

SEQ ID NO: 12273 - protein, 121 aa, Unknown
  Description of Unknown: Integrase A841 sequence
  G3DSA:1.10.10.60,SSF46689
MSNGNRLTKEQVKMILSMTRDGFSARHIAEVVGCSPRTVTRVRAAADARVMNPDRFTPLTADQLEFAEYLVEDGASYQEVARTLGVSRTTIERHFPGRAWTKRQAAEFTALLKKFRRLEAS

SEQ ID NO: 12274 - protein, 121 aa, Unknown
  Description of Unknown: Integrase A842 sequence
  G3DSA:1.10.10.60,SSF46689
MSNGNRLTPEQVKTVLAMTRDGFSAKHIGDVIGCSARTVVRVRARGDARVMDPELFTPLTQEQKDFARYLLDDGAPYQEVARTLGVSSTTIEKHFPGRAWTKRQAAEFTALLKKFRRLEAS

SEQ ID NO: 12275 - protein, 121 aa, Unknown
  Description of Unknown: Integrase A843 sequence
  G3DSA:1.10.10.60,SSF46689
MSNGNRLTNEQVKRILSMTRDGFSARHIAEVVGCSPRTVTRVRAAADARVMNPDRFTPLTADQLEFAEYLLEDGAPYQEVASTLGVSRTTIEKHFPGRAWKPKQIAEYQSLMVRFRRLEAS

SEQ ID NO: 12276 - protein, 121 aa, Unknown
  Description of Unknown: Integrase A844 sequence
  G3DSA:1.10.10.60,SSF46689
MSNGNRLTPEQVKTVLAMTRDGFSARHIAEVVGCSPRTVTRVRAAADARVMNPDRFTPLTADQLEFAEYLLEDGAPYQEVASTLGVSRTTIEKHFPGRAWKPKQIAEYQSLMVRFRRLEAS

SEQ ID NO: 12277 - protein, 121 aa, Unknown
  Description of Unknown: Integrase A845 sequence
  G3DSA:1.10.10.60,SSF46689
MSNGNRLTNEQVKMILAMTRDGFSARHIAEVVGCSPRTVTRVRAAADARVMNPRRFTPLTADQLEFAEYLLEDGAPYQEVARTLGVSRTTIEKHFPGRAWTKRQAAEFTALLKKFRRLEAS

SEQ ID NO: 12278 - protein, 121 aa, Unknown
  Description of Unknown: Integrase A846 sequence
  G3DSA:1.10.10.60,SSF46689
MSNGNRLTPEQVQTILLMTREGWSAKHIGEVVGCSARTVVRVRAAGDARLASPDQFVPLSQEQKDFAQYLLDDGAPYREVARTLGVSRTTVEKYFPGYGWSKKQAAEFRALVKKFRWLEAS

SEQ ID NO: 12279 - protein, 121 aa, Unknown
  Description of Unknown: Integrase A847 sequence
  G3DSA:1.10.10.60,SSF46689
MSNGNRLTNEQVKRILSMTRDGFSARHIAEVAGCSPRTVTRVRAAADARVMNPDRFTPLTADQLEFAEYLLEDGASYQEVARTLGVSRTTIEKHFPGRAWTKRQAAEFTALLKKFRRLEAS

SEQ ID NO: 12280 - protein, 121 aa, Unknown
  Description of Unknown: Integrase A848 sequence
  G3DSA:1.10.10.60,SSF46689
MSNGNRLTPEQVQTILLMTREGWSAKHIGEVVGCSARTVVRVRAAGDARLASPDQFVPLSQEQKDFAQYLLDDGAPYNEVARTLGVSWTTVKRYFPGYGWSKKQAAEFTALVKKFRWLGAS

SEQ ID NO: 12281 - protein, 121 aa, Unknown
  Description of Unknown: Integrase A849 sequence
  G3DSA:1.10.10.60,SSF46689
MSNGNRLTPEQVKMILSMTREGCSARHIAEVVGCSSRTVVRVRADGDARVMGPELFTPLTQEQKDFARYLLDDGAPYNEVARTLGVSWTTIERNFPGYGWTKRQAAEFTALSKKFRRLEAS

SEQ ID NO: 12282 - protein, 121 aa, Unknown
  Description of Unknown: Integrase A850 sequence
  G3DSA:1.10.10.60,SSF46689
MSNGNRLTPEQVQTILLMTREGWSAKHIGEVVGCSARTVVRVRAAGDARLASPDQFVPLSQEQKDFAQYLLDDGAPYNEVARTLGVSRTTVERYFPGYGWSKKQAAEFTALVKKFRWLEAS

SEQ ID NO: 12283 - protein, 121 aa, Unknown
  Description of Unknown: Integrase A851 sequence
  G3DSA:1.10.10.60,SSF46689
MSATSTQQRATIADRRALVTDLTRAGLSAPQIAERLGITTRTVQRHRVAAGIAQPPARHLTPEQIEKARQLLVDGASYKEAARTIGCDKATVAKRFPGYAWTLSECGRWGRFLDRTRERSA

SEQ ID NO: 12284 - protein, 120 aa, Unknown
  Description of Unknown: Integrase A852 sequence
  G3DSA:1.10.10.60,SSF46689
MTTNVPIHREEVARRREAIAELTRAGLSAPEIAIRLNVTARTVVRHRALAGVSKPTHPRLTEEQLATARRLIDEGAPYKEIARTIGCHECTVAQRFPGRGWTRKQIDEWRRERRLWADAS

SEQ ID NO: 12285 - protein, 120 aa, Unknown
  Description of Unknown: Integrase A853 sequence
  G3DSA:1.10.10.60,SSF46689
MTTNVPTDREEVARRREAIAELTRAGLSAPEIALRLNVTARTVVRHRALAGVSKPTYPRLTEEQLATARRLIDEGAPYKEIARTIGCHESTVAQHFPGRGWTRKQIDEWRREVRLWVDAS

SEQ ID NO: 12286 - protein, 120 aa, Unknown
  Description of Unknown: Integrase A854 sequence
  G3DSA:1.10.10.60,SSF46689
MTTNVPIHREEVARRREAIAELTRAGLSAPEIAIRLNVTARTVVRHRALAGVSKPTHPRLTEEQLATARRLIDEGAPYKEVARTIGCHECTVAQRFPGRGWTRKQIDEWRREVRLWADAS

SEQ ID NO: 12287 - protein, 120 aa, Unknown
  Description of Unknown: Integrase A855 sequence
  G3DSA:1.10.10.60, SSF46689
MTTNVPTDREEVARRREAIAELTRAGLSAPEIAIRLNVTARTVVRHRALAGVSKPTHPRLTEEQLATARRLIDEGAPYKEIARTIGCHESTVAQHFPGRGWTRKQIDEWRREVRLWVDAS

SEQ ID NO: 12288 - protein, 120 aa, Unknown
  Description of Unknown: Integrase A856 sequence
  G3DSA:1.10.10.60,SSF46689
MTRWLQIKDDYLELHAEGITARQAAERLGVSPRTIQRTRDRLGLSQPTTGGGKRPTPEQLEYARQLLEDGCSMTDAARSAGTTFNALKRRWPDKVWDPTTVGQYARQLDQLKRLELGRTK

SEQ ID NO: 12289 - protein, 120 aa, Unknown
  Description of Unknown: Integrase A857 sequence
  G3DSA:1.10.10.60,SSF46689
MTTNVPTDREEVARRRETIAELTRAGLSAAEIALRLNITPRTVVRQRALAGVSKPTYPRLTEEQLATARQLIDEGAPYKEVARTIGCCQSTIAQRFPGRGWTRKQIDEWRREVRLWVDAS

SEQ ID NO: 12290 - protein, 120 aa, Unknown
  Description of Unknown: Integrase A858 sequence
  G3DSA:1.10.10.60,SSF46689
MTTNVPTDREEVARRRETIAELTRAGLSAAEIAVRLNITPRTVVRQRAAAGVSKPTYPRLTEEQIETARRLIDEGAPYKEVARTIGCCQSTVAQRFPGRGWTRKQIDEWRRERRLWAAAS

SEQ ID NO: 12291 - protein, 120 aa, Unknown
  Description of Unknown: Integrase A859 sequence
  G3DSA:1.10.10.60,SSF46689
MTTNVPIHREEVARRREAIAELTRAGLSAPEIAIRLNITARTVVRHRALAGVSKPTHPRLTEEQLATARRLIDEGAPYKEIARTIGCHESTVAQHFPGRGWTRKQIDEWRREVRLWVDAS

SEQ ID NO: 12292 - protein, 120 aa, Unknown
  Description of Unknown: Integrase A860 sequence
  G3DSA:1.10.10.60,SSF46689
MKEIRSQQIRRRNNMLSELAELIVEAFVRNGLSREKAVSESEELVFQLHRRWAGITFVFPVKDELARKRLELHILQRYDGSNADKLVREFGVTEDWIYSVVRKHRRQRRTDQLGLFDPAE

SEQ ID NO: 12293 - protein, 119 aa, Unknown
  Description of Unknown: Integrase A861 sequence
  G3DSA:1.10.10.60,SSF46689
MKEIRSQQIRRRNNMLSELAELIVEAFVRNGIPREKAVPESEEVAFQLHRRWAGLTFVFPVKDDLARKRLELHILQRYDGSNADKLVQEFGISEGLIYEIVRKHRRQRKDQMTLFDPAE

SEQ ID NO: 12294 - protein, 117 aa, Unknown
  Description of Unknown: Integrase A862 sequence
  G3DSA:1.10.10.60,SSF46689
MTTWKKLTPEQIERIVSLTWDGWSIEQIATDIGCTSRTVTRVRGKHNITRGRALDPIPVEKLAVAARLLEEGASYTEAANTVGCSRSVLAAKFPGRGWDRKQCAEWRSIIRMERAIA

SEQ ID NO: 12295 - protein, 117 aa, Unknown
  Description of Unknown: Integrase A863 sequence
  G3DSA:1.10.10.60,SSF46689
MKLNKKHQKAIELLFEGSLKRREIAEELNISEQTLYNWLKDEKFTNAYDEYVKMIMGKSSGKALHTMLKLMSARSEMVRFNAAKDILDRSGYTPVNKQQVEISETPLFVDDIGDDDG

SEQ ID NO: 12296 - protein, 117 aa, Unknown
  Description of Unknown: Integrase A864 sequence
  G3DSA:1.10.10.60,SSF46689
MRRGAKLPEWVVERIVALSWNGWTTGDIAKEVGCSDRTVSRVRVRHGISRGEAHDPIPEHVLAQAARLLDDGASYTDAAATVGCSRTALRRKFPGRGWDRRQCAEWRVIARMERAIA

SEQ ID NO: 12297 - protein, 117 aa, Unknown
  Description of Unknown: Integrase A865 sequence
  G3DSA:1.10.10.60,SSF46689
MRRGAKLPEWVVERIVALSWNGWTTGDIAKEVGCSDRTVSRVRVRHGISRGEAHNPIPEHVLAQAARLLDDGASYTDAAATVGCSRTALRRKFPGRGWDRRQCAEWRVIARMERAIA

SEQ ID NO: 12298 - protein, 117 aa, Unknown
  Description of Unknown: Integrase A866 sequence
  G3DSA:1.10.10.60,SSF46689
MRRGAKLPEWVVERIVALSWNGWTIGDIAKEVGCSDRTVSRVRVRHGISRGEAHDPIPEHVLAQAARLLDDGASYTDAAATVGCSRTALRRKFPGRGWDRRQCAEWRVIARMERAIA

SEQ ID NO: 12299 - protein, 117 aa, Unknown
  Description of Unknown: Integrase A867 sequence
  G3DSA:1.10.10.60,SSF46689
MRRGAKLPEWVVERIVALSWNGWTTGDIAKEVGCSDRTVSRVRVRHGISRGESHDPIPEHVLAQAARLLDDGASYTDAAATVGCSRTALRRKFPGRGWDRKQCAEWRSIIRMERAIA

SEQ ID NO: 12300 - protein, 117 aa, Unknown
  Description of Unknown: Integrase A868 sequence
  G3DSA:1.10.10.60,SSF46689
MTTWKKLTPEQIERIVSLTWDGWSIEQIAADIGCTSRTVTRVRGKHNITRGRALDPIPVEKLAVAARLLEEGASYTEAANTVGCSRSVLAAKFPGRGWDRKQCAEWRSIIRMERAIA

SEQ ID NO: 12301 - protein, 116 aa, Unknown
  Description of Unknown: Integrase A869 sequence
  G3DSA:1.10.10.60,SSF46689
MTPNIIIIVDNKMENTNALEINAAITLVTLRRNSVNFDTRKKTPQNNGNKIFRSRQPNKYQDVLTFIYQQHKYPDPHMYQNLSIILGLSIRQIQIWFQNRRARDSKKNRLSNKLGK

SEQ ID NO: 12302 - protein, 116 aa, Unknown
  Description of Unknown: Integrase A870 sequence
  G3DSA:1.10.10.60, SSF46689
MTPNIIIIVDNKMENTNALEINAAITLVTLRRNSVNFDTRKKTPQNNGNKIFHNRRPNKYQDVLTFIYQQHKYPDPHMYQNLSIILGLSIRQIQIWFQNRRARDSKKNRLSNKLGK

SEQ ID NO: 12303 - protein, 116 aa, Unknown
  Description of Unknown: Integrase A871 sequence
  G3DSA:1.10.10.60,SSF46689
MTPNIIIIVDNKMENTNALEINAAITLVTLRRNSVNFETHKKPRQNSENKIFRGRQPNKYQDVLTFIYQQYKYPDPHMYQNLSVILGLSIRQIQIWFQNRRARDSKKIRLNNKLEK

SEQ ID NO: 12304 - protein, 115 aa, Unknown
  Description of Unknown: Integrase A872 sequence
  cd00569,G3DSA:1.10.10.60,SSF46689
MTGRVLTPIEVEKVAWWTQLGWTAAQIADKLGCTTRTVSRARAKSGVAKPKPPALSAEVLAEAARMLADGASQNEVARTLGVGQSTISAHFRGQGWTREQSIEWVSFLRRYRGVA

SEQ ID NO: 12305 - protein, 115 aa, Unknown
  Description of Unknown: Integrase A873 sequence
  G3DSA:1.10.10.60,SSF46689
MTGRVLTPVEVEKVAWLTRMGWTATQIAEQLGCHHRTVQRARAKTGVAKPKPPALSTEILEEAARMLADGASQNEVARTLGVGQATISAHFRGQGWTREQSIEWISFIRRYRGVA

SEQ ID NO: 12306 - protein, 115 aa, Unknown
  Description of Unknown: Integrase A874 sequence
  G3DSA:1.10.10.60,SSF46689
MTGRVLTPVEVEKVAWLTRMGWTATQIAEQLGCHQRTVQRARAKTGVAKPKPPALSTEILEEAARMLADGASQNEVARTLGVGQATISAHFRGQGWTREQSIEWISFIRRYRGVA

SEQ ID NO: 12307 - protein, 115 aa, Unknown
  Description of Unknown: Integrase A875 sequence
  G3DSA:1.10.10.60,SSF46689
MTGRVLTPVEVEKVAWLTRMGWTAKQIAEQLGCHHRTVQRARAKTGVAKPKPPALSTEILEEAARMLADGASQNEVARTLGVGQATISAHFRGQGWTREQSIEWISFIRRYRGVA

SEQ ID NO: 12308 - protein, 115 aa, Unknown
  Description of Unknown: Integrase A876 sequence
  cd00569,G3DSA:1.10.10.60,SSF46689
MTGRVLTPVEVEKVAWLTRMGWTAPQIAEQLGCHHRTVQRARAKTGVAKPKPPALSAEVLAEAARMLADGASQNEVARTLGVGQATISAHFRGQGWTREQSIEWISFIRRYRGVA

SEQ ID NO: 12309 - protein, 115 aa, Unknown
  Description of Unknown: Integrase A877 sequence
  G3DSA:1.10.10.60,SSF46689
MTGRVLTPVEVEKVAWLTRMGWTAPQIAEQLGCHHRTVQRARAKTGVAKPKPPALSTEILEEAARMLADGASQNEVARTLGVGQATISAHFRGQGWTREQSIEWISFIRRYRGVA

SEQ ID NO: 12310 - protein, 114 aa, Unknown
  Description of Unknown: Integrase A878 sequence
  G3DSA:1.10.10.60,SSF46689
MKFTDTPTTTLDELLNSTRGNISQAAKVIGINRGTLRNYIAKKDKVLLVQIDGKLVVFVADRRQGSHKKATQKSELVFMWSDEHKEDRWHIRSGDYYYGPYDTKGEAEFMLERN

SEQ ID NO: 12311 - protein, 113 aa, Unknown
  Description of Unknown: Integrase A879 sequence
  G3DSA:1.10.10.60,SSF46689
MSKSIFSKEMDAFAIDILIRISMTLVESPIETEITEPVVKKLKGKREKIKNAGPLNEWFLSHLDYPYPNRAMRDELASRSGLTEKQVANWFGNARKRRPEYRKDAFVEDDDLW

SEQ ID NO: 12312 - protein, 112 aa, Unknown
  Description of Unknown: Integrase A880 sequence
  SSF53041,cd03768,PTHR30461:SF3,PF00239, PS51736,G3DSA:3.40.50.1390,PTHR30461,G3DSA:1.10.10.60,SSF46689, PF02796
MLVEELRDRGINFRSLTDSIDTSTPMGRFFFHVMGALAEMERELIVERTRAGLDAARAEGRIGGRRPKYQEETWQQMRRLLEKGIPRKQVAIIYDVAVSTLYKKFPASSFQS

SEQ ID NO: 12313 - protein, 112 aa, Unknown
  Description of Unknown: Integrase A881 sequence
  G3DSA:1.10.10.60,SSF46689
MTIPSNTCHTASYFTTGLEIMTKERILDVAYSMALSDGFSCLKRDDIAAKAGVAQGTINHHFKYISHLKDDVMKIAVEKGDLKIIAEGIVSGNTVALSASHALKMEALQSLA

SEQ ID NO: 12314 - protein, 110 aa, Unknown
  Description of Unknown: Integrase A882 sequence
  G3DSA:1.10.10.60,SSF46689
MDTFESELTLDMISEGMYRDIAEEIGVLNFLKVAKLVGGTTFYIPKAESLMRPVRDLHIKKEFNGYNHLELAQRYDVTERWVRQICGDGSIEGQVTIFDIGCENDMENTS

SEQ ID NO: 12315 - protein, 109 aa, Unknown
  Description of Unknown: Integrase A883 sequence
  G3DSA:1.10.10.60,SSF46689
MSDVMWQPGVTIADLEKGAIKSALRFYGNKTDAAKSLGISVRTIDNKLKEYENQKIASEQAAKIAREKKLAEFRGLSVGTDNEKEVILPRGDAEQKTPNPQSDADEYKK

SEQ ID NO: 12316 - protein, 109 aa, Unknown
  Description of Unknown: Integrase A884 sequence
  G3DSA:1.10.10.60,SSF46689
MEDLVKELTIDMVPDGDNRIIAETIGVENYYKLCSVVGGSTIYLQKPESVLRPVRDAHIKAEFNGYNHPELARKYGVTERWVRQLCGEGKLEGQMSLLDYGDEPENTTF

SEQ ID NO: 12317 - protein, 108 aa, Unknown
  Description of Unknown: Integrase A885 sequence
  G3DSA:1.10.10.60,SSF46689
MAKKNYSEEFRRDAVELYRDTGGATVAGIAADLGVSHGSLTTWLRNAGIPIRRPAATAPGPGTGETPEQEAARLRAEVAHLRAEKTKLETERDILRSAAKYFAGETNW

SEQ ID NO: 12318 - protein, 108 aa, Unknown
  Description of Unknown: Integrase A886 sequence
  G3DSA:1.10.10.60,SSF46689
MENLDILELNAAITLVSLRRNSVNIGIRKKNPQNKDKLNNFNYKCYPKKYQDILTFIYQQQKYPDPYMYKNLSITLGLTIHQIQTWFQNRRSRDNKKNILDNQPEINM

SEQ ID NO: 12319 - protein, 106 aa, Unknown
  Description of Unknown: Integrase A887 sequence
  G3DSA:1.10.10.60,SSF46689
MGKRWTDKEDETLLLILSTSPKASYKEVARSMNRTPCSIRARYLKLRKRWGDLPPRGGVYTPEERVRVATLAKKHTLKEIAEIMNRSVHAIRCYCFRNKITLKVRR

SEQ ID NO: 12320 - protein, 104 aa, Unknown
  Description of Unknown: Integrase A888 sequence
  G3DSA:1.10.10.60,SSF46689
MEKVIIIYHEHLNSFEESAVKILSGWKSERKNGIRFKMDGKKKCRLFTTCQLLILEEFYKANKYISMDKSIQLARTFGVTRKQINTWFQNKRAHDKRFESMNKN

SEQ ID NO: 12321 - protein, 104 aa, Unknown
  Description of Unknown: Integrase A889 sequence
  G3DSA:1.10.10.60,SSF46689
MENPTTLEINAAIILVKLRRNSVNFDTRKKTPQNNENKIFRSRRPNKYQDVLTFIYQQQKYPDPHMYQNLSIILGLSIRQIQIWFQNRRARDSKKIRLNNKLEK

SEQ ID NO: 12322 - protein, 101 aa, Unknown
  Description of Unknown: Integrase A890 sequence
  G3DSA:1.10.10.60, SSF46689
MDKKIIIIDRENFDSFEETAINILSKWKYERKNSIKPKMNYKFRKTRLFSPSQLIILNEFYKNNKYISIDKSIQLSRIFGVTRKQINTWFQNKRSYGKQQK

SEQ ID NO: 12323 - protein, 100 aa, Unknown
  Description of Unknown: Integrase A891 sequence
  G3DSA:1.10.10.60,SSF46689
MKKRNFSAEFKRESAQLVVDQKYTVADAAKAMDVGLSTMTRWVKQLRDERQGKTPKASPITPEQIEIRELRKKLQRIEMENEILKKATALLMSDSLNSSR

SEQ ID NO: 12324 - protein, 100 aa, Unknown
  Description of Unknown: Integrase A892 sequence
  G3DSA:1.10.10.60,SSF46689
MEKWMHKLKVEDLPEVYQNLAQVIGVDGVIKMTQEFGGTYMYIPKVDGLLRVARDQKIAEAHKNGDSIRKLAREFGISDSRVRTILNEYALDQNQLALFD

SEQ ID NO: 12325 - protein, 100 aa, Unknown
  Description of Unknown: Integrase A893 sequence
  G3DSA:1.10.10.60,SSF46689
MNKIIIIYCNHFDSFEESVVQILSNLQCQRKNGVKMTKVKKFRRSRLFTTTQLQILEETYKGNKYISLNEKIGLSKNFGVTVKQISIWFANRRAYDARKN

SEQ ID NO: 12326 - protein, 99 aa, Unknown
  Description of Unknown: Integrase A894 sequence
  G3DSA:1.10.10.60,SSF46689
MSKKHKTYTTEFKAEAIKLIEANQGNVSETARQLSISMQTLSNWNTKAKAGTLAGTKQYSPDLNALLEENKKLKQQLKIAEMEREFLKKAAAYFAKESQ

SEQ ID NO: 12327 - protein, 98 aa, Unknown
  Description of Unknown: Integrase A895 sequence
  G3DSA:1.10.10.60,SSF46689
MSGKRYPEEFKIEAVKQVVDRGHSVSSVATRLGITTHSLYAWIKAYGPDSSTNKVQSDAQAEIRRLQKELKRVTDERDILNLQRRTSQSCPTEVRLYP

SEQ ID NO: 12328 - protein, 98 aa, Unknown
  Description of Unknown: Integrase A896 sequence
  G3DSA:1.10.10.60,SSF46689
MELQDWRKEPRKKYSNEFKLRMVELASQPGACVAQIARENGVNDNVIFKWLRLWQNEGRVSRRLPVTTSSDTGVELLPVEITPDEQKEPVAAIAPSLY

SEQ ID NO: 12329 - protein, 97 aa, Unknown
  Description of Unknown: Integrase A897 sequence
  G3DSA:1.10.10.60,SSF46689
MNATELLDQLREKVEALEEENTHLSNQLEIGRRSFGKAFMNGAVRGPNRPNRRKLTPREVHDIRTAYRNGMSQAELARTYEVNPSTISRTIGRVYHS

SEQ ID NO: 12330 - protein, 97 aa, Unknown
  Description of Unknown: Integrase A898 sequence
  G3DSA:1.10.10.60,SSF46689
MTDRTRMKWTPELHAIFIDTCARLGGIYKAKPVEIMRLMNIPEISRDHVKSYLQKLRKEEDACNIALYGCSVKNTDATKKYNEICGLLNQAIKQMPE

SEQ ID NO: 12331 - protein, 96 aa, Unknown
  Description of Unknown: Integrase A899 sequence
  G3DSA:1.10.10.60,SSF46689
MSRKIRRHFTDDFKQQIVDLYNAGRKRSSLIKEYELTPSTFDKWVRQAKTTGSFKSVDNLTDEQRKLIELRKRNKELEMQLDILKQAAVIMAQKGK

SEQ ID NO: 12332 - protein, 96 aa, Unknown
  Description of Unknown: Integrase A900 sequence
  G3DSA:1.10.10.60,SSF46689
MSRKIRRHFTDDFKQQIVDLHNAGRKRSELIKEYDLTPSTFDKWVRQAKLTGSFKSVDNMTDEQRELIQLRKRNKELEMQLDILKQAAVIMVRKGK

SEQ ID NO: 12333 - protein, 95 aa, Unknown
  Description of Unknown: Integrase A901 sequence
  G3DSA:1.10.10.60,SSF46689
MLQRGSQPGRPLNPREGVSMTSKRWNAPYFMDSVGRRRKLSDSAMKAICREYRDGETVRELAESYGVSTSLIRSVVYWTPRAKDEPKIELSEDQG

SEQ ID NO: 12334 - protein, 95 aa, Unknown
  Description of Unknown: Integrase A902 sequence
  G3DSA:1.10.10.60,SSF46689
MPNQETLNRKKARKAEVARLLLAGMTQTAIAQIYGLSVSCISLYAKEMQIPCKADWYVSRNKILDLHRQGLRQSEIARKLALSRQRVSEIIKKFA

SEQ ID NO: 12335 - protein, 94 aa, Unknown
  Description of Unknown: Integrase A903 sequence
  G3DSA:1.10.10.60,SSF46689
MNDTQTSVLNAAMKLSRIHGFQHIKRDDIAETANVSTGIVSYYYSIPEMRDAVMQEAVRVNDAVIICQGLAAKHPIAQGAPEALRREAVELLLK

SEQ ID NO: 12336 - protein, 93 aa, Unknown
  Description of Unknown: Integrase A904 sequence
  G3DSA:1.10.10.60,SSF46689
MPRQRRTFTDDFKRQMVQLHENGKSRAAIINEYELSASALDRWIKQANQSGSFSEKDNRSLEENELIALRKENQRLKMEVDILKQAALIMGRK

SEQ ID NO: 12337 - protein, 93 aa, Unknown
  Description of Unknown: Integrase A905 sequence
  G3DSA:1.10.10.60, SSF46689
MSRAINTHEPRTAKMEVSLVSELLIKFYGNKSHVAEHLKLQRTTLNKYLNEYGDIMMMKFGDQWVPLTQLSRRHNEPKVDIQEVIDAINKVRL

SEQ ID NO: 12338 - protein, 92 aa, Unknown
  Description of Unknown: Integrase A906 sequence
  G3DSA:1.10.10.60,SSF46689
MGNKNTGKKYNEDFKKMIVDLYNSGSSAKDLSSEYGVSEVTIYAWVKKFSPIQTEDGSTVTADEIANMKKQMLRLQEENEILKKAMAIFAKK

SEQ ID NO: 12339 - protein, 91 aa, Unknown
  Description of Unknown: Integrase A907 sequence
  G3DSA:1.10.10.60,SSF46689
MAETPTLLRVLDEIEDILAENEDLRHEVEKLRAESLHAKGAGRPNRKKLSAEEAKYIREMARNGISQAEIAWSFDVNRSTISRIVRGIYHR

SEQ ID NO: 12340 - protein, 91 aa, Unknown
  Description of Unknown: Integrase A908 sequence
  G3DSA:1.10.10.60,SSF46689
MAETPTLLRVLDEIEDILAENEDLRHEVEKLRAQSLHAKGAGRPNRKKLSAEEAKYIREMARSGISQAEIAWSFDVNRSTISRIVRGIYHR

SEQ ID NO: 12341 - protein, 91 aa, Unknown
  Description of Unknown: Integrase A909 sequence
  G3DSA:1.10.10.60,SSF46689
MAETPTLLRVLDEIEDILAENEDLRHEVEKLRAESLHAKGAGRPNRKKLSAEEAKYIREMARSGISQAEIAWSFDVNRSTISRIVRGVYHR

SEQ ID NO: 12342 - protein, 91 aa, Unknown
  Description of Unknown: Integrase A910 sequence
  G3DSA:1.10.10.60,SSF46689
MADTSTLLKVLDEIEGLIEENEDLQHQVEKLRAESLHTKGAARPNRKKLTRDEVKYIREMARNGIPQAEIAWSFDVNRSTISRIVRGIYHR

SEQ ID NO: 12343 - protein, 91 aa, Unknown
  Description of Unknown: Integrase A911 sequence
  G3DSA:1.10.10.60,SSF46689
MAETPNLLRVLDEIEDILAENEDLRHQVERLRAESLHAKGAGRPNRKKLTPEEAKYIREMARSGIPQAEIAWSFDVNRSTISRIVRGIYHR

SEQ ID NO: 12344 - protein, 91 aa, Unknown
  Description of Unknown: Integrase A912 sequence
  G3DSA:1.10.10.60,SSF46689
MAETPTLLRVLDEIEDILAENEDLRLEVEKLRAESLHAKGAGRPNRKKLSAEEAKYIREMARSGISQAEIAWSFDVNRSTISRIVRGIYHR

SEQ ID NO: 12345 - protein, 91 aa, Unknown
  Description of Unknown: Integrase A913 sequence
  G3DSA:1.10.10.60,SSF46689
MSTFKRYDEEFKQSLVNLYQTGKTQSELCKDYGVSASALAKWIKQYSQVRLEDNSVLTAKQIQELQKRNAQLEEENLILKKASAIFMQNLK

SEQ ID NO: 12346 - protein, 90 aa, Unknown
  Description of Unknown: Integrase A914 sequence
  G3DSA:1.10.10.60,SSF46689
MREGRLSVVYLKEEEKQKRTIDAVKYMMKHNLTMNLAGRRYGLPRSTLHRFIHKHLEGWDKELYDEVIKFIKRRRKQIALEASYSYHGRP

SEQ ID NO: 12347 - protein, 87 aa, Unknown
  Description of Unknown: Integrase A915 sequence
  G3DSA:1.10.10.60,SSF46689
MRSLYSTCDVKIPIQKWKNTNKKKACGKKISGHSLDVLLRWYTAGFTPNAEQRFSLSQDLDLTPIQIKNWFYNKKRNEKKLKNNTLE

SEQ ID NO: 12348 - protein, 87 aa, Unknown
  Description of Unknown: Integrase A916 sequence
  G3DSA:1.10.10.60,SSF46689
MRSLYSTCDVKIPIQKWKNTNKKKACGKKISGHSLEVLLRWYTAGFTPNAEQRFSLSQDLDLTPIQIKNWFYNKKRNEKKLKYNTLE

SEQ ID NO: 12349 - protein, 87 aa, Unknown
  Description of Unknown: Integrase A917 sequence
  G3DSA:1.10.10.60,SSF46689
MADVREVADLLNRLNVIVRELVSENSQLKAAAAGKGNRPKLTDSEVSSVRELYRAGLSQRQIAEAYDVNPATISRIVRGIYHTKGGS

SEQ ID NO: 12350 - protein, 87 aa, Unknown
  Description of Unknown: Integrase A918 sequence
  G3DSA:1.10.10.60,SSF46689
MADVREVADLLNRLNTIVRELVSENSQLKAEAEGKASRPKLSPGEVSSIRELYRAGLSQKAIADTYDVNPATVSRIVRGIYHAKGGS

SEQ ID NO: 12351 - protein, 87 aa, Unknown
  Description of Unknown: Integrase A919 sequence
  G3DSA:1.10.10.60,SSF46689
MADVREVADLLNRLNVIVRELVSENSQLKAAAAGKGNRPKLTDSEVSSVRELYRAGLSQRQIAEAYDVNPATVSRIVRGIYHTKGGS

SEQ ID NO: 12352 - protein, 87 aa, Unknown
  Description of Unknown: Integrase A920 sequence
  G3DSA:1.10.10.60, SSF46689
MADVREVADLLNRLSTIVRELVSENSRLKAAVEGKSNRPKLTDNEVASIRELYRAGLSQKAIAEVYDVNPATISRLVRGIYHNKGGS

SEQ ID NO: 12353 - protein, 87 aa, Unknown
  Description of Unknown: Integrase A921 sequence
  G3DSA:1.10.10.60,SSF46689
MADVREVADLLNRLNGIVRELVSENSQLKAAVGGNSNRPKLTDNEVASIRELYRAGLSQKAIAEVYDVNPATISRLVRGIYHNKGGS

SEQ ID NO: 12354 - protein, 87 aa, Unknown
  Description of Unknown: Integrase A922 sequence
  G3DSA:1.10.10.60,SSF46689
MADVREVADLLNRLSTIVRELVSENSRLKAAVEGNSNRPKLTDNEVASIRELYRAGLSQKAIAEVYDVNPATISRLVRGIYHNKGGS

SEQ ID NO: 12355 - protein, 87 aa, Unknown
  Description of Unknown: Integrase A923 sequence
  G3DSA:1.10.10.60,SSF46689
MADVREVADLLNRLSTIVRELVSENSQLKAAVEGKSNRPKLTDNEVASIRELYRAGLSQKAIAEVYDVNPATISRLVRGIYHNKGGS

SEQ ID NO: 12356 - protein, 87 aa, Unknown
  Description of Unknown: Integrase A924 sequence
  G3DSA:1.10.10.60,SSF46689
MAEVREVADLLNRLNVIVRELVSENSQLKAAAAGKGNRPKLTDNEVSSVRELYRAGLSQRQIAEAYDVNPATISRIVRGIYHTKGGS

SEQ ID NO: 12357 - protein, 86 aa, Unknown
  Description of Unknown: Integrase A925 sequence
  PS51736,PS00397
MEVDYVTTKEACRITGFKAPTLRGWSNVGKVKTTRTLANQRLYDRQSLLSFIGGVNDGIEKEKIIYCRVSSKKQSEHFEHQIEFCK

SEQ ID NO: 12358 - protein, 84 aa, Unknown
  Description of Unknown: Integrase A926 sequence
  G3DSA:1.10.10.60,SSF46689
MREVADLLNRLNTIVRELVSENSQLKAEAEGKASRPKLSPGEVSSIRELYRAGLSQKAIADTYDVNPATVSRIVRGIYHAKGGS

SEQ ID NO: 12359 - protein, 84 aa, Unknown
  Description of Unknown: Integrase A927 sequence
  SSF53041,PTHR30461:SF3,PF00239,PS51736,G3DSA:3.40.50.1390, cd00569,PTHR30461,G3DSA:1.10.10.60,SSF46689, PF02796
MGRFFFHIMGALAEMERELIVERTRAGLAAAREQGRIGGRRPKLTPEQWAQAGRLIGAGVPRQQVAIIYDVGLSTLYRKFPARC

SEQ ID NO: 12360 - protein, 84 aa, Unknown
  Description of Unknown: Integrase A928 sequence
  G3DSA:1.10.10.60,SSF46689
MKSREFKSIVFGCEPQYEIEGLKTSQITVSTLQDLLVHTRGNQTKAAELLGAHRQTIKTMLQQNRPNVILIENVGDEYFYKLMK

SEQ ID NO: 12361 - protein, 84 aa, Unknown
  Description of Unknown: Integrase A929 sequence
  G3DSA:1.10.10.60,SSF46689
MKNLNNPLSTFIKLEKTQSELCKDYGVSASALAKWIKQYSQVRLEDNSVLTAKQIQELQKRNAQLEEENLILKKASAIFMQNLK

SEQ ID NO: 12362 - protein, 83 aa, Unknown
  Description of Unknown: Integrase A930 sequence
  G3DSA:1.10.10.60,SSF46689
MTSRYDKEFKQNIINLYKQGESAAQMAREYGIGYSTVHKWIQGQAKTQSGKSPDEIKAMEKRLASLSEENEILKKALGFLAQK

SEQ ID NO: 12363 - protein, 83 aa, Unknown
  Description of Unknown: Integrase A931 sequence
  G3DSA:1.10.10.60,SSF46689
MADVREVADLLNRLNVIVRELVSENSQLKAAAAGKGNRPKLSDNEVSSVRELYRAGLSQRQIAEAYDVNPATISRIVRGIYHT

SEQ ID NO: 12364 - protein, 83 aa, Unknown
  Description of Unknown: Integrase A932 sequence
  G3DSA:1.10.10.60, SSF46689
MADVREVADLLNRLNTIVRELVSENSQLKAAAAGKGNRPKLTDSEVSSVRELYRAGLSQRQIAEAYDVNPATISRIVRGIYHT

SEQ ID NO: 12365 - protein, 83 aa, Unknown
  Description of Unknown: Integrase A933 sequence
  G3DSA:1.10.10.60,SSF46689
MADVREVSDLLNRLNVIVRELVSENSQLKAAAVGKGNRPKLTANEVSSVRELYRAGLSQRQIAEAYDVNPATISRIVRGIYHT

SEQ ID NO: 12366 - protein, 83 aa, Unknown
  Description of Unknown: Integrase A934 sequence
  G3DSA:1.10.10.60,SSF46689
MSTFKRYDEEFKQSLVNLYQTGKTQSELCKDYGVSASALAKWIKQYSQVRLEDNSVLTAKQIQELQKRNAQLEEENLESVTLN

SEQ ID NO: 12367 - protein, 80 aa, Unknown
  Description of Unknown: Integrase A935 sequence
  G3DSA:1.10.10.60,SSF46689
MRSLYSTCDVKIPIQKWYNINKKKACGKKISGHSLDVLLRWYTAGFTPNAEQRFSLSQDLDLTPIQIKNWFYNKKRNEKN

SEQ ID NO: 12368 - protein, 77 aa, Unknown
  Description of Unknown: Integrase A936 sequence
  G3DSA:1.10.10.60,SSF46689
MKLKRKVRRGEMTKTSIDQEIDEAIAKGGSFYKIRRRFEKAILERALIKTRGNQTEAAKMLGISRSGLGGILKRVGR

SEQ ID NO: 12369 - protein, 76 aa, Unknown
  Description of Unknown: Integrase A937 sequence
  PS51736,cd00569,G3DSA:1.10.10.60,SSF46689,PF02796
MFGALGEFERNLMIERVNAGIESAKAKGRVGGRPKSMTPEQIKMARDLVDAGHNKTDIAEQMGVSRATLYRNLETA

SEQ ID NO: 12370 - protein, 74 aa, Unknown
  Description of Unknown: Integrase A938 sequence
  cd00569,G3DSA:1.10.10.60,SSF46689,PF02796
MAIIRAVCSVHFRAGLAAARAQGRVGGRRPKLTPEQWEQAGRLLAAGETRHRVGLLFDVSISTLYKKFPVNQSR

SEQ ID NO: 12371 - protein, 74 aa, Unknown
  Description of Unknown: Integrase A939 sequence
  SSF53041,cd03768,PF00239,PS51736,SM00857, G3DSA:3.40.50.1390,PS00397,PTHR30461
MLIGYVRVSTNEQNTALQRNALESAGCELIFEDKASGKKAERPGLKKVLRMLSRGDTLVVWALDHFAGSSVTWL

SEQ ID NO: 12372 - protein, 74 aa, Unknown
  Description of Unknown: Integrase A940 sequence
  G3DSA:1.10.10.60,SSF46689
MKFTDTPTTTLDEVLISTRGNISQAAKAIGINRGTLRNYIAKKDKVLLVQVDGKLVPFVADRRQGSHKKESNND

SEQ ID NO: 12373 - protein, 74 aa, Unknown
  Description of Unknown: Integrase A941 sequence
  G3DSA:1.10.10.60,SSF46689
MKFTDTPTTTLDELLISTRGNISHAATKIGITRTTLRNYIAKKDKVLLVQVDGKLVPFVADRRQGSHKKESNNG

SEQ ID NO: 12374 - protein, 74 aa, Unknown
  Description of Unknown: Integrase A942 sequence
  G3DSA:1.10.10.60,SSF46689
MKFTDTPTTTLDELLIKHRGNISHAALELGINRTTLRNYIAKKDKVLLVQIDGKLVPFVADRRQGAHKKESNNG

SEQ ID NO: 12375 - protein, 74 aa, Unknown
  Description of Unknown: Integrase A943 sequence
  G3DSA:1.10.10.60,SSF46689
MKFTDTPTTTLDEVLISKRGNISQAAKAIGINRGTLRNYIAKKDKVLLVQVDGKLVPFVADRRQGAHKKESNNG

SEQ ID NO: 12376 - protein, 74 aa, Unknown
  Description of Unknown: Integrase A944 sequence
  G3DSA:1.10.10.60,SSF46689
MKFTDTPTTTLDELLEFTHGNKSHAATKIGITRTTLRNYIAKKDKVLLVQVDGKLVPFVADRRQGAHKKELNNG

SEQ ID NO: 12377 - protein, 74 aa, Unknown
  Description of Unknown: Integrase A945 sequence
  G3DSA:1.10.10.60,SSF46689
MKFTDTPTTTLDEVLISTRGNKSHAATKIGITRTTLRNYIAKKDKVLLVQVDGKLVPFVADRRQGAHKKESNNG

SEQ ID NO: 12378 - protein, 73 aa, Unknown
  Description of Unknown: Integrase A946 sequence
  G3DSA:1.10.10.60,SSF46689,PF02796
MFLLYCRGTGEIGGRRPKLSPEQWAQAGRLIGAGIPRQQVAIIYDVGLSIHGLYWILLSANRKGVKKRDYRAN

SEQ ID NO: 12379 - protein, 72 aa, Unknown
  Description of Unknown: Integrase A947 sequence
  G3DSA:1.10.10.60,SSF46689
MQTQNNVRTTNIEVATIKDAMAFNYGNQRGMAKHLGINRGTLAKKLASNRDYYVRVHRDGWNNITHLEWLNK

SEQ ID NO: 12380 - protein, 72 aa, Unknown
  Description of Unknown: Integrase A948 sequence
  G3DSA:1.10.10.60,SSF46689
MKFTDTPTTTIDEVLISTRGNVTHAAKKIGVTRDTLRRYIQKKDKVLLVEVDGKLMAFVADRRQGHHKKEGK

SEQ ID NO: 12381 - protein, 71 aa, Unknown
  Description of Unknown: Integrase A949 sequence
  G3DSA:1.10.10.60,SSF46689
MKFTDTKTTTIDEVLINTRGNITHAAKKIGVTRDTLRRYIQKKDKVLLVEIDGKLVVFVADRRQGHHKKAN

SEQ ID NO: 12382 - protein, 71 aa, Unknown
  Description of Unknown: Integrase A950 sequence
  G3DSA:1.10.10.60,SSF46689
MKFTDTPTTTLDELLIKHRGNISHAALELGINRTTLRNYNKKKDKVLLVQVDGKLVPFVADRRQGAHKKAS

SEQ ID NO: 12383 - protein, 71 aa, Unknown
  Description of Unknown: Integrase A951 sequence
  G3DSA:1.10.10.60, SSF46689
MKFTDTPTTTLDEVLISTRGNISQAAKAIGINRGTLRNYIAKKDKVLLVQVDGKLVVFVADRRQGAHKKAN

SEQ ID NO: 12384 - protein, 71 aa, Unknown
  Description of Unknown: Integrase A952 sequence
  G3DSA:1.10.10.60,SSF46689
MKFTDTPTTTIEELLIKHRGNISHAALELGINRTTLRNYNKKKDKVLLVQVDGKLVPFVADRRQGAHKKAS

SEQ ID NO: 12385 - protein, 71 aa, Unknown
  Description of Unknown: Integrase A953 sequence
  G3DSA:1.10.10.60,SSF46689
MKFTDTPTTTIDEVLISTRGNISHAAKKIGITRTTLRNYIAKKDKVLLVQIDGKLVPFVADRRQGSHKKGN

SEQ ID NO: 12386 - protein, 71 aa, Unknown
  Description of Unknown: Integrase A954 sequence
  G3DSA:1.10.10.60,SSF46689
MKFTDTPTTTIDEVLISTRGNISHAAKKIGVTRDTLRRYIQKKDRVFLVEVDGKLMAFVADRRQGHHKKGN

SEQ ID NO: 12387 - protein, 71 aa, Unknown
  Description of Unknown: Integrase A955 sequence
  G3DSA:1.10.10.60,SSF46689
MKFTDTPTTTLDELLEFTRGNKSHAATKIGITRTTLRNYIAKKDKVLLVQIDGKLVPFVADRRQGAHKKAS

SEQ ID NO: 12388 - protein, 70 aa, Unknown
  Description of Unknown: Integrase A956 sequence
  G3DSA:1.10.10.60,SSF46689
MRELVSENSQLKAEAEGKASRPKLSPGEVSSIRELYRAGLSQKAIADTYDVNPATVSRIVRGIYHAKGGS

SEQ ID NO: 12389 - protein, 70 aa, Unknown
  Description of Unknown: Integrase A957 sequence
  G3DSA:1.10.10.60,SSF46689
MKFTDTPTTTLDELLNSTRGNISQAAKAIGINRGTLRNYIAKKDKVLLVQVDGKLVVFVADRRQGHFKKA

SEQ ID NO: 12390 - protein, 70 aa, Unknown
  Description of Unknown: Integrase A958 sequence
  G3DSA:1.10.10.60,SSF46689
MKFTDTPTTTLDEVLISTRGNISQAAKAIGINRGTLRNYIAKKDKVLLVQVDGKLVVFVADRRQGSHKKA

SEQ ID NO: 12391 - protein, 68 aa, Unknown
  Description of Unknown: Integrase A959 sequence
  G3DSA:1.10.10.60,SSF46689
MLKTKSIQVCTVADVLVKTRGNQLQAAKILGIHRGSLFNWIKAGIEKEKLVRVEIHGDFEEKLTVINH

SEQ ID NO: 12392 - protein, 68 aa, Unknown
  Description of Unknown: Integrase A960 sequence
  G3DSA:1.10.10.60,SSF46689
MLKTKPTQVCTVADVLVKTRGNQLQAAKMLGIHRGSLFNWIKAGIEKEKLVRVEIHGDFEEKLTVINH

SEQ ID NO: 12393 - protein, 68 aa, Unknown
  Description of Unknown: Integrase A961 sequence
  G3DSA:1.10.10.60,SSF46689
MTTTAPAATTLTADQTTTARTLLEDGASYREVARTLGVPRHRVMRALPGYGWTYRDAGTFTASMRWAR

SEQ ID NO: 12394 - protein, 67 aa, Unknown
  Description of Unknown: Integrase A962 sequence
  G3DSA:1.10.10.60,SSF46689
MTHTIKTIPDMLIETYGNQTEVARRLSCHRNTVRRYLYDKEARYHAIVNGVLMIHQGGRGIYDRNQH

SEQ ID NO: 12395 - protein, 67 aa, Unknown
  Description of Unknown: Integrase A963 sequence
  G3DSA:1.10.10.60,SSF46689
MTHTVKTIPDMLIETYGNQTEVARRLSCHRNTVRRYLYDKEARHHAIVNGVLMIHQGGRGVYDRNQH

SEQ ID NO: 12396 - protein, 67 aa, Unknown
  Description of Unknown: Integrase A964 sequence
  G3DSA:1.10.10.60,SSF46689
MTHTVKTIPDMLIETYGNQTEVARRLSCHRNTVRRYLYDKEARYHAIVNGVLMIHQGGRGIYDRNQH

SEQ ID NO: 12397 - protein, 67 aa, Unknown
  Description of Unknown: Integrase A965 sequence
  G3DSA:1.10.10.60,SSF46689
MTHTIKTIPDMLIETYGNQTEVARRLSCHRNTVRRYLYDKEARHHAIVNGVLMIHQGGRGIYDRNQH

SEQ ID NO: 12398 - protein, 67 aa, Unknown
  Description of Unknown: Integrase A966 sequence
  G3DSA:1.10.10.60, SSF46689
MKATVHTIYELLPSTRGNITELARVLGCDRATIYKYMHDINGEFHSVVNGKLFVKPGLKGRHTRDKR

SEQ ID NO: 12399 - protein, 67 aa, Unknown
  Description of Unknown: Integrase A967 sequence
  SSF53041,PF00239,PS51736
MTREYATWPPIRAGQPRLEFSSAVWWSWPALREALAEFERSMIRERQREGIALAKARGVCTDLICPV

SEQ ID NO: 12400 - protein, 67 aa, Unknown
  Description of Unknown: Integrase A968 sequence
  G3DSA:1.10.10.60,SSF46689
MTHTVKTIPDMLIETYGNQTEVARRLSCHRNTVRRYLYDKEARYHAIVNGVLMIHQGGRGVYDRNQH

SEQ ID NO: 12401 - protein, 67 aa, Unknown
  Description of Unknown: Integrase A969 sequence
  G3DSA:1.10.10.60,SSF46689
MTHTIKTIPDVLIETYGNQTEVARRLSCHRNTVRRYLYDKEARHHAIVNGVLMIHQGGRGIYDRNQH

SEQ ID NO: 12402 - protein, 66 aa, Unknown
  Description of Unknown: Integrase A970 sequence
  G3DSA:1.10.10.60,SSF46689
MTKTSIDQEIDEAIAKGGSFYKIRSRFEKAILERVLIKTRGNQTEAAKMLGISRSGLGGILKRVSR

SEQ ID NO: 12403 - protein, 66 aa, Unknown
  Description of Unknown: Integrase A971 sequence
  G3DSA:1.10.10.60,SSF46689
MTKTPIDQEIDEAIANGESFYKIRKRFEKAILERALIKTRGSQTEAAKMLGISRTGLGGILKRVCR

SEQ ID NO: 12404 - protein, 65 aa, Unknown
  Description of Unknown: Integrase A972 sequence
  G3DSA:1.10.10.60,SSF46689
MNRSIEQEIDEAIANGESFYKIRKRFEKAILERALIKTRGSQTEAAKMLGISRTGLSGILKRVSR

SEQ ID NO: 12405 - protein, 65 aa, Unknown
  Description of Unknown: Integrase A973 sequence
  G3DSA:1.10.10.60,SSF46689
MKTTVDQEIDEAIANGESFYKIRSRVEKAILERALIKTRGNQTEAAKMLGISRTGLGGILKRVSR

SEQ ID NO: 12406 - protein, 62 aa, Unknown
  Description of Unknown: Integrase A974 sequence
  G3DSA:1.10.10.60,SSF46689
MTHTIHELLPTTRGNITELARILDCDRGTLRKYIKDKKGEFHVIVNGKLFVKPGFKGRIKHD

SEQ ID NO: 12407 - protein, 61 aa, Unknown
  Description of Unknown: Integrase A975 sequence
  G3DSA:1.10.10.60,SSF46689
MLTISDLLVMTRGNQSEVARMLKISRCTLTRYMKLKVEHMVLERNGQYNLFTNISEQYGNG

SEQ ID NO: 12408 - protein, 60 aa, Unknown
  Description of Unknown: Integrase A976 sequence
  G3DSA:1.10.10.60,SSF46689
MRDFNLKEETRKFQKSLIEQALIFNSSDVTKTSKSLGISRASLYRKMKELKVFTEEKENN

SEQ ID NO: 12409 - protein, 58 aa, Unknown
  Description of Unknown: Integrase A977 sequence
  G3DSA:1.10.10.60,SSF46689
MKKWTKEEEQELVRLTENAWDWNFPGYDWVRTHLEIDYPNGRTVNAIRQKYYSILNCR

SEQ ID NO: 12410 - protein, 56 aa, Unknown
  Description of Unknown: Integrase A978 sequence
  G3DSA:1.10.10.60,SSF46689
MHAKGAGRPNRKKLSAEEAKYIREMARNGISQAEIAWSFDVNRSTISRIVRGIYHR

SEQ ID NO: 12411 - protein, 51 aa, Unknown
  Description of Unknown: Integrase A979 sequence
  G3DSA:1.10.10.60,SSF46689
MNGYPKRIRNQILALHEQGMAINEISRRLRGLIDRDTVKRWVAEHKNSKGS

SEQ ID NO: 12412 - protein, 40 aa, Unknown
  Description of Unknown: Integrase A980 sequence
  G3DSA:1.10.10.60, SSF46689,PF02796
MTTEVVERCRRMLGTGATRQQVADVTGVDVKTIYKYLPAT

SEQ ID NO: 12413 - protein, 37 aa, Unknown
  Description of Unknown: Integrase A981 sequence
  G3DSA:1.10.10.60,PF02796
MYSKMKELRAVGMTYKQIAQSLNVSVATVFKHCKAGD

SEQ ID NO: 12414 - protein, 907 aa, Unknown
  Description of Unknown: Integrase A982 sequence
  IPR006119,cd00338,PF07508,PS51736,G3DSA:3.40.50.1390, SM00857,G3DSA:1.10.1660.10,IPR025827, IPR036162, PTHR30461,PF13408,SSF53041,PS51737,PF00239,IPR011109
MNGLSKITASHRSRTAAIYLRQSTYVQVRDNTESTLRQYDLVERAVELGWAREDVLVIDADLGRSAKFGSERLGFRDLVAQVCLGEVGAVFGLEVSRLARSSADFARLLELARLTDALLVDADGVYDLADINDRLLLGLKGSMSEAELHILAGRLHGAKRAAAGRGELRFPLPVGYVYDDEGCCVIDPDQEVQAAIADVFAVFQEQGSAFKVVGAYVGRRFPLRAYGGIWAGQLRWGKLTHSRVLGLLRNPCYAGTYVYGRYLTRRTVRPDGSVHTGIVLRPRAQWPIVLHGHHEGYISWDDYLANEAKLKANCTHDGARPPREGLALCQGIMLCGSCGRPMTTRYYEYQQAAYGCSSSRADHEATATCRSIRADAVDEPVARLLLSALSPGQIELALAAANEVTVRHSRSHRAAELAVERARFDAQRAERAFNAVEPENRLVARTLESRWEARLVALAEAEAALAQVREARPALPDRDGLRALAAGLPRLWWADTTKDRDRKRLLRTLISDVTLLPETDRARARIGVRWHTGATDVLDIRRPHTSAQVRKTPAAARELIAQLSPTRSNAEITAELARAGLMTGTGQCYTVAAVKWVRYTYQIPAPSPFQDGEVSVDQAAQILGISANAVYYWLTHGRLSGRKEPGGRWCIPWNEQVEAACRSQIDASGHLIPHDLVPREIRPGEITVQQAADRLGVVCHVLYYWIRLGRLTARKGPDTRWCIPWDQETETACRNWLARPEQFVPHGTGSRPLSEGHDELSIQQAAARLGALPAAIAYQIRAGRLTARHLRNGRVAIAWDDDIEADLRWQLAQPKHPGPTGPGSHPLPAEISENGEISVQDAAARLGIRAGTVYHWIYQGDLTAHRAAGGRVSIPWPPGVEAACHQRALNCRKFTPQSQMSTAGGAV

SEQ ID NO: 12415 - protein, 821 aa, Unknown
  Description of Unknown: Integrase A983 sequence
  IPR006119,PTHR30461:SF3,PF00239,cd00338,PF07508, PS51736,G3DSA:3.40.50.1390,SM00857,IPR011109,Coil, PTHR30461,mobidb-lite,PS51737,SSF53041,IPR036162
MDPRRPRSPRGAARPSPRPIEMVPRFHFRVPVRIRPPGQDRATARLRRRPRPCPDRPDRARFDTFSRTTMDEPTPDGDAVRPRPAAATDTDRLIDELVVAAHRRTPQEQCGQVGAIYARYSTKAQGSVGDQVRSVLEAAARLKIHVPREFVFYDEAVSGSRNRRPGLDRLRATLARRGAVQAVLVFATNRLGRTAYHAMQIVHEEMVGRDIRCVFTSNNIDTADGHTWQLLLQAYSMVDQMVVASAAAHIHAAHEAMFDQGLVHGAVTYGYRGREVGEGRGVRKGRPLREYEIDPEAAPWILRAFEWYAREGLSIGEVVRRLNAEPRAPRNPRLLAGWDHAAVRRMLGNPRYRGHWMYGETKAVCHPGKASTAHVRRDAPLKSARLEHLRIVPEDLWLRARARLAEGDRRAAGRKPRDGDHRSRPRALAGLFHCGAHGRRMQAGGGHGKMLICKDCMGTPRERRSLCSILNRRLALKLTCEALALRIRRDDGLATAIVAASRSAAASLQSPDPAHLVGLRTRIEALTRRIGFVMDNPGAEPRDVLEAKAKLQQLRRERSALESDLGRIEADAARAVEVPDEGAVREMLSRLGATLDEAAGEGDAPEDRAVREVVDALTGGRVDLFQEGGREPKRGWLRGSFRFDLERLARLAGFPAIPAPPDGPDPRELVRIDYREPAPCEAHATAVKALYDEGVLVKEIAARLGISRNLAAKALAWWHRSRDLEPPDGRSRRSSLPVDARSLTPPLYVRLADEALRLSEQGLLYEEVAARLGCDRNTAAKAIKRASELRGTPAQDGRSRRKTLDRYRRGRDADAAPPGTA

SEQ ID NO: 12416 - protein, 801 aa, Unknown
  Description of Unknown: Integrase A984 sequence
  PTHR30461:SF3,G3DSA:3.40.50.1390,SM00857,SSF53041,IPR006118, IPR011109,PF07508,IPR038109,PS00397,G3DSA:1.10.10.2600, IPR036162,cd00338,PS51736,PF13408,mobidb-lite,Coil,IPR006119, IPR025827,PTHR30461,PS51737,PF00239
MRVALYARVSTSHQVEHQTIEQQFERLTAHVRAHADAGWHVDPAHVFRDDGYSGAALSRPGLDRLRDAIKAREVDRVLVTAPDRLARNYVHQMVLLEEWSRSGCIAAFLDRPMSDDPHDHLLLQIRGAVAEYERTLIAERMRRGRLAKLRAGVLLPWTYAPYGYRLSPDRPRDPTGVVTEPAEAAVVAELFALYREPGASLMQLALHLDRRGIPTPSRTPRWSTPTIRGILRNPTYTGQIYAQRTQYRAPTQRRSATHPIGRPHGSAVPQPSDTWLLVGQVPAVVSREHFDLVQAKLATNRSFARRNNTAHSYLLRALVSCGCCGLACTGRTVNGRNRYYLCNGKGHTTFSHRATRCPARYTPAGQLDDVVWADLCALMSEPEPLAVAVERAHGGAWLPQDLLARRETLRRGREHLHQQLERLTDAYLRAVIPLDEYERRRRDLEQRVQALSAQEDQVRDETARRQHLAGVTASLEAFRVRVQGGLAQADFEQRRQLVMLLVDRVVVTGAEVEIRYVLPTSPDSEHVRFCQLRKDYFDDPTAWEQHEADLVGRLAHDFDGDDRGGRRSVAGIASIEGLGDEREASARQAQYQNGSVPVLHVGRLRIEDKRTPVRVDQRLALAAFDLLTGVVAARPAALHRFDGLAIEHCCRRRGFPSDTLAINHDEVVVDLCEQPCVAPAAEVAEGGRARWQILGDHPPCDAAAQNVEDRVQDLPRRPDRRPPARLRPRHQRLDHRPLGVGQVGFIAKAHAAMLPPGGRGPHGVSKSGFSTLLEASPSRPLNPASDPYRTGSQSHHTIYGK

SEQ ID NO: 12417 - protein, 748 aa, Unknown
  Description of Unknown: Integrase A985 sequence
  IPR006119,cd00338,PF07508,PS51736,G3DSA:3.40.50.1390, SM00857,IPR025827,PS51737,IPR036162,PF13408, PTHR30461,SSF53041,Coil,PF00239,IPR011109
MTAHSKVEGRHLRLLALVYIRQSTPQQVQNNQESTRRQYELAQRARQMGWPDTAVRVIDEDLGTSGARSQNRTGFQRLVASIGMGEVGIVLVTEVSRLSRLSSDWHRVIELCAVFRTLIADEDGVYDAQNPNDRLLLGVKGTLFAAELHILRARMHGALLNKAQRGELAVALPVGYRRRADGVVEQDPDEAVRLAVDTVFERFSALGNARGVLRHFIDNGLRLPRIVQAGPEKGQAVWVRPAYSMIHRMLSNPAYAGAFVYGRVRRDVAAGDPPTAVERRLPIEEWAIVVQGVYPAFISYDRFLANRQKLKANRYNFAVKERGAARAGAALLQGLVQCGRCGHQMGVSYGRQQPRYQCRQAQTHYAEPMCQSFVAGDIDAIVVEAFLQAMRPAELDATLAALRNLEQERQTVDRQWQLRLERTRYEARLAQRQYDAVDPDNRLVARELERRWEAALAEAEMLQQEYERLLAAELRPLDAVEAEDVRWLASDLPALWKADTTRPIDRKRLLRLAVAAVTVTVRPGRSGADIQVLWSGGAKTMHRASSPGHGRHLRTDAGVLGTIRDLAGRMPDHQVAAALTAQGLLSRHGKTWTRSRVASMRRQHAIPTACPAQTRGLTMRADGFVPARVAAQQLGITLAALRVWAHRGVLICDQSSDAAKIWVRLDPGDRERLGGEADTAGMERVRDLAQTSGSSISAVWERVRRKEFSAYRTRRGHNQWDWRLAPLIPALGATPGSQSSSAARTTAQ

SEQ ID NO: 12418 - protein, 741 aa, Unknown
  Description of Unknown: Integrase A986 sequence
  IPR006119,cd00338,PF07508,PS51736, G3DSA:3.40.50.1390,SM00857,IPR038109,IPR011109, IPR025827,PS51737,PF13408,PTHR30461, G3DSA:1.10.10.2600,SSF53041,Coil,PF00239,IPR036162
MIEHSKIATGHLARQAVVSLRQSSASQVENNRESTDRKYALSGRARELGWPAERIVVIDEDLGLSGSGSVMRSGFARLTSEVALARVGIVLGLEVSRLARNNADWHRLIELAGLTDTLIGDADGIYHPALFNDRLLLGLKGAMSEAELHVLRARLDGGIRNKAARGELRRGLPVGFIWGEDDGEILIHPDEAVSHVIRTIFARFAELGSARRVWLWLRANDIKFPLRLGEHQDLRWSEASYHGVHAVLANPVYAGAYVYGKNRHETVLDETGARRKRVRKLPRDEWQVLIKDHHQGYIDWPSFEVNQQRMATNTQPRPHSDASRHSAGAVREGGALLQGIAHCGHCGRRLRTHYRGRNAAPGYHCAGKIIVDGRGVYCLNIGGVQIDEAVAAAFLEALEPARLTATIEAAERLESDREATLKQSRLDVERAQFAVNRAKRRYRAVDPDNRLVARSLEREWEEALRALEVAKTELARREEARPRLLSSQERANLLTLGVDLVSVWHAPSTTARDHKELLRTLIEEVTLHVDRDNACARLTLRWKGGAIGQLEVALPRSRPATVRTDEDTLTLVRRLAPHYPDAVIAGVLNRQGRQTARGHRFDANRVGNLRRHWNIPACKARPQTADGDILTIRQAASVLGVAPSTLHRHLNDGLIRGEQITPGAPWRIRLTDELKARFLTTPDDGFEPIRDALDTLGLSRQALLQRVRHGELESVYVIRGQRKGLWIKTIDQNPTLFEHML

SEQ ID NO: 12419 - protein, 738 aa, Unknown
  Description of Unknown: Integrase A987 sequence
  IPR006119,PTHR30461:SF3,cd00338,PF07508,PS51736, G3DSA:3.40.50.1390,SM00857,IPR038109,IPR011109,PF13340, IPR025161,PTHR30461,G3DSA:1.10.10.2600,SSF53041,PS51737, PF00239,IPR036162
MKRLNGLFDEAARDRRALAAELGARPPRMPGAGELKGRSPVLLSLPDVWLDRHGGAAEIVHTPTAGRAAIYTRFSTSAQTQTSTERQVELCRTYCVRLGLEHDPDRDVYSDEARSGRNIWGRQSLQQMLDAVLAGQYRYVVIEDGDRLSRDLSDLSWLAKTLQEAGVELHSTTRGKLDSRHVVMDGLLSSETLAQMVVRADYSRRRRAQEGLCMGGVAFGYDRVPGQAGKCVVNPAQAEHVRWIYETYLAGTLSPTQIARDLQRRGVDGPSGTCSWNDGTVRRILSNPRYCGLLIYGRRQTWRNPADRTWCQRVTDPQTWIVAEVEDWVIVDRETWNRVQVRMKERSLLAPGGLAGTRAPARKVENLLTKRIKCPFCEEGFYAVDHSSKGESRIRCNRYAQERGCTNSRSYLMHMVEAAVVRCVGDALADEAGLAAFADAQARALQKRERAAVDERPRLERRIAAAEGELHATFKVPEGIGEAEWGRTVAGLQAKLARELGALRHELSNLGSAPPQSVSIDPDRLGDLRQAFSELAATAPFRPVDEAGQRLKAAFRDFVTGVILHPGEEPGEFRIEVTTQMGELVPGVQRSMNLSAHHRLPPTGFRGDPDRVMRAREMAERREFALTDAEWELVEPLVPPETGRGRWARDCIPARTLVDIALYRIEARVPWRQIPDTFGEPVMVLAAMRRLAFCGAWDRVLACLKASSPERFEGKDPHDVAVLGLLTRRSLEARRSPI

SEQ ID NO: 12420 - protein, 737 aa, Unknown
  Description of Unknown: Integrase A988 sequence
  IPR006119,SSF46955,PF00239,cd00338,PF07508, PS51736,G3DSA:3.40.50.1390,SM00857,IPR025827,IPR009061, Coil,IPR036162,PTHR30461,PF13408,PS51737, SSF53041,IPR011109
MSDTANKIGTSHLQRAAFVYIRQSSASQVEHNRESTQRQYALAQRATALGWSQQQVNVVDDDLGLSGASTARRGGFARMTAEVALGHVGIILGLEVSRLARNNADWYRLLDLCTMTDTLIGDADGVYNPAHFNDRLLLGLKGTMSEAELHILRARLDGGIRNKAARGELRRGLPTGLVWGEADGEVRLHPDEAVVSALHAVFARFNEFGSARRVWLWLRSENLSFPLQLNRNEQIRWVAPTYNAIYNVLTNPVYAGAYCYGKTRTERYVDKHGTLKTRLRRLPQSQWAVLIREHHEGYIDWATYEANQMRLAANTKPRPHETGGAVREGAALLQGLATCGHCGRSLKTHYRGTNQTPGYHCSNKGIENGRGVYCLNIGGLQIDTAVALAFLHAVEPAGLEAAVQAAERLEADHDAALAQWRLTVERTHYEALRAERRYRAVDPENRLVARGLETQWETQLRELEQAQAELSRREQLRPRTLNPEQRKSLLVLGKDLKQLWDAPNLTVRDRKQLLRTLLEEVSITVQREHYQAHLKLRWRGGKLTECDIALPRSRPATIRTDEDTIALVRRLAEHHPDAIIAGILNAQGRVTARGLRFNQSLVGNLRRHWHIPCFELPAVLPDGELLSIRQAARALGTAPSTLHRWVNDGFIAAEQTTPGAPWRIRITDSLRRRFVEHSPEGYVVMQEATKLLGVSRQTVSQRVKRGELDAVLVCHGRRKGLRIKAVNDQPDLFEHSS

SEQ ID NO: 12421 - protein, 733 aa, Unknown
  Description of Unknown: Integrase A989 sequence
  IPR006119,cd00338,PF07508,PS51736,G3DSA:3.40.50.1390, SM00857,PS51737,IPR036162,PTHR30461,SSF53041, Coil,PF00239,IPR011109
MTNVDRLPELLLKRKAVIYVRQSTQTQVQTNLESRRRQYDLVEEAKRRGFRDIEVIDEDMGRSASGAVARPGFERLVALLCAGEVGAVLCMDASRLARNGRDWHHLLELCGLVEARVIDLDGVYDPCRANDRLLLGMKGSISEFELNVLRTRMLDAKRAKAYRGDLRISVPFGYIWHREVGLGLDPNLRLQEVIRLIFARFRELGSARQVLLSLRAEQVHFPRPSDGRTLTHFDWIPVRYRNVISVLKNPFYAGAYVYGKSGKQMAIVDGRARKSYKHPKPFDEWDVLLREHHEGYIDWAEFERNQKQLATNAYGKAGDVKSSRGGRALLAGLLACARCGRRLFVAYTGRIPQPVYRCARFDMPPQCMSFGGSRIDAAIGKELLRVVEPMAIEAARQAEQMHVDTLNGQRRIVELELQQAQYEATLAERRYAACDPDNRLIAAQLEKNWEAALHRVLACQTRLETVSTPAADVPTPDFAKLAEDLTAAWNAPNVTMRMRQQLVRALIVDIVADVDETAREVILTIHWQGGQHSQLRVRKPGSGEHGCSTSDEALAVIRSMATRWSDQDIAASLNRMGMRTGQGKTWTAHRVSSIRRVRDIHAYRPAEKDGEWLTMSEAAKQLGITSHAIRRLINDRILPAEQVMGSSARQSSSSWPASRSLRACDGGSCKIQTDSPLPLCTMPARSDQSSSGPQIAWPTPVCAHRIDLPSADSFINEAVIVQLENFNFNVCLN

SEQ ID NO: 12422 - protein, 720 aa, Unknown
  Description of Unknown: Integrase A990 sequence
  IPR006119,cd00338,PF07508,PS51736, G3DSA:3.40.50.1390,SM00857,IPR025827,SSF53041, IPR036162,PF13408,PTHR30461,mobidb-lite, PS51737,PF00239,IPR011109
MNPKREAHNRRSEKIDDLHLDRLAVVYVRQSTLQQVLEHQESTRLQYGLVDRAEALGWQRERVLVIDEDLGKSGTTAVGRSGFQRLVAEVSLNHVGLILGIEMSRLARCSKDWHQLLEVCALFRTLIGDLDGIYDPSQYNDRLLLGLKGTMSEAELHVLKTRLLEGKLNKARRGELPFDPPIGYLRRPSGEVIFDPDEQAQQVVHLIFRKFEEIGTLNGVLRYLVRADIQIPVRIREGINRGDLEWRKPNRMTLQNLLKNPAYTGAYAYGRRQQDPRKQQPGRPKTGRVVNAPEDWHALVFDQFPAYISWEQYQQNLARLAANQSRAETIGAARHGAALLSGLLVCQYCGCRMTVHYSGQGKTHEYLCNRRLKDYADRGCQHIAGRSLDVAITQQVLQALEPAALELSLQAAQSIEQERTELDKLWQQKLERANIEAERSGRHYRQVEPENRLVARQLGKEWEAKLATVEQVQEDYQRFLAQEPLTLSEVERSAIRQLAQDIPTLWNANTTTNAHRKEIMRQLINRIVVEAQGQSEQVKLVIEWLGGFQSEQIVVRPVASFEQLSYYPQLCQQVQAFVVQGLDAAAIAAQLNQSGFRPPRLQGGFSHQSTLELLRRLGLHQRRPKGYNKEPLADGEWWIPGLARQIGIPDGTLYQWVKRGWIEGRKQEKPPYRWIIRADEAEIERLNKCRQMSFSDRMRQQWQGETSVLAQSNESDDERT

SEQ ID NO: 12423 - protein, 716 aa, Unknown
  Description of Unknown: Integrase A991 sequence
  IPR006119,cd00338,PS51736,G3DSA:3.40.50.1390,SM00857, IPR011109,IPR025827,PS51737,PF13408,PTHR30461, SSF53041,Coil,PF00239,IPR036162
MPWERANSKVCDRHLQRLAVVYVRQSTRQQVLSHQESTRLQYALKDRAVALGWEADRVLVIDDDLAMSATSAVARTGFQRLVTEIGLDHVGLVLGIEMSRLARSGKDWYQLIELCALSGALLADLDGVYDPADYNDRLVLGLKGTISEAELHLIKQRMWNGRLNKARRGELAFPLSSGYVRLPSGEVGFDPDEQVQTVIYLLFAQFERIGTLHGMLRYLVRHDIQLGIRLREGPDKGTLEWRRPNRMTLQTLLHNPAYADIYAYGRRRVDPRRKDPARPGTGRVVQARDEWLVMIPNVLPAYITITQFEANEARLAANRARAEATCAVRSGPALAAGLVFCGRCGRRMTVRYHTQHGHNLPEYMCVREVTNYGADKTCQLLNAACVDAFVEQQVLIALTPAAVEVSLDAADQVVAERAELEKLWSQKLERAEYEADRARRCYHLAEPENRLVVRQLEKEWETALAAQQKLREDHERFTRTSPRVLTAAERQTITALASDIDGLWHARTTTITDRKETVRAIVDKVVITVIGTTERVQAMLVWAGGATTSGELVRPVQGLEQLSYYPQLAARVRELAGQGARSTAITRHLEAEGFRPAKRGKRITEPTVRALMRRLGCMPDRVQPRRLAPPGEEPGPDEWWLDQLADELDMPMGTLHSWIRCGWLTIRKETRHPYRVIAHADQAELAVLHERRTRPPGWYSRRLWADSTDELTHPHS

SEQ ID NO: 12424 - protein, 705 aa, Unknown
  Description of Unknown: Integrase A992 sequence
  IPR006119,SSF46955,cd00338,PF07508,PS51736,G3DSA:3.40.50.1390, SM00857,IPR025827,IPR009061,IPR036162,PF13408,PTHR30461,SSF53041 ,PS51737,PF00239,IPR011109
MNVHLKVQPHHLERGAYLYIRQSSMRQVVENVESARRQYALRGRAVALGWRDEQIIVIDNDQGESGASAAWREGFQRLVSDVGMGHAGIVMGLEVSRLARNNADWQRLLEICALADTLILDEDGVYDPASFNDRLLLGLKGTMSEAELHVIKARLRGGILNKVRRGEFRCLLPTGLVYDHFGNVTLDPDMQVRETIIHFFEMFSRLGSASQTVKVFRNEGLLFPSRLHNGDTLFRPLTASTAMRVLNNPRYAGAYTYGRRQFRRTIDGKKTLRARDIDDWPACIPDAHPGYISWERHQENLKILKANGRGFEAARASIPREGPALLQGRAVCGQCGSHLRVRYAARRGRQEAWYICNRARIYRGEPMCQSIAGPPVDEAIGMLIAEQMTPAAVELALEVRKEIQARHEEADRLRCRAIERAQTEAELAQRRFMLVDPSNRLVADTLEGEWNEKLRTLASAREERERGREHDQFILDKAVHERLVAMTADFNQLWKDPDTPSRERKRLLAHIIEDVTLLKLPAEGTTKLHVRFKGGKIQTLTTMNPKSSPQQIKTKPSIIELVDRLLDDYIYPEIAEILNEQGHRPGGTARRGCQDARFTPLKVAYLIHEYKLRSRYDRLRQRGMLTRQEAAAHLNISEQTVARWAKFGLITRHAYNGHYSLYEIADGDLPQKQCSRWNPLEDRAAAYRQMQTEPRTSTGEERGVV

SEQ ID NO: 12425 - protein, 705 aa, Unknown
  Description of Unknown: Integrase A993 sequence
  IPR006119,SSF46955,PF00239,cd00338,PF07508, G3DSA:1.10.1660.10,G3DSA:3.40.50.1390,SM00857,PS51736,IPR025827, IPR009061,PS51737,IPR036162,PF13408,PTHR30461, Coil,SSF53041,IPR011109
MSDATRSPKLRPWHLDRAAFVYVRQSTPQQVLDHRESTDRQYALADRAVALGWPRDRVTTIDDDLGKSGQSIEGRPGFQRLLAEVALDNVGLILGLEMSRLARSNRDWHQLLELCARFRVLLADADAVYDPADHNDRLLLGLHGMLNEAELHVIKERMCQGRLNKARRGEPMGSPPLGYVRLASGEWAIDPDEQVQATVRLIFDRFDREGTLHGLLRYLVHHGVRIPIRPRHGPNRGGLEWRRPNRPTLSNVLHHPAYAGAYRFGHREVDPRRKRPGRPDTGKLVRRPEECLVLIRDRLPAYITWERFCDNQERLEANRARRDRPGAPRQGASLLAGLLRCGRCGRRMLVRYSGATGRYSYTCARGAADHAEPICQSLSGPALDGLVAGRVLAAVEPAALEASLAAVAEVERERSELARHWRLRLERAGCEADRAARQYQACEPENRLVGRELERRWEEALRAQRRLEDEHERWRGSAPGRLSPDDERTIRSLAGDLPAVWQATTTTPAERQRIARLLIDHVSVTVDKASERVDVTLHWSGGMTESHAMSRPVKRYDLLADYPRLVERLRGWRAERLSPAAMAERLNVEGFRPPKRAERFTRGMVQRLLWHLGLARTPFGSPAGLGRDEYRPSSLARRLGVSRDTVRRWVRVGWLTAHRDAQGHHVIWADGSELRRLRELRRLPRTWANKGRLAELTRPRPRPGR

SEQ ID NO: 12426 - protein, 705 aa, Unknown
  Description of Unknown: Integrase A994 sequence
  IPR006119,cd00338,PF07508,PS51736,G3DSA:3.40.50.1390, SM00857,IPR025827,SSF53041,IPR036162,PTHR30461, PF13408,mobidb-lite,PS51737,PF00239,IPR011109
MNVHLKVQPHHLERGAYLYIRQSSMRQVVENVESARRQYALRGRAVALGWRDEQIIVIDNDQGESGASAAWREGFQRLVSDVGMGHAGIVMGLEVSRLARNNADWQRLLEICALADTLILDEDGVYDPASFNDRLLLGLKGTMSEAELHVIKARLRGGILNKVRRGEFRCLLPTGLVYDHFGHVTLDPDMQVRETIIHFFEMFSRLESASQTVKVFRNEGLLFPSRLHNGDTLFRPLTASTAMRVLNNPRYAGAYTYGRRQFRRTIDGKKTLRARDIDDWPACMPDAHPGYISWERHQENLKILKANGRGFEAARASIPREGPALLQGRAVCGQCGNHLRVRYAARRGRQEAWYICNRDHIYRGEPMCQSIAGPPVDEAIGMLIAEQMTPAAVELALDVRKEIQARHEEADRLRCRAIERAQTEADLAQRRFMLVDPNNRLVADTLEGEWNEKLRILANAREERERGREHDQFILDKAVHERLVAMTADFNELWKDPDTPSRERKRLLAHIIEDVTLLKLPAEGTTKLHVRFKGGKIQTLTTMNPQSSAQQIKTKPNIVELIDKLLDDYIYPEIAEILNEQGHRPGGTARRGCHDARFTPLKVAYLIHEYKLQSRYDRLRQRGMLTRQEAAVHLNISEQTVARWAKYGLIARHAYNGHYSLYEIPDGDLPQKQCSRWNQLQDRTAARQQTQTEPRTSTGEERGVV

SEQ ID NO: 12427 - protein, 705 aa, Unknown
  Description of Unknown: Integrase A995 sequence
  IPR006119,SSF46955,PF00239,cd00338,PF07508,PS51736,G3DSA:3.40. 50.1390,SM00857,IPR025827,IPR009061,IPR036162,PTHR30461,PF13408 ,PS51737,SSF53041,IPR011109
MNVHLKVQPHHLERGAYLYIRQSSMRQVVENVESARRQYALRGRAVALGWRDEQIIVIDNDQGESGASAAWREGFQRLVSDVGMGHAGIVMGLEVSRLARNNADWQRLLEICALADTLILDEDGVYDPASFNDRLLLGLKGTMSEAELHVIKARLRGGILNKVRRGEFRCLLPTGLVYDHFGNVTLDPDMQVRETIIHFFEMFSRLGSASQTVKVFRNEGLLFPSRLHNGGTLFRPLTASTAMRVLNNPRYAGAYTYGRRQFRRTIDGKKTLRARDIDDWPACIPDAHPGYISWERHQENLKILKANGRGFEAARASIPREGPALLQGRAVCGQCGSHLRVRYAARRGRQEAWYICNRARIYRGEPMCQSIAGPPVDEAIGMLIAEQMTPAAVELVLEVRKEIQARHEEADRLRCRAIERAQTEAELAQRRFMLVDPSNRLVADTLEGEWNEKLRTLASAREERERGREHDQFILDKAVHERLVAMTADFNQLWKDPDTPSRERKRLLAHIIEDVTLLKLPAEGTTKLHVRFKGGKIQTLTTMNPKSSPQQIKTKPSIIELVDRLLDDYIYPEIAEILNEQGHRPGGTARRGCQDARFTPLKVAYLIHEYKLRSRYDRLRQRGMLTRQEAAAHLNISEQTVARWAKFGLITRHAYNGHYSLYEIADGDLPQKQCSRWNPLEDRAAAYRQMQTEPRTSTGEERGVV

SEQ ID NO: 12428 - protein, 705 aa, Unknown
  Description of Unknown: Integrase A996 sequence
  IPR006119,SSF46955,cd00338,PF07508,PS51736, G3DSA:3.40.50.1390,SM00857,IPR025827,IPR009061,IPR036162, PF13408,PTHR30461,SSF53041,PS51737,PF00239, IPR011109
MNVHLKVQPHHLERGAYLYIRQSSMRQVVENVESARRQYALRGRAVALGWRDEQIIVIDNDQGESGASAAWREGFQRLVSDVGMGHAGIVMGLEVSRLARNNADWQRLLEICALADTLILDEDGVYDPASFNDRLLLGLKGTMSEAELHVIKARLRGGILNKVRRGEFRCLLPTGLVYDHFGNVTLDPDMQVRETIIHFFEMFSRLGSASQTVKVFRNEGLLFPSRLHNGDTLFRPLTASTAMRVLNNPRYAGAYTYGRRQFRRTIDGKKTLRARDIDDWPACIPNAHPGYISWERHQENLKILKANGRGFEAARASIPREGPALLQGRAVCGQCGSHLRVRYAARRGRQEAWYICNRARIYRGEPMCQSIAGPPVDEAIGMLIAEQMTPAAVELALEVRKEIQARHEEADRLRCRAIERAQTEAELAQRRFMLVDPSNRLVADTLEGEWNEKLRTLASAREERERGRENDQFILDKAVHERLVAMTADFNQLWKDPDTPSRERKRLLAHIIEDVTLLKLPAEGTTKLHVRFKGGKIQTLTTMSPKSSPQQVKTKPSIIELVDRLLDDYIYPEIAEILNEEGHRPGGTTRRGCQDARFTPLKVAYLIHEYKLRSRYDRLRQRGMLTRQEAAAHLNISEQTVARWAKFGLITRHAYNGHYSLYEIADGDLPQKQCSRWNPLEDRAAAYRQMQTEPRTSTGEERGVV

SEQ ID NO: 12429 - protein, 705 aa, Unknown
  Description of Unknown: Integrase A997 sequence
  IPR006119,cd00338,PF07508,PS51736,G3DSA:3.40.50.1390, SM00857,IPR025827,SSF53041,IPR036162,PTHR30461, PF13408,mobidb-lite,PS51737,PF00239,IPR011109
MNVHLKVQPHHLERGAYLYIRQSSMRQVVENVESAGRQYALRGRAVALGWRDEQIIVIDNDQGESGASAAWREGFQRLVSDVGMGHAGIVMGLEVSRLARNNADWQRLLEICALADTLILDEDGVYDPASFNDRLLLGLKGTMSEAELHVIKARLRGGILNKVRRGEFRCLLPTGLVYDHFGHVTLDPDMQVRETIIHFFEMFSRLESASQTVKVFRNEGLLFPSRLHNGDTLFRPLTASTAMRVLNNPRYAGAYTYGRRQFRRTIDGKKTLRARDIDDWPACMPDAHPGYISWERHQENLKILKANGRGFEAARASIPREGPALLQGRAVCGQCGNHLRVRYAARRGRQEAWYICNRDHIYRGEPMCQSIAGPPVDEAIGMLIAEQMTPAAVELALDVRKEIQARHEEADRLRCRAIERAQTEADLAQRRFMLVDPNNRLVADTLEGEWNEKLRILANAREERERGREHDQFILDKAVHERLVAMTADFNELWKDPDTPSRERKRLLAHIIEDVTLLKLPAEGTTKLHVRFKGGKIQTLTTMNPQSSAQQIKTKPNIVELIDKLLDDYIYPEIAEILNEQGHRPGGTARRGCHDARFTPLKVAYLIHEYKLQSRYDRLRQRGMLTRQEAAVHLNISEQTVARWAKYGLIARHAYNGHYSLYEIPDGDLPQKQCSRWNQLQDRTAARQQTQTEPRTSTGEERGVV

SEQ ID NO: 12430 - protein, 701 aa, Unknown
  Description of Unknown: Integrase A998 sequence
  IPR006119,PF00239,cd00338,PF07508, PS51736,G3DSA:3.40.50.1390,SM00857,IPR025827, Coil,IPR036162,PTHR30461,PF13408, PS51737,SSF53041,IPR011109
MLRATNSPDERVTAEHRGKLAYIYVRQSSVNQVRHHQESTELQYRLIDRAVALGWPHERVHVIDEDLGKSGSGCVEREGFKKLIAEIGLGNAGLVISLDASRLARNNRDWHQLLDLCSLFGVIIADGERLYDPCAYHDRLLLGLSGIMSEAELHQIKQRLHQGERQKAARGELRLGLPAGLAHDRSGQIILNPDEEVQARLCLVFSKFRELGSARAVMRYLRKENLPLPMRPLRGPAPHEVVWREASNPRVLSILHNPGYAGAYVYGRRRQTGGRVRQDVYRSRTAKVPIADWEVCLEAAHPGYIGWEEFMENQRRLENNINRYEAGHSGVPRKGAALLQGIAVCGRCGRRMSLRYSGPAGNYPVYTCRADRGHDGGPLCQEVRALPVDARVESILLEALTPDRIAIAVDALGQMEEEVRQLERQWALRRERARYEAERAHRQYDAVEPENRLVARSLERGWEEKLRAAETIEQDYERWRSNEPLVLSEADRDGLLAIGENLPGIWHAPSTTAAERKSILRLIICEVVLDQKRLQGQVWIKILWQTGATSEHSLQRRVHTYGDYLNIDRLRTRVTELNAAGKMDKEIASELNAEGFLAAQNCAFKGDNVWLLRRRWGIATVKINGTSPNPFRWPDGTYSVQGAAAALGITPQTIFKYMARGLIQGRQLVKGQPWQIELTEDQIDILRARAQRNRRSRKQAS

SEQ ID NO: 12431 - protein, 701 aa, Unknown
  Description of Unknown: Integrase A999 sequence
  IPR006119,PF00239,cd00338,PF07508,PS51736, G3DSA:3.40.50.1390,SM00857,IPR025827,Coil,IPR036162, PF13408,PTHR30461,PS51737,SSF53041,IPR011109
MLSVTNPSDERLTSARRAKLAYIYVRQSTVTQIKHHQESTELQYRLVDRAEDLGWPRERIQVIDEDLGKSGAGTTDRQGFQKLISEISLGHAGLVMSLDASRLARNNRDWHQLLELCSLFGVLLADGERLFDPCAYHDRLLLGLSGIMSEAELHQIRLRLHQGERQKAARGELRLPVPAGLVHDRSGAVTLNPDEEVQARVALVFAKFRELHSAHAVRRYLRANGLPLPVRPLRGPSPHDVVWREATSARVRSILQNPALAGAYVYGRRRQAPGQARAGSCRPSTIKVPVAEWEVCLQESHPGYISWEEFMANQRRLADNVNRYDADHVGVPRKGAALLQGIAMCGRCGRRMSLRYTGPQGDYPVYCCRADRDQTGAPLCQEVRALAVDARVEAILLEALKPDQIAIALAALGQLDREARQLERQWGLRRERARYEAERAQRQYDAVEPENRLVARSLERAWEEKLRAVEAVDQEHDRWRREQPLVLSADDRATLQALGQNLPQVWHAVTTTAADRKRILRFVIREVILDQKRITGHVWLKILWQTGATSEHAVQRRVHTYKDYADLDRLRQQITELNAAGKMDKEIAQILNQEGFTTARGCRFRGENVWLLRDRWGIATVKINGVAANPMRWSDGSYSVQGVASLLGVTPQVIFDYLARGFLVGRQLVKGQPWQIDPTDDQIRYLQNRLQRIRRSKKVAS

SEQ ID NO: 12432 - protein, 700 aa, Unknown
  Description of Unknown: Integrase A1000 sequence
  IPR006119,cd00338,PF07508,PS51736, G3DSA:3.40.50.1390,SM00857,IPR011109,IPR025827, PS51737,PF13408,PTHR30461,SSF53041, Coil,PF00239,IPR036162
MLISSNIADERLTTAHRAKLAYVYVRQSSVNQVRQHQESTELQYRLVDRAIGLGWPPERVQVIDEDLGKSGAGGVDRHGFQKLIAEIGLGNAGLVVSLDASRLARNNRDWHQLLELCSVFGVVIADGERLYDPRAYHDRLLLGLSGIMSEAELHQLRMRLHQGERQKAARGELRLPLPAGLAYDRTGTIILNPDEEVQARFHLVFAKFRELQSARRVMRYLDRNGLSLPVRPLLGPSPHEVVWRAPDSARVLNILQNPAYAGAYVYGRRQKDPSRCRPGSLTGTVKVAIADWAVCLHAAHPGYISWEEFMANQGRLADNVCRYEAGHSGVPRKGAALLQGIAVCGRCGRRMSMRYTGPHADYPVYCCRSDRDQQGSALCQEVRALAVDALVERIVLDALVPDQIEIALAAAGQLEQENRQLERQWALRVERARYEAERARRQYDAVEPENRLVARSLERAWEDKLRVVEAVEQQHARWRAQEPLLIGPTERAGLQALGENLPRIWNAATTSAADRKRILRFVIREVVLDQKRTRGQVWFKIVWQTGATSEHHVQRRVQAYRNYIDIDRLRQRIVELNAEHKMDGEIAAILNQEGFVAARGCAFKGENVWLLRTRWSIPTVKINGVDKNPMRWPDGSFSIQGAAAELCVTPQTVFDYLARGMLTGRQLTKGQPWQIELSDEQMSQLRNRVRRTKRSKKEAS

SEQ ID NO: 12433 - protein, 699 aa, Unknown
  Description of Unknown: Integrase A1001 sequence
  IPR006119,SSF46955,PF00239,cd00338,PF07508, PS51736,G3DSA:3.40.50.1390,SM00857,IPR011109,IPR025827, IPR009061,PF13408,PTHR30461,PS51737,SSF53041, IPR036162
MNVHLKVQSHHRERSAYLYIRQSSMRQVIDNTESAMRQYALRGRAIALGWREEQIIVIDNDQGESGASAVWREGFQRLVSDVGMGHAGIVMGLEVSRLARNNADWQRLLEICALADTLILDEDGVYDPASFNDRLLLGLKGTMSEAELHVIKARLRGGILNKARRGEFRCPLPTGLVYDHSGNVALDPDMQIRETIAHFFETFSRVGSASQTVKAFRQEGILFPSRLHDSQTVFRPLTPSTAMRVLHNPRYAGAYAYGRRRYRRTIDGKKLVREQGTDDWTACIPDAHPGYISWEQHQENLRILKSNICHKWNAGVASPPREGPALLQGRAVCGQCGRHFHMRYAARRGRQEAWYVCDRARSNRGEHVCQAIAAPPVDEAIGMLIADQMTPAAVELAIEVRKEIEARHEEADRLRCRAIERAQTEADLAQRRFMLVDPNNRLVADTLEGEWNEKLRILANAREERERAQEHDQFILNKAVQERLVTMTADFKKLWTNSETPNRERKRLLAHIIEDVTLLKLPKRGTTKAHIRFKGGKTQTLVTISPKSPSQQVKTSPDVIQLIDKLLDDHIFSEIADILNNQGYRPGSVTRRDQRNARFTTKRVTYLVREYKLRSRYDRLRDRGMLTKKEAAAHLNIHEHTLARWAEHGLVTSHAYNGHYYLYELPKSDLPQKQCSRWNQLVDRLAAHKENARHAKTFN

SEQ ID NO: 12434 - protein, 699 aa, Unknown
  Description of Unknown: Integrase A1002 sequence
  IPR006119,SSF46955,PF00239,cd00338,PF07508, PS51736,G3DSA:3.40.50.1390,SM00857,IPR011109,IPR025827, IPR009061,PF13408,PTHR30461,PS51737,SSF53041, IPR036162
MNVHLKVQSHHRERSAYLYIRQSSMRQVIDNTESAMRQYALRGRAIALGWREEQIIVIDNDQGESGASAVWREGFQRLVSDVGMGHAGIVMGLEVSRLARNNADWQRLLEICALADTLILDEDGVYDPASFNDRLLLGLKGTMSEAELHVIKARLRGGILNKARRGEFRCPLPTGLVYDHSGNVALDPDMQIRETIAHFFETFSRVGSASQTVKAFRQEGILFPSRLHDSQTVFRPLTPSTAMRVLHNPRYAGAYAYGRRRYRRTIDGKKLVREQGTDDWTACIPDAHPGYISWEQHQENLRILKSNICHKWNAGVASPPREGPALLQGRAVCGQCGRHFHMRYAARRGRQEAWYVCDRARSNRGEHVCQAIAAPPVDEAIGMLIADQMTPAAVELAIEVRKEIEARHEEADRLRCRAIERAQTEADLAQRRFMLVDPNNRLVADTLEGEWNEKLRILANAREERERAQEHDQFILNKAVHERLVTMTADFKKLWTNSETPNRERKRLLAHIIEDVTLLKLPKRGTTKAHIRFKGGKTQTLVTISPKSPSQQVKTSPDVIQLIDKLLDDHIFSEIADILNNQGYRPGSVTRRDQRNARFTTKRVTYLVREYKLRSRYDRLRDRGMLTKKEAAAHLNIHEHTLARWAEHGLVTSHAYNGHYYLYELPKSDLPQKQCSRWNQLVDRLAAHKENARHAKTFN

SEQ ID NO: 12435 - protein, 697 aa, Unknown
  Description of Unknown: Integrase A1003 sequence
  IPR006119,PF00239,cd00338,PF07508,PS51736, G3DSA:3.40.50.1390,SM00857,IPR025827,IPR036162,PTHR30461, PF13408,PS51737,SSF53041,IPR011109
MLRDYAVDERISTTQQAKLAYVYVRQSSVGQIRHHQESTALQYRLVDRALGLGWPRERVEIIDDDLGKSGAEAQHRYGFQRLIAEVGLGHAGLVLSYDASRLARNNSDWHQLLQLCSMFSVLIADSERIYDPGLYHDRLLLGLSGIMSEAELHQIRMRLHTGERQKAARGELRIPLPAGLIYAPAGGIMLNPDAQVQERIRLVFDSFMRLGSAKAAVRYLRQADLALPVRPLKGPAPHEIAWRDATDARVRNILKNPVYAGAYVYGRRCAAPEKRSEGGKNPTRAVPREQWEVCIQNAHPAYISWETHMAISDKLTDNVGNFKAGHRGMSRKGKALLQGIAMCGSCGRRMALNYSGPDSNHPVYRCRSERATCVGQYCQEVRAPRVEAEVERQFLAALTPDQLAIALAALDAIDADVHGLERQWTLKRERAEYECERARCQYDAVEPENRLVARSLESIWESKLREVEKVEQDYRRWKTEQTVALNADDRARIAAFGIDLPDLWERIENSERKAMLRLVIDKVILDQRRAKGMVWIRIIWQTGAATEHWVMRRTQSYAEAAHADVLEQRIRELNAAGMMDAEVATALNIEGLRNSLDGLFDHNTVHLLRQRWNIPTVKINGVEHNPPRWPDGSYSIQGAATALGVTEQTVFKWLKRGKLQGRQLKKGQPWQVDLTLQQIKALTAPNYSMTPSRKAAS

SEQ ID NO: 12436 - protein, 696 aa, Unknown
  Description of Unknown: Integrase A1004 sequence
  IPR006119,cd00338,PF07508,PS51736, G3DSA:3.40.50.1390,SM00857,IPR025827,IPR036162, PF13408,PTHR30461,SSF53041,PS51737, PF00239,IPR011109
MKSELIKPIHLARRAVVYIRQSTTHQVVTNQESLRLQYALRQRAIELGWPEAGIDVIDADLGISGASAAQRSGFKELVGRVGLKEVGLILSIDVTRLARNCSDWYPLLDICGLHGCLIADRDGVYDPGSANGRLLLGLKGTISELELHTIRSRLTAGLLAKAERGELALTLPIGLVRDPSGVVVKDPNLEVQERLELLFETFLKVRTIAKVMREFNDRGLELPRRDRHGDLHWARATTSAVAAILKNPAYAGAFVYGRTRLRRPSDGRLPTKVPKPIEQWRIIVKDRYPPYIAWQSYEKIRGIVSDNRAEYMRNKTRGAPREGELLLQGIAWCGRCGHKMYARYKGGAEYVCNHLHSHQGLPACQYIRARRVDAAVAQAFLTALAPAEIDALSCARRAQQQAYKAMQSGAEQQLERRRYEAALAERQFNRVDPDNRLVAAELECRWEVALKEVRVAEEALARLKSPQAIAQITVGNKVLNDKVVRLSGRLPEIWTDPGTTDAKRKALLRCLIDKVILDRGEHDVVRMRIVWRGGAVTDIEVKMRVNSVADLTQGAEMRERVLELARAKMHDDEIAAKLTSEGHRSPNCPDKVLPITVQRIRLHAGLKGLTEQRTRWRHSTDLLSAQQLAGVLNIPVNWLYVQIRQGRLLIDRHPSGAHLFSNTSRVIEAVRKLRNHELDQLDLRITEPHEEGHQHA

SEQ ID NO: 12437 - protein, 696 aa, Unknown
  Description of Unknown: Integrase A1005 sequence
  IPR006119,PF00239,cd00338,PF07508,PS51736, G3DSA:3.40.50.1390,SM00857,IPR011109,IPR025827,PS51737, PTHR30461,PF13408,Coil,SSF53041,IPR036162
MSTKITVDHLGRGAAIYVRQSTPGQLINHTESRRRQYDLADAARAAGFVDVMIIDEDLGRSGSGLECRPGFQKLVAAVCAGTVGAVYCIEASRLARNGRDWHHLIDLCALAGALVVDPDGVYDPRLLNDRLLLGLKGTMSEYELSLLRQRGIEARDGKARRGELRFTLPPGYCWNEAGRIEIDPDARVAGAIRMLFSKFRELGSARQVFLWARAAELSLPVVRRNLIACKILWQPPAYHTVIQVLQNPIYAGAYVFGRRGNRTRVVEGRARKTSGHKRERTDWNTLLRDNHEGYITWAEFEEHQRMLEENAHMQKRAARKAGRGGRALLTGLVRCGHCGRKMRVFYGMQSGHAHRYQCRGDDAHVGVGLCIGIGGIRVDRAVVAQMLEAVSTRAVEAALLAADQAAAAGAEERAALERELEAARYDASLAARRYDLVEPEKRHVVRELEARWNTALERVAQIERRIAEAEARSSARPRVNRAALLGLAHDLSAAWNAPTADTRTRQRLTRLLVEEVVIDLDDTAHEAVLRIHWVGGRHTELRVPRARTGRRANKAHPGAVEVVRKLSGHWPDHEISVTLNRMKCRSDNGETWTTVKVRLLRERLGLSDFDPTVPRPETLTADKAAKRLGISIPSVHRLIQRGILPATQLVSSAPWHIPVAALDTDAVRTGVNEIKARRPKNLIDYQRDETMPLPGL

SEQ ID NO: 12438 - protein, 696 aa, Unknown
  Description of Unknown: Integrase A1006 sequence
  IPR006119,PF00239,cd00338,PF07508, PS51736,G3DSA:3.40.50.1390,SM00857,IPR025827, Coil,IPR036162,PTHR30461,PF13408, PS51737,SSF53041,IPR011109
MSPKITADHLGRGAAIYVRQSTPGQLINHTESRRRQYDLADAARAAGFVDVMIIDEDLGRSGSGLESRPGFQKLVAAVCAGTVGAVYCIEASRLARNGRDWHHLIDLCALAGALVVDPDGVYDPRLLNDRLLLGLKGTMSEYELSLLRQRGIEARDGKARRGELRFTLPPGYCWNEAGRIEIDPDERVAGAIRMLFSKFRELGSARQVFLWARAAELSLPVVRRNLIACKILWQPPAYHTVIQVLQNPIYAGAYVFGRRGNRTRVVEGRARKTSGHKRERTEWNTLLRDNHEGYITWAEFEEHQRMLEENAHMQKRAARKAGRGGRALLTGLVRCGHCGRKMRVFYGMQSGHAHRYQCRGDDAHVGVGLCIGIGGIRVDRAVVAQMLEAVSARAVEAALLAADQAAAAGAEERAALERELEAARYDASLAARRYDLVEPEKRHVVRELEARWNTALERVAQIERRIAEAEARSSARPRVNRAALLGLAHDLSAAWNAPTADARTRQRLTRLLVEEVVIDLDDAAYEAVLRIHWIGGRHTELRVPRARTGRRADKAHPGAVEVVRKLSGHWPDHEISVTLNRMKCRSDNGETWTTVKVRLLRERLGLSDFDPTVPRPETLTADKAAKRLGISIPSVHRLIQRGILPATQLVPSAPWHIPMAALDTDAVQTGVNEIKARRPKNLIDYQRDETMLLPGL

SEQ ID NO: 12439 - protein, 696 aa, Unknown
  Description of Unknown: Integrase A1007 sequence
  IPR006119,cd00338,PF07508,PS51736,G3DSA:3.40.50.1390, SM00857,IPR011109,IPR025827,PS51737,PF13408, PTHR30461,SSF53041,Coil,PF00239,IPR036162
MSTKITVDHLGRGAAIYVRQSTPGQLINHTESRRRQYDLADAARAAGFVDVMIIDEDLGRSGSGLECRPGFQKLVAAVCAGTVGAVSCIEASRLARNGRDWHHLIDLCALAGALVVDPDGVYDPRLLNDRLLLGLKGTMSEYELSLLRQRGIEARDGKARRGELRFTLPPGYCWNEAGRIEIDPDARVAGAIRMLFSKFRELGSARQVFLWARAAELSLPVVRRNLIACKILWQPPAYHTVIQVLQNPIYAGAYVFGRRGNRTRVVEGRARKTSGHKRERTDWNTLLRDNHEGYITWAEFEEHQRMLEENAHMQKRAARKAGRGGRALLTGLVRCGHCGRKMRVFYGMQSGHAHRYQCRGDDAHVGVGLCIGIGGIRVDRAVVAQMLEAVSTRAVEAALLAADQAAAAGAEERAALERELEAARYDASLAARRYDLVEPEKRHVVRELEARWNTALERVAQIERRIAEAEARSSARPRVNRAALLGLAHDLSAAWNAPTADARTRQRLTRLLVEEVVIDLDDTAHEAVLRIHWVGGRHTELRVPRARTGRRANKAHPGAVEVVRKLSGHWPDHEISVTLNRMKCRSDNGETWTTVKVRLLRERLGLSDFDPTVPRPETLTADKAAKRLGISIPSVHRLIQRGILPATQLVSSAPWHIPVAALDTDAVRTGVNEIKARRPKNLIDYQRDETMPLPGL

SEQ ID NO: 12440 - protein, 696 aa, Unknown
  Description of Unknown: Integrase A1008 sequence
  IPR006119,PF00239,cd00338,PF07508, PS51736,G3DSA:3.40.50.1390,SM00857,IPR011109, IPR025827,PS51737,PTHR30461,PF13408, Coil,SSF53041,IPR036162
MSTKITVDHLGRGAAIYVRQSTPGQLINHTESRRRQYDLADAARAAGFVDVMIIGEDLGRSGSGLECRPGFQKLVAAVCAGTVGAVSCIEASRLARNGRDWHHLIDLCALAGALVVDPDGVYDPRLLNDRLLLGLKGTMSEYELSLLRQRGIEARDGKARRGELRFTLPPGYCWNEAGRIEIDPDARVAGAIRMLFSKFRELGSARQVFLWARAAELSLPVVRRNLIACKILWQPPAYHTVIQVLQNPIYAGAYVFGRRGNRTRVVEGRARKTSGHKRERTDWNTLLRDNHEGYITWAEFEEHQRMLEENAHMQKRAARKAGRGGRALLTGLVRCGHCGRKMRVFYGMQSGHAHRYQCRGDDAHVGVGLCIGIGGIRVDRAVVAQMLEAVSTRAVEAALLAADQAAAAGAEERAALERELEAARYDASLAARRYDLVEPEKRHVVRELEARWNTALERVAQIERRIAEAEARSSARPRVNRAALLGLAHDLSAAWNAPTADTRTRQRLTRLLVEEVVIDLDDTAHEAVLRIHWVGGRHTELRVPRARTGRRANKAHPGAVEVVRKLSGHWPDHEISVTLNRMKCRSDNGETWTTVKVRLLRERLGLSDFDPTVPRPETLTADKAAKRLGISIPSVHRLIQRGILPATQLVSSAPWHIPVAALDTDAVRTGVNEIKARRPKNLIDYQRDETMPLPGL

SEQ ID NO: 12441 - protein, 696 aa, Unknown
  Description of Unknown: Integrase A1009 sequence
  IPR006119,cd00338,PF07508,PS51736,G3DSA:3.40.50.1390, SM00857,IPR011109,IPR025827,PTHR30461,PF13408, SSF53041,PS51737,PF00239,IPR036162
MNTKITPDHLGRAAVVYVRQSTMTQVTGNLESQRRQYDLAGAAATTGFASVTVIDDDLGRSGSGSMERPGFERLVAQVCSGDVGAVYCIEASRLARNGRDWHHLIDLCALAGTLVIDPDGAYDPRLVNDRLLLGLKGTMSEYELSLMRQRGIAARDSKAGRGELRFMLPPGLCWSEVGKIEIDPDEHVAETIRLVFAKFRELGSGRQVFLWLRSADIKMPVVLRNVDVCKLVWKAPAYHSVMQILHNPLYAGAYAFGRRAQRTRIIDGRARKATGVRKPRDEWSVLLRDNHQGYISWREYEENHKLLAENAHMKKNYDRKSARGGRALLTGLMRCGRCGRMMRVFYGSAKGNAHRYQCRGDDAHVGVGLCIGIGGVRVDRAVAVQILEAVSDRAVEAAIFASDQVERSRRDVIAALDRDLEGSRYEALLASRRYELVDPAKRHVARELEARWNDALERVGVLERKIKDLSALSAARPAIDRGRLLQLAQDLPTVWNAPSTETRTKQRLIHILVQEIICDLDDATNEAVLLIHWTGGRHTEVRVARVKTGRYPAELAPSAVEALRKLGGHWPDRELAVSLNRMLCKTGDGESWTAVRVRDMRERLGIPEYDATKVEIPMISLMKAAEKLGICVGSAKSLVQRGILPATQILPGSPWMVPVDALTSEAVRIGVQGVVDRRPKFYEDYQYDKVVRLPGI

SEQ ID NO: 12442 - protein, 696 aa, Unknown
  Description of Unknown: Integrase A1010 sequence
  IPR006119,cd00338,PF07508,PS51736, G3DSA:3.40.50.1390,SM00857,IPR025827,IPR036162, PF13408,PTHR30461,SSF53041,PS51737, PF00239,IPR011109
MNTKITPDHLRRAAVVYVRQSTMTQVTGNLESQRRQYDLAGAAATTGFASVTVIDDDLGRSGSGSMERPGFERLVAQVCSGDVGAVYCIEASRLARNGRDWHHLIDLCALAGTLVIDPDGAYDPRLVNDRLLLGLKGTMSEYELSLMRQRGIAARDSKAGRGELRFMLPPGLCWSEVGKIEIDPDEHVAETIRLVFAKFRELGSGRQVFLWLRSADIKMPVVLRNVDVCKLVWKAPAYHSVMQILHNPLYAGAYAFGRRAQRTRIVDGRARKATGVRKPRDEWSVLLRDNHQGYISWREYEENHKLLAENAHMKKNCDRKSARGGRALLTGLMRCGRCGRMMRVFYGSAKGNAHRYQCRGDDAHVGVGLCIGIGGVRVDRAVAMQILEAVSDRAVEAAIFASDQVERSRRDVIAAIERDLEGARYEALLASRRYELVDPAKRHVARELEARWNDALERVGVLERKIKDLSALSAARPVIDRGRLLQLAQDLPTVWNAPSTETRTKQRLIHILVQEIICDLDDATNEAVLLIHWTGGRHTEVRVARVKTGRYPAELAPSAVEALRKLGGHWPDRELAVSLNRMLCKTGDGESWTTVRVRDMRERLGIPEYDATKVDVPMISLMKAAEKLGICVGSAKSLVQRGILPATQILPGSPWMVPVEALSSEAVRIGVQGVIDRRPKFYEDYQYDKVVRLPGI

SEQ ID NO: 12443 - protein, 696 aa, Unknown
  Description of Unknown: Integrase A1011 sequence
  IPR006119,PF00239,cd00338,PF07508,PS51736, G3DSA:3.40.50.1390,SM00857,PS51737,IPR025827,IPR036162, PF13408,PTHR30461,Coil,SSF53041,IPR011109
MMSELIQPIHLKRKAVVYIRQSTPHQVVSNQESLRLQYALRQRARDLGWHEADIDVIDADLGLSGASAAHRSGFQELVGRVVLSEVGIILSIDVTRLARNCSDWYPLLDICGLRGCLIADRDGVYDPGSANGRLLLGLKGTISELELHTIRSRLTAGLIAKAQRGELALTLPVGLVRDPSGVVLKDPDTAVQGRLGLVFELFVKLRSIAKVMRTLNARGLDLPRRDRHGELHWARATVSAVAAILKNPAYAGAFVYGRTRMRDPTPDGRAPGKAKVARPLEEWRIVVKDRYPAYIDWPTYEKIRSIVSDNRAEYMRTKTRGIPRDGELLLQGIAWCGRCGHKMYARYKGGGEYVCNHLRTHSGLPTCQHIRAKAVDAAVADAFLSALAPAELDALSRARRAQSQVDSALRANAEREVERKRYAAALTQRQYNRVDPDNRLVAAELERRWESALMEVRAAEAALAEQSEQQPTAHMAMGKAFTGKVVALAGRLPKIWADSATTDTHRKALLRCLVDKVVLDRTPESALVRIVWRGGAVTDLDVKLRVTAIAKLARGAEMRARLLELAKAGVPDEEIAHILTSEGLRSANSADKVLPVTVQRIRLAEGIRTPPSCRRWSHDPGYLSTKALATKLEIPVNWLYVQIRKKRLLIDPQPTGAYLFPDTSLVLDGVRNLRNHIVNELDLRICQHDDRGYQHG

SEQ ID NO: 12444 - protein, 696 aa, Unknown
  Description of Unknown: Integrase A1012 sequence
  IPR006119,cd00338,PF07508,PS51736, G3DSA:3.40.50.1390,SM00857,IPR011109,IPR025827, PS51737,PTHR30461,PF13408,SSF53041, Coil,PF00239,IPR036162
MNTKITSDHLGRAAIVYVRQSTMAQVTGNLESQRRQYDLAGAAATTGFASVTVIDDDLGRSGSGSVERPGFERLVALVCSGNVGAVYCIEASRLARNGRDWHHLIDLCALTGTLVIDPDGAFDPRLVNDRLLLGLKGTMSEYELSLIRQRGIAARDSKAGRGEFRFMLPPGFCWSEAGKIEIDPDEHVAEAIRLVFDKFRELGSGRQVFLWLRSADIKMPVVLRNVEVRKLVWKAPAYHSVMQILHNPLYAGAYVFGRRAQRTLIIDGRARKANGLRKPRDEWSVLLRDNHQGYITWREYEENQKLLTENAHMKRNCDRKSARGGRALLTGLIRCGRCGRMMRVFYGGAKGNAHRYQCRGDDARVGLGLCIGIGGVRVDRAVATQILEAVSDRAVEAAIFASDQVERSARDVIAAIERDLEGARYEASLAGRRYELVDPAKRHVARELEARWNDALERVSMLERKIEELSALSTARPAIDRGRLLQLAHDLPTAWNAPSTDTRTKQRLIHILVQEIICDLDDTTNQAVLLIHWTGGRHTEVRVARVKTGRYPSDMAPPAVEALRKLGGHWPDRELAVSLNRMLCKTGDGEGWTAVRVRDMRERLGIPEYDPTKAGSPVISLMKAAERLGICIGSAKSLVKKGILPATQILPGSQWMVPIEALTSEAVLIGVQGVVGRRPKIYEDYQYDKVVRLPGL

SEQ ID NO: 12445 - protein, 696 aa, Unknown
  Description of Unknown: Integrase A1013 sequence
  IPR006119,PF00239,cd00338,PF07508,PS51736, G3DSA:3.40.50.1390,SM00857,IPR011109,IPR025827,Coil, PF13408,PTHR30461,PS51737,SSF53041,IPR036162
MHAKITVEHLARSALVYVRQSTMSQVLGNLESQKRQYQMAEAARDMGFAEVRVIDEDLGRSGSGQIARPGFQRLVAEVCAGTVGAVYCIEASRLARNGRDWHHLIDLCALTGALVVDPEGVYDPRLMNDRLLLGLKGTMSEYELSLLRQRGLAARDAKASRGELRFTLPPGFCWSEDDRIEMDPDERVQQAIRLIFAKFRELGSGRQVFLWLRAADIHLPVALRNGALRKIAWRKPAYHSVMQVLHNPIYAGAYAFGRTGNRTGVVDGQARKTSGHHRAIADWSVLIKDNHEGYLDWRAYEENRRMLEENAHMQKRAARKSGRGGQALLSGMARCARCGRMMRVFYKTGTDLSHRYQCRGDDGHVGAGLCIGAGGGGIDALVASQLLEAVSGQAVQAALLAGQQAAKAQETVRLAVEKELDEARYAAELAERRYEHVDPAKRHVARTLEARWNVALERVAAVEHKLAALGAELRAKPGVDPAVLMRLATDLPSVWNAVGTDARARQRLVRLLIEEVVIDIDAEENEFILLIHWIGGRHTEVRLARRKTGRFPPGRPLTAREVLRKLAGHWPDRELAVTLNRMRCRTEDGETWTTVRVAELRDKLAIPPYDPDAEVPKTLSVDAAAKRLGVCVASVHKLIRSQILPATQIMYSAPWKIPVDALETEAVRIGLQEIAVRRPRQALEKVADRSMPLPGF

SEQ ID NO: 12446 - protein, 696 aa, Unknown
  Description of Unknown: Integrase A1014 sequence
  IPR006119,PF00239,cd00338,PF07508, PS51736,G3DSA:3.40.50.1390,SM00857,IPR011109, IPR025827,PF13408,PTHR30461,SSF53041, IPR036162
MNTKITSDHLGRAAVVYVRQSTMAQVTGNLESQRRQYDLAAAAATTGFASVTVIDDDLGRSGSGSMERPGFERLVAQVCSGNVGAVYCIEASRLARNGRDWHHLIDLCALAGTLVIDPDGAYDPRLVNDRLLLGLKGTMSEYELSLMRQRGLVARDSKAKRGEFRFMLPPGFCWSEAGKIEIDPDEHVAETIRLVFAKFRELGSGRQVFLWLRSADIKMPVVLRNVDVCKLVWKAPAYHSVMQILHNPLYAGAYAFGRRAQRTLIVDGRARKANGLRKPRDEWSVLLRDNHRGYITWREYEENHKLLAENAHMKKNCERKSARGGRALLTGLMRCGRCGRMMRVFYGSAKGNAHRYQCRGDDAHVGVGLCIGIGGVRVDRAVAIQILEAVSDRAVEAAIFASDQVERSQRDIIAAIERDLEGARYEALLASRRYELVDPAKRHVARELEARWNDALERVGVLERKIKELSALSAARPVIDRGRLLQLAHDLPTVWNAPSTDTRTKQRLIHILVQEIICDLDDATNEAVLLIHWTGGRHTEVRVARVKTGRYPAELAPSAVEALRKLGGHWPDRELAVSLNRMLCKTGDGESWTTVRVREMRERLGIPEYDAAKVDVPMISLTKAAETLGICVGSAKSLAKKGILPATQILPGSQWMVPVAALTSETVRIGVQRVVDRRPKFYEDYQYDKVVRLPGL

SEQ ID NO: 12447 - protein, 695 aa, Unknown
  Description of Unknown: Integrase A1015 sequence
  IPR006119,PF00239,cd00338,PF07508,PS51736, G3DSA:3.40.50.1390,SM00857,IPR025827,PS51737,IPR036162, PF13408,PTHR30461,Coil,SSF53041,IPR011109
MKSELVTPSHLARKAVVYIRQSTPHQVVSNQESLRLQYALRQRARELGWREAAIDVIDADLGLSGASIAQRNGFKELVGRVGLSEVGLILSIDVTRLARNCTDWYPLLDICGLRGCLIADRDGVYDPGTPNGRLLLGLKGSISELELHTIRSRLTAGLLAKAERGELAVMLPIGLMRDPSGVVVKDPDMAVQGRLGLVFQLFLQLRSVAKVMRALNERDLELPRRDRYGDLCWTRATLAAVAAILKNPAYAGAFVYGRTRFRPPKREGALPQKAPRPMEEWRIVVKDRYPAYIDWPIYEKIRSVIRDNRAEYMRIKTRGAPRNGELLLHGIAWCARCGHKMYVRYKGGGEYVCNHLRTQEGQPTCQHIRAAHIDAAVGDAFLTALAPAELDALSRSRRVQQQTNNALRSSAERELERKRYTAALAERQFNRADPDNRLVASELERRWEAALNDVRAAEEALARQTPPKAITQVAISKELNDKVISLTGRLPQIWGDETISDAHRKALLRCLIEKVVLDRGERDLALARIVWRGGAVTELEVKMSVNSVTRLTRGTEMRERLLTLARDGVPDDKIATILTREGHRSPRCADKVLPITVGRLRRAAAIKVTAQRSRWEHDDSYLSPPELARRLEIPVNWLYVQIRTKRLLIDRQPSGAYLFPNTPSVLHAIGDLRNHVIAQLDLRICQPNKEGHQHG

SEQ ID NO: 12448 - protein, 695 aa, Unknown
  Description of Unknown: Integrase A1016 sequence
  IPR006119,SSF46955,PF00239,cd00338,PF07508,PS51736,G3DSA:3.40. 50.1390,SM00857,IPR025827,IPR009061,IPR036162,PF13408,PTHR30461 ,PS51737,SSF53041,IPR011109
MSMNSESHQKITSAHLSRMAYLYVRQSTLRQVLENTESTQRQYALRERAAALGWPLERIVVIDRDLGQSGASAADREGFQQLVSEVSLGHVGIVLGLEVSRLARNSTDWHRLLELCAFADTLILDEDGLYNPGLFNDRLLLGLKGTMSEAELHVLKARLRGGILSRARRGELKQMLPVGFVHDVQDRVILDPDVQVQSAVRLFFETFKRTGSCLAVVKDFHARGLLFPRRLRSGAHKGELVWAELLHCRARQIIHNPRYAGAFVFGRTKQRHLPNGKICSRLVPSEEWILLRDMHPGYISWEEYQSNRQQVQGNALSWSDDRRRSPAREGNALLQGLVICGTCGERMTVRYHLHRGQSVPTYWCGRRPMHRGESGLCQTVHGGTLDTAIGDVVIEAMTPFAIEVALTVQQELASRHEEADRLRRQHVERARYEADLAQRRFLKVDPDNRLVADALEADWNARLRALADAQQVYEKASVSDSNVVTDAERVELLALATDFPRLWRNPRTQMKEKKRMLRLLIEDITLTKADALHVDIRFAGGATRSLDLALPKSCVELRTTDAEVIKEIDQLIDTYTDGEIADVLNERGVRTVVTTPWTAARVGRLRNTYHLSDRRTRLLALGLLTPEDVAARYGVAVSTVHLWRRRGLLRAHPVNDRGDYLYEIPPEDLPAKYAHKREYRVEPSTTHSRNAGGAV

SEQ ID NO: 12449 - protein, 695 aa, Unknown
  Description of Unknown: Integrase A1017 sequence
  IPR006119,cd00338,PF07508,PS51736,G3DSA:3.40.50.1390, SM00857,IPR025827,PS51737,IPR036162,PF13408, PTHR30461,SSF53041,Coil,PF00239,IPR011109
MKSELVKPTHLARRAVVYVRQSTPHQVISNQESLRLQYALRERARELGWHEADIDVIDADLGISGASTTGRNGFKELVGRVGLSEIGLILSIDVTRLARNCSDWYPLLDICGLRGCLIADRDGVYDPGSANGRLLLGLKGTISELELHTIRSRLTAGLLAKAERGELALMLPVGLVRDASGVVVKDPDLGVQERLELVFRTFLKFRTVAKVMRVLNDRDLPLPRRDRFGELRWARATVSAVARILKNPAYAGAFVYGRTRFRAAGRDGGSEAKTPKDIKDWRIIVKDRYPHYIDWSTYEKIRDIVRDNRAEYMRAKTRGAPRDGELLLHGIAWCGRCGYKMYVRYKGGGEYACNHLHSHSGLPDCQRVRAAQIDAAVADAFLAALAPGELDALARARQAQQQVNKALRAGAERELERKRYAAALAERQFNRVDPDNRLVASELERRWEAALSELRAAEDAVAQRASTEPAKRTGFSKDLNNKVVALFDSLPQIWANDATTDAHRKALLRCLVEKVVLDRGERDVALARIVWRGGAVTDLHVKMKVNSVAKLTRGEELRARLLELALTGVPDDQIAEILTREGHHSPNCEDKVLPITVQRLRLAAGIKAKAQRNRWTHEPTLLSAVQLAARLDIPVNWIYVQIRRKRLLIDQQSTGAYLFQNSPAVVNAVRDLRNRTINHLDLRIIQPHQEGHQHA

SEQ ID NO: 12450 - protein, 695 aa, Unknown
  Description of Unknown: Integrase A1018 sequence
  IPR006119,cd00338,PF07508,PS51736, G3DSA:3.40.50.1390,SM00857,IPR025827,PS51737, IPR036162,PF13408,PTHR30461,SSF53041, Coil,PF00239,IPR011109
MKSELVKPTHLARRAVVYVRQSTPHQVISNQESLRLQYALRERARELGWHEADIDVIDADLGISGASTTGRNGFKELVGRVGLSEIGLILSIDVTRLARNCSDWYPLLDICGLRGCLIADRDGVYDPGSANGRLLLGLKGTISELELHTIRSRLTAGLLAKAERGELALMLPVGLVRDASGVVVKDPDLGVQERLELVFRTFLKFRTVAKVMRVLNDRDLPLPRRDRFGELRWARATVSAVARILKNPAYAGAFVYGRTRFRAAGRDGGSEAKTPKDIKDWRIIVKDRYPHYIDWSTYEKIRDIVRDNRAEYMRAKTRGAPRDGELLLHGIAWCGRCGYKMYVRYKGGGEYACNHLHSHSGLPDCQRVRAAQIDAAVADAFLAALAPGELDALARARQAQQQVNKALRAGAERELERKRYAAALAERQFNRVDPDNRLVASELERRWEAALSELRAAEDAVAQRASTEPAKRSGFSKDLNNKVVALFDSLPQIWANDATTDAHRKALLRCLVEKVVLDRGERDVALARIVWRGGAVTDLHVKMKVNSVAKLTRGEELRARLLELALTGVPDDQIAEILTREGHHSPNCEDKVLPITVQRLRLAAGIKAKAQRNRWTHEPTLLSAVQLAARLDIPVNWIYVQIRRKRLLIDQQSTGAYLFQNSPAIVNAVRDLRNRTINHLDLRIIQPHQEGHQNA

SEQ ID NO: 12451 - protein, 695 aa, Unknown
  Description of Unknown: Integrase A1019 sequence
  IPR006119,cd00338,PF07508,PS51736,G3DSA:3.40.50.1390, SM00857,IPR025827,PS51737,IPR036162,PF13408, PTHR30461,SSF53041,Coil,PF00239,IPR011109
MKSELVKPTHLARRAVVYVRQSTPHQVISNQESLRLQYALRERARELGWHEADIDVIDADLGISGASTTGRNGFKELVGRVGLSEIGLILSIDVTRLARNCSDWYPLLDICGLRGCLIADRDGVYDPGSANGRLLLGLKGTISELELHTIRSRLTAGLLAKAERGELALMLPVGLVRDASGVVVKDPDLGVQERLELVFRTFLKFRTVAKVMRVLNDRDLPLPRRDRFGELRWARATVSAVARILKNPAYAGAFVYGRTRFRAAGRDGGSEAKTPKDIKDWRIIVKDRYPHYIDWSTYEKIRDIVRDNRAEYMRAKTRGAPRDGELLLHGIAWCGRCGYKMYVRYKGGGEYACNHLHSHSGLPDCQRVRAAQIDAAVADAFLAALAPGELDALARARQAQQQVNKALRAGAERELERKRYAAALAERQFNRVDPDNRLVASELERRWEAALSELRAAEDAVAQRASTEPAKRSGFSKDLNNKVVALFDSLPQIWANDATTDAHRKALLRCLVEKVVLDRGERDVALARIVWRGGAVTDLHVKMKVNSVAKLTRGEELRARLLELALTGVPDDQIAEILTREGHHSPNCEDKVLPITVQRLRLAAGIKAKAQRNRWTHEPTLLSAVQLAARLDIPVNWIYVQIRRKRLLIDQQSTGAYLFQNSPAIVNAVRDLRNRTINHLDLRIIQPHQEGHQHA

SEQ ID NO: 12452 - protein, 695 aa, Unknown
  Description of Unknown: Integrase A1020 sequence
  IPR006119,PF00239,cd00338,PF07508, PS51736,G3DSA:3.40.50.1390,SM00857,IPR011109, IPR025827,PF13408,PTHR30461,PS51737, SSF53041,IPR036162
MMSELIKPTHLARKAVVYIRQSTPHQVVSNQESLRLQYALRQRARDLGWHEADIDVIDADLGLSGASATQRGGFKELVGRVGLSEVGLILSIDVTRLARNCSDWYPLLDICGLRGCLIADRDGVYDPGSPNGRLLLGLKGTISELELHTIRSRLTAGLLAKAARGELALNLPVGLVRDPSGVVTKDPNIEVQERLERVFDTFLKFRTVAKVMRVFNQRNLDLPRRDRHGDLRWTRATISAIAKILGNPAYAGAFVYGRTRTCHGTCESGLPSKAPRPIDQWRIVVKDRYPAYIDWPTYEKIRTIVADNRAEYMRTKTRGAPRDGELLLHGIAWCARCGHKMYVRYKGGGEYVCNHLRTHEGLPTCQHVRAPKVDAAVAEAFLTALAPAELDALSRAGRAQHQLDTALRTSAEHQLERKRYAAALAERQFNRVDPDNRLVAGELERRWEAALIEVRTAEEALARQSALHSLPQRVIGKDLGDKVIALAGRLPQIWADPTTTDAQRKALLRCLVDKVALDRGQRDVVLVRIVWRGGAISDLMVKMKVNSVAKLSQGQEMRGRVLDLARAGALDDDIAATLTAEGHRSPNCEDRVLPITVQRLRLAAGMKVAAQRTRWTHDVGNLSATELADVLGIPVNWLYVQIRKERLLIDRQPNGAYLFQNTPDVIQAVRELWNHSVNQLDLRICQPHQEGHQHA

SEQ ID NO: 12453 - protein, 694 aa, Unknown
  Description of Unknown: Integrase A1021 sequence
  IPR006119,PF00239,cd00338,PF07508,PS51736, G3DSA:3.40.50.1390,SM00857,IPR011109,IPR025827,PF13408, PTHR30461,PS51737,SSF53041,IPR036162
MSTNSAQKVTSEHLRRDAFLYVRQSSLRQVFENTESTKRQYALRDRAVSLGWPIERIHVVDNDLGMSGSSAKERDGFQHLVAEVANGHAGIVLGLEVSRLARNNADWHRLIELASLTQTLILDEDGIYDPGQFNDRLLLGLKGAMSEAELHILKGRLQGGIKNKARRGELEVPLPIGLVYHPNGSVALDPDQQVRGALQLLFDTFRQAASATATVRRFRQEGWLFPRRIRRGIGKGDLLWGPLEHCRVIQILHNPRYAGAFVYGRTRGAYRPGRKSTSLKVARENWQVLIQNSHPGFIDWDEFERNQATLKQNLTGFGLDRRGSMPREGVGLLQGRVVCGACGARMRVRYQEVDNKLQPYYMCTENPVRRAGKPCQSVRGSAIDDAIGSLLLESVAPAVLEVALAVEDEISGRVKQAAAQRQKQLVRARYDAELARRRYMSVDPTNRLVADSLEADWNERLRVLDALQQENERLQHADHKLLSSDARTQIRALAEDFPRVWNDQRVVPVERKRMIALLIEDVTLVKAERIAIHVRFRGGRTTSLEIDKPKPIALIRKTLPEVVAKVDELLETCSDRQVAEQLNALGYTNWKGESFTHKKVSIVRTAYRLKSRFERLRARGMVTANELAKQLGVCPTTIYLWGQRGVVHQHRYGNLHRCLYEPLGDVVLVKGQGGRYSSTEPTFIPVPSTTQGAV

SEQ ID NO: 12454 - protein, 694 aa, Unknown
  Description of Unknown: Integrase A1022 sequence
  IPR006119,cd00338,PF07508,PS51736, G3DSA:3.40.50.1390,SM00857,IPR025827,IPR036162, PTHR30461,PF13408,SSF53041,PS51737, PF00239,IPR011109
MFTETHQKVTADHLSRDAFLYVRQSSLRQVFENTESTKRQYALRERASALGWPIERIHVIDSDLGRSGASAEGRDGFQQLVSEVAIGHAGIVLGLEVSRLARNNADWHRLIELAALSHTLILDEDGIYDPAHFNDRLLLGLKGTMSEAELHVLRARLQGGIRNKARRGELELALPIGLVYGADGSVVLDPDRQIQDTLRLLFVSFAECGSASAVVRRFQREGWAFPRRIRGGIGKGELLWATLDHSRAVQILHNPRYAGAFVYGRTRGGRNAQLKSVQHKVAREQWHVLIRDAHVGYIDWEEYERNQATLKQNVGGFGEASRGRVPREGTGLLQGRVVCGLCGARMRVRYQEVEGRLEPYYQCTDAVVRRAGKLCQSVRGRPIDEAISALLLESVAPAAIEVALAVQEEIAGRLEQAETLRASQLERARYEAELARRRYLKVDPDNRLVADALEADWNARLRQLDALQREHERQRAADQGLLGEEARGRILALAKEFRHVWNDPRTEPIERKRMMALLIEDVTLVKADRVSIHVRFRGGKTRSLLIDKPKPIAQIRKTSPQVVQTVDELLETCTDRQVAARLNELGYRNWQGQSFTFKKVIVLRNAYHLKSRFERLRERGMRTGDELAKQLDVCPTTIHQWGRQGLLRRHLYGNNHRCLYEPVGEVLVTKGAGGRYGSRSPTLIAVSSTTQGAI

SEQ ID NO: 12455 - protein, 694 aa, Unknown
  Description of Unknown: Integrase A1023 sequence
  IPR006119,cd00338,PF07508,PS51736,G3DSA:3.40.50.1390, SM00857,IPR011109,IPR025827,PTHR30461,PF13408, SSF53041,PS51737,PF00239,IPR036162
MSTDNAMKISADHLRRDAFLYVRQSSLRQVFENTESTKRQYALRDRAVALGWPIERVHVIDNDLGLSGAQSQDRDGFQRLVSEVAMGHAGIVLGLEVSRLARNNADWHRLLELAAMSRTLIMDEDGVYDAASFNDRMLLGLKGTMSEAELHILKSRLQGGILNKARRGELELPLPIGFVYTPDTRVVLDPDRQIQDTVRMLFDTFREAGSACAVVRRLRSEKILFPRRIRRGLGKGDVLWSEIDHSRLLQILHNPRYAGAFAYGRTRTVYNAKLKSVQQKMPRSDWQVLIPQAHEGYISWDEFERNQSSLEQNAVGFSPGLRGRMPRQGSGLLQGRVLCGRCGARMRVHYEQFEDKLRPYYVCNEAVVRHAGKTCQWARGPAIDEAVSALLLEAMAPTAIEVALAVQQEISQRVEQAASLRDKQLQRARYEAELARRRYLKVDSDNRLVADALEADWNGKLRDLDALQREHERQNETDQSLLDGAAQERIRALAADFPSVWSNERTSVVERKRMLGLLIEDVTLLVDEQINMHIRWRGGRTQSLTVARPRPMAVIRKTPEAVVALINELLETDNDQQIASRLNALGHRNWRGEPFTLKKVMIVRRAYGLKTRFERLRESGMLTGEEVARQLGVSATTIHQLGRDGVLKRHRYATNHRYLYEPPGNVRLEKGIGGRYGSRQPRLIDAQPTQQGAS

SEQ ID NO: 12456 - protein, 694 aa, Unknown
  Description of Unknown: Integrase A1024 sequence
  IPR006119,PF00239,cd00338,PF07508, PS51736,G3DSA:3.40.50.1390,SM00857,IPR011109, IPR025827,PF13408,PTHR30461,PS51737, SSF53041,IPR036162
MSTNSALKVTAEHLRRDAFLYVRQSSLRQVFENTESTKRQYALRDRAVSLGWPIERIHVVDNDLGMSGSSTQGRDGFQHLVAEVANGHAGIVLGLEVSRLARNNADWHRLIELASLTQTLICDEDGIYDPGQFNDRLLLGLKGAMSEAELHVLKGRLQGGIKNKARRGELEVPLPIGLVYHPNGSVVLDPDQQVRGALQLLFDTFRQAASATATVKRFRQEGWLFPRRIRRGIGKGDLIWGPLEHCRVIQILHNPRYAGAFVYGRTRGAYRQGRKSFGLKVDRENWQVLIQNAHPGFIDWDEFERNQATLKQNLTGFGRDRRGSMPREGVGLLQGRVVCGLCGARMRVRYQVVGNKLEPYYMCTENPVRRASKPCQSVRGSAIDDTIGSLLLESVAPAALEVALAVEDEISGRVKQAADQRQNQLARARYDAELARRRYMSVDPTNRLVADTLEADWNERLRVLDGLQQENERLQKADHKLLSSDARTKIQSLAEDFPRVWNDQRVVPLERKRMVALLIEDVTLVKSERVAIHVRFRGGRTTSLEIDKPKPIALIRKTLPEVVAKIDELLETGSDRQVAEQLNALGYTNWKGETFTHKKVYLVRTAYRLKSRFERLRERGMVTANELAAQLGVCPTSIHLWARRGLLRQHRYGNLHRCLYEPVGDVVLVKGQGGRYSSTQPTFIAVPPTAQGAV

SEQ ID NO: 12457 - protein, 694 aa, Unknown
  Description of Unknown: Integrase A1025 sequence
  IPR006119,PF00239,cd00338,PF07508,PS51736, G3DSA:3.40.50.1390,SM00857,IPR011109,IPR025827,PF13408, PTHR30461,PS51737,SSF53041,IPR036162
MSTDNAMKISADHLRRDAFLYVRQSSLRQVFENTESTKRQYALRDRAVALGWPIERVHVIDNDLGLSGAQSQDRDGFQRLVTEVAMGHAGIVLGLEVSRLARNNADWHRLLELAAMSRTLIMDEDGVYDAASFNDRILLGLKGTMSEAELHILKSRLQGGILNKARRGELELPLPIGLVYTPDMRVVLDPDRQIQDTVRMLFDTFREVGSACAVVRRLRSEKILFPRRIRRGIGKGDVLWSAIDHSRVIQILHNPRYAGAFAYGRTRTIYNAKLKSVQQKMPRSDWQVLIPQAHEGYISWDEFERNQTSLEQNAVGFSPGLRGRMPRQGNGLLQGRVLCGRCGARMRVHYEQFEGNLRPYYICNEAVVRHAGKVCQWARGPAIDEAVSALLLEAMAPTAIEVALAVQEEISQRVEQAASLRDKQLQRARYEAELARRRYLKVDPDNRLVADALEADWNGKLRDLDTLQREHERQNDTDQSLLDGAMQERIRALAADFPRIWNNERTSPVERKRMLGLLIEDVTLLVDEQINMHIRWRGGRTQSLAVARPRPMAVIRKTPEAVVALINELLETDNDQQIASRLNALGHRNWRGEAFTLKKVMLVRRAYGLKTRFERLRESGMLTGEEVARRFGVSATTVHQLGRDGVLKRHRYATNHRYLYEPPGNVRLAKGVGGRYGSRQPRLMDAQQIQQGAS

SEQ ID NO: 12458 - protein, 694 aa, Unknown
  Description of Unknown: Integrase A1026 sequence
  IPR006119,PF00239,cd00338,PF07508, PS51736,G3DSA:3.40.50.1390,SM00857,PS51737, IPR025827,IPR036162,PTHR30461,PF13408, Coil,SSF53041,IPR011109
MSTDIAIKVDADHLRRDAFLYVRQSSLRQVFENTESTKRQYALRDRAVALGWPIERVHVIDSDLGLSGAQSQDRDGFQHLVSEVAMGHAGIVLGLEVSRLARNNADWHRLLELAALSRTLIMDEDGVYDPAYFNDRMLLGLKGTMSEAELHILKSRLQGGILNKARRGELEMPLPIGLVYTPDARVVLDPDRQIQDTVRLLFDTFRQTGSACAVVRRLRGEKILFPRRIRRGIGKGDVLWNEIDHSRVLQILHNPRYAGAFAYGRTRTAYNAKLKPVQLRVARSDWQVLIPDAHDGYISWAEYERNQAALEQNATGFSPGLRGRMPRQGSGLLQGRLLCGRCGARMRVHYEPFEGRLRPYYVCNEAVVRHAGKHCQWVRGAPVDEAVSALLLEVMAPAAIDVALAVQQEITQRVEQAAALRGTQLQRARYEAELARRRYLKVDPDNRLVADALEADWNARLRDLDALQREHERQNEADHSLLDEPAQQRIRALTADFPRIWNDERTGAVERKRMLGLLIEDVTLLVDDEVNINIRWRGGRTQSLSVARPRPMSVIRKTPAQVVALINELLEATNDRQIAARLNELGHRNWRGEPFTPKKVMLVRRTYGLKSRYERLREGGMLTGEEVAQQLGVCESTVHQLGRKGTLKRHRYASNHRYLYEPPGNVRLEKGAGSRYGGRQPRLIVAQPLQQGAS

SEQ ID NO: 12459 - protein, 694 aa, Unknown
  Description of Unknown: Integrase A1027 sequence
  IPR006119,cd00338,PF07508,PS51736,G3DSA:3.40.50.1390, SM00857,IPR025827,IPR036162,PTHR30461,PF13408, SSF53041,PS51737,PF00239,IPR011109
MSTDNAMKISADHLRRDAFLYVRQSSLRQVFENTESTKRQYALRDRAVALGWPIERVHVIDNDLGLSGAQSQDRDGFQRLVTEVAMGHAGIVLGLEVSRLARNNADWHRLLELAAMSRTLIMDEDGVYDAASFNDRMLLGLKGTMSEAELHILKSRLQGGILNKARRGELELPLPIGLVYTPDMRVVLDPDRQIQDTVRMLFDTFREVGSACAVVRRLRSEKILFPRRIRRGIGKGDVLWSEIDHSRVIQILHNPRYAGAFAYGRTRTIYNAKLKSVQQKMPRSDWQVLIPQAHEGYISWDEFERNQTSLEQNAVGFSPGLRGRMPRQGNGLLQGRVLCGRCGARMRVHYEQFEGNLRPYYICNEAVVRHAGKACQWARGPAIDEAVSALLLEAMAPTAIEVALAVQEEISQRVEQAASLRDKQLQRARYEAELARRRYLKVDPDNRLVADALEADWNGKLRDLDTLQREHERQNETDQSLLDGAMQERIRALAADFPRIWNNERTSPVERKRMLGLLIEDVTLLVDEQINMHIRWRGGRTQSLAVARPRPMAVIRKTPEAVVALINELLETDNDQQIASRLNALGHRNWRGEAFTLKKVMLVRRAYGLKTRFERLRESGMLTGEEVARRFGVSATTVHQLGRDGVLKRHRYATNHRYLYEPPGNVRLAKGVGGRYGSRQPRLIDAQQIQQGAS

SEQ ID NO: 12460 - protein, 694 aa, Unknown
  Description of Unknown: Integrase A1028 sequence
  IPR006119,PF00239,cd00338,PF07508, PS51736,G3DSA:3.40.50.1390,SM00857,IPR025827, IPR036162,PF13408,PTHR30461,PS51737, SSF53041,IPR011109
MSTDNAMKISADHLRRDAFLYVRQSSLRQVFENTESTKRQYALRDRAVALGWPIERVHVIDNDLGLSGAQSQERDGFQRLVTEVAMGHAGIVLGLEVSRLARNNADWHRLLELAAMSRTLIMDEDGVYDAASFNDRMLLGLKGTMSEAELHILKSRLQGGILNKARRGELELPLPIGLVYTPDMRVVLDPDRQIQDTVRMLFDTFREVGSACAVVRRLRNEKILFPRRIRRGIGKGDVLWSEIDHSRVIQILHNPRYAGAFAYGRTRTIYNAKLKSVQQKMPRSDWQVLIPQAHEGYISWDEFERNQTSLEQNAVGFSPGLRGRMPRQGNGLLQGRVLCGRCGARMRVHYEQFEGNLRPYYICNEAVVRHAGKACQWARGPAIDEAVSALLLEAMAPTAIEVALAVQEEISQRVEQAASLRDKQLQRARYEAELARRRYLKVDPDNRLVADALEADWNGKLRDLDTLQREHERQNETDQSLLDGAMQERIRALAADFPRIWNNKRTSPVERKRMLGLLIEDVTLLVDEQINMHIRWRGGRTQSLAVARPRPMAVIRKTPEAVVALINELLETDNDQQIASRLNALGHRNWRGEAFTLKKVMLVRRAYGLKTRFERLRESGMLTGEEVARRFGVSATTVHQLGRDGVLKRHRYATNHRYLYEPPGNVRLAKGVGGRYGSRQPRLMDAQQIQQGAS

SEQ ID NO: 12461 - protein, 694 aa, Unknown
  Description of Unknown: Integrase A1029 sequence
  IPR006119,cd00338,PF07508,PS51736,G3DSA:3.40.50.1390, SM00857,IPR025827,IPR036162,PTHR30461,PF13408, SSF53041,PS51737,PF00239,IPR011109
MSTDNAMKISADHLRRDAFLYVRQSSLRQVFENTESTKRQYALRDRAVALGWPIERVHVIDNDLGLSGAQSQDRDGFQRLVTEVAMGHAGIVLGLEVSRLARNNADWHRLLELAAMSRTLIMDEDGVYDAASFNDRMLLGLKGTMSEAELHILKSRLQGGILNKARRGELELPLPIGLVYTPDMRVVLDPDRQIQDTVRMLFDTFREVGSACAVVRRLRSEKILFPRRIRRGIGKGDVLWSEIDHSRVIQILHNPRYAGAFAYGRTRTIYNAKLKSVQQKMPRSDWQVLIPQAHEGYISWDEFERNQTSLEQNAVGFSPGLRGRMPRQGNGLLQGRVLCGRCGARMRVHYEQFEGNLRPYYICNEAVVRHAGKACQWARGPAIDEAVSALLLEAMAPTAIEVALAVQEEISQRVEQAASLRDKQLQRARYEAELARRRYLKVDPDNRLVADALEADWNGKLRDLDTLQREHERQNETDQSLLDGAMQERIRALAADFPGIWNNERTSPVERKRMLGLLIEDVTLLVDEQINMHIRWRGGRTQSLAVARPRPMAVIRKTPEAVVALINELLETDNDQQIASRLNALGHRNWRGEAFTLKKVMLVRRAYGLKTRFERLRESGMLTGEEVARRFGVSATTVHQLGRDGVLKRHRYATNHRYLYEPPGNVRLAKGVGGRYGSRKPRLIDAQPIQQGAS

SEQ ID NO: 12462 - protein, 694 aa, Unknown
  Description of Unknown: Integrase A1030 sequence
  IPR006119,PF00239,cd00338,PF07508, PS51736,G3DSA:3.40.50.1390,SM00857,IPR025827, IPR036162,PTHR30461,PF13408,PS51737, SSF53041,IPR011109
MSTDNAMKISADHLRRDAFLYVRQSSLRQVFENTESTKRQYALRDRAVALGWPIERVHVIDNDLGLSGAQSQDRDGFQRLVSEVAMGHAGIVLGLEVSRLARNNADWHRLLELAAMSRTLIMDEDGIYDAASFNDRMLLGLKGTMSEAELHILKSRLQGGILNKARRGELELPLPIGFVYTPDTRVVLDPDRQIQDTVRMLFDTFREAGSACAVVRRLRSEKILFPRRIRRGIGKGDVLWSEIDHSRLLQILHNPRYAGAFAYGRTRTVYNAKLKSVQQKMPRSDWQVLIPQAHEGYISWDEFERNQTSLEQNAVGFSPGLRGRMPRQGNGLLQGRVLCGRCGARMRVHYEQFEGNLRPYYICNEAVVRHAGKACQWARGPAIDEAVSALLLEAMAPTAIEVALAVQEEISQRVEQAASLRDKQLQRARYEAELARRRYLKVDPDNRLVADALEADWNGKLRDLDALQREHERQNETDQSLLDGAMQERIRALAADFPGIWNNERTSVVERKRMLGLLIEDVTLLVDEQINMHIRWRGGRTQSLAVTRPRPMAVIRKTPETVVALINELLETDNDQQIASRLNTLGHRNWRGEPFTLKKVMLVRRAYGLKTRFERLRESGMLTGEEVAHRLGVSATTVHQLGRDGVLKRHRYATNHRYLYEPPGNVRLAKGVGGRYGSRKPRLIDAQPIQQGAS

SEQ ID NO: 12463 - protein, 693 aa, Unknown
  Description of Unknown: Integrase A1031 sequence
  IPR006119,PF00239,cd00338,PF07508,PS51736, G3DSA:3.40.50.1390,SM00857,IPR025827,IPR036162,PTHR30461, PF13408,PS51737,SSF53041,IPR011109
MSTERYQKVTHDHLRRDAFLYVRQSSLRQVFENTESTKRQYALRERAVSLGWPIERIHVIDTDLGLSGASAEHRDGFQQLVSEVAIGHAGIVLGLEVSRLARNNADWHRLIELAALTHTLILDEDGVYDPAYFNDRLLLGLKGTMSEAELHVLNARLQGGMRNKARRGELELPLPVGLVYHPNGSVVLDPDQQIHASLRLLFDTYRQTHSASMVVRRFRREGWSFPRRIRRGIGKGEVHWGALNTSRVLQILHNPRYAGAFVYGRTRIGRKADLTSTQLKVAQSDWQVLIRDAHIGYIDWDEFERNQVTLRQSANGFGSLVRGTVPREGDGLLQGRVICGICGNRMRVRYQKVSDRMEPYYVCHDVAAHDAGKPCQSIRGRAIDDAISALLLETVGPATIEVALAVEDEIAGRIEQADSMRLKQLERARYEAELARRRYMNVDPANRMVADALEADWNDRLRRLDVLQQEHDRQRRSDQDLLGDEARARIRALADDFAAVWNDRRVESIERKRMLGLLIEDVTLVKSEKVSIHVRFRGGRTTSLAVDNPRPMALVRKTLPAVVTVIDELLETCTDQQVATRLNELGYTNWQQQAFTARKVALVRTTYGLPSRFERLRSRGLLTGAELAAQFKVSQTTIHQWGRQGLLRRQVYGHDHRCLYEPPGNVLLVRGAGGRKATQATFIAAPTTGQGAM

SEQ ID NO: 12464 - protein, 692 aa, Unknown
  Description of Unknown: Integrase A1032 sequence
  IPR006119,cd00338,PF07508,PS51736, G3DSA:3.40.50.1390,SM00857,IPR025827,SSF53041, IPR036162,PF13408,PTHR30461,mobidb-lite, PS51737,PF00239,IPR011109
MMGEQHAKIQARHLKRNAYLYVRQSTLRQVLENSESTKRQYDLRERALALGWRLDQVVVIDSDLGQSGASAVDREGFQRLVSEVGLGRAGIVMGLEVSRLARNSTDWHRLLEICALADTLILDEDGVYDPAHFNDRLLLGLKGTMSEAELHVLQARLRGGILNKARRGELEIRLPIGFDYDPAGRVRLDPDVRVQESLRQFFRTFRRTGSATATVKAFRAEGLSFPHRIYRGPQTGELLWTDLEHSRALWLLHHPRYTGAFCFGRTRVRKQPDGSHRHQRLPSEEWIALIRDAHAGYITWDEYEENLRILRDNAQAPATGRDRGTPREGPALLQGLALCAKCGDRMTVRYHVNGTRRVPDYVCQREGVEHAQPICQQIVGGELDAAIGRLLVEVVTPITLGVALAVQKELESRSEDSDRLRRQAVERARYESDLARRRYMRCDPDNRLVADSLEVEWNQALRNQTAAQEHYDKQRESETGLDDQQRAAILALAKDFPRLWNDPHTADRERKRMARLLIADVTLLKEADIRAQVRFSGGATHTLHLPLPKPAWMLRQTPGTVVAEIDRLLEDHTDSEIADWLNDQGLISGDGKPFHRPMVRRIRIDYALPSRHDRLRARGLLTLHEMAQRLNICPDSLKRWRRAGLLKAHKYDDRGGYLFEPPGPDTPVKHQHQGKTTGKSTTREGSFPAHTA

SEQ ID NO: 12465 - protein, 692 aa, Unknown
  Description of Unknown: Integrase A1033 sequence
  IPR006119,PF00239,cd00338,PF07508,PS51736, G3DSA:3.40.50.1390,IPR038109,SM00857,IPR011109,Coil, PTHR30461,G3DSA:1.10.10.2600,PS51737,SSF53041,IPR036162
MTNADRLPAPLLQRKAVVYVRQSTQAQVQMNLESQRRQYELVGEAKRRGFRDIEVIDDDLGRSASGTVARPGFERLVALLCAGEVGAVLCLDASRLARNGRDWHHLLELCGLVEARVIDLDGVYDPCRPNDRLLLGMKGSISEFELNVLRTRMLDAARSKAQRGELRISVPIGYLWHRDVGLGLDPNQRLQEVIRMIFTRFRELGSARQAFLSLQAEQIHFPRPTDGRTLTHFDWTLIRYRNVISVLRNPFYAGAYAYGKSGKQTTIVDGRAHKTYKHRKPFEEWEVLLKEHHEGYIDWAEFERNQKLLAANAYGKAGDVKSGRGGRALLAGLLGCARCGRRLSVAYTGRTPRPVYRCYRFDLPPKCMSFGGSRIDAAIARELMRVVEPVAIEAALQAEQMLMDTLSEQRRIIELELQQAQYEATLAERRYAACDPDNRLIAAQLEKNWEAALRRVQACQARLETTRTSAAPIAAPDFTKLAEDLDAAWNAPGVTMRMRQQLVRVLIVDIVADVNESTREVILTIHWQGGQHSQVRIRKPKTGEHGCSTSDEALAVMRSMATRWSDQDIAASLNRMGIRTGQGKTWTAHRVSSVRRVRNIYAYKSAEKDGDWLTMSEAAKALGVTHYMIRRLINDKVLPAEQVMPDAPWQIRASDLRSEAVTAALTRKHRPCRNDVEGQLPMFTEVSEGGAQ

SEQ ID NO: 12466 - protein, 692 aa, Unknown
  Description of Unknown: Integrase A1034 sequence
  IPR006119,SSF46955,cd00338,PF07508,PS51736,G3DSA:3.40.50.1390, SM00857,IPR011109,IPR025827,IPR009061,PS51737,PF13408,PTHR30461 ,SSF53041,Coil,cd16862,PF00239,IPR036162
MNSKVRTTHLERHAVVYLRQSTPTQVEFHRESTERQYALADRALTLGWDKSQIEVLDSDLGKSGQTTTGREDFHRLMAAVGLGEVGAVLALEASRFSRSQADWHKLLDICALTDTLVIDHDGIYDPNDFNDRVILGFKGTWSHTELHGMRLRLQGAKLNKAKKGELRCSPPTGYVYDPEGKLVLDPDEGVVAAIQLAFQQFRELRTAFKVMRYFCVNQIPFPRRRWRPGDIGTLHWGPANLSRITALLHNPTYTGTYVYGRRRSFNVIEGGQIKKVKIQQLPQEEWKVIIHNAHEAYISWSEYLSNCERLRQNSPVSLSDGCPSTPREGFALLQGLVICGKCGRRMSPRYHGTGGCRAAYECSQARKQDGSMGVCWTVAGAAIDTAVAEQVLEAFTSEQLDISLAVLSELENQAFEIDKTWQLRLERARYEADRAFRQYDATEPENRLVARTLERRWNEKLQQLAELEEAYQKARLVQRLELTAAQRQQILQLANDIPTLWHASTTTNLERKEILGLLVKQVAITPIDAPERSTRVQILWHTGATSCFVATRPTNAEKFRTPKQVIQLIEELAVGRTDSEIAHELNRRGLVGGKGRAFTKKGVAWIRWKFGIEKPLSNPQVAHLGVSPEGYYSTSALAEKLGVGIHTIYYWRDKGIIQAFQETDRSPWWYKVTPEILDTLREKIRRVPVKSE

SEQ ID NO: 12467 - protein, 692 aa, Unknown
  Description of Unknown: Integrase A1035 sequence
  IPR006119,SSF46955,PF00239,cd00338,PF07508, PS51736,G3DSA:3.40.50.1390,SM00857,PS51737,IPR025827, IPR009061,IPR036162,PF13408,PTHR30461,Coil, SSF53041,IPR011109
MNNKISSTHLERRAVVYLRQSTPTQVEFNRESTERQYALADRALTLGWDKSQISVLDSDLGKSGQTTTGREDFHRLMAAVGLGEVGAVLALEASRFSRSQADWHKLLDICALTDTLVIDHDGIYDPNDFNDRVILGFKGTWSHTELHGMRLRLQGAKLNKAKKGELRCSPPTGYVYDPEGKLVLDPDEGVVAAIQLAFQKFRELRTAFKVMRYFCVNQIPFPRRRWRPGDIGTLHWGPANLSRITALLHNPTYTGTYVYGRRRSFNVIEGGQIKKVKIQQLPQEEWKVIIHNAHEAYISWSEYLSNCERLRQNSPISLSDGCPGTPREGFALLQGLVICGKCGRRMSPRYHGTGGCRAAYECSQARKLDGSMGVCWSVAGAAIDTAVSAHVLSAFTDEQLDISLAVLSELENIADEADKTWQLRLERARYEAERAGRQYDATEPENRLVARTLEKRWNEKLQQLAELEEAYQKARLVQRLELTAVQRQQILQLANDIPTLWHASTTTNLERKEILGLLVKQVAITPIDAPERSTRVQILWHTGVTSELIATRPTNAEKFRTPNQVIQLIEELAVGRTDSEIAHELNRRGLVGGTGRAFTKKGVAWIRWKFGIEKPLSNPQVAHDGVSPEGYYSTSALAEKLGVGIHTVYYWRDKGIIQAFQETPRSPWWYIVTPEVLETLREKIRRVPVKSE

SEQ ID NO: 12468 - protein, 691 aa, Unknown
  Description of Unknown: Integrase A1036 sequence
  IPR006119,PF00239,cd00338,PF07508,PS51736, G3DSA:3.40.50.1390,SM00857,IPR011109,PS51737,IPR041657, PTHR30461,Coil,SSF53041,PF12728,IPR036162
MSKITPVHLARAAFVYIRQSTAYQVVNNLESQRRQYGLVERARQLGWEDVQLVDDDLGRSGGGTVRPGFEKLLSAICEERVGAVVSLEASRLARNGRDWHTLLEFCGLVGTLIVDEEAIYDPRSPNDRLLLGMKGTMSEMELSIFRQRSVEAMRQKARRGELHLTVAVGYVKTDDSRIEKDPDRRVQDGILLVFSKFAELQSIRQVLLWFRQENVLVPAIVQGRGKRPVEWKAPVYHTLHHMLTNPVYAGSYAYGRRGTRVTIKDGRKRIMRDTLRRNWKDWEVLIHDHHEGYIAWTEFERNQHVIADNANGKSYMGRGSIRRGEALLPGLFRCARCGRRLHIQYTGKGGNTQRYACRGAFGTRAADNCIGFGGMRVDRAVAQEVLDRLQPLGIEAALAAMEAQSVHHCDKRKHIENAIQQAQYEAARARRQYDAVDPDNRLVASELERRWNEKLVQLRDLEVQLETLEQTQHTPALSAADRARLMTLGKDLTKAWNSPGASIETRKKIIRLLVKEIIVDVVGDTLALIIHWQGGDHTQLTVKKNKIGQTRWTVEADVLDLIRVLARQLSDTAIAAILNRAGKLTAHGASWTRSHVCSLRNINGIPVYREGERAERAEVTLDEAADILKVSRTTAYRMVSSGTLPARQLCGGAPWIIQLADLQRDAVCREADARRSRRPISRDPQQNLFAL

SEQ ID NO: 12469 - protein, 691 aa, Unknown
  Description of Unknown: Integrase A1037 sequence
  IPR006119,cd00338,PF07508,PS51736,G3DSA:3.40.50.1390,SM00857 ,IPR025827,IPR041657,Coil,SSF53041,IPR036162,PTHR30461,PF13408 ,mobidb-lite,PS51737,PF00239,PF12728,IPR011109
MSKITADHLSLSAFVYVRQSTAYQVANNLESQRRQYGLVERARQLGWETVEIVDDDLGRSGGGIARPGFEKLLAAICEGRVGAVVSLEASRLARNGRDWHTLLEFCGLVGTLIVDEEAIYDPRSPNDRLLLGMKGTMSEMELSVFRQRSVEAMRQKARRGELHLTVAVGYVKTDDARVEKDPDRRVQESILLVFRKFAELQTVRQVLLWFRQENVLVPSVNQGRGKPPIEWKAPVYHTLHHILTNPVYAGSYAYGRRGTRVMIKDGRKRVIRDTLRRNSKDWEVLIHDHHEGYISWAEFERNQHLIAENANGKSYIGRGSIRRGEALLPGLFRCGRCGRRLHIQYSGKGGNTQRYVCRGTFGDMAAANCIGFGGMRVDRAVAQEVLERLQPLGIEAALQAMEAHTQRHSDKRQQLENSIKQAQYEAARARRQYDAVDPDNRLVAGELERRWNEKLIQLRDLEIELETLSTDRDMPALSADDRARLMKLGRDLGQAWDSPSVSIETRKKIIRLLITEIVVDIVDDTLAIIIHWQGGDHTRMTVKKNKIGQTRWAVKADVVDLVRALARQLPDLSIAAILNRSGKRTGHGASWTRSHVCSLRNIHGIPVYREGERAERGERTLDETADILKVSRATAYRMVSSGVLPARQLCAGAPWIIQLSDLQDDTVRREADARRSRRPISQDPVQNPLLF

SEQ ID NO: 12470 - protein, 691 aa, Unknown
  Description of Unknown: Integrase A1038 sequence
  IPR006119,PF00239,cd00338,PF07508,PS51736, G3DSA:3.40.50.1390,SM00857,IPR025827,IPR041657,Coil, IPR036162,PF13408,PTHR30461,PS51737,SSF53041, PF12728,IPR011109
MSKITIDHLALSAFIYVRQSTAYQVANNLESQRRQYSLVERARQLGWETVEIVDDDLGRSGSGTARPGFEKLLAAICEGRVGAVVSLEASRLARNGRDWHTLLEFCGLVGTLIVDEEAIYDPRSPNDRLLLGMKGTMSEMELSVFRQRSVEAMRQKARRGDLHLTVAVGYVKTDDVRVEKDPDRRVQESILLVFRKFAELQTVRQVLLWFRQENVLVPSVLQGRGKRPIEWKAPVYHTLHHILTNPVYAGSYVYGRRATRVMIKDGRKRVTRDTLRRNPKDWDVLIHGHHEGYISWAEFERNQHLIAENTNGKSYMGRGSIRRGEALLPGLFRCGRCGRRLHIQYSGKGGNTQRYVCRGTFGDMAAGNCIGFGGMRVDRAVAQEVLERLQPLGIEAALQAMEAHTQRHSDQHQQLENSIKQAQYEAARARRQYDAVDPDNRLVAGELERRWNEKLIQLRDLELQLQTLTGDRDTPVLSADDRTRLMTLGRDLGKAWDSPNASIETRKKIIRLLIKEIIVDIVDDTLALIIHWQGGDHTRMTVKKNKIGQTRWAVKADLVDLVRALARQLPDLSIAAILNRSGKRTGHGASWTRSHVCNLRNIHGIPVYREGERAERGERTLDETADILKVSRATAYRMVSSGVLPARQLCTGAPWIIQLSDIQDDAVRREADARRSRRPISQDPVQNPLLF

SEQ ID NO: 12471 - protein, 691 aa, Unknown
  Description of Unknown: Integrase A1039 sequence
  IPR006119,PF00239,cd00338,PF07508,PS51736,G3DSA:3.40.50.1390 ,G3DSA:1.10.1660.10,SM00857,IPR011109,IPR025827, PS51737,PTHR30461,PF13408,Coil,SSF53041, IPR036162
MNAFSPLPPALLKRKAVVYVRQSSQSQVMQNLESQRRQYDLVDAARQHGFRRVEVIDDDLGLSASGAVARPGFERLVAWLCAGDVGAVLCFDASRLARNGRDWHHLLELCGLVDARVIDQDGVYNPCSPNDRLLLGMKGTISEFELGIIRARMLDAARAKARRGELRISVPIGYIWYRDAGLGFDPDLRVQEAVRLIFSRFRELRSGRQVLLSLTEDKLCFPRPTDGRNTTTFDWTPIRYRNVISVLKNPFYAGVYAYGKSEKRTEIIDGRARKTYGHGKPKEEWEVFLKDHHDGYIEWDEYERNQALLAANAYGQKGGAKSGRGGRALLSGLLSCGRCGRRLCVAYTGKTPRPVYRCERPNLMLGLNRCLGFGGPRIDKAVAAELLRVVQPMAIEAAMQAEHMQSEARAERRRAAELDLQKAQYEAALAERRYAACDPDNRLIAATLEKNWEVALKRLEACKTRLDAEQLPDTPAKLPDLDGLAEDLQAAWNAPGVSTRARQRLARALIKDIIADVDEEARDVVLTIHWQGGQHSQLRVRKPKTGEHGCNTSEDALEVMRSMAGRWSDSDIAATLNRMGIRTGFGHTWTAHRVSSIRRVNDIHAYFSAEKSGKWLTMTEAATKLGVTNHVIRNLIKAKILPAEQVVPRAPYQIKAVDIEREDIIEAINNRRRKRPYRDPRQIALPINSIT

SEQ ID NO: 12472 - protein, 690 aa, Unknown
  Description of Unknown: Integrase A1040 sequence
  IPR006119,cd00338,PF07508,PS51736,G3DSA:3.40.50.1390, SM00857,PS51737,IPR025827,IPR036162,PF13408, PTHR30461,SSF53041,Coil,PF00239,IPR011109
MNTKITPQHQSKPAYIYIRQSTLAQVRHHQESTERQYALKDKALALGWTETAIRTLDRDLGQSGAQMTGREDFKTLVADVSMGQVGAVFALEVSRLARSNLDWHRLLELCALTHTLVIDADGCYDPGDFNDGLLLGLKGTMAQAELHFLHGRLQGGKLNKAQKGELRFPLPVGLCYDDQGRIVLDPDDEVRGAVQLAFRLFQETGSAYAVVKRFAEEGLRFPKRAYGGAWAGRLIWGRLSHERVLGLIRNPSYAGIYVFGRYQYRQRITPRGEVHKRVQPVPKAEWRVHLPDHHDGYITPEEFERNQDRLALNRTNGEGTVLSGAAREGLALLQGLLICGCCGRALTVRYQGNGGLYPLYLCSARRREGLATTDCMSMRSELLDNAIGEAVFTALQPAELELAVTALSELEQRDHAIMRQWHMRIERAEYEVALAERRYQECDPANRLVAGTLERRWNDAMLRLEAIRTEAAQFQSQKALVATSEQKAQVLALARNLPRLWRAPTTSAKDRKRMLRLLIRDITVERRSATRQAVLHIRWQGSACTDITVDLPKPAADAMRYPAAFVERVRELSQHLPDRQIVAHLNQEGIRSSTGKSFTLEMVKWIRYRYRIEVTCFKRPDELTVQQLAHRLHVSPHVVYYWIERQVVQARKLDGRGPWWVTLDAAKERQLKDWVRTSGHLQRQHSNTQL

SEQ ID NO: 12473 - protein, 690 aa, Unknown
  Description of Unknown: Integrase A1041 sequence
  IPR006119,PF00239,cd00338,PF07508, PS51736,G3DSA:3.40.50.1390,SM00857,IPR011109, IPR025827,PF13408,PTHR30461,mobidb-lite, Coil,SSF53041,IPR036162
MMHEKIGPHHLERKALLYVRQSSAHQVLHNRESSALQYAMRDRLTVLGWSSIETIDDDLGRSAAGGVTRAGFDRMVAEVCLGKVGAVAAREVSRFARNSRDWQQLIEMCRVVDTVLIDQETVYAPRQSNDRLLLGLKGSLNEYELDLLRQRSLSARYEKARRGELLVAAPVGFMKAGDRLEKDPDRRVQEAITLVFDKVAELGSARQALLWFLEHSLDLPARRANGDVVWRRPTYATIHRMIENPVYGGAYAYGKTRVTPRHDAIVPRSSSRRKRRGDWLALKPGAHEGYVSWERAEAIRTMVSDNIPASRHHGAPKHGDALLAGLLRCRRCGRKLTVRYTGTNHNIPRYSCWRGLLDNGEPRCIAFGGLRVDDAIEEALLRVVEPGAIAAAAAAEAQAAGRRDQVREALVRDLEAARYQADRAFRQYDAADPANRLVAAELETRWNRALAQAAEVEARIAEHDAAAPNSSSLAVLDAARLGTNLRAVWAAPTTDSRLKKRIVRTVIHEVVADIDDTASEIVLLVHWIGGAHTELRLPTRRRGQRNSTASEIIAAVRHLALIASDDLIAGILNRNRLLTGHGNRWTRERVTALRSHHKIQVFRPAPDGIEPQLNLTDAARLLGVAPKTLRLAAEAGVIEGDHPLPDGPWIFRRSELAKPAAAQITHRARQNPKHPAGSHPDQKNLSLSTT

SEQ ID NO: 12474 - protein, 690 aa, Unknown
  Description of Unknown: Integrase A1042 sequence
  IPR006119,PF00239,cd00338,PF07508,PS51736,G3DSA:3.40.50.1390 ,SM00857,G3DSA:1.10.1660.10,IPR038109,IPR011109, IPR025827,PS51737,PTHR30461,PF13408,G3DSA:1.10.10.2600, Coil,SSF53041,IPR036162
MTGTDLIPAQLLKRKAVVYVRQSTQSQVMTNLESQRRQYDLVDSARQHGFTDIEVIDDDLGRSASGTVARPGFDRLVASLCAGKVGAVLCLDASRLARNGRDWHHLLELCGLVEARVIDHDGVYNPCQPNDRLLLGMKGSISEFELGVLRTRMLDAARSKARRGELRLSVPFGYIWHREAGLGLDPDLRLQEVIRLIFARFRELGSARQVLLSMKADGIHFPRPSDEGRMTSFTWLPIRYRNVIAVLKNPFYAGVYVYGKSEKRTTIVDGRARRSYGHGKPVGTWEVFIKEHHEGYVSWEEYERNQKQLALNNYGRAGGVKSGRGGKALLSGIMTCGRCGRRLSVAYTGNPQSRPVYRCDKPNLMMGLPRCMTFGGLRVDAAVARELLRAVEPLAIEAAFEAERMNRERQEEQRQILDLELQQARYEASLAERRYAACDPDNRLIAAQLEKNWEIALRRVRDLKARQPAEGPSTIEADPNAFANLAENLSAAWNAPDVTMRARQQMLRTMIADIVVDVDDAVRDVVLTIHWRGGQHSELRVRKPKAGEHGCATAEDALEVMRSMAGRWSDEHIAATLNRMGLPTGQGKTWTAHRVYSVRRVRGIDAYRSAVKDGEWLTMTEAAKALGTSSHTIRLLIKTGVLPAVQVVPRAPHQIRSADLMSEAVKSAMARKGRPCRVVDADMLPMFTDT

SEQ ID NO: 12475 - protein, 690 aa, Unknown
  Description of Unknown: Integrase A1043 sequence
  IPR006119,PF00239,cd00338,PF07508,PS51736, G3DSA:3.40.50.1390,SM00857,IPR025827,Coil,IPR036162, PF13408,PTHR30461,PS51737,SSF53041,IPR011109
MNTKITPQHQSKPAYIYIRQSTLAQVRHHQESTERQYALRDQALALGWPQTSIRILDRDLGQSGAQMTGREDFKTLVADVSMGHVGAVFALEVSRLARSNLDWHRLLELCALTGTLVVDADGCYDPGDFNDGLLLGLKGTMAQAELHFLRGRLQGGKLNKAQKGELRFPLPVGLCYDDEGHIVLDPDDEVRGAVQLAFRLFHETGSAYAVVKRFAEGGLRFPKRAYGGAWAGRLIWGRLRHERVIGLIKNPSYAGIYVFGRYQYRQRITPQGEVHKRVQPVPKADWRVHLPEHHEGYITPEEFERNQARLAGNRTNGEGTVLSGPAREGLALLQGLLLCGCCGRALTVRYQGNGGIYPLYLCNAQRRQGLATRDCMNVRSDLLDNAIGAEVLKALRPTELELALTALNELEQRDQAIMRQWHMRIERAEYEVALAERRYQECDPANRLVAGTLERRWNDAMLRLEAIKAEAAQVQSQKARVATPEQKTQVLALARNLPRLWRAQTTPAKDRKRMLRLLIRDITVEKLTATRQAILHIRWQGGACTDITVNLPKPVAEAMRYPAALVEKVRQLSQHLSDPQIVARLNQEGLRSASGRPFTLSMVKWIRYRYQIASVSLKRGDELTVQQLARRLAVSAHVVYYWIKRKVVQARQLDGRGPWWITLDPAKERQLRDWVRTSGHLQPQHSNIQL

SEQ ID NO: 12476 - protein, 690 aa, Unknown
  Description of Unknown: Integrase A1044 sequence
  IPR006119,cd00338,PF07508,PS51736, G3DSA:3.40.50.1390,SM00857,IPR011109,IPR025827, SSF53041,PTHR30461,PF13408,mobidb-lite, PF00239,IPR036162
MICEKIGPQHLDRKAILYVRQSSAHQVLHNRESSALQYAMRDRLTALGWSQIETVDDDLGRSAAGGVTRAGFDRMVAEVCLGKVGAVAAREVSRFARNSRDWQQLIEMCRVVDTVLIDQETVYAPRQGNDRLLLGLKGSLNEYELDLLRQRSLSARYEKARRGELIVAAPVGFVKAGDRIEKDPDRRIQEAITLVFDKVGELGSARQALLWFIEHGLDLPAKRNNGDVVWRRPSYATIHRMIENPIYGGAYAYGKSRAATGYDGTTMRSRSRRKARDEWLALIPGSHEGYVSWERSEDIRKMVSDNVPTSRHHGAAKHGDALLAGLIRCRRCGRKLTVRYTGAGHDIPRYSCWRGLLDNGEPRCIAFGGLRVDDAIEQLLLQVLEPGAIAASVEAEAQAAGRRDQVRDVLMRDLEAARYAADRAFRQYDAADPQNRLVASELEARWNRALTRVGDVEARIVAHDASATHPPLPPLKDIDDLAGELEAVWNAPHSDTRVKKRIVRTLIQEVIADIDDDVSEIVLLIHWVGGIHTDLRLPKRRKGQRNSTSADIIAAVRELVLIANDDLIAGILNRNGLVTGHGNRWTRERVTALRSHHRIPVFRTVTDGPAPWLNLSQAARHVGVAPKTLRIAAEACEIEGIHPLPEGPWIFSRTELDGSAAHHLAKRARQNPKYPTGSHPSQRSLFSSTT

SEQ ID NO: 12477 - protein, 690 aa, Unknown
  Description of Unknown: Integrase A1045 sequence
  IPR006119,PF00239,TIGR01764,PF07508,cd00338, PS51736,G3DSA:3.40.50.1390,IPR010093,SM00857,IPR011109, G3DSA:1.10.1660.10,IPR025827,PS51737,PF13408,PTHR30461, Coil,SSF53041,IPR036162
MTKSDLIPTVLLRRKAVVYVRQSTQSQVMTNLESQRRQYDLVDLARQHGFADIEVIDDDLGRSASGTVARPGFDRLVAWLCAGKVGAVLCLDASRLARNGRDWHHLLELCGLVEARVIDHDGVYNPCQPNDRLVLGMKGSISEFELGVLRTRMLEAAKSKARRGELRLSVPFGYIWHREAGLGLDPDLRLQEVIRLIFARFRELGSARQVLLSMTADQIHFPRPSDEGRMTSFTWLPIRYRNVIGVLKNPFYAGVYVYGKSEKRTSIVDGRARRSYGHGKPVGTWEVFIKDHHEGYVSWEEYERNQKQLALNNYGRADGVKSGRGGKALLSGVMTCGRCGRRLSVAYTGNPQSRPVYRCDKPNLMMGLPRCMTFGGPRVDAAVARELLRAVEPLAIEAAFEAERMHRERQDDQRQILDLELKQARYEAGLAERRYAACDPDNRLIAAQLERNWEIALRRVQDLEARQPAGTPSTIEVDQGAFANMAENLSAAWNTPDVTMRARQQLLRTLIADIIVDVDDTVRDVVLTIHWRGGQHSELRVRKPRTGEHGCATAEDALAVMRSMAGRWSDEHIAASLNRMGLPTGQGKTWTAHRVSSVRRVRGIHAYRSAEKDGEWLTMTEAAMALGVTNHAIRRLIKTGVLPAVQVVPGAPYQIRADDLASEPIKTAMARKGRPCRAADAGTLPMFTDT

SEQ ID NO: 12478 - protein, 690 aa, Unknown
  Description of Unknown: Integrase A1046 sequence
  IPR006119,PF00239,TIGR01764,cd00338,PF07508, G3DSA:1.10.1660.10,PS51736,IPR010093,SM00857,G3DSA:3.40.50.1390, IPR011109,IPR025827,PS51737,PF13408,PTHR30461, Coil,SSF53041,IPR036162
MTKSDLIPTVLLRRKAVVYVRQSTQSQVMTNLESQRRQYDLVDLARQHGFADIEVIDDDLGRSASGTVARPGFDRLVAWLCAGKVGAVLCLDASRLARNGRDWHHLLELCGLVEARVIDHDGVYNPCQPNDRLVLGMKGSISEFELGVLRTRMLEAAKSKARRGELRLSVPFGYIWHREAGLGLDPDLRLQEVIRLIFARFRELGSARQVLLSMTADQIHFPRPSDEGRMTSFTWLPIRYRNVIGVLKNPFYAGVYVYGKSEKRTSIVDGRARRSYGHGKPVGTWEVFIKDHHEGYVSWEEYERNQKQLALNNYGRADGVKSGRGGKALLSGVMTCGRCGRRLSVAYTGNPQSRPVYRCDKPNLMMGLPRCMTFGGPRVDAAVARELLRAVEPLAIEAAFEAERMHRERQDDQRQILDLELKQARYEAGLAERRYAACDPDNRLIAAQLERNWEIALRRVQDLEARQPAGTPSTIEVDQGAFANMAENLSAAWNTPDVTMRARQQLLRTLIADIIVDVDDTVRDVVLTIHWRGGQHSELRVRKPRTGEHGCATAEDALAVMRSMAGRWSDEHIAASLNRMGLPTGQGKTWTAHRVSSVRRVRGIHAYRSAEKDGEWLTMTEAAMALGVTNHAIRRLIKTGVLPAVQVVPGAPYQIRADDLASEPIKAAMARKGRPCRAADAGTLPMFTDT

SEQ ID NO: 12479 - protein, 690 aa, Unknown
  Description of Unknown: Integrase A1047 sequence
  IPR006119,PF00239,cd00338,PF07508,PS51736, G3DSA:3.40.50.1390,SM00857,IPR011109,IPR025827,PTHR30461, PF13408,mobidb-lite,SSF53041,IPR036162
MISEKIGPQHLERKAILYVRQSSVHQVLHNRESSTLQYAMRGRLTAMGWSHIETIDDDLGRSAAGGVTRAGFDRMVAEVCLGKVGAVAAREVSRFARNSRDWQQLIEMCRVVDTVLIDQETVYAPRQGNDRLLLGLKGSLNEYELDLLRQRSLSARYEKARRGELVVAAPVGFVKAGDRIEKDPDRRVQEAIALVFDKVAELGSARQALLWFIEHGLDLPAKRNNGDVVWRRPSYATIHRMIENPIYGGAYAYGKSRAATGYDGTAMRSRSRRKARDEWLALIPGSHEGYVSWERSEDIRKMVSDNVPTSQHHGAPKHGDALLAGLIRCRRCGRKLTVRYTGAKHDIPRYSCWRGLLDNGEPRCIAFGGLRVDDAIERALLQVLEPGAIAASVEAEAQAADRRDQVRDVLMRDLEAARYAADRAFRQYDAADPQNRLVAAELETRWNRALTRAGEVEARIVAHDASTAHPALPSLKDIDGLASDLEAVWNAPQSDARLKKRIVRTLIQEVVADIDHDASEIVLLIHWVGGVHTDLRLPRRRKGQRNSTSADIIAAVRELVLIANDDLIAGILNRNGLVTGHGNRWTRERVTALRSHHRIPVFRTVADGPAPWLNLSQAARHIGVASKTLRIAAEAGEIKGIHPLPEGPWIFCRTELDGSAAHHLAKRARQNPKYPTGSHPDQQTLFSSTT

SEQ ID NO: 12480 - protein, 690 aa, Unknown
  Description of Unknown: Integrase A1048 sequence
  G3DSA:3.40.50.1390,SM00857,SSF53041,PF12728,IPR011109,TIGR01764 ,PF07508,IPR038109,IPR010093,IPR041657,G3DSA:1.10.10.2600 ,IPR036162,cd00338,PS51736,G3DSA:1.10.1660.10,PF13408,Coil, IPR006119,IPR025827,PTHR30461,PS51737,PF00239
MTSTDLIPTALLKRKAVVYVRQSTQSQVMTNLESQRRQYDLVDIARQRGFADIEVIDDDLGRSASGTVARPGFDRLVAWLCAGKIGAVLCLDASRLARNGRDWHHLLELCGLVEARVIDHDGVYNPCLPNDRLLLGMKGSISEFELGVLKARMLEAARSKARRGELRLSVPFGYIWHREAGLGLDPDIRLQEVIRLIFARFRELGSARQVLLSITADQIHFPRPSDEGRMTSFVWLPIRYRNVIAVLKNPFYAGVYVYGKSEKRTSIVDGRARRSYGHGKPVGTWEVMIKGHHEGYISWDEYERNQKQLALNNYGRAGGVKSGRGGKALLSGIMTCARCGRRLSVAYTGNPQSRPVYRCDKPNLMMGLPRCMTFGGPRVDAAVARELLRAVEPLAIEAAFEAERMHRERQDDQRQILDLELQQARYEANLAERRYAACDPDNRLIAAQLEKCWETTLRRLRDLETRQPTGRPPAIEVDPSAFANMAENLSAAWNGPDVTMRARQQLLRTLIADIIVDVDDAVRDVVLMIHWRGGQHSELRVRKPRAGEHGCATTEDALAVMRSMAGRWSDEHIAASLNRMGLPTGQGKTWTAHRVSSVRRVRGIHAYRSAEKDGEWLTMTEAAKALGVTNHAIRRLIKTGVLPAAQVVPGAPYQIRADDLASGSIKTAVARKGRPCRVADVDTLPMFTDT

SEQ ID NO: 12481 - protein, 690 aa, Unknown
  Description of Unknown: Integrase A1049 sequence
  IPR006119,cd00338,PF07508,PS51736,G3DSA:3.40.50.1390, SM00857,IPR011109,IPR025827,PS51737,PF13408, PTHR30461,SSF53041,Coil,PF00239,IPR036162
MSNTDLIPTALLARKAIVYVRQSSQSQVMTNLESQRRQYDLVDVARQHGFSDIETIDDDLGRSASGTVARPGFDRLVALLCAGQVGAVLCFDASRLARNGRDWHHLLELCGLVEARVIDHDGVYNPCRPNDRLLLGMKGSISEFELGVLRARMLDAARSKARRGELRLSVPFGYIWHREAGLGLDPDLRLQDVIRSIFTRFHELGSARQVLLSMTKDQVHFPRPSDEGRMTSFVWMPVRYRNVIGILKNPFYAGVYVYGKSEKRTAIVDGRARRTYGHGKPAGTWEVMIRDHHEGYITWDEYERNQQQLALNNYGRSGGTKSGRGGKALLSGLLTCGRCGRRLSVAYTGNPQSRPVYRCDKPNLMMGLPRCMTFGGPRVDAAVARELLRAVEPLAIEATFEAERMHRERQEDQRHIHDLELRQARYEASLAERRYAACDPDNRLIAAQLEKNWETALRRVRDLEVRKPADSPSTIEVDPDTFTNLADNLQAAWDSPDVTMRARQQLLRTLIADIVVDVDDAVREVVLTIHWKGGQHSELKVRKPQSGEHGCATTEDALAVMRSMAGRWSDEHIAASLNRMGMPTGQGKTWTAHRVASVRRVRAIHAYKSADKDGEWMTMTEAAAALGVTNHRIRHLIKTKVLSAEQVVPGAPYQIRASDLASATVQAAIARKARPCRIADAETLPMFTDT

SEQ ID NO: 12482 - protein, 690 aa, Unknown
  Description of Unknown: Integrase A1050 sequence
  IPR006119,cd00338,PF07508,PS51736, G3DSA:1.10.1660.10,SM00857,G3DSA:3.40.50.1390,IPR011109, IPR025827,PTHR30461,PF13408,SSF53041, PS51737,PF00239,IPR036162
MTNSELLPATVLRRKAVVYVRQSTQTQVQTNLESQRRQYDLVQEARRRGFAQIEVIDDDLGRSASGMVARPGFDRLVAWLCAGEVGAVLCFDASRLARNGRDWHHLLELCGLVEARVIDLDGVYDPCRPNDRLLLGMKGSISEFELGVLRSRMFEAARAKAHRGELRISVPVGYIWHREVGLGFDPDARLQEAVHLIFERFRKLGSARQVLLSLAADGVHFPRPSDGKKMVSFDWTPIRYRNVISVLKNPFYAGVYVYGKSEKRTTLVEGRLRKSYGHGKPADTWDVVIKDHHEAYIGWAEFERNQKLLAINAYGRVDGVKSGRGGRALLSGMLCCGRCGRRLTVNYVGGGIRQAVYRCDRPNNYLGQPRCFTFGGRRPDEAITRELLRAVEPLAIEAAMHAQRRHMEVQAEQRRIVELDLQQARYEASLAERRYAACDPDHRLIASQLEKGWEAALERVRRCEQRVAAFDQEQEAAPPPNLDGLAEDLQAAWNAPGVTMRSRQQLLRTLVKDIIADVDDATREVVLTVHWRGGQHSQIRVIKPRTGEHGCRTPEDALAVIRSMAGKWSDEHIAASLNRMGLPTGQGKTWTAHRVSSTRRVHDIRAYRSAHKDSDWLTMSEAAATLGVNNHRIRRLIKDGLLPAEQVVPRAPYQIRASDLLDPKVTDAVGRTDRPCHADGGKQISMFSST

SEQ ID NO: 12483 - protein, 690 aa, Unknown
  Description of Unknown: Integrase A1051 sequence
  IPR006119,PF00239,cd00338,PF07508,PS51736, G3DSA:3.40.50.1390,SM00857,IPR025827,IPR036162,PF13408, PTHR30461,mobidb-lite,Coil,SSF53041,IPR011109
MMHEKIRPHHLERKAVLYVRQSSAHQVLHNRESRTLQYAMRDRLTTLGWSCIEIVDDDLGRSAAGGVARAGFDRMVAEVCLGKVGAVAAREVSRFARNSRDWQQLIEMCRVVDTVLIDQEAIYAPRQGNDRLLLGLKGSLNEYELDLLRQRSLAARFEKAKRGELVVTAPVGFIKVGDRVEKDPDRRVQEAIALVFDKVSELGSARQALLWFLEHGLDLPVRRPNGDIAWRRPCYATIHRMVGNPIYGGAYAYGKTGAAPTFGRMMAQPGRCRKTRNEWLALIPGTHEGYLSWERAEAIRTMVSNNAPMGQHHGAPKHGDALLAGLIRCRRCGRKLTLRYTGTAHNVPRYSCWRGLLDNGEPRCIAFGGLRVDDAIEEALLGVVGPGAVAAAIDAEKQAANKRDQVREFLQRDLEAAGYAADRAFRQYDAADPANRLVAAELEARWNKALTHVGEIEPRIVEHDAQTPASSPLPAADVSALAHNLRAVWSTPTTDARLKKRIVRSVIQEVVADLDDSASEIVLLVHWAGGVHTELRLPRRRHGQRNATPDDVNDAVRQLALIANDDLIAGILNRNGLTTGNGNRWTRERVTALRSYRKIPVFRPQADNIELWLNLGNAARLLGISPKTLRQAAEAGQIEGAHPLPDGPWIFSRSELTTPAARQIVDRARSNPRHPAGSHPDQQNLFSSIA

SEQ ID NO: 12484 - protein, 689 aa, Unknown
  Description of Unknown: Integrase A1052 sequence
  IPR006119,PF00239,cd00338,PF07508, PS51736,G3DSA:1.10.1660.10,SM00857,G3DSA:3.40.50.1390, IPR025827,IPR041657,IPR036162,PTHR30461, PF13408,mobidb-lite,SSF53041,PF12728,IPR011109
MSKITPEHLARQAVVYIRQSTPDQVVHNLESKRRQYNLPERARQLGWSDVAVIDDDLGRSGGGVARPGFEKLLAAICEVRVGVVVSIEASRLARNGRDWHTLLEFCGLVGTLIADEDGVYDPRQPNDRLLLGMKGTMSEMELSVLRQRSLEALKQKARRGELFMTVAVGYVRVGHNRIEKDPDRRVGEAIALVFAKFTEMQSVRQVHLWFRHERVPLPAVTYGAEGRLVEWKLPVYNTILHILTNPIYAGAYAFGRTGSRISIEAGRKKVVRGFKKERKDWEVLIPNHHEGYLSWADHERNLGLIADNANGKNPMSRGALRRGEALLAGLLRCGHCGRKLHVAYSGKNGNTGRYHCRGGANNHGGDPCISFGGMRIDRDVAAEVIERLQPLGIEAALAAQAARSRANEDKRGQVELALEQARYEVGRARRQYDAVDPDNRLVAAELEKRWNDRLAVVRNLETELEGLTASPAVDLTPADRERLMTLGADLERAWSSAGVAPETRKRIVRTLIDEIVVRVEDNALDLVIRWHGGDHSALKVKKNRSGQHRWSATGETVDLVRVLARQMPDKAIASVLNRSGKTTGRGNGWTKSRVCSLRSHNDIAAYREGERRDRGEVTLDEAAAALSVSPSTVRRLIKDGQLAASQLCKGAPWIIKAADLERPDVKRAATARRLRRPPSGNPLQKELEL

SEQ ID NO: 12485 - protein, 689 aa, Unknown
  Description of Unknown: Integrase A1053 sequence
  IPR006119,PF00239,cd00338,PF07508,G3DSA:1.10.1660.10, G3DSA:3.40.50.1390,IPR038109,SM00857,PS51736,IPR036162, PTHR30461,G3DSA:1.10.10.2600,PS51737,SSF53041,IPR011109
MTTSDLLPAAVLRRKAVVYVRQSTQSQVQTNLESQRRQYDLVAQARRLGFAQVEVIDDDLGRSASGMVDRPGFERLVAWLCAGEVGAVLCFDASRLARNGRDWHHLLELCGLVEARVIDPDGVYDPCRPNDRLLLGMKGSISEFELGVIRARMFEAARAKAHRGELRISVPIGYVWHRQIGLGLDPDMRLQETIRLIFARFRTLGSARQVMLSLAADDVHFPRPSDGKKMVSFDWTPIRYRNVISILKNPFYAGVYAYGKSEKRTTLVQGRLRKTYKHGKPLDRWDVMIKDHHEAYIDWAEFERNQKQLAVNAYGKVDGTKSGRGGRALLAGMLCCGRCGRRLTVAYTGRGVPQPVYRCDRPNLQLAQPRCFTFGARRPDEAIARELLRAVEPLAVEAALQAERRYMQVQADQRRIVELELQQARYEAGLAERRYAACDPDHRLIAAQLEKSWEAALQRVLACEQRLNVARQVQSSARPDLTGLEEDLAAAWDAPGVTMRARQQLLRTLVKDIVADVDDQAREVVLTIHWRGGQHSQVRVVKPRTGEHGCRTPDEALAVMRSMAGKWSDEHIAATLNRMGLPTGQAKTWTAHRVSSVRRVNDIHAYRSAEKDGQWLTMSEAAAKLGVNNHRIRRLIKEGLLPAEQVVPRAPYQIRASDLLEQRVIDAIARTLSPCRAVSEKQMSMFSST

SEQ ID NO: 12486 - protein, 689 aa, Unknown
  Description of Unknown: Integrase A1054 sequence
  IPR006119,PF00239,cd00338,PF07508, PS51736,G3DSA:3.40.50.1390,SM00857,IPR011109, PS51737,PTHR30461,Coil,SSF53041, IPR036162
MTITDLIPTALLARKAVVYVRQSTQSQVITNLESQRRQYDLVDIARHHGFSHVEVIDDDLGRSASGTVARPGFDRLVALLCAGKVGAVFCFDASRLARNGRDWHHLLELCGLVEARVIDHDGVYNPCRPNDRLLLGMKGSISEFELGVLRARMLDAARSKARRGELRLSVPFGYIWHREAGLGLDPDLRLQEVIRSIFARFHDLGSARQVLLSMTKDHIHFPRPSDEGRMTNFVWMPVRYRNVIGILKNPFYAGVYVYGKSEKRTAIVDGWARRSYGHGKPVGTWEVMIRDHHEGYISWGEYERNQQQLALNNYGRSGGTKSGRGGKALLSGLLTCGRSGRRLSVAYTGNPQNPVYRCYKQNLMMGLPRCMTFGGSKVDAAVARELLRAVEPLAIEATFKAERMHRERQEDQRHIHDLELQQARYEASLAERRYAACDPDNRLIAAQLEKNWETALRRVRDLEVRRPTESPSTIEVDPGTFANLADNLQAAWESPDVTMRVRQQLLRTLIADIVVDVDDEVRDVVLTIHWKGGQHSELKVRKPQTVEHGCATTEDALAVMRSMAGRWSDEHIAASLNRMGMPTGQGKTWTAHRVASVRRVRAIHAYKSADKEGEWLTMTEAAAVLGVTNHRIRHLIKTNVLSAEQVVPGAPYQIRASNLTSATVQAAIARKGRPCRIADTETLPMFTDT

SEQ ID NO: 12487 - protein, 689 aa, Unknown
  Description of Unknown: Integrase A1055 sequence
  IPR006119,cd00338,PF07508,PS51736,G3DSA:3.40.50.1390, SM00857,IPR011109,PS51737,PTHR30461,SSF53041, Coil,PF00239,IPR036162
MTITDLIPTALLARKAVVYVRQSTQSQVITNLESQRRQYDLVDIARQHGFSHVEVIDDDLGRSASGTVARPGFDRLVALLCAGKVGAVFCFDASRLARNGRDWHHLLELCGLVEARVIDHDGVYNPCRPNDRLLLGMKGSISEFELGVLRARMLDAARSKARRGELRLSVPFGYIWHREAGLGLDPDLRLQEVIRSIFARFHDLGSARQVLLSMTKDHIHFPRPSDEGRMTNFVWMPVRYRNVIGILKNPFYAGVYVYGKSEKRTAIVDGWARRSYGHGKPVGTWEVMIRDHHEGYISWGEYERNQQQLALNNYGRSGGTKSGRGGKALLSGLLTCGRSGRRLSVAYTGNPQNPVYRCYKQNLMMGLPRCMTFGGSKVDAAVARELLRAVEPLAIEATFKAERMHRERQEDQRHIHDLELQQARYEASLAERRYAACDPDNRLIAAQLEKNWETALRRVRDLEVRRPTESPSTIEVDPGTFANLADNLQAAWESPDVTMRVRQQLLRTLIADIVVDVDDEVRDVVLTIHWKGGQHSELKVRKPQTVEHGCATTEDALAVMRSMAGRWSDEHIAASLNRMGMPTGQGKTWTAHRVASVRRVRAIHAYKSADKEGEWLTMTEAAAVLGVTNHRIRHLIKTNVLSAEQVVPGAPYQIRASNLTSATVQAAIARKGRPCRIADTETLPMFTDT

SEQ ID NO: 12488 - protein, 689 aa, Unknown
  Description of Unknown: Integrase A1056 sequence
  IPR006119,cd00338,PF07508,PS51736, G3DSA:3.40.50.1390,SM00857,IPR011109,IPR025827, Coil,PF13408,PTHR30461,SSF53041, PS51737,PF00239,IPR036162
MTSTDLIPTVLLERKAVVYVRQSTQSQVMTNLESQRRQYDLVDVARQRGFLDVEVIDDDLGRSASGTVARPGFDRLVALLCAGKVGAVLCFDASRLARNGRDWHHLLELCGLVEARVIDHDGVYNPCRPNDRLLLGMKGSISEFELGVLRARMLDAARSKARRGELRLSVPFGYIWHREAGLGLDPDLRLQDVIRSVFARFHELGSARQVLLSMTKDQIHFPRPSDERRMTNFVWTPVRYRNVIGILKNPFYAGVYVYGKSEKRTAIVDGRARRSYGHGKPVGTWEVMIRDHHEGYISWDEYERNQQQLALNNYGRSGGTKSGRGGKALLSGLLTCGRCGRRLSVAYTGNPHSPVYRCDKQNLMMGLPRCMTFGGPKVDAAVARELLRAVEPLAIEATFEAERMHRERQEDQRHIHDLELQQARYEASLAERRYAACDPDNRLIAAQLEKNWETALRRVRDLEERKPADRPSTIAVDPGTFANLADNLLAAWESPDVTMRVRQQLLRTLIADIVVDVDDAVRDVVLTIHWKGGQHSELKVRKPQTGEHGCATTEDALAVMRSMAGRWSDEHIAASLNRMGMPTGQGKTWTAHRVASVRRVRAIHAYKSADKDGEWLTMTEAAAALGVTNHRIRHLIKMKVLSAEQVVRGAPYQIRVSDLASATVQAAIARKGRPCRIADTETLPMFTDT

SEQ ID NO: 12489 - protein, 689 aa, Unknown
  Description of Unknown: Integrase A1057 sequence
  IPR006119,cd00338,PF07508,PS51736,G3DSA:3.40.50.1390, SM00857,IPR025827,PS51737,IPR036162,PTHR30461, PF13408,SSF53041,Coil,PF00239,IPR011109
MSSTDLIPTALLARKAIVYVRQSSQSQVMTNLESQRRQYDLVDVARQHGFSNIETIDDDLGRSASGTVARPGFDRLVALLCAGQVGAVLCFDASRLARNGRDWHHLLELCGLVEARVIDHDGVYNPCRPNDRLLLGMKGSIGEFELGVLRARMLDAARSKARRGELRLSVPFGYIWHREAGLGLDPDLRLQDVIRSIFARFRELGSARQVLLSMTRDNIHFPRPSDEGRMTSFVWTPVRYRNVIGILKNPFYAGVYVYGKSEKRTAIVDGRARRSYGHGKPAGTWEVMIPDHHEGYISWDEYERNQQQLALNNYGRSGGTKSGRGGKALLSGLLTCGRCGRRLSVAYTRNPQNHVYRCYKQNLMMGLPRCMTFGGPKVDAAVARELLRAVEPLAIEATFEAERMHRERQEEQHHIHDLELRQARYEASLAERRYAACDPDNRLITAQLEKNWETALRHVRDLEVCKPADSPSTIEVDTGTFANLADNLQAAWESPDVTMRVRQQLLRTLIADIVVDVDDEVRDVVLTIHWKGGQHSELRVRKPQSGEHGCATTEDALAVMRSMAGRWSDEHTAASLNRMGMPTGQGKTWTAHRVASVRRVRAIHAYKSADKEGEWLTMTEAAAILGVTNHRIRHLIKTNVLSAEQVVPGAPYQIRASDLASATVQAAIARKGRPCRVADPDTLPMFTDT

SEQ ID NO: 12490 - protein, 689 aa, Unknown
  Description of Unknown: Integrase A1058 sequence
  IPR006119,PF00239,cd00338,PF07508, PS51736,G3DSA:3.40.50.1390,SM00857,IPR011109, IPR025827,PS51737,PF13408,PTHR30461, Coil,SSF53041,IPR036162
MISTDLIPTVLLERKAVVYVRQSTQSQVMTNLESQRRQYDLVDVARQRGFLDVEVIDDDLGRSASGTVARPGFDRLVALLCAGKVGAVLCFDASRLARNGRDWHHLLELCGLVEARVIDHDGVYNPCRPNDRLLLGMKGSISEFELGVLRARMLDAARSKARRGELRLSVPFGYIWHREAGLGLDPDLRLQDVIRSIFARFHELGSARQVLLSMTKDQIHFPRPSDERRMTNFVWTPVRYRNVIGILKNPFYAGVYVYGKSEKRTAIVDGRARRSYGHGKPVGTWEVMIRDHHEGYISWDEYERNQQQLALNNYGRSGGTKSGRGGKALLSGLLTCGRCGRRLSVAYTGNPHNPVYRCDKQNLMMGLPRCMTFGGPKVDAAVARELLRAVEPLAIEATFEAERMHRERQEDQRHIHDLELQQARYEASLAERRYAACDPDNRLIAAQLEKNWETALRRVRDLEERKPADSPSTIAVDPGTFANLADNLLAAWESPDVTMRVRQQLLRTLIADIVVDVDDAVRDVVLTIHWKGGQHSELKVRKPQTGEHGCATTEDALAVMRSMAGRWSDEHIAASLNRMGMPTGQGKTWTAHRVASVRRVRAIHAYKSADKDGEWLTMTEAAAALGVTNHRIRHLIKMKVLSAEQVVRGAPYQIRVSDLASATVQAAIALKGRPCRIADTETLPMFTDT

SEQ ID NO: 12491 - protein, 689 aa, Unknown
  Description of Unknown: Integrase A1059 sequence
  IPR006119,PF00239,cd00338,PF07508,PS51736, G3DSA:3.40.50.1390,SM00857,IPR011109,IPR025827,Coil, PF13408,PTHR30461,PS51737,SSF53041,IPR036162
MTSTDLIPTALLARKAVVYVRQSTQSQVITNLESQRRQYDLVDIARQRGFSDVEVIDDDLGRSASGTVARPGFDRLVALLCAGKVGAVFCFDASRLARNGRDWHHLLELCGLVEARVIDHDGVYNPCRPNDRLLLGMKGSISEFELGVLRARMLDAARSKARRGELRLSVPFGYIWHREAGLGLDPDLRLQEVIRSIFTRFHELGSARQVLLSMTKDQIHFPRPRDEGRMTNFVWIPVRYRNVIGILKNPFYAGVYVYGKSEKRTAIVDGRARRSYGHGKPVGTWEVMIRDHHEGYISWDEYERNQQQLALNNYGRSGGTKSGRGGKALLSGLLTCGRCGRRLSVAYTGNPQSPVYRCYKQNLMMGLPRCMTFGGSKVDAAVARELLRAVEPLAIEATFEAERMHRERQEDQRHIHDLERQQARYEASLAERRYAACDPDNRLIAAQLEKNWETALRRVRDLEVRRPAESPSTIEVDPGTFANLADNLQAAWESPDVTMRVRQQLLRTLIADIVVDVDDEVRDVVLTIHWKGGQHSELKVRKPQTGEHGCATTEDALAVMRSMAGRWSDEHIAASLNRMGMPTGQGKTWTAHRVASVRRVRAIHAYKSAGKDGEWLTMTEAAAVLGVTNHRIRHLINTNVLSAEQVVPGAPYQIRASDLTSATVQAAIARKGRPCRIPDTETLPMFTDT

SEQ ID NO: 12492 - protein, 689 aa, Unknown
  Description of Unknown: Integrase A1060 sequence
  IPR006119,PF00239,cd00338,PF07508, PS51736,G3DSA:3.40.50.1390,SM00857,IPR011109, IPR025827,PF13408,PTHR30461,PS51737, SSF53041,IPR036162
MKITAEHLARGAYVYVRQSTADQLVNNPESRRRQYGLAERARSLGWKDAIVIDEDLGRSGSGISRPGFEKLLAAICEGRVGAVLAIEASRLARNGRDWHTLIEFCGLVGTLIIDEDGIYEPRHPNDRLLLGMKGTMSELELSILRARSIEALKQKARRGELFLTVAIGYVKSGRNRIEKDPDLRIREAIDRVFRRFDELQSIRQVHLWLRSEGIMLPAVNYTRAADRAIVWKLPVYNTVHHILTNPIYAGAYAFGRTCSKVTIEAGRKRILRGIRRDRADWEVLLIDHHEGYLSWHDFERNQRLITDNATSKGLVPRGALRRGELLLGGLLRCGHCGRKLHVSYSGSNGNTGRYHCRGAQVNHGTDPCIGFGSLRVDQAVSAEVLQRLQPLGIEAAIKAIETSTVQAGEKRRHVELALEQARYDAAHARRQYDAVDPDNRLVAGELERRWNAALVAVRERQDELDALDRHKPEALGEEERRSLLRMGADLELAWHHANATATTRKRIIRAVIREIVVAIEDDHIKMLVHWQGGDHTALSVRKNKAGHHRWGAPPDIEELIRALARQLPDRAIASLLNRLGKTTGRQNGWTQSRVCTFRNQHDIAVYKKDERSERGEYTLQETAAKLGLRPMTVLRMIRAGDLKAEQYCKGTPWIIRHEDIEQLDIQHHSGRSEHSPLSQSQDQQIQLFQ

SEQ ID NO: 12493 - protein, 689 aa, Unknown
  Description of Unknown: Integrase A1061 sequence
  IPR006119,PF00239,cd00338,PF07508,PS51736, G3DSA:3.40.50.1390,SM00857,IPR011109,IPR025827,PS51737, PF13408,PTHR30461,Coil,SSF53041,IPR036162
MSNTDLIPTALLARKAIVYVRQSSQSQVMTNLESQRRQYDLVDVARQHGFSDIETIDDDLGRSASGTVARPGFDRLVALLCAGQVGAVLCFDASRLARNGRDWHHLLELCGLVEARVIDHDGVYNPCRPNDRLLLGMKGSISEFELGVLRARMLDAARSKARRGELRLSVPFGYIWHREAGLGLDPDLRLQDVIRSIFARFRELGSARQVLLSMTRDNIHFPRPSDEGRMTSFVWTPVRYRNVIGILKNPFYAGVYVYGKSEKRTAIVDGRARRSYGHGKPAGTWEVMIRDHHEGYISWEEYERNQQQLALNNYGRSGGTKSGRGGKSLLSGLLTCGRCGRRLSVAYTGNPQNPVYRCYKQNLMMGLPRCMTFGGSKVDAAVARELLRAVEPLAIEATFEAERMHRERQEEQRHIHDLELRQARYEASLAERRYAACDPDNRLIAAQLEKNWETALRRVRDLEVRKPADSPSTIEVDTGTFANLADNLQAAWESPDVTMRVRQQLLRTLIADIVVDVEDEVRDVVLTIHWKGGQHSELRVRKPQSGEHGCATTEDALAVMRSMAGRWPDEHIAASLNRMGMPTGQGKTWTAHRVASVRRVRAIHAYKSADKEGEWLTMTEAAATLGVTNHRIRHLIKTNVLSAEQVVPGAPYQIRASDLTSATVQAAIARKGRPCRTTDTETLPMFTDT

SEQ ID NO: 12494 - protein, 689 aa, Unknown
  Description of Unknown: Integrase A1062 sequence
  IPR006119,PF00239,cd00338,PF07508, G3DSA:1.10.1660.10,G3DSA:3.40.50.1390,PS51736,SM00857, IPR011109,IPR025827,Coil,PF13408, PTHR30461,PS51737,SSF53041,IPR036162
MTGNDLLPVTVLKRKAVVYVRQSTPGQVQNNLESQRRQYELVDVARRWGFHDVEVIDDDLGRTASGTVDRPGFERLVSGLCTGKVGAVLCLDASRLSRNGRDWHHLLELCGLVEARVIDLDGVYDPCRPNDRLLLGMKGSISEFELGILRTRMLDAARAKARRGELRLSVPIGYIWHREYGLGLDPDIRVQEAIRLIFSRFRELGSARQVLISLTADNFHFPRPSDGRKTVSFDWVPVRYRSVISILKNPFYAGVYVYGKSEKRTEIVDGRARKSYGHSKPFGTWEVLLQDHHEGYIDWSEFERNQSHIAVNAFGQKGGIKSGRGGRALLAGLLTCGRCGRRLGVVYSGRPPGHPYYRCERINQMLAKPRCMTFGASRIDPAIGKEILRAVTPMAIEAAMEADRAHRDNLEERHRMVELDLQQARYEASLAERRYAACDPDNRLIAAQLENSWEAALRRVEACEAGLAQARQIDLAAPVPDFAGIATDLETAWRSPNVDMRCRQQLLRTLVTDIIADVDEEQREVILTIHWKGGQHSQLRIRKPKAGEHGQSTPEAALAIIRSMATRWSDADIAATLNRMGMQTGQGKTWTARRVGSLRTVHKIHGYRSAEKNGEWLTLTEAAKKLGVTAHRVRRLIKEGVLPTEQVVPDAPHQIRATDLEKDEVTQFPRHRGPCRIKMENQKSLFPDI

SEQ ID NO: 12495 - protein, 688 aa, Unknown
  Description of Unknown: Integrase A1063 sequence
  IPR006119,cd00338,PF07508,PS51736,G3DSA:3.40.50.1390, SM00857,PS51737,IPR036162,PTHR30461,SSF53041, Coil,PF00239,IPR011109
MTITDLIPTALLARKAVVYVRQSTQSQVITNLESQRRQYDLVDIARHHGFSHVEVIDDDLGRSASGTVARPGFDRLVALLCAGKVGAVFCFDASRLARNGRDWHHLLELCGLVEARVIDHDGVYNPCRPNDRLLGMKGSISEFELGVLRARMLDAARSKARRGELRLSVPFGYIWHREAGLGLDPDLRLQEVIRSIFARFHDLGSARQVLLSMTKDHIHFPRPSDEGRMTNFVWMPVRYRNVIGILKNPFYAGVYVYGKSEKRTAIVDGWARRSYGHGKPVGTWEVMIRDHHEGYISWGEYERNQQQLALNNYGRSGGTKSGRGGKALLSGLLTCGRSGRRLSVAYTGNPQNPVYRCYKQNLMMGLPRCMTFGGSKVDAAVARELLRAVEPLAIEATFKAERMHRERQEDQRHIHDLELQQARYEASLAERRYAACDPDNRLIAAQLEKNWETALRRVRDLEVRRPTESPSTIEVDPGTFANLADNLQAAWESPDVTMRVRQQLLRTLIADIVVDVDDEVRDVVLTIHWKGGQHSELKVRKPQTVEHGCATTEDALAVMRSMAGRWSDEHIAASLNRMGMPTGQGKTWTAHRVASVRRVRAIHAYKSADKEGEWLTMTEAAAVLGVTNHRIRHLIKTNVLSAEQVVPGAPYQIRASNLTSATVQAAIARKGRPCRIADTETLPMFTDT

SEQ ID NO: 12496 - protein, 688 aa, Unknown
  Description of Unknown: Integrase A1064 sequence
  IPR006119,cd00338,PF07508,G3DSA:1.10.1660.10, PS51736,G3DSA:3.40.50.1390,SM00857,IPR025827, PS51737,IPR036162,PF13408,PTHR30461, SSF53041,Coil,PF00239,IPR011109
MTGNNLIPATVLNRKAVVYVRQSTSGQVQNNLESQRRQYELVDVARRWGFRDVEVIDDDLGRTASGAADRPGFERLVSGLCTGMVGAVLCLDASRLSRNGRDWHHLLELCGLVEARVIDLDGVYDPCRPNDRLLLGMKGSISEFELGILRTRMLDAARAKARRGELRLSVPIGYIWHRDYGLGLDPDLRVQEAIRLIFSRFRELGSARQVLISLTTDNFHFPRPSDGRKRVSFDWVPLRYRSVISILKNPFYAGAYAYGKSEKRTEIVDGRARKSYGHGKPFGTWEVLLRDHHEGYIDWSEFERNQSLIAVNTFAKKGGIKSGRGGQALLAGLLTCGRCGRRLSVSYRGRPSHPYYQCKSINQMLAKPRCMTFGASRIDPAIGKEILSAVTPMAIEAAMEADRAHRDNLEERHRMMELDLQQARYEASLAERRYAACDPDNRLIAAQLEKSWESALRRVETCEAALTQARQIDAGIPIPDFAGIATDLEAAWSAPNVDTRCRQQLLRTLVTDIVADVDEEQREVILTIHWKGGQHSQLRIRKPNPGEHGQKTPDAALAVMRSMATRWSDADIAATLNRMGMQTGQGKTWTARRVGALRTVHKIHGYRSAEKNGEWLTLTEAAKKLGVTAHRVRRLIKEGVLPTEQVVPDAPHQIRAADLEKDEVIQFPRYRGPCRIKMENQKSLFPDV

SEQ ID NO: 12497 - protein, 688 aa, Unknown
  Description of Unknown: Integrase A1065 sequence
  IPR006119,cd00338,PF07508,G3DSA:1.10.1660.10,G3DSA:3.40.50.1390, SM00857,PS51736,IPR011109,IPR025827,PS51737, PF13408,PTHR30461,SSF53041,Coil,PF00239,IPR036162
MTGNNLIPATVLNRKAVVYVRQSTPGQVQNNLESQRRQYELVDVARRWGFRDVEVIDDDLGRTASGAADRPGFERLVSGLCTGMVGAVLYLDASRLSRNGRDWHHLLELCGLVEARVIDLDGVYDPCRPNDRLLLGMKGSISEFELGILRTRMLDAARAKARRGELRLSVPIGYIWHRDYGLGLDPDLRVQEAIRLIFSRFRELGSARQVLISLTADNFHFPRPSDGRKRVSFDWVPLRYRSVISILKNPFYAGAYAYGKSEKRTEIVDGRARKSYGHGKPFGTWEVLLRDHHEGYIDWSEFERNQSLIAVNTFAKKGGIKSGRGGQALLAGLLTCGRCGRRLSVSYRGRPSHPYYQCKSINQMLAKPRCMTFGASRIDPAIGKEILSAVTPMAIESAMEADRVHRDNLEERHRMMELDLQQARYEASLAERRYAACDPDNRLIAAQLEKSWESALRRVETCEAALTQARQIDTGIPTPDFAGIATDLEAAWSAPNVDTRCRQQLLRTLVTDIVADVDEEQREVILTIHWKGGQHSQLRIRKPNPGEHGQKTPEAALAVMRSMATRWSDADIAATLNRMGMQTGQGKTWTARRVSALRTVHKIHGYRSAEKNGEWLTLTEAAKKLGVTAHRVRRLIKEGVLPTEQVVPDAPHQIRAADLEKDEVTQFPRYRGPCRIKMENQKSLFPDV

SEQ ID NO: 12498 - protein, 688 aa, Unknown
  Description of Unknown: Integrase A1066 sequence
  IPR006119,cd00338,PF07508,PS51736,G3DSA:3.40.50.1390, SM00857,IPR011109,PS51737,IPR025827,PF13408, PTHR30461,SSF53041,Coil,PF00239,IPR036162
MRSELITDRHLARHAVIYIRQSSPHQVLSNQESLRLQYDLRRRALGLGWREEDVEIIDADLGLSGAAAVHREGFKDLIARVTLGQVGIVLSSEVTRLTRNCSDWYPLLDLCGYRDCLIADRDGVYDPGTANGRLLLGLKGTLSEVELHTIRARLTAGLLNKAARGELALILPVGLVRETGGVVVKNPDREVQARLDLIFTTFLRLRSASKVLHAFNERGLSIPRRGRFGDTVWRPPTVAAILQVLKNPAYAGAFVYGRTRSVRTAPLGKGSQKRLPREQWRIVVKDQYPAYISWATFEKIEAMLRDNYAEYDRNKTRGVPREGAALLHGMVYCGACGHKMVVQYKGGARYMCNYLRQQHGVPVCQVIPAAPVDAEAVAAFFKALTPAELDAYTQAVSLRREADAAGLKAQAQQVERLRYRAALAERQFDQVDPDNRLVAAELERRWEETLRDLRQAEAALADAAPEEGRVIPFGVGPDLQAAFTEVGRRLPDLWQQPALTTVRKKALLRCLIDKVVIHRAVRDTIALRLVWRGGATSEIALPITVGSLAELSRSGEMEAAIVERARAGESDAAIAAALTAAGHRSPLRQAVLPSTVQAIRLRHGILRERRQSHPRRIPGCLTVSQLAAQLGVTPHWIYDRIYNGTIAIELDAKTGLYLFPDGPTTLRAFQKLKAGKVDRLSPVPRLAC

SEQ ID NO: 12499 - protein, 688 aa, Unknown
  Description of Unknown: Integrase A1067 sequence
  IPR006119,PF00239,cd00338,PF07508, G3DSA:1.10.1660.10,PS51736,SM00857,G3DSA:3.40.50.1390, IPR011109,IPR025827,PS51737,PF13408, PTHR30461,Coil,SSF53041,IPR036162
MTGNNLIPATVLNRKAVVYVRQSTPGQVQNNLESQRRQYELVDVARRWGFRDVEVIDDDLGRTASAAVDRPGFERLVSGLCTGMVGAVLCLDASRLSRNGRDWHHLLELCGLVEARVIDLDGVYDPCRPNDRLLLGMKGSISEFELGILRTRMLDAARAKARRGELRLSVPIGYIWHRDYGLGLDPDLRVQEAIRLIFSRFRELGSARQVLISLTADNFHFPRPSDGRKRVSFDWVPLRYRSVISILKNPFYAGAYAYGKSEKRTEIVDGRARKSYGHGKPFGTWEVLLQDHHEGYIDWGEFERNQSLIAVNTFAKKGGIKSGRGGQALLAGLLTCGRCGRRLSVSYRGRPSHPYYQCKSINQMLAKPRCMTFGASRIDPAIGKEILSAVTPMAIEAAMEADRVHRDNLEERHRMMELDLQQARYEASLAERRYAACDPDNRLIAAQLEKSWESALRRVEACEAALTQARQIDAGIPIPDFAGIATDLEAAWSAPNVDTRCRQQLLRTLVTDIVADVDEEQREVILTIHWKGGQHSQLRIRKPNPGEHGQKTPEAALAVMRSMATRWSDADIAATLNRMGMQTGQGKTWTARRVGALRTVHKIHGYRSAEKNGEWLTLTEAAKKLGVTAHRVRRLIKEGVLPTEQVVPDAPHQIRAADLEKDEVTQFPRYRGPCRIKMENQKSLFPDV

SEQ ID NO: 12500 - protein, 688 aa, Unknown
  Description of Unknown: Integrase A1068 sequence
  IPR006119,PF00239,cd00338,PF07508,PS51736, G3DSA:3.40.50.1390,SM00857,IPR038109,IPR011109,PTHR30461, G3DSA:1.10.10.2600,PS51737,SSF53041,IPR036162
MTDVDILPPSILKRKAVVYVRQSSQAQVQHNLESQRRQYELVDEARRRGFRDVEVIDDDLGRSASGTVARPGFDKLVAGLCAGNVGAVLCLDASRLARNGRDWHHLLELCGLVEARVIDLEGVYNPCRPNDRLLLGMKGSISEFELGILRSRMLDAARSKARRGELRIPVPIGYIWHREIGLGFDPDLRVQEAVRQIFERFRQLGSGRQVYRALSAEHVHFPRPSDGKRSVSFDWTPIRYRNVISVLKNPFYAGAYAYGKTEKRTEIIDGRAHKTYKHPRALSDCEILLKGHHEGYIDWSEYERNQKQLSLNDFGRRGGPKSGRGGRSLLIGLMACGRCGRRLKVGYRGRYPYPIYQCFGADVYNSARCMSFAGQRTDRAIASQLIRAVEPMAVEAALKAERMYMEGQAEQQRMIELELQQARYDASLAERRYAACDPDNRLIAATLEKNWEATLRRVQECEARLSAAEATNADKTVPDFAGLADDLQAAWANPQVTMRTRQQLLRSLVNEITANIDDVAHEIVLTIHWKGGQHSEVRLHKPSSGEHECRTSDDAIAVITSMATRWSDEDIAATLNRMRMPTAQGKTWTAKRVSSIRRVRDIHAYRSAEKDGTWLTLREAAQHCGVTSHRIRRLIEAKILPAEQVVPGAPYQILAADLNSDAVVRAMGRNGGPCHLETQNQIPMFPNT

SEQ ID NO: 12501 - protein, 687 aa, Unknown
  Description of Unknown: Integrase A1069 sequence
  IPR006119,PF00239,cd00338,PF07508, PS51736,G3DSA:3.40.50.1390,SM00857,IPR011109, IPR025827,PTHR30461,PF13408,mobidb-lite, Coil,SSF53041,IPR036162
MMHEKIGPHHLERKAILYVRQSSVSQVLHNRESSALQYAMRDRLTALGWSRIETVDDDLGRSAAGGVTRAGFDRMVAEVCLGKVGAVAAREVSRFARNSRDWQQLIEMCRVVDTVLIDQEAVYAPRQGNDRLLLGLKGSLNEYELDLLRQRSLSARYEKARRGELVVTVPVGFLKVGDRIEKDPDRRIQEAIALVFNKVAELGSARQALLWFLEHGLDLPVRRANGDAIWRRPNYATIHRMIANPIYGGAYAYGKSRSVPGYGGRSGIRRKARDEWLALIPDAHEGYVSWERAEAIRKMVSDNVPASRHHGAPKHGDALLAGLFRCKRCGRKLTVRYTGANHNIPRYSCWRGLLDNGEPRCIAFGGLRVDDAIEEALLGVVEPGAIAAAVEAERNRASQRDQVQDALLRDLEAARYAADRAFRQYDAADPENRLVTSELEARWNKALTRVSEMESKIASHQAATPQSTPMSTLEMAALAGSLRTVWAAPATDARLKKRIVRTVIHEVIADLDDMTSEIVLVIHWVGGIHTELRLPKRHRGQRNATPDDIIEAVRQLVLIANDDVIAGVLNRNGLMTGNGNRWTRERVTALRSYRKIPVFRPQSDGIEPWLNLGDAARLLGVAPKTLRLAAEAGEIEGVHPLPDGPWIFSRSKLATSRAQQIVHRARQNPRYPTGSPPDQENLFPSTT

SEQ ID NO: 12502 - protein, 687 aa, Unknown
  Description of Unknown: Integrase A1070 sequence
  IPR006119,cd00338,PF07508,PS51736,G3DSA:3.40.50.1390, SM00857,IPR011109,IPR025827,SSF53041,PTHR30461, PF13408,mobidb-lite,PF00239,IPR036162
MMHEKIGPHHLERKAILYVRQSSAHQVLHNRESSALQYAMRDRLAALGWSYIETVDDDLGRSAAGGVTRAGFDRMVAEVCLGKVGAVAAREVSRFARNSRDWQQLIEMCRVVDTVLVDQEAVYAPRQGNDRLLLGLKGSLNEYELDLLRQRSLSARYEKARRGELVVTVPAGFVKAGDRIEKDPDRRIQEAIALVFNKVTELGSARQALLWFLEQGLDLPVRCANGDVIWRRPNYATIHRMIANPIYGGAYAYGKSRSVPGYDGRSGIRRKARDEWLALIPDAHEGYISWERAEEIRKMVSDNVPASRHHGAPKHGDALLAGLFRCKRCGRKLTVRYTGANHNIPRYSCWRGLLDNGEPRCIAFGGLRVDDAIEEALLGVVEPGAIAAAFEAERNMASQRDQVQDALLRDLEAVRYVADRAFRQYDAADPENRLVTSELEARWNKALARVGEIEAKIAKHRTVTPQPFPMSASQVTALAGNLRTVWTAPTTDARLKKRIVRTLINEVVADLDDGTSEIVLVIHWVGGVHTELRLPKRRRGQRNATPDDIVDAVRQLVLIANDDVIAGVLNRNGLTTGNGNRWTRERVTALRSYRKIPVFRPQIDGVEPWLNLGGAAKLLGITPKTLRLAAEAGDIEGVHPLPDGPWIFSRSKLATPQARQILDRARKNPRHPAGSPPDQENLFPSMT

SEQ ID NO: 12503 - protein, 687 aa, Unknown
  Description of Unknown: Integrase A1071 sequence
  IPR006119,mobidb-lite,cd00338,PF07508, PS51736,G3DSA:3.40.50.1390,SM00857,IPR011109, IPR025827,PF13408,PTHR30461,SSF53041, Coil,PF00239,IPR036162
MMHEKIAPHHLERKAILYVRQSSAHQVLHNRESSALQYAMRDRLAALGWSHIETVDDDLGRSAAGGVTRAGFDRMVAEVCLGKVGAVAAREVSRFARNSRDWQQLIEMCRVVDTVLVDQEAVYAPRQGNDRLLLGLKGSLNEYELDLLRQRSLSARYEKARRGELVVTVPAGFVKAGDRIEKDPNRRIQEAIALVFDKVTELGSARQALLWFLEQGLDLPVRCANGDVIWRRPNYATIHRMIANPIYGGAYAYGKSRSVPGYDGRSGIRRKARDEWLALIPDAHEGYISWERAEEIRKMVSDNVPASRHHGAPKHGDALLAGLFRCKRCGRKLTVRYTGANHNIPRYSCWRGLLDNGEPRCIAFGGLRVDDAIEEALLGVVEPGAIAAAVEAERNMANQRDQVQDALMRDLEAARYVADRAFRQYDAADPENRLVTSELEARWNKALTGVGEIEAKIAKHRTVTPHPFPMSASQVTALAGNLRAVWTAPTTDARLKKRIVRTLINEVVADLDDGTSEIVLVIHWVGGVHTELRLPKRHRSQRNATPDDIVDAVKQLVLIANDDVIAGVLNRNGLTTGNGNRWTRERVTALRSYRKIPVFRPQIDGVEPWLNLGGAAKLLGISPKTLRLAAEAGDIKGAHPLPDGPWIFSRSKLATPQARQILDRVRKNPRHPAGSPPDQENLFLSMT

SEQ ID NO: 12504 - protein, 687 aa, Unknown
  Description of Unknown: Integrase A1072 sequence
  IPR006119,cd00338,PF07508,PS51736,G3DSA:3.40.50.1390, SM00857,IPR011109,IPR025827,SSF53041,PF13408, PTHR30461,mobidb-lite,Coil,PF00239,IPR036162
MMHEKIGPHHLARKAILYVRQSSAHQVLHNRESSALQYAMRDRLAALGWSQIETVDDDLGRSAAGGVTRAGFDRMVAEVCLGKVGAVAAREVSRFARNSRDWQQLIEMCRVVDTVLVDQEAVYAPRQGNDRLLLGLKGSLNEYELDLLRQRSLSARYEKARRGELVVTVPAGFVKAGDRIEKDPDRRIQEAIALVFNKVTELGSARQALLWFLEQGLDLPVRCANGDVIWRRPNYATIHRMIANPIYGGAYAYGKSRSVPGYDGRSGIRRKARDEWLALIPDAHEGYISWERAEEIRKMVSDNVPASRHHGAPKHGDALLAGLFRCKRCGRKLTVRYTGANHNIPRYSCWRGLLDNGEPRCIAFGGLRVDDAIEEALLGVVEPGAIAAAVEAERNMASQRDQVQDALLRDLEAARYVADRAFRQYDAADPENRLVTSELEARWNRTLARVGEIETRIAKHRTVTPQPFPMSASQVTALAGNLRTVWTAPTTDARLKKRIVRTLINEVVADLDDGTSEIVLVIHWVGGVHSELRLPKRRRGQRNATPDDIVDAVRQLVLIANDDVIAGVLNRNGLTTGNGNRWTRERVTALRSYRKIPVFRPQIDGVEPWLNLGGAAKLLGITPKTLRLAAEAGDIEGAHPLPDGPWIFSRSKLATSQARQILDRARQNPRHPAGSPPDQENLFPSMA

SEQ ID NO: 12505 - protein, 687 aa, Unknown
  Description of Unknown: Integrase A1073 sequence
  IPR006119,PF00239,cd00338,PF07508, PS51736,G3DSA:3.40.50.1390,SM00857,IPR011109, IPR025827,PTHR30461,PF13408,mobidb-lite, SSF53041,IPR036162
MMHEKISAHHLERKAILYVRQSSAHQVLHNRESSALQYAMRDRLKALGWAQIETVDEDLGRSAAGGVTRAGFDRMVAEVCLGKVGAVAAREVSRFARNSRDWQQLIEMCRVVDTVLIDQEAVYAPRQGNDRLLLGLKGSLNEYELDLLRQRSLSARYEKARRGELVVTVPIGFLKAGDRIEKDPDRRIQEAIALVFNKVAELGSARQALLWFLEQGLDLPVRRANGEVTWRRPNYATIHRMIDNPIYGGAYAYGKSRSMPGYDGRSGIRRKARAEWLALIPDAHEGYVSWERAEEIRKMVSNNVPASRHHGAPKHGDALLAGLFRCKRCGRKLTVRYTGNNHNIPRYSCWRGLLDNGEPRCIAFGGLRVDDAIEEMLLGVVEPGAIAASAEAERNIANRRDQVHDALQRDLEAASFAADRAFRQYDTADPENRLVASELEARWNKALIRVGEIENKIASHKAAIPQVSSYSMLDIAALAGDLRAVWSAPTTDTRLKKRIVRTVIHEVIADLDDVASEIVLVIHWAGGVHTELRLPKRRRGQRNATPDDLIEAVRQLVLIANDDLIAGILNRNGLATGNGNRWTRERVTALRSYRKIPVYRPQSDGIEPWLNLGKAAKLLGVTPKTLRIAAETGEIEGVHPLPAGPWIFSRSKLELPQAKQLVDRVRQNPRHPAGSPQNQGNLFTSTT

SEQ ID NO: 12506 - protein, 687 aa, Unknown
  Description of Unknown: Integrase A1074 sequence
  IPR006119,mobidb-lite,cd00338,PF07508,PS51736, G3DSA:3.40.50.1390,SM00857,IPR011109,IPR025827,PTHR30461, PF13408,SSF53041,Coil,PF00239,IPR036162
MMHEKIAPHHLERKAILYVRQSSAHQVLHNRESSALQYAMRDRLAALGWSHIETVDDDLGRSAAGGVTRAGFDRMVAEVCLGKVGAVAAREVSRFARNSRDWQQLIEMCRVVDTVLVDQEAVYAPRQGNDRLLLGLKGSLNEYELDLLRQRSLSARYEKARRGELVVTVPAGFVKAGDRIEKDPNRRIQEAIALVFDKVTELGSARQALLWFLEQGLDLPVRCANGDVIWRRPNYATIHRMIANPIYGGAYAYGKSRSVPGYDGRSGIRRKARDEWLALIPDAHEGYISWERAEEIRKMVSDNVPASRHHGAPKHGGALLAGLFRCKRCGRKLTVRYTGANHNIPRYSCWRGLLDNGEPRCIAFGGLRVDDAIEEALLGVVEPGAIAAAVEAERNMANQRDQVQDALMRDLEAARYVADRAFRQYDAADPENRLVTSELEARWNKALTGVGEIEAKIAKHRTVTPHPFPMSASQVTALAGNLRAVWTAPTTDARLKKRIVRTLINEVVADLDDGTSEIVLVIHWVGGVHTELRLPKRHRGQRNATPDDIVDAVKQLVLIANDDVIAGVLNRNGLTTGNGNRWTRERVTALRSYRKIPVFRPQIDGVEPWLNLGGAAKLLGISPKTLRLAAEAGDIKGAHPLPDGPWIFSRSKLATPQARQILDRVRKNPRHPAGSPPDQENLFLSMT

SEQ ID NO: 12507 - protein, 687 aa, Unknown
  Description of Unknown: Integrase A1075 sequence
  IPR006119,PF00239,cd00338,PF07508, PS51736,G3DSA:3.40.50.1390,SM00857,IPR025827, IPR036162,PF13408,PTHR30461,mobidb-lite, Coil,SSF53041,IPR011109
MMHEKIGPHHLERKAILYVRQSSAHQVLHNRESSTLQYAMRDRLTALGWSRIETVDDDLGRSAAGGVTRAGFDRMVAEVCLGKVGAVAAREVSRFARNSRDWQQLIEMCRVVDTVLIDQEAVYAPRQGNDRLLLGLKGSLNEYELDLLRQRSLSARYEKARRGELVVTVPVGFLKVGDRIEKDPDRRIQDAIALVFNKVAELGSARQALLWFLEHGLDLPVRRADGDVIWRRPNYATIHRMIANPIYGGAYAYGKSRSVPGYGGRSGIRRKARDEWLALIPDAHEGYISWERAEEIRKMVSDNVPASRHHGAPKHGDALLAGLFRCKRCGRKLTVRYTGANHNIPRYSCWRGLLDNGEPRCIAFGGLRVDDAIEEAVLGVVEPGAIAAAIEAERRMASQRDQVQDALLRDLEAARYAADRAFRQYDAADPENRLVTSELEARWNTALARAGEIEAKIAKHRTVAPQPIPMSASQVAALAGNLRAVWTAPTTDARLKKRIVRTLINEVVADLDDGTSEIVLVIHWVGGVHTELRLPKRRRGQRNATPDDIVDAVRQLVLIANDDVIAGVLNRNGLTTGNGNRWTRERVTALRSYRKIPVFRPRVDGVEPWLNLGGAAKLLGITPKTLRLAAEAGQIEGAHPLPDGPWIFSRSKLATPQAHQILDRARQNPRHPTGSHPDQENLFPSTT

SEQ ID NO: 12508 - protein, 687 aa, Unknown
  Description of Unknown: Integrase A1076 sequence
  IPR006119,cd00338,PF07508,PS51736,G3DSA:3.40.50.1390, SM00857,IPR011109,IPR025827,SSF53041,PF13408, PTHR30461,mobidb-lite,Coil,PF00239,IPR036162
MMHEKIGPHHLARKAILYVRQSSAHQVLHNRESSALQYAMRDRLAALGWSQIETVDDDLGRSAAGGVTRAGFDRMVAEVCLGKVGAVAAREVSRFARNSRDWQQLIEMCRVVDTVLVDQEAVYAPRQGNDRLLLGLKGSLNEYELDLLRQRSLSARYEKARRGELVVTVPAGFVKAGDRIEKDPDRRIQEAIALVFNKVTELGSARQALLWFLEQGLDLPVRCANGDVIWRRPNYATIHRMIANPIYGGAYAYGKSRSVPGYDGRSGIRRKARDEWLALIPDAHEGYISWERAEEIRKMVSDNVPASRHHGAPKHGDALLAGLFRCKRCGRKLTVRYTGANHNIPRYSCWRGLLDNGEPRCIAFGGLRVDDAIEEALLGVVEPGAIAAAVEAERNMASQRDQVQDALLRDLEAARYVADRAFRQYDAADPENRLVTSELEARWNRTLARVGEIETRIAKHRTVTPQPFPMSASQVTALAGNLRTVWTAPTTDARLKKRIVRTLINEVVADLDDGTSEIVLVIHWVGGVHSELRLPKRRRGQRNATPDDIVDAVRQLVLIANDDVIAGVLNRNGLTTGNGNRWTRERVTALRSYRKIPVFRPQIDGVEPWLNLGGAAKLLGITPKTLRLAAEAGDIEGDHPLPDGPWIFSRSKLATSQAGQILDRARKNPRHPAGSPPDQENLFPSTT

SEQ ID NO: 12509 - protein, 687 aa, Unknown
  Description of Unknown: Integrase A1077 sequence
  IPR006119,cd00338,PF07508,PS51736, G3DSA:3.40.50.1390,SM00857,IPR025827,SSF53041, IPR036162,PF13408,PTHR30461,mobidb-lite, Coil,PF00239,IPR011109
MMHEKIGPHHLERKAILYVRQSSAHQVLHNRESSALQYAMRDRLAALGWSHIETVDDDLGRSAAGGVTRAGFDRMVAEVCLGKVGAVAAREVSRFARNSRDWQQLIEMCRVVDTVLVDQEAVYAPRQGNDRLLLGLKGSLNEYELDLLRQRSLSARYEKARRGELVVAVPVGFVKAGDRIEKDPDRRIQEAIALVFNKVAELGSARQALLWFLEQGLDLPVRYANGDVIWRRPNYATIHRMIANPIYGGAYAYGKSRAVPGYDGRSGIRRKTRDEWLALIPDAHEGYVSWERAEEIRKMVSNNVPSSRHHGAPKHGDALLTGLFRCKRCGRKLTVRYTGNNHNIPRYSCWRGLLDNGEPRCIAFGGLRVDDAIEEALLGVVEPGAVTAAIEAERNMASQRDQVQDALLRDLEAARYVADRAFRQYDAADPENRLVTSELEAPWNKALARVGEIEAKIAKHRTVTPQPFAMSASQVTALAGNLRTVWTAPTTDARLKKRIVRTLINEVVADLDDGTSEIVLVIHWVGGVHTELRLPKRRRGQRNATPDDIVDAVRQLVLIANDDVIAGVLNRNGLTTGNGNRWTRERVTALRSYRKIPVFRPQIDGVEPWLNLGGAAKLLGITPKTLRLAAEAGEIEGTHPLPDGPWIFSRSKLATSQARQILDRARQNPRHPTGSHPDQESLFPSTT

SEQ ID NO: 12510 - protein, 687 aa, Unknown
  Description of Unknown: Integrase A1078 sequence
  IPR006119,cd00338,PF07508,PS51736,G3DSA:3.40.50.1390, SM00857,IPR011109,IPR025827,SSF53041,PTHR30461, PF13408,mobidb-lite,PS51737,PF00239,IPR036162
MMHEKIRPHHLERKAILYVRQSSAHQVLHNRESSALQYAMRDRLTSLGWSSVEIIDDDLGRSAAGTVTRAGFERMVAEVCLGKIGAVAAREVSRFARNSRDWQQLIEMCRVVDTVLIDQETVYAPRQGNDRLLLGLKGSLNEYELDLLRQRSLSARYEKARRGELIVAAPVGFVKVADRLEKDPDRRVQEAITLVFEKVVELGSARQALMWFLEHELDLPAKRNNGDTIWRRPTYATIHRMIENPVYGGAYAYGKTSATPGFGQSATIRRNAREEWLALIPGVHEGYVSWERAEAIRKMVSDNAVTSRHHGAPKHGDALIAGLFRCRRCGRKLTVRYTGAKHNIPRYSCWRGHLDNGEPRCIAFGGLRVDDAIEGAILRVVEPGAIAAAAEAEAQASSRRDQVRDALGRDLEAARYAANRAFRQFDAADPENRLVAAELEIRWNRALELVGEIESKISAHDRTAPKPSLLMQTGIASLAQDLRTVWAAPTTDARLKKRIVRTVIQEVVADIDDATSEIVLMVHWIGGIHTEMRLPKRRRGQRNSTSGDIVAAIRQLVLIANDDLIAGVLNRNGLLTGHGNRWTKERVTAHRSHHKIPVFRPAPDGNEPWLNLNKAARFIGVAPKTLRLAAEAGEIKGQHPLSDGPWIFNRSDLEKQEAQNLLHRVRKNPRHPAGSHPDQNTLFPTTA

SEQ ID NO: 12511 - protein, 686 aa, Unknown
  Description of Unknown: Integrase A1079 sequence
  IPR006119,cd00338,PF07508,PS51736, G3DSA:3.40.50.1390,SM00857,IPR025827,IPR036162, PF13408,PTHR30461,SSF53041,PS51737, PF00239,IPR011109
MSKITPDHLARHAYVYVRQSSPDQLLHNHESRRRQYGLADRARQLGWAEVVVIDDDLGRSGGGIARPGFERLLGAICEGRVGIVLAIEASRLARNGRDWHTLLEFCGLVGCLLADEDGVYDAKLPNDRLLLGMKGTMSEMELSILRQRSLEALRQKARRGELFLTVAVGYIKTHHDRIAMDPDLRVREALGLVFRKFAEFQSIRQVHLWLRQERIRLPAVERTAEGPRIVWKLPVYNTLHHLLTNPIYGGAYAFGRTGSRVSVQDGRKRVVRGFRRTQAEWEVLIPDHHEGYISWAEFGRNQALIADNANSKGMMARGSVRRGDALLAGLLRCGHCGRRLHVAYSGTDGYCVRYDCRGAHLNHGTERCISFGGLRVDAAVAEEALRFLAPLGIEAALRAIDAREADGSETRRQAELALAQACYEAELARRQYDAVDPDYRLVAAELERRWNDRLVEVHRLEERVAALRTGQTAALTAEERARLMALGADVAALWHHPGATAETRKRILRTVIAEIVAKVVDDTIELVIHWQGGDHTHLSVPKNRSGKHRWRTDADTGDLIRALARQQPDRGIAAILNRAGKRTGKGNTWTEARVRSFRNAHGIAVYREGEMTERGEVTLEQAADRLKVSTMTVLRLIAGGTIQASQACKGAPWAILEAQLSGLEPLRPSVRRPVTDDPDQQTFDFQ

SEQ ID NO: 12512 - protein, 686 aa, Unknown
  Description of Unknown: Integrase A1080 sequence
  IPR006119,PF00239,cd00338,PF07508,PS51736, G3DSA:3.40.50.1390,SM00857,IPR025827,IPR036162,PTHR30461, PF13408,mobidb-lite,Coil,SSF53041,IPR011109
MMHEKIGPHHLERKAILYVRQSSAHQVLHNRESSTLQYAMRDRLTALGWSRIETVDDDLGRSAAGGVTRAGFDRMVAEVCLGKVGAVAAREVSRFARNSRDWQQLIEMCRVVDTVLIDQEAVYAPRQGNDRLLLGLKGSLNEYELDLLRQRSLSARYEKARRGELVVTVPVGFLKVGDRIEKDPDRRIQDAIALVFNKVAELGSARQALLWFLEHGLDLPVRRADGDVIWRRPNYATIHRMIANPIYGGAYAYGKSRSVPGYGGRSGIRRKARDEWLALIPDAHEGYISWERAEEIRKMVSDNVPASRHHGAPKHGDALLAGLFRCKRCGRKLTVRYTGANDNIPRYSCWRGLLDNGEPRCIAFGGLRVDDAIEEAVLGVVEPGAIAAAIEAERRMASQRDQVQDALLRDLEAARYAADRAFRQYDAADPENRLVTSELEARWNTALARAGEIEAKIAKHRTVAPQPIPMSASQVAALAGNLRAVWTAPTTDARLKKRIVRTLINEVVADLDDGTSEIVLVIHWVGGVHTELRLPKRRRGQRNATPDDIVDAVRQLVLIANDDVIAGVLNRNGLTTGNGNRWTRERVTALRSYRKIPVFRPRVDGEPWLNLGGAAKLLGITPKTLRLAAEAGQIEGAHPLPDGPWIFSRSKFATPQAHQILDRARQNPRHPTGSHPDQENLFPSTT

SEQ ID NO: 12513 - protein, 686 aa, Unknown
  Description of Unknown: Integrase A1081 sequence
  IPR006119,cd00338,PF07508,PS51736, G3DSA:3.40.50.1390,SM00857,IPR025827,IPR036162, PTHR30461,PF13408,SSF53041,PS51737, PF00239,IPR011109
MSTDNAMKISADHLRRDAFLYVRQSSLRQVFENTESTKRQYALRDRAVALGWPIERVHVIDNDLGLSGAQSQDRDGFQRLVTEVAMGHAGIVLGLEVSRLARNNADWHRLLELAAMSRTLIMDEDGVYDAASFNDRMLLGLKGTMSEAELHILKSRLQGGILNKARRGELELPLPIGLVYTPDMRVVLDPDRQIQDTVRMLFDTFREVGSACAVVRRLRSEKILFPRRIRRGIGKGDVLWSEIDHSRVIQILHNPRYAGAFAYGRTRTVYNAKLKSVQQKMPRSDWQVLIPQAHEGYISWDEFERNQTSLEQNAVGFSPGLRGRMPRQGNGLLQGRVLCGRCGARMRVHYEQFEGNLRPYYICNEAVVRHAGKACQWARGPAIDEAVSALLLEAMAPTAIEVALAVQEEISQRVEQAASLRDKQLQRARYEAELARRRYLKVDPDNRLVADALEADWNGKLRDLDTLQREHERQNETDQSLLDGAMQERIRALAADFPRIWNNERTSPVERKRMLGLLIEDVTLLVDEKINMHIRWRGGRTQSLAVARPRPMAVIRKTPEAVVALINELLETDNDQQIASRLNALGHRNWRGEAFTLKKVMLVRRAYGLKTRFERLRDSGMLTGEEVARRFGVSATTVHQLGRDGVLKRHRYATNHRYLYEPPGNVRLAKGVGGRYGSRQPRLIDA

SEQ ID NO: 12514 - protein, 685 aa, Unknown
  Description of Unknown: Integrase A1082 sequence
  IPR006119,PF00239,cd00338,PF07508,PS51736, G3DSA:3.40.50.1390,SM00857,IPR011109,IPR025827,PF13408, PTHR30461,mobidb-lite,PS51737,SSF53041,IPR036162
MRRLKTKAQYQSPGDPRNNALRGRAVALGWRDEQIIVIDNDQGESGASAAWREGFQRLVSDVGMGHAGIVMGLEVSRLARNNADWQRLLEICALADTLILDEDGVYDPASFNDRLLLGLKGTMSEAELHVIKARLRGGILNKVRRGEFRCLLPTGLVYDHFGHVTLDPDMQVRETIIHFFEMFSRLESASQTVKVFRNEGLLFPSRLHNGDTLFRPLTASTAMRVLNNPRYAGAYTYGRRQFRRTIDGKKTLRARDIDDWPACMPDAHPGYISWERHQENLKILKANGRGFEAARASIPREGPALLQGRAVCGQCGNHLRVRYAARRGRQEAWYICNRDHIYRGEPMCQSIAGPPVDEAIGMLIAEQMTPAAVELALDVRKEIQARHEEADRLRCRAIERAQTEADLAQRRFMLVDPNNRLVADTLEGEWNEKLRILANAREERERGREHDQFILDKAVHERLVAMTADFNELWKDPDTPSRERKRLLAHIIEDVTLLKLPAEGTTKLHVRFKGGKIQTLTTMNPQSSAQQIKTKPNIVELIDKLLDDYIYPEIAEILNEQGHRPGGTARRGCHDARFTPLKVAYLIHEYKLQSRYDRLRQRGMLTRQEAAVHLNISEQTVARWAKYGLIARHAYNGHYSLYEIPDGDLPQKQCSRWNQLQDRTAARQQTQTEPRTSTGEERGVV

SEQ ID NO: 12515 - protein, 685 aa, Unknown
  Description of Unknown: Integrase A1083 sequence
  IPR006119,PF00239,cd00338,PF07508, PS51736,G3DSA:3.40.50.1390,SM00857,IPR025827, PS51737,IPR036162,PTHR30461,PF13408, mobidb-lite,Coil,SSF53041,IPR011109
MTHVDLPASLLKRKAVVYVRQSTPAQVQLNRESQRRQYELVEEARRRGFRDVEVIDDDLGRSASGTVARPGFDKLVAWLCAGDVGAILCLDASRLARNGRDWHHLLELCGLVEARVIDLDGVYNPCRPNDRLLLGMKGSISEFELNILRTRMYEAVRSKARRGELRIGVPIGYIWHREIGLGLDPDARVQEAVRQIFSRFRQLGSARQTHLALHREGMHFPRPSDGRKLTALDWTPIRYRNVISVLKNPFYAGAYAYGKSKSRTAVVDGRAHKTYGHIRPLDEYDVLLKDHHEGYIDWGIYERNQKQLAINAYGQRDGAKSGRGGRSLLIGLMTCGQCGHRLRVAYRGRYPYPVYQCIGRRAHGLPRCMCFGGQRVDTAIARELMRVVQPIAIQAALVAERTHMETQREQQRILELELQQARYEASLAERRYAACDPDNRLIAAQLEKNWETSLRRVSEYEARLDDIKTHNSATPTPDFTGLAEDLDAAWSSSSVTMRTRQQLVRALINDTTVNIDEADCEIVLTIHWKGGRHSTLRLRKPQSGEHECVTSDDALAIIESMASRCEHIAATLNRMGLPTAQGKSWTAKRVGSIRRVRGIHAYKSAEKDGEWLTLTEAAKASNVTAHRIRSLIAAGILPAQQVVPGAPYQINASHLRDPRVATAMRRKGRPCQSPPESQIPMFTDT

SEQ ID NO: 12516 - protein, 683 aa, Unknown
  Description of Unknown: Integrase A1084 sequence
  IPR006119,PF00239,cd00338,PF07508,G3DSA:1.10.1660.10, PS51736,SM00857,G3DSA:3.40.50.1390,IPR025827,IPR041657, IPR036162,PTHR30461,PF13408,PS51737,SSF53041, PF12728,IPR011109
MKALGQAIVYIRQSTAGQLANNLESQRRQYGLADWARQLGWNDVAVIDDDLGRSGGGVARPGFEKLLAAICEGRVGAVVSIEASRLARNGRDWHTLLEFCGLVGTLILGEDGVYDPRHPNDRLLLGMKGTMSEMELSVLRQRSLEALKQKASRGELFMTVAIGYVRIGNNRIEKDPDRRITEAIALTFARFAEMQSVRQVHLWLRQERIPLPAVTYGAEGRLIEWKLPVYNTILHILTNPIYAGAYAFGRTGSRVSIEAGRKRVVRGFKKERKDWEVLIPNHHEGYLSWADYERNLGLIADNANGKNPMSRGALRRGEALLAGLLRCGHCGRKLHVAYSGANGNTGRYHCQGGFINHGGDRCISFGDMRIDRDIGAEVIVRLQPLGIEAALAAQALRSRANEDKRRQIALALEQARYEVGRARRQYDAVDPDNRLVASELETRWNERLTIARDLEAELEELTASPAAEPAPADRERLMMLGADLQRAWTSAGVTPEAKKRIVRTVIDEIVVRVEDNALDLVIRWHGGDHSALKVKKNRTGQHRWSVEGETIDLVRVLARQMPDKAIASVLNRAGKTTGRGNGWTQSRVCSLRSHNTIPTYREGERRERGEVTLDEAAAALSVSPSTVRRLIKDGQLSANQLCKGAPWIIHAADLDRNDVKGAATARRLRRPPSSNPLQKTLEL

SEQ ID NO: 12517 - protein, 677 aa, Unknown
  Description of Unknown: Integrase A1085 sequence
  IPR006119,PTHR30461:SF3,cd00338,PF07508,PS51736, G3DSA:3.40.50.1390,SM00857,IPR038109,IPR011109,PTHR30461, G3DSA:1.10.10.2600,SSF53041,PS51737,PF00239,IPR036162
MAEITIIQPREQPRRKLRCGAYCRVSTGREEQQHSYEAQRLWFMTLLGGSQTEELVDIYADIGISGTTTDRPEFMRMLNDCRHGCIDRILTKSISRFARNTRDCLAILRELRELGVTVFFEKENIDTARTADEMMIAIMGGLAQEESQSISRNIRWSLHRKMAAGTLGVARVPYGYDKVNGRLVINDEQAAVVRRIFSLYLGGMGARRIAALFNSEGLPAPESTAWNNITVYKMLAQEMYLGDIRWQKTVSVFMGTSHPNTGQANSFYVSGSHEPIIDRETFESAQALRLKSVRPAEKTNNSPFRQKVVCGICGRSYYLIGAARPYWQCTRRFDLVKPCTNDILHDETLSDLWRVIWTKFTNHADDVLLPLIGQLERIAEKVSENAESGRLDEIMQQKMTLRKMCAEGLISYGEVITSETELNAEYSSLIENCRKQKEHNSLLINEVKTLYKAVSAAHSDCCADILKSIRFAHDTADFELVSGIHIIMSIPKHKKRIITSHNPINAIRSLALCGGCGGRLSRRKVEGVYLWKCSNRRCSYWRSKHTDEDMIGNTTDVFSKVYADPRLVSLKCSMTEYRPTESVLTMLESLEKLIALGENAEMLIKAAVHLAEEKIGCIEYNVKTEQTAHIEDAIKNCVELPEFLIQAVRHIYVTPDRVRVKFINGKTVKSERSTNHE

SEQ ID NO: 12518 - protein, 675 aa, Unknown
  Description of Unknown: Integrase A1086 sequence
  IPR006119,PF00239,cd00338,PF07508, PS51736,G3DSA:3.40.50.1390,SM00857,IPR011109, IPR025827,PS51737,PF13408,PTHR30461, Coil,SSF53041,IPR036162
MSNTDLIPTALLARKAIVYVRQSSQSQVMTNLESQRRQYDLVDVARQHGFSDIETIDDDLGRSASGTVARPGFDRLVALLCAGQVGAVLCFDASRLARNGRDWHHLLELCGLVEARVIDHDGVYNPCRPNDRLLLGMKGSISEFELGVLRARMLDAARSKARRGELRLSVPFGYIWHREAGLGLDPDLRLQDVIRSIFTRFHELGSARQVLLSMTKDQVHFPRPSDEGRMTSFVWMPVRYRNVIGILKNPFYAGVYVYGKSEKRTAIVDGRARRTYGHGKPAGTWEVMIRDHHEGYITWDEYERNQQQLALNNYGRSGGTKSGRGGKALLSGLLTCGRCGRRLSVAYTGNPQSRPVYRCDKPNLMMGLPRCMTFGGPRVDAAVARELLRAVEPLAIEATFEAERMHRERQEDQRHIHDLELRQARYEASLAERRYAACDPDNRLIAAQLEKNWETALRRVRDLEVRKPADSPSTIEVDPDTFTNLADNLQAAWDSPDVTMRARQQLLRTLIADIVVDVDDAVREVVLTIHWKGGQHSELKVRKPQSGEHGCATTEDALAVMRSMAGRWSDEHIAASLNRMGMPTGQGKTWTAHRVASVRRVRAIHAYKSADKDGEWMTMTEAAAALGVTNHRIRHLIKTKVLSAEQVVPGAPYQIRASDLAGTVRNSVRWAGFIS

SEQ ID NO: 12519 - protein, 656 aa, Unknown
  Description of Unknown: Integrase A1087 sequence
  IPR006119,cd00338,PF07508,PS51736,G3DSA:3.40.50.1390, SM00857,IPR011109,PS51737,IPR025827,PTHR30461, PF13408,SSF53041,Coil,PF00239,IPR036162
MWLIERSHVHVAFGRVQVIDEDLGKSGAGGVDRHGFQKLIAEIGLGNAGLVVSLDASRLARNNRDWHQLLELCSVFGVVIADGERLYDPRAYHDRLLLGLSGIMSEAELHQLRMRLHQGERQKAARGELRLPLPAGLAYDRTGTIILNPDEEVQARFHLVFAKFRELQSARRVMRYLDRNGLSLPVRPLLGPSPHEVVWRAPDSARVLNILQNPAYAGAYVYGRRQKDPSRCRPGSLTGTVKVAIADWAVCLHAAHPGYISWEEFMANQGRLADNVCRYEAGHSGVPRKGAALLQGIAVCGRCGRRMSMRYTGPHADYPVYCCRSDRDQQGSALCQEVRALAVDALVERIVLDALVPDQIEIALATAGQLEQENRQLERQWALRVERARYEAERARRQYDAVEPENRLVARSLERAWEDKLRVVEAVEQQHARWRAQEPLLIGPTERAGLQALGENLPRIWNAATTSAADRKRILRFVIREVVLDQKRTRGQVWFKIVWQTGATSEHHVQRRVQAYRNYIDIDRLRQRIVELNAEHKMDGEIAAILNQEGFVAARGCAFKGENVWLLRTRWSIPTVKINGVDKNPMRWPDGSFSIQGAAAELCVTPQTVFDYLARGMLTGRQLTKGQPWQIELSDEQMSQLRNRVRRTKRSKKEAS

SEQ ID NO: 12520 - protein, 651 aa, Unknown
  Description of Unknown: Integrase A1088 sequence
  IPR006119,cd00338,PF07508,PS51736, G3DSA:3.40.50.1390,SM00857,IPR011109,IPR025827, IPR041657,Coil,SSF53041,PTHR30461, PF13408,mobidb-lite,PS51737,PF00239,PF12728,IPR036162
MSKITADHLSLSAFVYVRQSTAYQVANNLESQRRQYGLVERARQLGWETVEIVDDDLGRSGGGIARPGFEKLLAAICEGRVGAVVSLEASRLARNGRDWHTLLEFCGLVGTLIVDEEAIYDPRSPNDRLLLGMKGTMSEMELSVFRQRSVEAMRQKARRGELHLTVAVGYVKTDDARVEKDPDRRVQESILLVFRKFAELQTVRQVLLWFRQENVLVPSVNQGRGKPPIEWKAPVYHTLHHILTNPVYAGSYAYGRRGTRVMIKDGRKRVIRDTLRRNSKDWEVLIHDHHEGYISWAEFERNQHLIAENANGKSYIGRGSIRRGEALLPGLFRCGRCGRRLHIQYSGKGGNTQRYVCRGTFGDMAAANCIGFGGMRVDRAVAQEVLERLQPLGIEAALQAMEAHTQRHSDKRQQLENSIKQAQYEAARARRQYDAVDPDNRLVAGELERRWNEKLIQLRDLEIELETLSTDRDMPALSADDRARLMKLGRDLGQAWDSPSVSIETRKKIIRLLITEIVVDLVRALARQLPDLSIAAILNRSGKRTGHGASWTRSHVCSLRNIHGIPVYREGERAERGERTLDETADILKVSRATAYRMVSSGVLPARQLCAGAPWIIQLSDLQDDTVRREADARRSRRPISQDPVQNPLLF

SEQ ID NO: 12521 - protein, 629 aa, Unknown
  Description of Unknown: Integrase A1089 sequence
  IPR006119,PF00239,cd00338,PF07508,PS00398, G3DSA:3.40.50.1390,SM00857,IPR038109,PS51737,IPR036162, PTHR30461,G3DSA:1.10.10.2600,mobidb-lite,Coil,SSF53041, IPR006118,IPR011109
MPAGLRPARASAEWKRRLDRWCATRADAALSGRDEFNEARLPRIDSLNRASTPQDRWTMSTKAQSATSNTPRIYTYARFSSLQQADGSSIARQDAYAEAWAKQHGLILDRSLRMEDRGKSAHKGEHVKKGGALGAFIERIKAGDVVPGDTLIVENLDRLSRQSAQDAQTQFNAIVNTYGVDIVTMHDGVRYNREELARDPSPLFLALAVMVRAYDESSRKSSNARGAYRDKCERWLKGEYRGLIGQPRHIRASDGKLIKGTDPIWILYDTEAKRFELVPEKAAAMQRIIELYRQGHGSVEITRRMETEGLTISDKRAVVRIHKLITYPALKGDKVVVVDGQTYTLKGYYPPVVTETEFDELQLLVGKRGVRKGKGKVPAILTGMKMCYCGYCRQLMVGQTLTTTRADGTTHQNFRRLRCGSYANRAADCRGGASCSGVPVEKAIMTFCANQMNLDHLFTGNDKSDPLMRQLTAKRASLAKTDLKLKGIKDEMLNGDALPSTFREVLRELETNKRTLTQAITKLERELSINSAAQPAPAETWAELVSDVMALDYDARMKTRRLVQETFERIDVFSKGFECDGEHMAVRVTSKRGVVMGFEFNRRTGELIEATKTRKSKPLPKPARTPRMK

SEQ ID NO: 12522 - protein, 629 aa, Unknown
  Description of Unknown: Integrase A1090 sequence
  IPR006119,cd00338,PF07508,PS51736,G3DSA:3.40.50.1390, SM00857,IPR025827,IPR036162,PF13408,PTHR30461, SSF53041,Coil,PF00239,IPR011109
MMHEKIGPHHLERKAILYVRQSSAHQVLHNRESSALQYAMRDRLAALGWSQIETVDDDLGRSAAGGVTRAGFDRMVAEVCLGKVGAVAAREVSRFARNSRDWQQLIEMCRVVDTVLVDQEAVYAPRQGNDRLLLGLKGSLNEYELDLLRQRSLSARYEKARRGELVVSVPAGFVKAGDRIEKDPDRRIQEAIALVFNKVTELGSARQALLWFLEQGLDLPVRCANGDVIWRRPYYATIHRMIANPIYGGAYAYGKSRSVPGYVGRSGIRRKARDEWLALIPDAHEGYISWERAEEIRKMVSDNVPSSRHHGAPKHGDALLAGLFRCKRCGRKLTVRYTGANHNIPRYSCWRGLLDNGEPRCIAFGGLRVDDAIEEALLGVVEPGAIAAAVEAERNMANQRDQVQDALLRDLEAARYVADRAFRQYDAADPENRLVTSELEARWNKALTGVGEIEAKIAKHRTVTPQPFPMPASQVTALAGNLRTVWTAPTTDARLKKRIVRTLINEVVADLDDGASEIVLVIHWVGGVHTELRLPKRRRGQRNATPDDIVDAVRQLVLIANDDVIAGVLNRNGLTTGNGNRWTRERVTALRSYRKIPVFRPQIDGVEPWLNLGGAAKLLGITPKGDVTL

SEQ ID NO: 12523 - protein, 628 aa, Unknown
  Description of Unknown: Integrase A1091 sequence
  PTHR30461:SF3,G3DSA:3.40.50.1390,SM00857,cd03770, IPR025378,SSF53041,PF14287,IPR011109, PF07508,IPR038109,G3DSA:1.10.10.2600,IPR036162, PF13408,Coil,IPR006119,IPR025827,PTHR30461,PS51737,PF00239
MRKNEKITALYERLSRDDFGKDDDQQRESNSISNQKAMLEEFAARQGFTNIVHFTDDGISGTCFDRPGFLAMMKEVEAGNVEYLCIKDMSRMGRDYLKVGQIMEILRQRGVRLIAINDGVDSARGDDDFTPFRNIMNEYYARDTSRKIRSTFQSKGKSGKHLTGTVIYGYLWNEARDQWLVDPEAAEVVKRIFSMTIDGYGPYQIASKLKSEKVLIPSAYLAQHGEGVNKNKTFKDVYGWGSSTICNILEKREYLGHTINFKTRKHFKDKKSHYVPEDEWTIFENTHEPIIDQQTFDLVQKIRGNVRRYPDGWGEAAPLTGLLYCADCGGKMYVHRTNNGKRISQYTCSQYTKVPCGTLCKTQHRINEDVVLSLVSEMLKAIAEYAKHDRAEFVRVVQEAQSSQQTTEVRKQRTRLATAKQRVSELEVLLCKIYEDNILGKLSDSRYATLDAQYEKEQSELTAEISVLEKAVKSYEKHEKDADRFIALIDKYENFDKLTIAMLNEFIEKILVHERDRKGSIQTTQEVEIYFNFVGRFVPPAFGEVELTPEELEEIRKREERKDRLHQNYLKRKASGAQKRYEDKIKKRKKAEIEAKKAAIRAEDIAKGVFVPVSSLPQREPMKGVQTA

SEQ ID NO: 12524 - protein, 628 aa, Unknown
  Description of Unknown: Integrase A1092 sequence
  PTHR30461:SF3,G3DSA:3.40.50.1390,SM00857,cd03770,IPR025378, SSF53041,PF14287,IPR011109,PF07508,IPR038109, G3DSA:1.10.10.2600,IPR036162,PF13408,Coil,IPR006119, IPR025827,PTHR30461,PS51737,PF00239
MRKNEKITALYERLSRDDFGKDDDQQRESNSISNQKAMLEEFAARQGFTNIVHFTDDGISGTCFDRPGFLAMMKEVEAGNVEYLCIKDMSRMGRDYLKVGQIMEILRQRGVRLIAINDGVDSARGDDDFTPFRNIMNEYYARDTSRKIRSTFQSKGKSGKHLTGTVIYGYLWNEARDQWLVDPEAAEVVKRIFSMTIDGYGPYQIASKLKSEKVLIPSAYLAQHGEGVNKNKTFKDVYGWGSSTICNILEKREYLGHTINFKTRKHFKDKKSHYVPEDEWTIFENTHEPIIDQQTFDLVQKIRGNVRRYPDGWGEAAPLTGLLYCADCGGKMYVHRTNNGKRISQYTCSQYTKVPCGTLCKTQHRINEDVVLSLVSEMLKAIAEYAKHDRAEFVRVVQEAQSSQQTTEVRKQRTRLATAKQRVSELEVLLCKIYEDNILGKLSDSRYATLDAQYEKEQSELTAEISVLEEAVKSYEKHEKDADRFIALIDKYENFDKLTIAMLNEFIEKILVHERDRKGSIQTTQEVEIYFNFVGRFVPPAFGEVELTPEELEEIRKREERKDRLHQNYLKRKASGAQKRYEDKIKKRKKAEIEAKKAAIRAEDIAKGVFVPVSSLPQREPMKGVQTA

SEQ ID NO: 12525 - protein, 618 aa, Unknown
  Description of Unknown: Integrase A1093 sequence
  IPR006119,SSF46955,PF00239,cd00338,PS51736, G3DSA:3.40.50.1390,SM00857,IPR025827,IPR009061,PF13408, PTHR30461,SSF53041,IPR036162
MNVHLKVQSHHRERSAYLYIRQSSMRQVIDNTESAMRQYALRGRAIALGWREEQIIVIDNDQGESGASAVWREGFQRLVSDVGMGHAGIVMGLEVSRLARNNADWQRLLEICALADTLILDEDGVYDPASFNDRLLLGLKGTMSEAELHVIKARLRGGILNKARRGEFRCPLPTGLVYDHSGNVALDPDMQIRETIAHFFETFSRVGSASQTVKAVRQEGILFPSRLHDSQTVFRPLTPSTAMRVLQGRAVCGQCGRHFHMRYAARRGRQEAWYVCDRARSNRGEHVCQAIAAPPVDEAIGMLIADQMTPAAVELAIEVRKEIEARHEEADRLRCRAIERAQTEADLAQRRFMLVDPNNRLVADTLEGEWNEKLRILANAREERERAQEHDQFILNKAVHERLVTMTADFKKLWTNSETPNRERKRLLAHIIEDVTLLKLPKRGTTKAHIRFKGGKTQTLVTISPKSPSQQVKTSPDVIQLIDKLLDDHIFSEIADILNNQGYRPGSVTRRDQRNARFTTKRVTYLVREYKLRSRYDRLRDRGMLTKKEAAAHLNIHEHTLARWAEHGLVTSHAYNGHYYLYELPKSDLPQKQCSRWNQLVDRLAAHKENARHAKTFN

SEQ ID NO: 12526 - protein, 616 aa, Unknown
  Description of Unknown: Integrase A1094 sequence
  IPR029016,IPR003018,PS00676,PS50045,IPR009057,SSF46689,PF00158, cd00009,cd00569,G3DSA:3.40.50.300,G3DSA:1.10.8.60,PS00675, PF01590,IPR002078,PF02954,G3DSA:1.10.10.60,G3DSA:3.30.450.40, PS00688,PTHR32071,IPR002197,SSF52540,PR01590,IPR025662,SSF55781
  CONT. FROM ABOVE: ,PTHR32071:SF77,IPR025943,IPR003593,SM00382, IPR025944,IPR027417
MNLSQREHIANVVASVEQAAATQVLNPQGSDAVQASWLRCVNHHGLDPSRLQEARILPARQLREHCQQLEALRVVAQPGLEKLYQQIAPAGYILLLADAQGVAVDYLGNANAEISLRRAGLFLGAQWSEALSGTCAVGTALATRQAITIHQTDHFDATHIPLTCSAVPLFDSQGDLQAVLDISALTSPQPRSSQHLVLQLAQQQAQKIENAWLLHRHRHDWVLKLSRHPGWHDIEPEFLLAFDANGRLTGLNPAARHWLSAHPQPLGLPLSALFPGPLEQLLSTPQLEDISGQQRFYAQTVHPARPASTAGVTLSPKLAALSGGDPQLDQQLRRAGRLLDTSLHLLVQGETGSGKEYFARAFHQASQRRKGPFIAVNCAAIPASLLESELFGHLPGSFSGAGSKARPGLIQAAEGGTLFLDEIGDMPLEMQTRLLRVLAEQEVLPIGARQPQKVDIRVLSASHHPLTQRVAAGLFREDLLYRLQGACIQLPPLRERQDINWLIDQMLAGQAQLSPPARHALLSYRWPGNLRELHHALQYALAMCESGIIAMDDLPDTLRVTAPAQPVAVNDEQDALLRQLRAARWNMSETARQLGISRMTLYRRLQRLGIQLPERQ

SEQ ID NO: 12527 - protein, 612 aa, Unknown
  Description of Unknown: Integrase A1095 sequence
  PTHR30461:SF3,G3DSA:3.40.50.1390,SM00857,SSF53041,IPR006118, IPR011109,PF07508,IPR038109,PS00397,G3DSA:1.10.10.2600, IPR036162,cd00338,PS51736,PF13408,mobidb-lite, Coil,IPR006119,IPR025827,PTHR30461,PS51737,PF00239
MVVKPRPSLSKPRCVIYARVSTDKQAKQNISIPDQMARARVYADLQGWQVVGEYVDAGASGRDDTGRPQFREMLAEAKKKPRSFEFIVVHSFSRFYRDQPRSELERRELKRNGVQVRSLTQEIEDDGGGGTLALSVMGLIDEYFSREQSKHVRRAMEENARQGFRSGGTAPFGYEYKVAEMRGERAKKKLTINEAEAATVREAFELHAAGLGIAKITDRLNEKGSRTRSDRLWAKNVIHAMLSNETYVGRNYYRPTDPITEEKLPREGWITVPCPPIVSEALFESVQEQMRMRAPEITAPRLTTSPVLLSGIARCGSCLAPLQLATGTSWTKDTYRYYKCSGKVRIGACAGGKPVSISEGLLDDLVLTTLCESLFTADRLASIVKSWIEVRSKDRSAASSRLSSLREQLKGTKKRERNLWDLAEKHGLGLEEDFRQRLTEIVEERNNLTRLISLQEALVSETIKPLSKAEAGRIASELREGIQHPDVDVRRRYVRAFLSCVVVYEDEIIIGGHNSSVAEAASGCDLHPLDRTALVRASVQDWLGTFPGELPTPRSAIALIEPFCDVPADLAAALETDRLKTLAQQDSPGQAEAKRLLIRGEPAQPRPSEPKD

SEQ ID NO: 12528 - protein, 606 aa, Unknown
  Description of Unknown: Integrase A1096 sequence
  IPR006119,PTHR30461:SF3,PF00239,cd00338,PF07508, PS51736,G3DSA:3.40.50.1390,SM00857,IPR038109,IPR011109, PS51737,IPR025827,PTHR30461,PF13408,G3DSA:1.10.10.2600, Coil,SSF53041,IPR036162
MNTKVKLIKASNLGARNRNALHLDLKRVAAYCRVSTDSKDQLESYKSQVDYYTNLIKNNKNWTLAGIYADEATTGTTATKRADFMRLISDCQNGDIDMIITKSISRFARNTLDTLKYVRLLKENNVGVVFEEENIDTLTMDGELLLTILSSVAQQEVENTSAHVKKGLKMKMEKGELIGFQGCLGYDYDPITKSISINEEEAKIVRYIFKRYLEGNGGSVIGRELEEQGYLTPRGKTKWSDTTVLGVIKNEKYIGDILMGKTFTVDPITKRRLANFGESDKYHIENHHEAIISKEDFEKAQEIRLRRAQNRNTIANKDRKREKLSRQYAFSSMLECGFCGEILSRRTWHTSSIYKKINWQCVKSTKKGKKYCPHSKGIQEAAIEKAFVESYRQLCHADSTIIDDFLKIVEEEINDETLVKDLKKLENQLNRIISQERKLVDLHLEDSIDEEVYAKKYKKLTKQKEELLDEKKTLELTIKDEDSIKERLKQFKKVLENREIIEEFNRTVFESIVDKVVVGRIDKDGTVHPYDLTFYFKTGVKDSQDSNNFKDKRKNAKDNDINKLCSYKNDEDKKLCSQSKDNACGDGSSVVQTKHRTSFRYRNRGR

SEQ ID NO: 12529 - protein, 591 aa, Unknown
  Description of Unknown: Integrase A1097 sequence
  IPR006119,PTHR30461:SF3,cd00338,PF07508,PS51736, G3DSA:3.40.50.1390,IPR038109,SM00857,IPR011109,IPR025827, SSF53041,PF13408,PTHR30461,G3DSA:1.10.10.2600,mobidb-lite, PS51737,PF00239,IPR036162
MTRVALYARYSSDNQRAASIEDQFRLCEERAAREGWQVVDYYRDAAISGASMILRPGIQTLLRDAQAGQFDIVLAEALDRVSRDQADVATLFKRLQFAGVTIVTLAEGEISELHVGLKGTMNALFLKDLALKTHRGLRGRVEAGKSGGGLCYGYRVVHQMDARGELIRGEREIDPVQAEIVRRIFHEFASGRSALSIASRLNDEGIPSPTGGKWNNTTLRGNALRGTGILNNELYIGRLVWNRLRYLKDPQTGKRVSRLNPQSEWIVTEVPDLRIMDDDLWQAVRARQALIAEKSVNISAGIRASLNKLNGQRRPRSLLSGLVFCGVCGGPCSIRGGDRFACSTHMDNRSCANKTTIRRPELEDRVLSGLKDRLMTPEAAAEAMRAYVEETNRANHERRASTAGWQTELTRLRKGLKQMLQVIEDGGYTRGMVERMREMEAREDEVVALLAAQPQDVPDIHPNIAAIFKHKVERLAETLNHPEDRQDASEAIRALIEKIVLHPGKGRGEMHATLHGELGNLLDFAASRGQGTKNTNTPGARAPGVSVSGIAGTHNRRKLRSASNEQATLVAGACNRRKLLLVSGFVERLVA

SEQ ID NO: 12530 - protein, 577 aa, Unknown
  Description of Unknown: Integrase A1098 sequence
  IPR006119,PTHR30461:SF3,cd00338,PF07508,PS51736, G3DSA:3.40.50.1390,SM00857,IPR011109,PS51737,IPR025827, PTHR30461,PS00397,PF13408,SSF53041,Coil, PF00239,IPR006118,IPR036162
MRTPHLRAVSAPQTLQVALYARVSTDQQAEHHTIDSQLAELTARAEQDGHDLRDDLRFIDNGHSGASLIRPALEHLRDLVALSAIDLIYVHAPDRLARSYAHQVLLIEEFAHAGTQVVFLNHPIGTTPEDSLLLQLQGMFAEYERAKVLERSRRGKRHRAQTGAVSVLSRAPFGYRYITREAGGGDARYEIDEEAARIVRQIFTWVGHERLTLAGVCRRLHDSGLPSPTGRRHWSRAMIHSMLLNPAYAGQALYGRRQSVPWRPPLHPPRGHDGLPRRPWRQVLATPERHISIAVPAIVGEELFASVAEQLEENRRRSRERLAGVQYLLRGLLVCQKCGYGFTGHHHRGQWRYYRCCGTDRSRFHGAFRCDARLVATELLDEAVWTEVCRLLDDPARVIAEYQRRLDAVQATPHRLELDALGRQRAKARRAIERLIDSYTEGLIEKPEFEPRLAALRRRTARLEAEAKAHQEADEQVRSLHLVIGKLDLFAALVHDRLAGADWTTRRDIICTLVKRIEVADDVVRVIFRVDPGVSGPSEAGRTLHHCPTRPHYAMSEGCAGWAGAEPPAQGTSHAAE

SEQ ID NO: 12531 - protein, 577 aa, Unknown
  Description of Unknown: Integrase A1099 sequence
  PTHR30461:SF3,G3DSA:3.40.50.1390,SM00857,SSF53041,IPR006118, IPR011109,PF07508,IPR038109,PS00397,G3DSA:1.10.10.2600, IPR036162,cd00338,PS51736,PF13408,mobidb-lite, Coil,IPR006119,IPR025827,PTHR30461,PS51737,PF00239
MSDRRIALYARVSTEQQARDHTIASQVAALHERITADEQSLAPEDAYVDEGYSGSVLVRPALERLRDAVATGEIERVYVLAPDRLARRYAHQVLLMEEFRRAGAEVIFLNHAIGGTAEDDLLLQIQGVIAEYERSKILERSRRGRRHAAQSGLVSAFTTGPYGYRYVPKALGGGVARFEVVPEEARVVRLIFAWVGLERISLREVCRRLQQAGVVTRRGSTRWYASTLGGMLTNTTYIGRAIYGHARYVFGPPKLLRPLRGHPHPCRRPSVRVKVPREEWIEVPVPAMVDPAVFEAAQMQLQENRQRKRESRAGPRWLLQGLTVCRRCGYAYYGKTAPQSKRDPAKGVYCYYRCIGTDGYRFDDHAVCDNPQIRGDYLEQAVWDRVRALLEDPDRMAGEYHRRLTQTQDRTGSSDYVLQLERQIARLQRGIGRLIDSYAEGVIEPAEFQPRIAGLKTRRARLEEQRRVAVEEAQAERELTLMIGRLEEFATRVSDGLDELDFAGKQALIRTLVRRIEIDRNHVEVIFRVPPPTPEGSSPSEPHPHSETWHHCTSDNDAEGCKSLHLTAKEAVARNGL

SEQ ID NO: 12532 - protein, 575 aa, Unknown
  Description of Unknown: Integrase A1100 sequence
  IPR006119,PTHR30461:SF3,PF00239,cd00338,PF07508, PS51736,G3DSA:3.40.50.1390,SM00857,IPR038109,Coil, IPR036162,PTHR30461,G3DSA:1.10.10.2600,PS51737,SSF53041, IPR011109
MSKGNRVAIYARFSTDLQREASIEDQLVSCREAALRQGWQVVAEYSDRATSGASMFRAGIEALQRDAKAGRFDIVLSEGMDRLSRKLSDISRFHERMEHAGVRIWTITEEDVDDMKIGLKGTMNAMQLRDIALKTRRGQRGRVRQGKVAGGNSYGYDVVAGPADGKGRTEGGERAINPGKAAVVRRIFEDYARGLSPRRIAEALNTEGIPGPRGRAWGASTLHGNRERRTGILNNELYIGRLVWNRLQYRKDPDTGKRMSRPNAGDVLVTTDVPHLRIVDDDLWQRVRARQGALTSKGTQVAVWDRRRPKFLFSRLMKCGCCGSGVSKEGRDGFSCSAARSKGAAVCTNRTVIKQADLEGRVLHALEHHLMDEAAVRIFCEEYAAERNRLAAGATANRKGLEKELAQVKRDHAKLVDAIIAGVPVEQVKERMNALDARRKELERQLSAEAAPDPVRFHPSMSGAYRERIGALIRALREPEGMEEAKEAIRAMVEKIVLTPVMGPDGKTELAIDLHGALASLLRLATGLPMADVPRRAAGGANSVTASDGVSEAVEFVDKLVLVAGAGFEPAAFRL

SEQ ID NO: 12533 - protein, 571 aa, Unknown
  Description of Unknown: Integrase A1101 sequence
  IPR006119,PTHR30461:SF3,cd03768,PF00239,PF07508, PS51736,G3DSA:3.40.50.1390,IPR038109,SM00857,IPR011109, IPR025827,PS51737,PTHR30461,PF13408,G3DSA:1.10.10.2600, Coil,SSF53041,IPR036162
MPDNRKYAIYSRKSKFTGKGESIENQIEICRRALKSKYDVVDEDIVEFEDEGFSGGNTKRPKFQEMMERYRNGEFQLVICYRLDRISRNTSDFVNTYEELKEHSVCFRSVSDNIDDTSPMGRAMMMISSVFAQLERDIIAERITDNMHELAKSGRWLGGNPPTGYRSAETVGSMTVDGKIHKARMLEKNPEEAELVRLVFTKFVELRSITKVETYLLNNDFKSKKGNTLSRFAIKTILQNPVYAIADEDTWVYLNEKDMQLYGSRDDFDGIHGIMAYNKTIQKKGRSMKQKAPSEWIVAVGKHEGIIEGKRWVEVQHLLEKNRDKAYRKPKSNTALLSGLLFCACCGSFMRPKLSSRVNKQGEKVYDYLCELKERSHGLKCDNKRINGNELDRQICDEIKHLGEDDSGLMKLLRNSQKSLNETFADSQAEIDRLTEKKKQYEAERTNLVKALTFAGETMAAEDIISQINDLHTKTSELERQISEHRRLMENSDITDEQYHSLADMLSSFAKTIDTLDVMKKRDVIRCLVRRVEWDGENIHLYLMGEESGGGTDVLHSEPKCECSKWKMELI

SEQ ID NO: 12534 - protein, 570 aa, Unknown
  Description of Unknown: Integrase A1102 sequence
  IPR006119,PTHR30461:SF3,cd00338,PF07508,G3DSA:3.40.50.1390, IPR038109,SM00857,IPR011109,PS51737,PTHR30461, G3DSA:1.10.10.2600,SSF53041,Coil,PF00239,IPR036162
MLVAIYARHSTDKQDTSSADQVARCIQFCADRGWTVSHIFADEALSGATMSHRENAKALVAAALAGEFEKVLSEDLSRLSRSQSDIAALYEKLRFMGIDIETIADGTINELHIGLKGTMNALYLRDLADKTRRGLRAITLRGKIPGGLCYGYRTKHRLDEKGELVRGEREIHPGEAEVIRRIYSEYHDGAILSEICEGLNDDGIASPRGGTWSISALVGTASRQTGVLRHTLYKGWITWNRQEYRVNPETGKRNCVVRPQSEWLRIPVPELAIVDEDLFDAVQRMIEDRSSMRHIRAADAKARSRERAMERQRKARSLQMKTGQTGSWFFTRRLRCAETGHPLTAAPPGYYGSRRTALWMIPRETIIVQGLEALNTVDLDTIRTFQETLSPDRQRHESAIERLQQQIDQATDEVKALLSDLGNRTNRPVIRSFLDDKEKQITNARLQLYTHQRELDKLIFRTDLANESLNRWKRLLARLKHDPSDGLSTVLVRTCINRLLVHVERNADDEPVRLWCTADINVPELLKLNTAIMPWDLIPEPWSRAATVELKDIPKPAKAKAKAKQKKKTV

SEQ ID NO: 12535 - protein, 568 aa, Unknown
  Description of Unknown: Integrase A1103 sequence
  IPR006119,PTHR30461:SF3,PF00239,cd00338, PF07508,G3DSA:3.40.50.1390,SM00857,IPR038109, PS51737,IPR036162,PTHR30461,G3DSA:1.10.10.2600, Coil,SSF53041,IPR011109
MLVAIYARHSTDKQDTSSADQVARCIQFCADRGWTVSHIFADEALSGATMSHRENAKALVAAALAGEFEKVLSEDLSRLSRSQSDIAALYEKLRFMGIDIETIADGTINELHIGLKGTMNALYLRDLADKTRRGLRAITLRGKIPGGLCYGYRTKHRLDEKGELVRGEREIHPGEAEVIRRIYSEYHDGAILSEICEGLNDDGIASPRGGTWSISALVGTASRQTGVLRHTLYKGWITWNRQEYRVNPETGKRNCVVRPQSEWLRIPVPELAIVDEDLFDAVQRMIEDRSSMRHIRAADAKARSRERAMERQRKARSLQMKTGQTGSWFFTRRLRCAETGHPLTAAPPGYYGSRRTALWMIPRETIIVQGLEALNTVDLDTIRTFQETLSPDRQRHESAIERLQQQIDQATDEVKALLSDLGNRTNRPVIRSFLDDKEKQITNARLQLYTHQRELDKLIFRTDLANESLNRWKRLLARLKHDPSDGLSTVLVRTCINRLLVHVERNADDEPVRLWCTADINVPELLKLNTAIMPWDLIPEPWSRAATVELKDIPKPAKAKAKQKKKTV

SEQ ID NO: 12536 - protein, 567 aa, Unknown
  Description of Unknown: Integrase A1104 sequence
  IPR006119,PTHR30461:SF3,cd00338,PF07508,PS51736, G3DSA:3.40.50.1390,SM00857,IPR038109,IPR025827,PS51737, IPR036162,PF13408,PTHR30461,G3DSA:1.10.10.2600,SSF53041, Coil,PF00239,IPR011109
MKVAIYARYSSDNQRDASIADQLRMCRLHAEKQGWHVVEEYTDHAISGASLIRPGIQALMTDAMAGRFDVILSEAMDRLSRDQEDIAGIFKRMSYADVKMFTLSEGEVSHLHVGLKGTMNALFLKDLADKTRRGQRGRVEAGKSGGGNSYGYDVVKKLDANGEPIRGDRTINENQAAVVRRIFHDYAAGKSAKTIAFALNKDGIPSPSGGDWGFSTINGNPKRGNGILNNEMYVGKIVWNRQRFVKDPNTGKRQARPNPESEWVIQETPELRILDDDLWNAVKARQEKNKLTRDDNGSTDVRTVNHRRRPKYLFSGLTKCSCCGGGYSAISATLIGCSTARNKGTCDNRVNIRRDELESRVLNALRTRLVDPELFAHFCEVFTQEMNRLRMEGRVGIASAEAEIAKIDRELETLLNLILKGGAADALNAKMVSLEKRKKELELFLAEADEPPPLLHPSMALQYRKRIQQLYESLQDEEEGKRVEAADTIRSLVDQIVLTPVEGKVEIDVQGDLAGILTISTQTKNPAGERGGSQVKMVAGAGSNLHLLPEQVKMVAGTGFEPVTFRL

SEQ ID NO: 12537 - protein, 566 aa, Unknown
  Description of Unknown: Integrase A1105 sequence
  IPR006119,PTHR30461:SF3,PF00239,cd00338,PF07508, PS51736,G3DSA:3.40.50.1390,SM00857,IPR038109,PS51737, IPR025827,IPR036162,PF13408,PTHR30461,G3DSA:1.10.10.2600, Coil,SSF53041,IPR011109
MQEKRVIVIEPTQVIHEDINGLPTLKPKLKVCAYARVSTDSEDQLHSVEAQKSVYTQKIQENEDWDFIGLYADEGLSGTSIQKRPQFLQMIEDAKAGKIDLILTKSLSRFARNTVDTLTIIRELREINVDVFFEKENIYSSDTKVDFMLTIFSSIAQEEARNISENVKWGFRKRFKEGKVHINTKRFLGYDKDDDGNIVINEEQAKTVRIIYDMYISGSSLKEIVLFLTENELQNGRGEIFWTPATVSAILTNEKYCGDAVLQKRVTIDYLTHKSVKNDGHAPKYYIMNNHEPIVSRTKFELVQELKKKRGRKRKQSNYGNIYPLSGIVFCGECGAVMNRSYYNYGKATERVVLTCRKNNKEHICSNKPIDNDTLEKAIVKSIKELELSKDTFIDETLEIVRSCLSSSELETEISDLKKQITKTEKSIKDIIDLNVNSIADNTEFYKSIYNEKKAQLIDLKAQLNNKKSSLVNGHLHEERIQEMKEFLDGNIGLNKNILMGTYKFIIALSPSEVLLLISDTPMTKKSIKNELDVYKAMPSIYTDKVKSMNEKYDITYHVVDLREQE

SEQ ID NO: 12538 - protein, 564 aa, Unknown
  Description of Unknown: Integrase A1106 sequence
  IPR006119,PTHR30461:SF3,cd00338,PF07508,G3DSA:3.40.50.1390, SM00857,IPR038109,IPR025827,SSF53041,IPR036162, PF13408,PTHR30461,G3DSA:1.10.10.2600,mobidb-lite,PS51737, PF00239,IPR011109
MSLPSHGFTILRNAPDSARGATARSARRAAGAAEPMPTGSGRQLAVLYARYSSAKQNPMSCEDQLALCRETAANLNFEIAAEFFDAAASGRTLLRNRPGVCEMKARVAKGDVAVLIVEGIERIGRRARDIAEVSEWFESQNVDLVAANGGRIPWKLVPFHGAIAEFQSRETADKTRRGQVGTTRRGRVSAGLAYGYRVAPGAAEFNRVIDPAQAEVVRRIFEDYAAGLSPRQIVSTLNAEGIPSPTGMAWNDSTLRGNAQTRDGILRNEAYVGTLVYGRNRFTRDPDSGNRLSRPGEANSIVYVDRPELQIIPEDLWNRVQERLEKAYKLRVAQKRQLNETHRARHLLTGILRCGCCGGSITIVNGERYGCYNRKSKGLSVCGNRRTILRPKLEEAVLARIRAGLLTPDLARHFAAEVRRLWEEQSAGQTNAPARLKTDLARVKRSIENLINRLEGDDPGPHILERLRDREAEAARLTTELAALEAPAKNRQPPSAEELVAAYRGHVDRMESLLRDPAMIVEANDLLRHMLGHVSVHPDADRPRGFRIEITGDLLTFLLPSASK

SEQ ID NO: 12539 - protein, 564 aa, Unknown
  Description of Unknown: Integrase A1107 sequence
  IPR006119,PTHR30461:SF3,PF00239,cd00338,PF07508, PS51736,G3DSA:3.40.50.1390,IPR038109,SM00857,IPR011109, IPR025827,PS51737,PF13408,PTHR30461,G3DSA:1.10.10.2600, Coil,SSF53041,IPR036162
MRRAAVYARFSTELQNEKSTEDQIALCRAYAARNGLAIVAVYEDKARSGSSILGRDALMRLMEAAGQNAFDIVVVEALDRLSRDMADLAGLHKRLSFLDIEIQAVHDGIADAVLIGIRGLVGQMQREDGAKKVRRGMAGVVRDGRHAGGRAYGYRPVFGRPGELEIVEQEAEVVRRIFAAYAAGRTPRDLAGDLNRDGIAPPRGIHWNGSTINGNAQRGVGLLFNELYVGRIVWNKVRMLKNPDTGKRVSRPNPKDQWQTKEVAHLRIIEDETWHKAQARKAVRVNATSHVKRRPAHLLSGLLRCGVCGSGLSVHDRDKTGKTRIRCSAVRESGSCSNRRIIYLPEIEKAVLDGMRDQLKAPDLIEAYIRRYNQERRELSAQANAMRTALQGKRDRIEGERQRTIDLVIRSVIAEEDAKQRIAELKTQLSEVEAQLSGLDEPPSPVALHPATLQRYIETVDGLSKALADHATAADDRGPLIQNLRGLVHSVTVHPKRAREGFEIEVKGKLAALIGGAAFPTARYTEKPTGLGSRFNAAVTYDSGLEVVAGEGYRQFTAATEFVC

SEQ ID NO: 12540 - protein, 564 aa, Unknown
  Description of Unknown: Integrase A1108 sequence
  IPR006119,PTHR30461:SF3,cd00338,PF07508,PS51736, G3DSA:3.40.50.1390,IPR038109,SM00857,IPR025827,IPR036162, PF13408,PTHR30461,G3DSA:1.10.10.2600,SSF53041,PS51737, PF00239,IPR011109
MPRVALYARYSDDKQSPASIDDQFLICREQAAREGWRIVANYKDAAISGASVILRSGIQSLLQDAQMGRFDILLAEALDRVSRDQADVATLYKNLQFAGVKIVTLAEGEVSELHVGLKGTMNALFLKDLAKKTHRGLRGRVEKGKSGGGLCFGYDVVRRFSSEGEPVHGERSINAAEAEVIRQVFRQFANGLSPHAIACRLNDSGISAPTGKLWTSTTIRGHAKRGTGLLNNELYIGKLVWNRLRYLKNPQTGKRVSRINPKSEWIVTEVPDLRIVDEELWQAVKARQENIAIQYADVIEATRSAHTALNRTHRPKSLLSGLVYCGCCGGPYSLRGQGRFACSNHVDTKSCSNGHSITRDKLEARVLDGLRDRMMTPEVAAEAIRTYVEESNRINHQRRASEVADRTDLQKVLKAIKGLVTLAKEGKGTRALVDELLELEAQEDAIRARLAATPADVPDIHPNISEIYRRKVDRLTHALSQPEECQEAADALRALIERIDLTPGAKRGEVNAVLYGEFGRILEWIEQRRLAENAQSPGALAPGPCGMSVSVVAGVGFEPTTFRL

SEQ ID NO: 12541 - protein, 558 aa, Unknown
  Description of Unknown: Integrase A1109 sequence
  IPR006119,PTHR30461:SF3,PF00239,cd00338,PF07508, PS51736,G3DSA:3.40.50.1390,IPR038109,SM00857,IPR011109, PS51737,IPR025827,PF13408,PTHR30461,G3DSA:1.10.10.2600, Coil,SSF53041,IPR036162
MLKEKIKVYLYTRVSTSIQIEGYSLEAQKSRMKAFAIYNDYEIVGEYEDAGKSGKSIEGRKQFNRMMEDIKSGKDGVSFVLVFKLSRFARNAADVLSTLQIMQDYGVNLICVEDGIDSSKDAGKLMISVLSAVAEIERENIRIQTMEGRIQKAREGKWNGGFAPYGYKLEDGKLFINEEEAVAIRTIFDQYVNTTIGANGLSKYLENHGIRKIPRQNGKNPLFDAGLIRKILKNPVYNGKIAFGRRTLEKVHGTRNEYKQVEQDEYLISEGIHEAIVSDEVWQAAQVKLKSQAKKYEHVNKGKDTRTHLLSGIVKCPICGVGMFGNKCTKKKKDGTKYKDFYYYGCKHRQMIRGHKCTFSKQIREELLDDAVAEVIVKIVSNPKFASMMQEKINMKVDTSEIEKEIDNYQKELRKSHSTKFKLIEEIDNLDVEDKHYKRRKQDLDDRLYRMYDKIDELESSLIDAKAKKQTIEAEKLTGDNIYKVLIYFDKLYKVMNDVERRQLITALISEIQVYEEKQPNGQWLKSITFKLPIIDDDLNISLDNDEQVEAIALIQKM

SEQ ID NO: 12542 - protein, 558 aa, Unknown
  Description of Unknown: Integrase A1110 sequence
  PTHR30461:SF3,G3DSA:3.40.50.1390,SM00857,SSF53041,IPR006118, IPR011109,PF07508,PS00397,IPR036162,cd00338, PS51736,PF13408,mobidb-lite,Coil,IPR006119, IPR025827,PTHR30461,PS51737,PF00239
MRTPHLRAVSAPQTLQVALYARVSTDQQAEHHTIDSQLAELTARAEQDGHDLRDDLRFIDNGHSGASLIRPALEHLRDLVALSAIDLIYVHAPDRLARSYAHQVLLIEEFAHAGTQVVFLNHPIGTTPEDSLLLQLQGMFAEYERAKVLERSRRGKRHRAQTGAVSVLSRAPFGYRYITREAGGGDARYEIDEEAARIVRQIFTWVGHERLTLAGVCRRLHDSGLPSPTGRRHWSRAMIHSMLLNPAYAGQALYGRRQSVPWRPPLHPPRGHDGLPRRPWRQVLATPERHISIAVPAIVGEELFASVAEQLEENRRRSRERLAGVQYLLRGLLVCQKCGYGFTGHHHRGQWRYYRCCGTDRSRFHGAFRCDARLVATELLDEAVWTEVCRLLDDPARVIAEYQRRLDAVQATPHRLELDALGRQRAKARRAIERLIDSYTEGLIEKPEFEPRLAALRRRTARLEAEAKAHQEADEQVRSLHLVIGKLDLFAALVHDRLAGADWTTRRDIICTLVKRIEVADDVVRVIFRVDPGVSGPSEAGRTLHHCPTRPDPAPDVA

SEQ ID NO: 12543 - protein, 552 aa, Unknown
  Description of Unknown: Integrase A1111 sequence
  IPR006119,PTHR30461:SF3,PF00239,cd00338,PF07508, PS51736,G3DSA:3.40.50.1390,SM00857,IPR038109,IPR025827, Coil,IPR036162,PTHR30461,PF13408,G3DSA:1.10.10.2600, PS51737,SSF53041,IPR011109
MKVALYARYSSDNQRDASIEDQLRLCRLHAEKQGWTVVDSYTDRAISGASLLRPGIQELISDAMRGKFVVVLAEAMDRLSRDQEDIAGLFKRMAFGGVRIVTLSEGDVTHLHVGLKGTMNALFLKDLADKTRRGLRGRVADGKSGGGLCFGYDVVKQFAANGEPIRGDRTINEAEAAVVRRIFADYIAGKSSRQIAFELNKEGVPGPQDAEWGPSTIHGNPKRGVGILNNELYVGRLVWNRLRYLKDPDTGKRVSRLNPESEWVIQEVPEMRIIDQKVWNAVKARQKSLAYETSEPGENPLNERRRPKHLFAGLVKCGCCGGGYTMISKDLLGCATSRNKGTCENRLNIRRDALEASVLSGLRTHLMEPQLFKEFCDEFTREVNRLRIERSADIISQRKELERVQRDLDRAIQAILDGVPGGQLKDKIGSLEARKAELTGLLANAEEPPPLLHPNMAEIYRQRVAALYESLLSADGTAEAAELFRTLVDQVTLVPNEAELEIVLRGDLAAILRFAANKKNPDFLAEAGVLGALLSQESLVAGIGFEPMTFRL

SEQ ID NO: 12544 - protein, 550 aa, Unknown
  Description of Unknown: Integrase A1112 sequence
  IPR006119,PTHR30461:SF3,cd00338,PF07508,G3DSA:3.40.50.1390, SM00857,IPR011109,PS51737,PTHR30461,SSF53041, Coil,PF00239,IPR036162
MLCYSYVRFSTPDQAKGDSYRRQMEFASNYCKLHNLTLVEDLSFKDLGVSAYKGNNLKNGALGKFLELVVSGQIPCGSTLIIESFDRLSRQTAIKAQAVFFEIISAGITIVTAMDNRSYNLQSVADNPFDLMYSLMIMIRANEESETKSKRVKEAIKSKIDNKKIIPSKLPYWIKHNKNEDILELIPERAQTISYIIERYLSGFGINKLTRHLNETIPPFAGKSWYPLYLQKLLRSVSLYGERQFNMNDTLYIMDDYYPAIIDKSKFAVIQENLDSRAPTRGGKIPSAITGIRKVYCGYCQGVLVSQSTKRNGKIVDGLRRARCGTNNNAGSCITSSFRISIVESAIAEYCSQHFDLSLLAPESNSSKLDLAKYRLELKQLDTIIANYVKFISDGNISPAIISALDETEKNKKNLQQKIQKAELNTLANSKSEIAAKWKTIKTNLSVYDEENILKLRELIRGSIKRILVFQYGPWANTGPITTSSGKIIQPYKGNFSIQITFNNGVRKTLELGENVKDQEVDTINRTITENGNTYTPDEYILMIQKTLTK

SEQ ID NO: 12545 - protein, 550 aa, Unknown
  Description of Unknown: Integrase A1113 sequence
  IPR006119,cd03768,PS51736,G3DSA:3.40.50.1390, SM00857,IPR025296,PTHR30461:SF2,PF13700, SSF53041,PTHR30461,mobidb-lite,PF00239, IPR036162
MPVEFLTDEQAAAYGTFGEVPTRPELERFFFLDDDDRDLIALRRSDGHRLGMALQICTVRYIGTFLGDDPLAVPWEVVDYLAGQLGIEDASCVKSYAERRMTPYNHAQEIRERFGYHDYGDRKWSREFRTFLYGRAWTHAEGPVALFNHAVTWLRRHRVLLPGVSVLARQVSEARTVAERRLYESVAKATHKADRTLAPALVGLLERPEGKRVSELERLRMTDPQTAQASDADDVERHPCPRCHAQPGSPCRSRSGAVAGTYHTGRFTKVPRLAKLLRVPTPADRGPGQPWRPGTPIPAPVDPDTPSTDIRIGYARCSTLGQELDSQLDALAAKNIPRDKIFAEKISTRVRVRPKFEAALAAAREIKAHAPHCRVIFTVYEMKRLGRDAAELTALADHLAAHGLVLEMLAGPLAGIYDPTGHGRLLFAFFAAMAETERENIRESTLEGLDAAARKGKHGGRPPVITDDMLHTVLRRRANGETVEQIQPDLIIPTGRRKGQNPSLSSIYRALAEHEKQQTYPDAVAQAHADFAALQSAGSIPGQMAGSMVS

SEQ ID NO: 12546 - protein, 550 aa, Unknown
  Description of Unknown: Integrase A1114 sequence
  IPR006119,PTHR30461:SF3,PF00239,cd00338,PF07508, PS51736,G3DSA:3.40.50.1390,SM00857,IPR038109,PS51737, IPR036162,PTHR30461,G3DSA:1.10.10.2600,Coil,SSF53041, IPR011109
MNAVEIIDFNKLESKDRLKNVCAYARVSTKKELQETSLDLQVETYTKMIMDNPKWNFVGVYSDVGKSGTDTKYREQFNQMIELAIAGGIDLIITKSISRFARNTIDCLNIIQELKRHNIEVWFEKENISSFDPKVELTITIYASVAEEESKINSENTKWGVKKRFEDGIVPMVTSRVLGYKRDQNGNIAVDEDEAKIVRKVFNLYSKGYSQGYIAEELNKEGHITKHYKLAYSSGTIRGILNNEKYTGNALLQKSIRRRVGDKTGEKNQQTHPKYYVENSHPKIITKSLWDKVQSIKSQRMMKYNHTTDILELKKRAKNRSIYSGFVECFVCGKNYHYKVNNKREKWATEILICSSNREKKTCENDSLFVETFDEQLLSQINYVIKNKYEFLNKLNEVLTSHPEIRELNIEINTLEDKLDEIHHQIKSLALLEGDFETLVLDQLKTQKSNIEMKLTANKNKLLTSHNIESKIKHYKLLLKEFKKPIDDLSVFPFQDLFDKVLVNERNDIEFILNPFNTISSKSIYSFPEIITPYKIRKTLFETTSKISCF

SEQ ID NO: 12547 - protein, 548 aa, Unknown
  Description of Unknown: Integrase A1115 sequence
  PTHR30461:SF3,G3DSA:3.40.50.1390,SM00857,SSF53041,IPR006118, IPR011109,PF07508,IPR038109,PS00397,G3DSA:1.10.10.2600, IPR036162,cd00338,PS51736,PF13408,Coil, IPR006119,IPR025827,PTHR30461,PS51737,PF00239
MNIHSPTTTARAALYLRVSTARQAEHDISIPDQKRQGEAYCEQRGYQLVETYVEPGATATNDKRPEFQRMIEAGTSKPAPFDIVVVHSFSRFFRDHFEMEFYVRKLAKNGVKLVSITQEMGDDPMHQMMRQIMALFDEYQSKENAKHVLRAMNENARQGFWNGARPPIGYRIVAAEQRGSKIKKKLEIDPLHADTVRLIYRLFLEGDGTSGAMGVKAIATYLNERRFFTRDGGRWGLAQIHAILTRTTYIGEHRFNTRSHKDREKKPESEVAIMAVPPLIERETFDAVQARLKSRNPMVTPARVSSGPTLLTGICFCAKCGGAMTLRTGQGSTGATYRYYTCSTKARQGKTGCKGRTIPMDKLDHTVADYIGDRLLLPKRLETVLASVIDRRQERTERRREHLAELQRRITEADQRLGRLFDAIEAGMVDKDDAMAKERMVSLKALRDQAAADAERTQLALDSSGNQGVTPDMLKGFARKARERIRLNDGGYRRDHLRALAQRVEVADDEVRIMGSKSELLRTLVAASSVETAAFGVHSSVLKWRAIC

SEQ ID NO: 12548 - protein, 545 aa, Unknown
  Description of Unknown: Integrase A1116 sequence
  IPR006119,PTHR30461:SF3,cd00338,PF07508,PS51736, G3DSA:3.40.50.1390,SM00857,IPR038109,IPR011109,PS51737, PTHR30461,G3DSA:1.10.10.2600,SSF53041,Coil,PF00239, IPR036162
MELKNIVNSYNITNILGYLRRSRQDMEREKRTGEDTLTEQKELMNKILTAIEIPYELKMEIGSGESIDGRPVFKECLKDLEEGKYQAIAVKEITRLSRGSYSDAGQIVNLLQSKRLIIITPYKVYDPRNPVDMRQIRFELFMAREEFEMTRERMTGAKYTYAAQGKWISGLAPYGYQLNKKTSKLDPVEDEAKVVQLIFKIFLNGLNGKDYSYTAIASHLTNLQIPTPSGKKRWNQYTIKAILQNEVYIGTVKYKVREKTKDGKRTIRPEKEQIVVQDAHAPIIDKEQFQQSQVKIANKVPLLPNKDEFELSELAGVCTCSKCGEPLSKYESKRIRKNKDGTESVYHVKSLTCKKNKCTYVRYNDVENAILDYLSSLNDLNDSTLTKHINSMLSKYEDDNSNMKTKKQMSEHLSQKEKELKNKENFIFDKYESGIYSDELFLKRKAALDEEFKELQNAKNELNGLQDTQSEIDSNTVRNNINKIIDQYHIESSSEKKNELLRMVLKDVIVNMTQKRKGPIPAQFEITPILRFNFIFDLTATNNFH

SEQ ID NO: 12549 - protein, 545 aa, Unknown
  Description of Unknown: Integrase A1117 sequence
  IPR006119,PTHR30461:SF3,cd00338,PF07508,PS51736, G3DSA:3.40.50.1390,IPR038109,SM00857,IPR011109,IPR025827, PTHR30461,PF13408,G3DSA:1.10.10.2600,SSF53041,PS51737, PF00239,IPR036162
MSRPIEAASNVKIIPAMSSEELKQAKYRQTRVAAYCRVSTDHEEQANSYKVQIDYYTNLINSNSEWTMAGIYADEGISGTQTKNRKEFNKMIRKCRQKKIDLVLCKSISRFARNTVDCLEYIRELRLLGIGVIFEKENINTLAMNSEFIISLYGSFAQAESESISKNVSWGIEKSFKEGKVKYVMDKTLGYRMGEDGKPYIVEEEAEIVRRIYRMFLDGLSMQRIADIMQAEGAARRSGCTTWNRSNVNYILKNEKYAGDAILQKSYTIDCITHKRVKNNGEKNKYILHDCHPAIIDRDTYNRTQQELTRRCTIKQRSDKAVTAQGRYASKYALTDIMICGECGTPYRRVVWNSHGKKLPVWRCINRLDHGNRYCKHSPSLNEEHLQQAIIDAINTAYTHNTAFLQSMENNISIVLNDEDKNNTERVRIESRLAEIDKARDDLIHLVTSGSVGEDSLDKEFEALNDEESYLKTQLEAMKSQTEKRDEVRYSIMSAVEGIGEMENTMVDYDEVAVRKMIECIKVLSKTEILIIFKGGYECNAVVEK

SEQ ID NO: 12550 - protein, 545 aa, Unknown
  Description of Unknown: Integrase A1118 sequence
  IPR006119,PTHR30461:SF3,PF00239,cd00338,PF07508, PS51736,G3DSA:3.40.50.1390,SM00857,IPR038109,IPR025827, Coil,IPR036162,PTHR30461,PF13408,G3DSA:1.10.10.2600, PS51737,SSF53041,IPR011109
MPKNNDMASNVTMIPALSPAELKQSKYRQIRVAAYCRVSTDSEEQANSYQVQIEYYTNLINSNPEWTLAGIFADEGISGTQTKNRKQFNKMIRKCQQKKIDLVLCKSISRFARNTVDCLEYIRELRLLGIGVIFEKENINTMMMNSEFIISLYGSFAQAESESISKNVSWGIEKSFREGKVKYVLDKTLGYRMGEDGVPYIVEEEAEIVRRIYVMFLDGMSMQGIADQLQSEGIKRRSGSSTWNRANVNFILKNEKYAGDAILQKSYTIDCITHKRVKNNGEKNKYIVHDCHPAIIDRDTYNRVQQELAKRGAIKKRSAKARTELGQYSSKYALTDILICGECGTAYRRVTWTSHGHKRIVWRCISRLDHGSKYCKHSPSISEESLQNAIVKALNAVYSRNGDMLARMEQNILAVIGDNGDMQKQTAKIQKRLEEIEDERDSLVRQITSGAVDEDALDKNFESLNDEEAYLKTQLDDMQTKAKLSDEKKYALMAVGEELRRHDCHLAEYDDVTVRKVIEVIRVLSKNEVQIIFKDGHEMNVAVEK

SEQ ID NO: 12551 - protein, 544 aa, Unknown
  Description of Unknown: Integrase A1119 sequence
  IPR006119,PTHR30461:SF3,cd00338,PF07508,PS51736, G3DSA:3.40.50.1390,IPR038109,SM00857,PS51737,IPR025827, IPR036162,PTHR30461,PF13408,G3DSA:1.10.10.2600,SSF53041, Coil,PF00239,IPR011109
MTRAVIYARFSTELQSEKSTEDQIALCRAYAARIGLDVIGSYEDKARSGASIFGRDGLMRLMDAARDRAFEVVIVEALDRLSRDMEDLAGIHKRLSFLGVEIHAVHDGTADAILVGLRGLVGQLQREDGAKKVRRGMAGVIREGRHAGGRAYGYCPVPGRRGELEIVEEEAEIVRRIFAAYAAGRPPREIAGELNRDRIAPPRGTRWNASTINGNARRGNGLIFNELYAGRIVWNKVRMVKNPDTGKRISRPNPRDQWQEIAAPHLRIVDEGTWKCAQALKAEKARLSTNVKRRPAHLLSGLLRCGCCGSGMSVHDRDKTGKTRIRCSAVRENGSCSNRRILYLTDVEEAVLKGMTEELKDTRLIETYVRAYNEERKRLAATAISRRTRIERRRDRLEAERQRAIDMLIKGVLREEEGRARLDELRGQVLEAERELSQVGETPQIIALHPATLDSYIATVDRLAAVLTEHAAAEDDRGSLVSTFRALVHGVTVHPKAPREGFQVEVKGKLAALIGGAAFPQAKYSGGRVVAEERLEPPRGGRCV

SEQ ID NO: 12552 - protein, 543 aa, Unknown
  Description of Unknown: Integrase A1120 sequence
  PTHR30461:SF3,G3DSA:3.40.50.1390,SM00857,SSF53041,IPR006118, IPR011109,PF07508,IPR038109,PS00397,G3DSA:1.10.10.2600, IPR036162,cd00338,PS51736,PF13408,Coil, IPR006119,IPR025827,PTHR30461,PS51737,PF00239
MKAVIYARVSTQDQALGFSLATQKELCEKKARALGALEVEVVEDAYTGTELTRPSLDYVRQLVAAGKVDLVVVYDPDRLSRNLTDLLILCREFDKAGVRLEFVNFDWQKTPQGMLFLQMRGAFAEFEHALIKERTQRGKAKKAASGKIRCYAKPFGYGWDAEGDTLVINPQEAEIVKQMFEWLTDPLEPLTPWQITQKLGQVYPQGPRGKGWVHSSVVRMLKNPVYTGRLRRKDEQPDWKPVLVPAIIDQETFMRAQEMLARSKRFNPKTTRRRFLLQRLLVCGECGRRLTVVTHNNPQRAKYSYYTCPGRYPTKFDDQGRVGRCGLPPWRTEEIDKTVWDTIASIIKNPELFYQYITSEKLETASIPRRRLEEARKRLEQVQRVIERIDRAYFILEALPEEDYKRYRAEQEGELVRIEEDIKRLEAVINAQEQVQKGVEFLRQYAENLARSVDELNFFQKQNITRELVQRVKIYADGSLEIEGYFNLPFTGPGKNVPEHCEELTILTPQKNLKEPPCSSVLTCTHREACLYTYNFLIPAKTK

SEQ ID NO: 12553 - protein, 542 aa, Unknown
  Description of Unknown: Integrase A1121 sequence
  IPR006119,PTHR30461:SF3,PF00239,cd00338,PF07508, PS51736,G3DSA:3.40.50.1390,IPR038109,SM00857,IPR025827, Coil,IPR036162,PF13408,PTHR30461,G3DSA:1.10.10.2600, PS51737,SSF53041,IPR011109
MKKITAIAAKNKVDIHETALRKTRVCAYCRVSTDSLKQAESLETQSNYYEDYIKGNREWEFSGIFADQGISGTATANRAEFNKMIRACQLGKIDLIITKSISRFARNTADCLETVRYLKSLNVGVYFQRENINTKGADSELILSVLSSIAQDESRNISENTKWAFQKKFKQGKIQVNVKRFLGYDKNDEGKLVINPKEAEIVKRIYREYLNGSSLNEIKRGLERDKIKTVTDKEGWQGSTIKGILSNEKYYGNAVLQKTITVDYLTHKRKKNQGEAPKYEVKGSHDAIISKEEFLRVQALINKRALEFGNVPEGRNKYTQRYAFSGKIICGNCGAVFKRRTWNSKAKSKQIVWQCSTYINEGKSKCDMKAIDDATLKAVFVRMFNKLYESKEDFFKTFTDNIDKVLKQSAKCEDVFKIDREIENINEEIKSLVRQQIKGELQEKVFDTKYKILNERLQELKNSKDTVAFDNGKYAETLKRSKEIRRVIEMRETTLTEFDDNIFENLIEKIVALTPTHLEFHLKNGMKVEEEFIKKRGVNGLQ

SEQ ID NO: 12554 - protein, 541 aa, Unknown
  Description of Unknown: Integrase A1122 sequence
  IPR006119,PTHR30461:SF3,cd00338,PF07508,PS51736, G3DSA:3.40.50.1390,IPR038109,SM00857,IPR011109,IPR025827, PS51737,PF13408,PTHR30461,G3DSA:1.10.10.2600,SSF53041, Coil,PF00239,IPR036162
MNIAIYSRKSVFKEAGDSVQNQIELCDMYIKRNFFNNEEIKIEIFEDDGFSAKNTNRPEFKRMIKKIENGEIDKLICYKLDRISRSVADFSTVLDLLQKNNCDFISISEQFDTSSPIGRAMIYIASIFAQLERESIAERVKDSMMQMAKRGMFLGGKPSLGFNVKRIKYMNEEMREKEASVLVPNLKELELVSTIYKTYLECGSVTGLEKILFDNGIKNRNNSYYKTSVLVDILRNPVYVKSNNKVHTYLCDMGMQVCGSPNGNGYLIYNKSNVNGKKKDKSEWICAISKNKGYIEPQLWLEVQKLLDKNKDKKIKRLGTGNNVSLLAGLLKCKVCGANMLPRANGGQYKQTYYICTNKKKRGEEKCTCKNIRVDYVDNAVLDSIKIYSKEVLSKSLDSYIKDNINNNSDDYIKSNIEDQIKEKEIFMNSLIEKLAVSTNERVTGILMDQIDNADTEIRKLKIKLEDNLNEEKENKSIIENIRYFVNNLSSFSKNIEIIDSIQFKRECLSKIIDKVVWDSENFKAIVSYSIDIENNESKKK

SEQ ID NO: 12555 - protein, 540 aa, Unknown
  Description of Unknown: Integrase A1123 sequence
  IPR006119,PTHR30461:SF3,cd03768,PF07508,PS51736, G3DSA:3.40.50.1390,SM00857,IPR038109,IPR025827,Coil, IPR036162,PTHR30461,PF13408,G3DSA:1.10.10.2600,SSF53041, PS51737,PF00239,IPR011109
MKVAIYSRKSMFTGKGDSVENQVQMCKEYAQRNLNIDEFIVYEDEGFSGGNTNRPKFQELILDVKKKKFDILICYRLDRISRNVADFSSTLELLQDNNISFVSIKEQFDTSTPIGRAMVYIASVFAQLERETIAERIRDNMLELSKTGRWLGGQTPLGFDSEKITYFDNDMKERSFNKLCPVDKELNIVKLIYNKYLEAGSIHLTLKYLLSNNIKGKNGGDFASTSINDILRNPVYVQSNDLVFEYLKSKGINVSGNPNGNGILIYNKRNSKFKNKSMELWIAAVSNHTGIIPANRWLAVQHFLDKNSKKENPRKGTSRKALLSGILKCAKCGAPMRVSYGKARKDGTRNYYYTCTMKAHSGKTRCDNPNVRGDHLENEVVKYLKTLNTDFIIQELTAYKKEVAATETTSILKNIKDDIKIKKNDMNTLLNQLSKTESSVASEFILKKIDELGKEIKDLEAKAQNADNEKKENDLSILNIDIVLDSLKEFNVFFDNINDLKNDDYTIRRKRYLLEKIIDKITFNGDTKEISIDLWGSKKK

SEQ ID NO: 12556 - protein, 539 aa, Unknown
  Description of Unknown: Integrase A1124 sequence
  IPR006119,cd03768,PF00239,PS51736,G3DSA:3.40.50.1390, SM00857,IPR025827,PF13408,PS00397,PTHR30461, Coil,SSF53041,IPR006118,IPR036162
MAFNMRTVGYARVSTEEQGRRGISLETQKSRLKRNGATYIYQDIESGQKSTRPGFLQMIEDAKRGSVEEIIICDVTRLGRDGVVLASTVYELKARGVKWRFLDDNIDLDDPGGTILFFLKAGMSQSEVEKTKHRVKTSFKKLKEKGLPIGTLPYGYILDSLTRKAVIDEIPLLCLISDRPSNWDTPDSKEFYQELYSSNTEYYNFHTHEYINWKSLKNDTRLKSITIADLCRESIDTYIKVKCFRQVCNYFKDKYNLSGIRKGSMKETPRRYMFPFNNLTSFSRWIRNPVLYGHIHYKKEGNKRRDLLRGRIADFTTWAEEYEIKFDSHQRLISKEQEKMLYLISSPRQSLSSKPDKIHSKTDVLFSGLLFCPACKHHLTHRKSAGKSGFNYYFCRTTGCSNTNAIREDNLNKQVINEILNKTQSGQIEDHEKPSKPLEICRLEEEISELDKTLILHPNNQIFIKAKEDSLKKLSELENGYKCFDFYNKSAAEILNHPAMRNIGFLEFLSLEHRKIIYRNLIEFICIQNGKVDFISYNL

SEQ ID NO: 12557 - protein, 538 aa, Unknown
  Description of Unknown: Integrase A1125 sequence
  PTHR30461:SF3,G3DSA:3.40.50.1390,SM00857,SSF53041,IPR006118, IPR011109,PF07508,IPR038109,PS00397,G3DSA:1.10.10.2600,IPR036162 ,cd00338,PS51736,PF13408,Coil,IPR006119,IPR025827,PTHR30461, PS51737,PF00239
MRVALYARVSTQRQAQADGVAQQLDRLQAHAASQGWTVVAENIFRDDGYSGASLKRPGLERLRDRAALRHLDRVLITAPDRLARHYVHQVLLLEEITATGCQVEFLDRPMSQDPHDQLLLQIRGAVAEYERSLIAERMRRGRLRKLQAGLLLPWTRPPYGYRVDPDRPRDPAGVRCDEAEAAAVAEMFAWYGEEGRSLYGLAQKLLSDAIPPPRVKGRWNVTTLRGILTNPVYTGEVFAGRIQTAPRRLQAREEWIPVASIPTIVSQESFDRVQAKLAQNRQFARRNNTAHPYLLRALVSCGVCGLSCLGRCLPAGHRYYCCRGKLSPVNSHRDTPCPSRFIPASQVEALVWEDLRQLLTDPEAIRHALERAHGGHWLPQELRARRETLRRGQVSVAQQIERLTEVYLAGVVGLDEYRRRRGDLEQRQQALAAQEQQLAAQTERQADIARLGLSLEEFSRRIRQGLDQATWEQRRQLIEWLVTRVIVTNGEVEIRYVIPTSPAAQTGGICHLRSDYRVLLLQAEAVPACRYPLREDCP

SEQ ID NO: 12558 - protein, 536 aa, Unknown
  Description of Unknown: Integrase A1126 sequence
  IPR006119,PTHR30461:SF3,cd03768,PF07508,PS51736, G3DSA:3.40.50.1390,IPR038109,SM00857,IPR025827,Coil, IPR036162,PTHR30461,PF13408,G3DSA:1.10.10.2600,SSF53041, PS51737,PF00239,IPR011109
MIAAIYSRKSKFTGKGDSIENQIQMCQEYCTRLYGETMEFIIYEDEGFSGGNTNRPKFQELIKDASNKKFDVLICYRLDRISRNVADFSSTLELLQNYNVSFISIKEQFDTSTPMGKAMIYIASVFAQLERETIAERVRDNMLELAKSGRWLGGQTPLGFKSEEIIYFDQDFKERKMHKLTPVSDEMKTVRLIYDKYLELKSLSQVVKYLNQNFIKTKTGKDVWNKSGIQDILVNPVYVKADKNVILYLSDLGMTVVGNPGGKHGILTYNKKRGKAIYRDVEEWIAAIAKHEGVINAKDWLMVQKLLHENKEKAPRLGKTHNALLTGILKCAKCGSNMKVIHGRNKSGKVFYYKCTLKNSSGNTRCDNANVRTDDIEKILKEKLKEYSLNKGLLRKEVEEYKKELLSTKSYEFKNIDNIKKDIDNKKKQIENLVNQMSLSPVAAKYIIPQIENLNREIEDHQKKLIDVETSTNLISQADLSLEMIFKCLDKMQIIDELEDEEVKLIYNVMLDSVLWDGDTGNLTIKFWGDKKKLLL

SEQ ID NO: 12559 - protein, 534 aa, Unknown
  Description of Unknown: Integrase A1127 sequence
  IPR006119,PTHR30461:SF3,PF00239,cd00338,PF07508, G3DSA:3.40.50.1390,IPR038109,SM00857,IPR011109,IPR025827, Coil,PTHR30461,PF13408,G3DSA:1.10.10.2600,PS51737, SSF53041,IPR036162
MNTVYTLYRVSTKQQVDKTKDDIPMQREACHEFAEKMGWTIGKEFLEKGVSGFKVSASNRDAIQDLKAAALNKEFDILLVFMFDRIGRIDDETPFIVEWFVKQGIRVWSVQEGEQRFESHVDKLMNYIRFWQASGESEKTSMRIKTRMQQLKAEGSYTGGPVPFGYTLVNTGRLNKKGREVHDLAVDPVEADWVREIFSKTVNEGYGTFRCAELLNKNGVKTHKGSRFTSNSINRILRNRLLTGYVVSGDTESPHLKDLQIIDMTTFERAQKILEQRMKKNEETREIARKTQTQQLLSGIMVCGHCGGHLSTQKHIDRHTRQDGTEYVKVQPKYVCYHKSRGLCQCSGSTTYQVKRIDDAVCELIHDMFAGIKESPDEAVLKKNFDKEMTSYRAKITKLNREAEKQAQQLEKLESEVADSLMGNSRFSPDLLSKVIKSTEENIAETKTAIETLKSEMTGKKKAMESVKPMFEIFAGWAKEFDESTIEKKKMIISQLVSRIEVYKGYKIKVTLNMDYQEFCDNWDTLNSKSTINA

SEQ ID NO: 12560 - protein, 533 aa, Unknown
  Description of Unknown: Integrase A1128 sequence
  PTHR30461:SF3,G3DSA:3.40.50.1390,SM00857,cd03770,IPR025378, SSF53041,PF14287,IPR011109,PF07508,IPR038109, G3DSA:1.10.10.2600,IPR036162,PS51736,PF13408,Coil, IPR006119,IPR025827,PTHR30461,PS51737,PF00239
MLKQQANNKEKVALYSRLSRDDGLDKESNSIANQREMLKRYAKENKFYVYDEYIDDGFSGTTFNRPALNRMFEDIEAGKVNVVLVKDMSRLGRNNALFMYYVEEVFPDLDVRFIAINDMVDTAQDDNEIMPFKSVLNEYYARDISKKIRSSIRTTALTGGFTGAFAPYGYLVDPENKKKLIVDPETAPIVKRIFELSQQGTSTHQIARILCKDGILVPRAYRAKKKGILEQSKGFTFPTDWVGKNVKMILENQVYLGHMVSHKSQTKSFKNKKIVPVPKEDWIVVENTHEAIIDKETFEIVQKFISVKKQPNKTGKPNIFVGLVKCPDCGRNLAYSNPNGNEPRFRCRTYARNTELCTTHAISYKALYEIVQNDIKNHVNSMEELGDHFIKEMRELSETSGSQKIHQFNQELVSLEKRIDEIDSIFTKLIEQNALGKITDERFSKMSMNYETEQAEVVQSYRELKSKIKSEEEKVQGTDRFLETISKYKDVTELNRSMLCELIDSIYVYQAERIGKERTQKVEINYRFLAVSH

SEQ ID NO: 12561 - protein, 533 aa, Unknown
  Description of Unknown: Integrase A1129 sequence
  IPR006119,PTHR30461:SF3,PF00239,cd00338,PF07508, PS51736,G3DSA:3.40.50.1390,IPR038109,SM00857,IPR011109, IPR025827,PS51737,PTHR30461,PF13408,G3DSA:1.10.10.2600, Coil,SSF53041,IPR036162
MARVSVIPARQVAVINGVQREDKKRVCAYCRVSTDTEEQLTSYEAQVTYYESYIKGKPEYEFAGIFADEGISGTNTKHRVEFNKMIEAALAGKFDMIITKSISRFARNTLDCLKYVRLLKEKGVAVYFEKENIDTMDSKGEVLLTILSSLAQDESRNISENSRWGIVRRFQQGKVRVNHKRFLGYDKDENGELIVNEKQAEIVRRIYKEYLEGKGIRAIARGLEEDNVLTGAWGRKWHDSTIQKILRNEKYSGDALLQKTVTVDFLTHKRVKNKGEVQQYYVEDSHPPIISKETFQRVQEEIDRRANLVGYSEETKSRHTNKYAFSGKIVCGNCGSKFRRKRWGGNEKYKKYVWLCANHIDNGNEACNMQAVDEEKLKVAFIKSINKVIENRETFISNMMENINRVLESKEDSNDLKAINERLEELKVQMMNLVRLNVRNGLDSQIYDEEYQRLEEEMQQLKEKKTKFDNTDLMREKGLQKVKEIKKVLDGREDIIKKFDDELFSQMVEQVKVISLVEVEFVYKIGSVVKEIL

SEQ ID NO: 12562 - protein, 532 aa, Unknown
  Description of Unknown: Integrase A1130 sequence
  IPR006119,PTHR30461:SF3,cd00338,PF07508,PS51736, G3DSA:3.40.50.1390,IPR038109,SM00857,IPR025827,Coil, IPR036162,PTHR30461,PF13408,G3DSA:1.10.10.2600,SSF53041, PS51737,PF00239,IPR011109
MSNIKTAANVTLIPAKEQANSVFTGKKLKVAAYCRVSTDETEQMNSFGVQIAYYTDYIGSRPDWQMIGIFADEGISGTQTENRTQFNRMIELCRKGRIDLILCKSISRFARNTVDCLDFVRELKRLNVAVQFEKENINTLSVSSEFAITLYASFAQAESESISRNITWGIEKSFKEGNVRYQMRYTLGYRLVDGVPQIIEDEAVIVREIFSLFAGGMSLRKIAERLTSEGAARRNGSTVWNRDHVNSILKNEKYVGDAILQKYYTVDCLTHTCAKNNGQKPKYLVQNCHAPIIDRETWDRVQLELSRRSAMTKGNARGGRYRTEYALSELLVCGSCGCNYKRVLWKSGTGKRAVWRCKSTLDGGKARCDSPSLHEEALHSAIVRAINEQILDSSGFDRQSALSADTLESENADLERRIASVSARLGEIEVERNRLLADISAIPADVLGSKLKLLHTEEQELKSKLDELNSKRDSGRHDLYRIKAARNLTHGIEALGEFDNDLVRQVVEEITVKSADKVVVKFCGGEKVTVKV

SEQ ID NO: 12563 - protein, 530 aa, Unknown
  Description of Unknown: Integrase A1131 sequence
  IPR006119,PTHR30461:SF3,PF00239,cd00338,PF07508, cd18039,G3DSA:3.40.50.1390,IPR038109,IPR011109,SM00857, IPR025827,PS51737,PF13408,PTHR30461,G3DSA:1.10.10.2600, Coil,SSF53041,IPR036162
MIGGIYARSSLGQTKQGDTVKHQVQMIQEYAKRLEFNVSFDEKFIYPDDGESGYKTTLLQRPPMKQLLEDIDSGLIDIVFFKGISRFARDSGEAIQTSKRLIQKGVRVISIEENYDSDVSDPTFFQMYAVLAEAESRKTSIRVSLGNKQKSRNGLWAGSVPPFGYIKVKDITDKAKKEELISKGVHPQTLFPHPEKADIIRKIFDMYVNQGFGRKKIVNWVNSQGIKTQYGNKIGDITIKRILMNPAYIGVIVYGKTRYNYIDSDDGLRKIQKVINVDKEDWAICEDAHPPIIEREVFMKAQRLIKQKEKAFNKGRRFNNAKHPLTGLLKCSLCGAPMICQKRTNKKADGTKVTYRYYVCSTYHQKGRDVCPQANINADELEDYIHKQISQQIEKVKNDEYFLEGYSTYNPNEEINSQIKVIDREIEKNTNKSLTLLENKDLYDDQTFRDLNLKLKEEIVRLRKQKDELMDELKFAEEIMTKDDLKAKFDEFLELNLSDISRTREVFHEWINEVRVEDKKVIIDQKFKMI

SEQ ID NO: 12564 - protein, 529 aa, Unknown
  Description of Unknown: Integrase A1132 sequence
  IPR006119,PTHR30461:SF3,PF00239,cd00338,PF07508, PS51736,G3DSA:3.40.50.1390,IPR038109,SM00857,IPR011109, IPR025827,PS51737,PF13408,PTHR30461,G3DSA:1.10.10.2600, Coil,SSF53041,IPR036162
MLVIKSKVVEIIRACAYIRYSSDNQRDESLEAQIRAIKEFGKSNGYEVVKVYQDKAKSATTDKRPEFQQMIKDSGNDVFDAVIVHKLDRFSRNKYDSAQYKRKLKQNGVKLISVTENLDGSPESIILESVIEGMAEYYSKNLAREVMKGMRETAYQAKHTGGLPPLGYDVNSDKKYVINDREAESVRLIYEMYVTGYTQSQMVDELNARGFKTKVGAMFKSNSINSVLSNEKYTGVYVFNKSAKKDAFGKRNSHLQKDSSEIIRIEGGMPKIIEKELYDKAQEILRSRKKSKAVNKAKESYLLSGIIKCGECGYSMYGNRRKPKDKPLYVSYRCGCRKRTSSNVCNNKEIRKEYIEEYVLTELEARIFNDKAIPILVEGINENLRKQNKGDEDKKSVFQKELEEVEKQINNIVTAITNGFMQEEFKIKMEELKDRKIYLEGKLIELEANQSVTKVTEEDIRGLLSGFKEYVITKNIPECKNFIQNFVKEVIVYKTHVEVVFNVGLNLGEDNKYKFSSKSSIWSIRKKHN

SEQ ID NO: 12565 - protein, 529 aa, Unknown
  Description of Unknown: Integrase A1133 sequence
  IPR006119,PTHR30461:SF3,PF00239,cd00338,PF07508, PS51736,G3DSA:3.40.50.1390,SM00857,IPR038109,PS51737, IPR025827,IPR036162,PTHR30461,PF13408,G3DSA:1.10.10.2600, Coil,SSF53041,IPR011109
MRTARAVRMIPATAKLHEPVANNAIGQKRVAAYARVSTDNDEQLSSYEAQVDYYTRHIKSNPEWDFVEVYADEGISATTTKRRDGFNRMIADALDGKIDLIITKSISRFARNTVDTLTAVRQLKEKGVEVRFEKENICTMDSKGELLITIMSSLAQEESRSLSENVTWGQRKRFADGKVSLPYKQFLGYEKGDDGLPKIVKKEAEVVRLIYKLYIEGKTMAGIARHLIEKGIPTPGGKKKWQSSTVMSILKNEKYKGDAILQKTFTVDFLTKKKKVNEGEVPQYYVENSHPAIITPEAFDLVQSEIKKRREAKGYKTGGSCFSGKIICGECGSFYGSKVWHSTTKYRRTIWQCNHKFKNDRRCKTPHLYEDKIKEVFVEAFNEIINNKDEFLQCYEDMTKALTDTSTLDREIAKSQEELEIVAELLRKCVQENANSVLNQEEYQQRYSDLYQRYDNEQKRIAEINDKRREHNGKRESIMEFICRLEQSKTLLTEFDEGLWNATVEAIKVHSENNVSLIFKDGTELELNI

SEQ ID NO: 12566 - protein, 527 aa, Unknown
  Description of Unknown: Integrase A1134 sequence
  IPR006119,PTHR30461:SF3,PF00239,cd00338,PF07508, PS51736,G3DSA:3.40.50.1390,IPR038109,SM00857,IPR025827, Coil,IPR036162,PF13408,PTHR30461,G3DSA:1.10.10.2600, PS51737,SSF53041,IPR011109
MPKVTVIPSTINPITQMPIHANHVKKVAAYARVSTNSDEQYTSYEAQVNFYKKYIQEKPDWEYTEVYADEGLSGTTTKKRTEFNRMIKDALNGKINLIITKSISRFARNTLDTISFVRKLKAKGIEVFFEKENLWTLDPKSELILTIMASIAQEESRSISQNVTWGKRVGFQEGKVSFAYKRFLGYKKEDDKIVIDEDQAVIVRDIYRMFLVEGKTPTGIAKYLKSQHIKTPSGKSTKWQTNVVTSILTNEKYKGDALLQKTYTVNYLDHSKAINTGQIPQYYVENNHPAIIDRDTWEQVQIEIERRNKLGAHYSSSDVFASKLICEDCGSFYGKKKWHTNTKYERFVYQCNSKFHKGKDKCKTPHLNEDDIKRQFIKAYNLMAKDKQRVIKDTKDIIKLLTDTTKIDSEITKIDDEMVVITELVNKLVMENSKTDTDIDAYNKKYEKLSARYDKLKDYLDGLITEKESKLGQKKTMQTFINNLIESEDELVDWNERIWMLMVESAVVHRNQSITFKFHSGVTIKTS

SEQ ID NO: 12567 - protein, 526 aa, Unknown
  Description of Unknown: Integrase A1135 sequence
  IPR006119,cd00569,cd03768,PS51736,G3DSA:3.40.50.1390, SM00857,IPR009057,SSF46689,SSF53041,PTHR30461, PS00397,mobidb-lite,PF00239,IPR006118,IPR036162
MDTERRHGPRQLAAAAIRGRRPCPLLDHRKRLQRARARRMDHRGRGRWPERPPGAHRVRGGRAPRPHPRPGRRPCVHQRPAVEPAVARLGHRGPSDLGADRAPIPERAQSRDDRTRHMAHHPSPPRGPRHRNRAHPHHRGRGRHAGERGRAQRVRVRHGPHPPFGLRGHGRGTGQRPLHPPAAGRRGRRHRPLHRAIRNPHRPPPGQRSEHLRRHGLAGHSGHPRPHRRITRHPGPAHPARERRPPRHRRPNPQGPGPRPGSTPQGPPGLDQGPHRRALRRRSSHRPPLAQHAAPQGGHFRSIRVSTPPHGAPRARENGPMPTPGQQPLPQPGAVVGYARVSTREQTASLDEQRERLTQLGAVRVFEDVASGARADRPGLAAARDFMRDGDTLTVTRLDRLGRSMLDTLTTLRDLDAAGIRVRALDLNLDTGTAAGRMVVHVMAALSEYERELLAERTREGLAHARAQGRTGGRRPSLTPQQVEAITATLAAGMSIRDVATMHGVSERTISRVRAGIYGQSKRPQT

SEQ ID NO: 12568 - protein, 526 aa, Unknown; identical to SEQ ID NO: 12567
  Description of Unknown: Integrase A1136 sequence
  IPR006119,cd00569,cd03768,PS51736, G3DSA:3.40.50.1390,SM00857,IPR009057,SSF46689, SSF53041,PTHR30461,PS00397,mobidb-lite, PF00239,IPR006118,IPR036162

SEQ ID NO: 12569 - protein, 523 aa, Unknown
  Description of Unknown: Integrase A1137 sequence
  PTHR30461:SF3,G3DSA:3.40.50.1390,SM00857,SSF53041,IPR011109, PF07508,IPR038109,G3DSA:1.10.10.2600,IPR036162,cd00338, PS51736,PF13408,mobidb-lite,Coil,IPR006119, IPR025827,PTHR30461,PS51737,PF00239
MSRTVTAIPATKKPGTVTTPSGVPARRKVAAYARVSTEMEEQTSSYEAQIDYYTTYIRSRNDWQFAGMYCDEGISGTSMKRREGFQTMIDDALAGKIDLILTKSVSRFARNTVDSLTTVRKLKDAGVEVYFEKENIYTFDAKGELLITIMSSLAQEESRSISENVTWGHRKRFADGKVMVPYKSLLGYKKGADGNLVIDETQAPTVRLIYQLFLDGMAISEIKTELATRKILTPRGKEVWSTSTVRSILSNEKYKGDALLQKTFTTDFLTKKMKVNEGEVPQYYVSGNHEPIIEPRIWDQVQYELTTRHGNISSAKVGLFSTRLKCAQCGAWYGRKTWASNTKYKYTVWQCNHKYAVEHPCSSATVKDEHIKNAFVQALNQLIARQSRQSHLLQIFDSMFDTSRMEEQAAACQAKIVELTEQIEALIAENQQRALDQDAYQNKYTELDTAYRKTLACKASLEADIAANTAKHAAVTTALGDLAGEPVSEFRPSQWSALIDHAIVDEDTIRFVFRVGEVVRVQL

SEQ ID NO: 12570 - protein, 523 aa, Unknown
  Description of Unknown: Integrase A1138 sequence
  IPR006119,PTHR30461:SF3,PF00239,cd00338,PF07508, PS51736,G3DSA:3.40.50.1390,SM00857,IPR038109,IPR011109, PTHR30461,G3DSA:1.10.10.2600,PS51737,SSF53041,IPR036162
MEDWRTQDGTDHDPASPIVRAAEYVRMSTDHQKYSTENQAEAIRHYAAAHGIEIVRTYADAGKSGLKIDGRDALKQLIDDVQTGVADYTMVLVYDVSRWGRFQDADESAYYEYICKRSGISVEYCTEQFENDGSPVSTIVKGVKRAMAGEYSRELSVKVFAGQGRLIEKGFRQGGPAGFGLRRTLVDERGETKGILTRGEHKSIQTDRVILTPGPPEEVAIVRDIYHAFVHEGRSEQDIADDLNRRHIPTDLDRPWTRGTVHQVLINEKYAGDNVWNRQSFKLKKKRVRNDPEMWIRAAGAFDAIVERDLFEAAKAIIGARSFRLSDTEMLSALKVLLVSRGLLSGIIIDECEGMPSSSAYSSRFGSLLRAYDLVGYTPDRDYRYVAINQALRKLHPEILGQVLDGLRDMGSEVVQDVQTDRVIVNEEFSLSVVIVRCNPTPTGLLRWKIRFDTSRMPDITIVVRMDTANRAAFDYYLFPRLDLVADRLRLAEDNGLSLDAYRFDTLDLLYEIAAPVAIAEAA

SEQ ID NO: 12571 - protein, 523 aa, Unknown
  Description of Unknown: Integrase A1139 sequence
  IPR006119,PTHR30461:SF3,cd00338,PF07508, PS51736,G3DSA:3.40.50.1390,SM00857,IPR038109, IPR036162,PTHR30461,G3DSA:1.10.10.2600,SSF53041, PS51737,PF00239,IPR011109
MEDWRTRDGTDHEPASPCVRAAEYVRMSTDHQKYSTENQAEAIRHYAAAHGVEIVRTYADAGKSGLKIDGRDALKQLIDDVQTGVADYTMVLVYDVSRWGRFQDADESAYYEYICKRSGISVEYCTEQFDNDGSPVSTIVKGVKRAMAGEYSRELSVKVFAGQGRLIEKGFRQGGPAGFGLRRTLVDERGETKGILTRGEHKSIQTDRVILTPGPPEEVAIVRGIYHAFVHEGRSEQDIADDLNRRSIPTDLDRPWTRGTVHQVLINEKYAGDNVWNRQSFKLKKKRVRNDPEMWIRAAGAFDAIVERDLFEAAKAIIGARSFRLSDTEMLSALKVLLDSRGLLSGIIIDECEGMPSSSAYSSRFGSLLRAYDLVGYTPDRDYRYVAINRALRKLHPEILGQVLDGLRDMGSEVVQDFQTDRVIVNEEFSLSVVIVRCNPTPTGLLRWKIRFDTSRMPDITIVVRMDTANRAAFDYYLFPRLDLIADRLRLAEDNGLSLDAYRFDTLDLLYEIAAPIAIAEAA

SEQ ID NO: 12572 - protein, 522 aa, Unknown
  Description of Unknown: Integrase A1140 sequence
  IPR006119,PTHR30461:SF3,cd00338,PF07508,PS51736, G3DSA:3.40.50.1390,IPR038109,SM00857,PS51737,IPR036162, PTHR30461,G3DSA:1.10.10.2600,SSF53041,Coil,PF00239, IPR011109
MKLSHILQPNMKAAFYGRHSTDKQDMDMQLNSVMEVIRKYDCIHTHSFLDKAVSARKNKITSRKELENMFEAAKRKEFDFVIVYKSDRLARDPLEHQTIRIVMKTLDIPIIISSTESVYNTDTDLIVQLMEDGFTKYEVDTIIARTRSGLENKAKQGKWLGGKPPFGYTYDKSSEQFIEHTEELCYVKEIFNLYVNGHGFQYIAHTLPNGSRRGKDWGKENVKAIVLNPFYCGLLSWRRQTDGKQNERDIWIEAPNHYVKPIISRTTWEACWRIYSEKRNGNMVPKHYKTSFLLQGLLSCEKCQELMKTKNQQTVSSTNKKYGGKIYFCPNCKLRIEADLLHDKVVNQTLTDVKISGFHNVYHAIEQKIQYEIQELNNNIQKHQRLYENHIIKLHNITEELKQRMKNNDDKRFLKSLAIYRSDVQRKLDGIIQQINNFKQQITLKEKVEKSKEIWLHTLNEVFQDDVKLQEISDMDKRRFLLPLIQSVSIKENKKRNEYDISLQLRTDFSKRDVKKQISLIL

SEQ ID NO: 12573 - protein, 522 aa, Unknown
  Description of Unknown: Integrase A1141 sequence
  IPR006119,PF00239,cd00338,PF07508,PS51736, G3DSA:3.40.50.1390,SM00857,IPR038109,PS51737,IPR036162, PTHR30461,PS00397,G3DSA:1.10.10.2600,Coil,SSF53041, IPR006118,IPR011109
MRDVLEKGKKGAFYARVSSDRQTIDAQRHHVYEFIKNYECEIVKEYVDPGESAFKKKLIKRPQIMALLRDVEQGKYDFVITYADDRLARSEIEHVQIRVIMKEAKTDVILTSTGELYTERDIITQLIREGGTRYEVERISARTKDAYEQRTDYGQWMGGPVPFGYVQDENTKNFFILEDEKEIVLKIYQLYQNGEGFADIAKILNEQKAKTNTIHWKKERVKHILTNPIYAGYVTFGRLKPGSGNSIEGLSKWKMAKCEEIPPIMTKEEWLATFQMFEKKRNKELPPKQLKTEYVLRDLIYCKSCDAPLLPKNQETRGKNGKKYGIKKYMCSNKLCKVWFSTDELHALVFDSVIKEVTDKVISKSQTELMYEMEQILEKDIKQIKKEIQRLKKQVDNCLVWIKDAEREIDELYNQKKKLVKVNPKIDPLLDVMLDYRLHLLHEIRETEELIAKKEAKMKHIEDVDSNQSMLQKNVLQAFRIEFTNLQKDMKRVRQLLVYLIDKIIIDQNGKTEYILKINLEQ

SEQ ID NO: 12574 - protein, 522 aa, Unknown
  Description of Unknown: Integrase A1142 sequence
  IPR006119,PTHR30461:SF3,cd00338,PF07508,PS51736, G3DSA:3.40.50.1390,SM00857,IPR038109,IPR036162,PTHR30461, G3DSA:1.10.10.2600,SSF53041,PS51737,PF00239,IPR011109
MDEVATTLKAPSGRRVVRAAQYLRMSTEHQTYSIDNQRDAIRDYAEIMGYEIVATYEDAGRSGLNLGGRPGLQRLLADVESGRADFETVVVYDVSRWGRFQNIDESAAYEYRCQMAGVRIEFCAEQFANDGSIESDVLKAIKRSMAAEQSRMLSQKVFIGQARLIRMGFRQGSKVGFGLRRLLVDQHGRPKGILSPSEYKSLQTDRIILVLGPPDEIATVRWIFGHFVKTRKTELEMARLLNKRGVLSDLGRPWTRVSVHSVLTNENYIGNSIWNKHSARLRSHQVRNPPELWVRVENILEPIVDRKLFNRAQIVLKTIYRHLTNDEMLAALKALLARRGALSSFIIDAAPDCPPSTRYMSRFGTIVKAYELIGYEPPKNSRYIFVNRRLETMRLQIIEDLLAAVEKRGGIATHVMETDLLRINQEITVAIATGRCRVSSFGYPRWFAKADREPPPDIFVLIRMNPDDLSIRDYLIAPAHEIAGKSELHAINGARLDTYIFPTLNPLIRLAERASVGSAAWN

SEQ ID NO: 12575 - protein, 521 aa, Unknown
  Description of Unknown: Integrase A1143 sequence
  IPR006119,PTHR30461:SF3,cd00338,PF07508, PS51736,G3DSA:3.40.50.1390,SM00857,IPR038109, IPR011109,PTHR30461,G3DSA:1.10.10.2600,SSF53041, PS51737,PF00239,IPR036162
MQSDVPRTEGQEVPIRMRAAEYVRMSTEHQQYSTENQGDKIREYAARRGIEIVATYADEGKSGLRIDGRQALQRLIHDVENKRADFQIILVYDVSRWGRFQDADESAYYEYICRRAGIQVAYCAEQFENDGSPVSTIVKGVKRAMAGEYSRELSAKVFAGQCRLIELGFRQGGPAGYGLRRTLVDVQGAAKTELSRGEQKSLQTDRVILTPGPEEEVRIVNQIYRWFIDDGLVESEIAGRLNGMRLRTDLGREWTRATVHEVLTNEKYVGHNIYNRVSFKLKKVRVVNPPDMWIRREGAFTGIVPPDVFYTAQGIIRARARRYTDEELIERLRGLYRNRGFLSGLVINEAEGMPCAAVYAHRFGSLVRAYQLVGYTPDRDYRYVEINRQLRRMHPDLVQQIEREIANLGGSFERDPATDVLWVNREFTVSIVLARCHAVDSGHNRWKIRLDTSLAPDISVAARLDDGNQAVRDFYLLPRVDFGPSRISLAEQNTAELESYRFETLDYLYGMAARARLRVAA

SEQ ID NO: 12576 - protein, 520 aa, Unknown
  Description of Unknown: Integrase A1144 sequence
  IPR006119,PTHR30461:SF3,cd00338,PF07508,PS51736, G3DSA:3.40.50.1390,SM00857,IPR038109,IPR011109,PTHR30461, G3DSA:1.10.10.2600,SSF53041,PF00239,IPR036162
MAGDTEPTVCEGGSHTRAAEYVRMSTEHQQYSTENQRSKIRDYADQHRLRIVATYADEGKSGLRLDGRAALQRLIHDVEARTVDFQVILVYDVSRWGRFQDADESAYYEYVCRRAGINVVYCAEQFENDGSPVSTIVKGVKRAMAGEYSRELSTKVFAGQCRLIELGFRQGGPAGFGLRRVLLDQSGLIKSALGRGERKSLQTDRVVLMPGPESETGIVRLIYQWFIEESLSDAQIAARLNSMNVRTDLDRIWSRATVHEVLTNEKYIGNNIYNRVSFKLKKLRVANPPEMWIRKDGAFKPVLSPDIFYTAQGIMRARAHRYSSEELLERLRELYQSRGFLSGIVIDETEGMPSSSVYSYRFGSLVRAYQAVGFTPDRDYQYVEINRLLRRLHPEIVNNTERLIAEIGGETVRDPATDVLFINREFTVSIVLARCHHVGLGKRRWKVRFDASLLPDITVAIRMKDGNDLPYDYYLLPRVDFGQRDIQLSERNSVELETYRFDTLDYLYRMAERARLRRVA

SEQ ID NO: 12577 - protein, 520 aa, Unknown
  Description of Unknown: Integrase A1145 sequence
  IPR006119,PTHR30461:SF3,PF00239,cd00338,PF07508, PS51736,G3DSA:3.40.50.1390,SM00857,IPR038109, IPR011109,IPR025827,Coil,PF13408,PTHR30461,G3DSA:1.10.10.2600, PS51737,SSF53041,IPR036162
MTEKNIMVIPARKRVGSTAAKEKIKKLRVAAYCRVSTETEEQNSSYEVQVSHYTEFIKKNNEWEFAGIFADDGISGTNTKKRDEFNRMIAECMDGNIDMVITKSISRFARNTLDCLQYIRQLKDKNISVYFEKENINTTDAKGEVLLTIMASLAQQESQSLSQNVKLGLQYRYQQGKVQVNHKRFMGYTKDEDGNLTIVPEEAEIIKRIYREYLEGQSLVGIGRALEKDGILTAAGKPRWRPESVKKILQNEKYIGDALLQKTVTVDFLTKKRVKNEGHVPQYYVENSHEAIIPKELFLQAQEEIHRRSNIYTGEGKNKRIYSSKYALSAITFCGDCGDIYRRVYWNIHGRKEFVWRCVTRIEQGPEVCKNRTVKEDELYGAVMTAINKLLAGGNNMIKTLEENIHAVIGETTEYQISEINNSLEEKQKELIKLANKGQDYDHLADEIDELRDKRQILLVEDASLSGENERINELIEFIRKNKFRTLEYDDKLVRKIIQSVTVYEGHFVIAFKSGIEMEI

SEQ ID NO: 12578 - protein, 519 aa, Unknown
  Description of Unknown: Integrase A1146 sequence
  IPR006119,PTHR30461:SF3,PF00239,cd00338,PF07508, PS51736,G3DSA:3.40.50.1390,SM00857,IPR038109,IPR011109, PTHR30461,G3DSA:1.10.10.2600,SSF53041,IPR036162
MDKATTPPEFERRRARAAQYLRMSTERQIYSIDNQRDAIRNYAEIMGYDIVATYEDPGRSGLSILGRPGLKRLIEDIESRRADFETVVVYDVSRWGRFQNTDESASYEYRCQRAGVRIEFCAELFVNDGSIGSDVLKAIKRSMAAEYSRMLSNRVFAGQSRIVKLGFSGGGPAGYGLRRLLVDGSGNPKAILHRDERKGLASDRVVLVPGPENEVSTVRWIFNQFVKKGKTAVEIASALNARGLVTEFGRPWTGACVGTILASEKYVGNIVWNRISHRLLQNRLRNPPSAVVRADNVIEPLVPRALFDRAQAIRRARTYLRPDEELLADLTKLLKERGRLSSPIIDAAPGCHSASIYAHRFGSMNAAYQLIGYDGSANYRKLDIRRRLIQIRQQTIENLMSDIDGVGGSALYDPQTKIMRVNDEFSVAIWTAQYRMNVTGFPRWPFWKRGLIGPEVTILIRMESDNQTVRDFLIAPAHEAQSALHMLKANNGVRLDAFLFASLDPVVEMARREPMPANI

SEQ ID NO: 12579 - protein, 519 aa, Unknown
  Description of Unknown: Integrase A1147 sequence
  IPR006119,PTHR30461:SF3,cd00338,PF07508, PS51736,G3DSA:3.40.50.1390,IPR038109,SM00857, IPR011109,IPR025827,PF13408,PTHR30461, G3DSA:1.10.10.2600,SSF53041,Coil,PF00239,IPR036162
MLSRYEGGHHDKEAIAYVRFSTASQQYGDSLRRQNALISEWLSQHPDYELDDITYQDLGLSAYSGMNATRGALYDFLDAVEHGYIAAGTVLLVESLDRLSREKISDATERLKSILRSGVEVVTLCDHTHYSIDSLDDPYVLIKAILIAQRANEESETKSRRMRAAWQKKREDAAATGKLITRSCPRWLTVSPGGEKFELIEEHARTINLIFRLRLKGCSLNGITKTLNERGVPTLTGEIGRWNPSTIESLLGNKALTGTFTPSYQTMAKGVSEIRGYFPPVVPDKLFHDVQGVRLARFGNPGVSENPYLINIFRSLMYCGTCGHSIMLTSVDKKGAGYYACPMRRLHRCSEPAIRRDHVDAALVGVLLCSMDMLQANGTVMGTASQLENRLVELNMSINRLIAALQIAPDVPELAMKVRELSKELRAGELKLRALRNRGVAGSGEWIAGLNLADRRNRERCRDYAARHIDRLFLHTAEGRCDVHLLNGLRLINFPVKKKLPVSSFISSLAYLCGDTLIL

SEQ ID NO: 12580 - protein, 519 aa, Unknown
  Description of Unknown: Integrase A1148 sequence
  IPR006119,PTHR30461:SF3,PF00239,cd00338,PF07508, PS51736,G3DSA:3.40.50.1390,IPR038109,SM00857,IPR011109, PTHR30461,G3DSA:1.10.10.2600,SSF53041,IPR036162
MDRATTPPEFERRRARAAQYLRMSTERQIYSIDNQRDAIRNYAEVMGYDIVATYEDPGRSGLSILGRPGLKRLIEDIESRRADFETVVVYDVSRWGRFQNTDESASYEYRCQRAGVRIEFCAELFVNDGSIGSDVLKAIKRSMAAEYSRMLSNRVFAGQSRIVKLGFSGGGPAGYGLRRLLVDGSGNPKAILHRDERKGLASDRVVLVPGPENEVSTVRWIFNQFVKKGKTAVEIASALNARGLVTEFGRPWTGACVGTILASEKYVGNIVWNRISHRLLQNRLRNPPSAVVRADNVIEPLVTRALFDRAQAIRRARTYLRPDEELLADLTKLLKERGRLSSPIIDAAPGCHSASIYAHRFGSMNAAYQLIGYDGSANYRKLDIRRRLIQIRQQTIENLMSDIDGVGGSALYDPQTKIMRVNDEFSVAIWTAQYRMNVTGFPRWPFWKRGLIGPEVTILIRMESDNQTVRDFLIAPAHEAQSALHMLKADNGVRLDAFLFASLDPVVEVARREPMPANI

SEQ ID NO: 12581 - protein, 518 aa, Unknown
  Description of Unknown: Integrase A1149 sequence
  IPR006119,PTHR30461:SF3,cd00338,PF07508, PS51736,G3DSA:3.40.50.1390,IPR038109,SM00857, IPR036162,PTHR30461,G3DSA:1.10.10.2600,SSF53041, PS51737,PF00239,IPR011109
MTGAGDQTHKTENVRAAQYVRMSTEHQKYSTENQAIEIAKYARENGYVIVKTYMDSGKSGLKLDGRDALQSLIEDVSNGQTDFSIILVYDVSRWGRFQNADESAYLEYLCTRAGIAVEYCAEQFANDGSLTTTIIKNMKRAMAGEYSRDLSRKVFEGQRHLVELGYRQGGAAGFGLRRQLIDERGEPKALLAHGERKSIQTDRVILVPGPATEVAVVDRIYRLFVEKGQNECSIAGILNYENLFTDMGRPWTRGTVHQVLTNEKYVGNNVFNRISFKLKMHRVRNPPDAIIRASGVFQPIVSEDLFQRAAAIIAKRTVRLRDDEMLALLTQLLLKSGKLSAIIIDEQEGMPSSSIYGSRFGSLLRAYKLIGYTPDRDYRYVEINRLLRTLFPDVVSGIIASVENAGGRIVRDAATDLLKVNGEFAVSVVVCRCIETPAGSLRWKIRLDNGLHPDLSIAVRMAPGNEKILDYYLLPAIDFASANLAVAEDNPIGIDAYRCADLSRFIRLTERVPIRRAA

SEQ ID NO: 12582 - protein, 516 aa, Unknown
  Description of Unknown: Integrase A1150 sequence
  IPR006119,PF00239,cd00338,PF07508,PS51736, G3DSA:3.40.50.1390,IPR038109,SM00857,IPR011109,IPR025827, Coil,PTHR30461,PF13408,G3DSA:1.10.10.2600,PS51737, SSF53041,IPR036162
MVIPARKRVGSTAAKEKIKKLRVAAYCRVSTETEEQNSSYEVQVSHYTEFIKKNNEWEFAGIFADDGISGTNTKKRDEFNRMIAECMDGNIDMVITKSISRFARNTLDCLQYIRQLKDKNISVYFEKENINTTDAKGEVLLTIMASLAQQESQSLSQNVKLGLQYRYQQGKVQVNHKRFMGYTKDEDGNLTIVPEEAEIIKRIYREYLEGASLLQIARGLEADGILTAAGKAKWRPETLKKILQNEKYIGDALLQKTYTVDFLSKKRVKNNGIVPQYYVENSHEPIIPRELFMQVQEEMVRRANLRGGKGGKKRVYSSKYALSSIVYCGQCGDIYRRVHWNNRGYKSIVWRCVSRLEEKGSECTAPTINEETLQAAVVKAINELLDNKEPFLSTLQKNIATVLNEENDNATVDIDGKLEELQQQLLIQAKSKNDYEDVADEIHRLRELKQNALVENAEREGKRQRIAEMTDFLNEQSCELEEYDEQLVRRLIEKVTIYEDKLTVEFKSGIEIDEEI

SEQ ID NO: 12583 - protein, 516 aa, Unknown
  Description of Unknown: Integrase A1151 sequence
  IPR006119,PTHR30461:SF3,PF00239,cd00338,PF07508, PS51736,G3DSA:3.40.50.1390,SM00857,IPR038109,IPR036162, PTHR30461,G3DSA:1.10.10.2600,SSF53041,IPR011109
MVKSLKPQLDPERVIRAAEYVRMSTDHQKYSILNQSALIHVFAETNRMEIVATYADPGKSGLTLRSRPGLSRLLSDIVAGKVDFEVVLVYDVSRWGRFQDADESAHYEFLCRQAGIRVIYCAEQFGADGHPLASVLKALKRAMAGEFSRELSVKVAAGKARIASLGYRVGGIAGYGLRRQVLEDGQARGMLLRKGQLKYLQTDRVTLVPGPAEEVAVVARIYRDYIYLRKGELQIARALNAEGYSFFGKAWSRHLVRTILTNEKYIGVNILGRTIQRLAAPNINNPPEKWTRFEGAFVPIVSRDLFEAAARVRSFNVKAYTDAELLEALRVALKREGKLTVEIIERDPDLPAASTIRAHFGGVTGAYQRLGFAIGSRYRFYDIERALAAVRKQTQESLMQALEARSIECSVTAPNLIAFADRFAIEVRVCRHREPISYRCSGWRMAHEPASGSSHVLAIRMARGNQAIQDFLFLRRAEIQGVPPFLKASCDDQTAQFRYTDVPAVATAIADIALNL

SEQ ID NO: 12584 - protein, 515 aa, Unknown
  Description of Unknown: Integrase A1152 sequence
  IPR006119,PTHR30461:SF3,PF00239,cd00338,PF07508, PS51736,G3DSA:3.40.50.1390,SM00857,IPR038109, IPR011109,PS51737,PTHR30461,G3DSA:1.10.10.2600,Coil,SSF53041, IPR036162
MYHPQELDVFIYLRKSRKDLEEEKKAIEHGQHYDTLERHRTQLLELAHKEHHNIIDIFEEVVSGEYISERPMMQKLLREVESGIADAVLVMDLDRLGRGDMVDQGTIYRVFCYSETFIITPTEIINPNDENQELTFSIKSLIAREELKTIVKRMQRGRRASAKEGKSISRVPAYGYLRDNNLKLYPDPEKSWVIPIIFKLMVNGMGRQAIAQELDRLGISPPKGEYWNPSTISSITKNEVYLGHIIWGKIRYTKQNGKYIRKKVPKERWQRHDNAHPPLVSEELFQKANMAHSKRWRPPTIKTKKLSNPLAGILLCELCGHSMLYQPRKDRPNPQVRCVQPSCKGIQKGAALALVEQRILDGLQQIIESFEIQKNMVEKKQSKNNIQLQQKAVERKEQQVNDLQKQKNKLHDLLEKGVYDIETFLERQKSIVLRLKTTQEEIEQLEQEIKYIAEKEKHMHEFVPKIRNVLEAYYVTEDIDKKNHLLKSVLEKATYLRKTTWNRRDEFVIELYTKI

SEQ ID NO: 12585 - protein, 514 aa, Unknown
  Description of Unknown: Integrase A1153 sequence
  IPR006119,PTHR30461:SF3,PF00239,cd00338,PF07508, PS51736,G3DSA:3.40.50.1390,SM00857,IPR011109,IPR025827, PTHR30461,PF13408,SSF53041,IPR036162
MKLYSYQRWSSAVQEAGTTKTRQEDAARAYALRNGLEYCEIVDSGVSAYRGANKQGALGKFIDAVQQGVIERGVTLYVESLDRISREGINNALRLFQDILELDITIVTGMDGKVFTKQSINDNPFDLMMSILVFIRANEESTKKSLRTNGNAKALVERFKSGQPTNIKSMGGCPFWIDNSMSQYESVQKHVKYWPIAEEIVQQFLDGKSVFQVVKYLNATYPEGCYGKPWNYANVRKVRLSKAIYGVKEITISSTLHTLDNYYPALCTEGEFLRLQVIKDNNKYIGKVGDQKNNINLLCGMKLFRCGHCGSTMMAMKHKNTIRYMCEKGRMDSNGCRLWSFGSLGIEHCLMLVLTYAYIDTNRKGVQNKTDYSTRIASKNEAIDEISKRITNTIELVSMGLSNVEEVKVLIEGLNKQRTVLKTELDVLVTQQALSDSIDFETLMHDFFTHAQYAVLQSVDHEYREELRKVVFAMMDSVIAWKYGKNLYFSFRIKDHDEYFNFVPGTEKNTFRLY

SEQ ID NO: 12586 - protein, 512 aa, Unknown
  Description of Unknown: Integrase A1154 sequence
  IPR006119,PTHR30461:SF3,PF00239,cd00338,PF07508, PS51736,G3DSA:3.40.50.1390,SM00857,IPR038109, IPR011109,IPR025827,PS51737,PTHR30461,PF13408,G3DSA:1.10.10.2600, Coil,SSF53041,IPR036162
MKKMTVIPAVSQIRQGRIRVAAYCRVSSNKDDQEHSYETQVRYFTSLYRGSETSELVGVYADEGISGTSMDKRVEFQRLMEDCRAGKIDRIVTKSISRFARNTKDCLKSIRELKELGITIAFEKENIDTARLSDEMMITVMGGLAQEESQSISNNVRWGIQKKMASGTFGHCRVPYGYTKEKKTGKLIIEPDKAEVVRRIFDMYISGMGARKIALTLTDEGIPSPTGKAWNQKTVLNILEQEKYIGDTLWQKTYSKFMGEKFIPNSGQVPQYYIEGSHPAIISKEKFALVRDMRKASTPQKSTKVESPFRKKLICGKCGHTYALIRSKKRDYWQCGYRYDVGNPCNNTVLYADELQTAFTALCDKLHTHNAEIIGKCYAQLTELQRLMEYGTAEGANQLKTIADLKEQKLRLATLYRKRFITTEKYDREVTEIDMQISSLSRSMDRASENKDKTIDDMETLAELFKGYDGTPEARKEILETAVESITISGDTLTFRLPSGLEFTERLDRNGN

SEQ ID NO: 12587 - protein, 511 aa, Unknown
  Description of Unknown: Integrase A1155 sequence
  IPR006119,PTHR30461:SF3,PF00239,cd00338,PF07508, PS51736,G3DSA:3.40.50.1390,IPR038109,SM00857,IPR011109, PTHR30461,G3DSA:1.10.10.2600,PS51737,SSF53041,IPR036162
MSTDLQRDSPTNQKEVLARYATIHGIHIAATYEDYGKSGLSMRNRPALARLLQDVLDEKRIFSVLLVYDVSRWGRFQDVDESAHYEYVCRRAGVRVVYCAEPFENDNSASSNIMKTLKRAMAGEYSRELSLKVFLGQCRGTREGFRQGAAAGYALQRVLVDFNGNVKGPLHNGERKNLQSDHVVIVPGPAHEVALVRRVYEWFLTENLSPTRIAKRLNDFGLRTDLNRRWLKDAVTRLLTSEKYAGNNVYNRTSVRLHTPRVKNPPEQWVRAVGVFEPVVDRATFDAVQLRLDSRTHLMPDDDLLVKLVALHEKIGKVTAKAITADRSLPGVQTYRKRFGSLTEVYRTIGFDNGHDYGFLRVLRAAKILHSRLSDTVIATLRDAGHEVHHSLDKTLLCVDNEIRIRLNVRPATRTLYKPVRWIIKWPELHPPVDILVLARVDRFAVNFIDFFVLPRGSLGPQKQTELTEKPNPQLEMFRYSDLKILLELTARVSLEVFREPGNAANNYRPD

SEQ ID NO: 12588 - protein, 511 aa, Unknown
  Description of Unknown: Integrase A1156 sequence
  IPR006119,PTHR30461:SF3,cd03768,PF00239,PF07508, PS51736,G3DSA:3.40.50.1390,SM00857,IPR011109, PTHR30461,PS00397,Coil,SSF53041,IPR006118,IPR036162
MTEKTKIIVGYARVSSREQAVDSHALEQQIARLKAAGATEIFIDIESGSNDNRPALKKLMNLVELRQVNEVIITRIDRKARSLVKLRECIDIYQKAGVNLRILDQQIDLNTSQGKLMANVLGSLAEWETDALSDRIRHGKQHRRNQRAACESYPWGYQVIKDKYQLDTRLFLCLISDRPDNYLDLYNEDDVTKLPGLTIKQIARDCVDIFLQVQGVSRALKVIFAKYGLPRKHHKRNSRDSILHWTNAGFNNWLTNPVLCGHTAYFQRITISKGKRKKNKPEDWQIIHDTHPEHRLITDAEAVEIQQILKFNSKTGHFSFNQDPNHPVCYREYAYQTGLVFCAECGSKCITKSAKHKKGMYYYFACRYAGMGCGNKKSTRKCNIENALINTLVQRSQSLANELDQQATREQEKSEKLKQLESRLEALEKIPGFDPDLEKLKEKIRLQIAEEVNPFLSDSILSRSTEEIIRAGNNLAIWHTLSPDEKVKIYHQIVHQITIRNAEVEEVILKI

SEQ ID NO: 12589 - protein, 510 aa, Unknown
  Description of Unknown: Integrase A1157 sequence
  IPR006119,PTHR30461:SF3,cd00338,PF07508,PS51736, G3DSA:3.40.50.1390,IPR038109,SM00857,IPR011109,IPR025827, Coil,PTHR30461,PF13408,G3DSA:1.10.10.2600,SSF53041, PS51737,PF00239,IPR036162
MKAAIYARYSSDNQREESIEAQIRAINEFAERENIQIVKTYIDEARSATTDDRPQFLKMIKESELGLFDTLIVHKLDRFSRNRYDSAFYKKKLKDNNVRLISVLEHLDNSPESIILESVLEGMAEYYSVNLSREVMKGMRETALQCKHNGGLPPLGYDVAKDKTYIINPNEAKAVKLIYELYSNGVGYNLILSRLNELGYKTKKGKFFGKNSLYSILTNEKYNGIYVFNKSSKKINGKRNSHKHKLDEEIIKIKDGMPKIIDDDLWNEVKKKMDNNKAHRGAAQAKKIYLLSGLIYCGKCGHAMTGNSRHSGRNKTLYETYECSNRKRTKQCDMRAINKSLAEKIVIDALYDNIFSKKAIENLTRKILTYAQEQNKTITEDIITYKKELKDVDSKIDNIVEAIADGLYSPVMKEKLTSLESKKNALLIRIDEAEREAILTSPSKEMIKKYLSKDSDIKEKTPQQQKKVVQNYIKKVTIYDDEVITDTIVTCLGIGEAYRTRVHKLYITKY

SEQ ID NO: 12590 - protein, 509 aa, Unknown
  Description of Unknown: Integrase A1158 sequence
  IPR006119,PTHR30461:SF3,PF00239,cd00338,PF07508, PS51736,G3DSA:3.40.50.1390,IPR038109,SM00857,IPR011109, PTHR30461,G3DSA:1.10.10.2600,SSF53041,IPR036162
MKKAIAYLRFSTSSQQYGDSLRRQNKLVAEWLDSHPNYLLDDLTYKDLGLSAFDGSHAVHGAFSEFMEAVQGGYIPHGTVLLVESLDRLSREKIGEATERLRSILSAGIDVVTLTDHTHYTKDSLDDPYSLIKAILIAQRANEESEIKSRRMKSAWQKKREDAEASGRIITRSCPRWLRVSHDGKSFELIAEHAATLQEIFRLRLEGNSINGITKMLNDRNVVTLTGEAGRWNPSTVEKLLSNKALTGVYVPSYRTIANGIQEIPGYFPRVIADKTFSAVRGFRSRPYGKDKETNNPWLINLFRSVMTCKACGHSIMLNGIDARGMGYYVCPMRRLHRCDAPALRRDIADANLIRTVLAVVDKFQPGRTVKVPVRILQDRNILILKSIDQLVEALQVAPEVTALAERIKALHREFKSNEVTMHALKSRERLATVNDISLLNLALKTDREKCRRFVMRNFRDIRLDTASKTCDILFSNGFRLLNFPLLKSTDPGQLVSALAYTDDETLVL

SEQ ID NO: 12591 - protein, 508 aa, Unknown
  Description of Unknown: Integrase A1159 sequence
  IPR006119,PTHR30461:SF3,cd00338,PF07508,PS51736,G3DSA:3.40.50. 1390,SM00857,IPR038109,IPR025827,Coil,IPR036162,PF13408, PTHR30461,G3DSA:1.10.10.2600,SSF53041,PS51737,PF00239,IPR011109
MKKAIAYMRFSSPGQMSGDSLNRQRRLITEWLKVNSDYYLDTVTYEDLGLSAFNGKHAQSGAFSEFLDAIEHGYILPGTTLLVESLDRLSREKVGEAIERLKLILNHGIDVITLCDNTVYNIDSLNEPYSLIKAILIAQRANEESEIKSSRVKLSWKKKRQDALESGTIMTASCPRWLSLDDKRTAFIPDPDRVKTIELIFKLRMERRSLNAIAKYLNDHAVKNFSGKESAWGPSVIEKLLANKALIGICVPSYRARGKGISEIAGYYPRVISDDLFYAVQEIRLAPFGISNSSKNPMLINLLRTVMKCEACGNTMIVHAVSGRLHGYYVCPMRRLHRCDRPSIKRDLVDYNIINELLFNCSKIQPVENKKDANETLELKIIELQMKINNLIVALSVAPEVTAIAEKIRLLDKELRRASVSLKTLKSKGVSSLGDFHAIDLTSKNGRELCRTLAYKIFEKIIINTDNKTCDIYFMNGIVFKHYPLMKVISAQQAISTLKYMVDGEVYF

SEQ ID NO: 12592 - protein, 508 aa, Unknown
  Description of Unknown: Integrase A1160 sequence
  IPR006119,cd03768,PF00239,PF07508,PS51736, G3DSA:3.40.50.1390,SM00857,IPR025827,IPR036162,PTHR30461, PS00397,PF13408,Coil,SSF53041,IPR006118, IPR011109
MHQYNIVGYARVSSREQAENCHALEQQIDRLKSAGVEYVFVDVESGANPERLNYNKLIQLVEKGAIKMVIATRWDRLTRNELVYLQLKNLFQYSAVKLKLLDQGDVDLNSAFGELSADMQALFAVHERRMLKERVSRGFEYKRKKKSAWGRQPWGYKSENEKYVIDRSRIICLLSQRPYNYQELSDLPDNSSLLVQGLSKGEIAKEAIEYFLKVRKARDVLRYLYEKYGVSSKANNNNLLLTSQLLFWRSGQSFCEWIKNPVLRGHTAYNKYEPRNAQKRGNQKPPEEWEIHENTHPDERMLSDEEYCEVVTIIEQNSRTMGTMKTRSQLTGLIICGECGSKCINKNNQIYRYYGCRNSGIGCSNKKQIRVDLLEAKLFDFIIEKAHQFNGVDSVSQVIENPEDSSVVIKLKEQKQSLEKMLQDHYNLTIKKAINDLDLQIKKEISHSEIDDFSLATAAEVLVYPYITHLGFWYCLNTQERELIYHKLIKKIVVLDSQVTTIELKVSG

SEQ ID NO: 12593 - protein, 507 aa, Unknown
  Description of Unknown: Integrase A1161 sequence
  IPR006119,PTHR30461:SF3,PF00239,cd00338,PF07508, PS51736,G3DSA:3.40.50.1390,SM00857,IPR038109,IPR025827, PS51737,IPR036162,PF13408,PTHR30461,G3DSA:1.10.10.2600, Coil,SSF53041,IPR011109
MNNMIVVPAAAKVQRGLTRVAAYCRVSTSQENQEHSYEAQVRYFTNLYRSSSTETFVGIYADEGISGTSLDKRTEFQRMINDCRAGKIDRIVTKSVSRFARNTKDCLETLRELKALGVTVAFEKENIDTSRLSDEMMITVMGGLAQEESHSISRNVRWSIQRKMANGTFRHARVPYGYAKDDETGNLIVDPEQAEIIRRIFNMYVNGTGAHKIALTLNDEKIPSPTGIAWNKKTILKILDNEKYTGDTMWQKTYSEFMGEKFKPNHGQAAKYYIEGSHEAIISKELFEMAAKVKKKAAPKSFEKNNTPFRKKLICRKCGHTYTFISSKRRNYWQCNCRSAIDKPCDNRVLYNDELESAFTALCDKLHVHGTVILGKCAEQLAELQRLEQFGTAEGVKRMKELSDLKDQKQRFRGLYDKHFISEEKYQQQIGEIDLKIERLSREMSRLSGANDGISGEINTLLEMFEDYEGSDDDKKEIIESALEKITFVDETLTFRLQCGLEFTEVV

SEQ ID NO: 12594 - protein, 506 aa, Unknown
  Description of Unknown: Integrase A1162 sequence
  cd00569,PTHR35004,PF00665,IPR009057,IPR012337, SSF46689,IPR001584,G3DSA:1.10.10.60,SSF53098,IPR017894, PS50531,PS50994
MLTVETIARIRREHAKGKSIRAIARSLKVSRETVTKYLRSGETAPRYERQHQPLPKLAGFQEELERLITENERRPARDRLDYLGLFGRLKDAGFQGGYDTVRRYIKRFKQRQPPSGPVNAYVPLTFAPAEAYQFDWAEEWIILDGVTTKVQVAHARLCHSRMPFVAVYPRQTQEMVFDAHARAAAFYGGLCERGIYDNMKTAVDAVFVGKERRFNRRFAQMCSHYLVEPVACTPASGWEKGQVENQVGTLRQRLFTPRLRAKTLEEVNERLHDEVIVWAQQTSHPEDKSRTVWEVFQAERPALITVSDPFDGFHEATLSVSKTCLIHFDRNRYSVAAIAAGKPVQVRAYATRIVVWFNGAIVAEHPRAFGHGHTRYNPLHYLPVLVRKPGALRNGAPFRDWDLPPALATVRTRLGRGDDADRQFVGVLAAILTDGLEAVEVACREALASGTHSRDVILNILARRHDVTPAPAMAVPTALTLSIEPAADCGRYDRLRAVREGCHGTA

SEQ ID NO: 12595 - protein, 503 aa, Unknown
  Description of Unknown: Integrase A1163 sequence
  IPR006119,cd03768,PF07508,PS51736, G3DSA:3.40.50.1390,SM00857,IPR038109,IPR011109, IPR025827,Coil,PF13408,PTHR30461, G3DSA:1.10.10.2600,SSF53041,PS51737,PF00239,IPR036162
MNNRIDAIYARQSVDKKDSISIESQIEFCKYELKGGNCKEYTDKGYSGKNTDRPKFQELVRDIKRGLIAKVIVYKLDRISRSILDFANMMELFQQYDVEFVSSTEKFDTSTPMGRAMLNICIVFAQLERETIQKRVTDAYYSRSQRGFKMGGKAPYGFHTEPIKMDGINTKKLVVNPDEAANIRLIFEMYAQPTTSYGDITRYFAEQGILFYGKELIRPTLAQMLRNPVYVQADLDVYEFFKSQGTVIVNDAADFTGTNGCYLYQGRDVKPSKKNDLKDQMLVLAPHEGIVPADIWLACRKKLMNNMKIQSARKATHTWLAGKIKCGNCGYALMSIFNPSGRQYLRCTKRLDNKSCPGCGKIITSELEAVVYQQMVKKLEKHKTLTGRKKAAKANPKIAALQVELLHVDSEIEKLVDSLTGANNVLLSYVNVKIAELDGRKQELVKQIAELTVETISPGQVNQISGYLDTWDDVSFDDKRRVVDLMITTVAATSDSLNITWKI

SEQ ID NO: 12596 - protein, 503 aa, Unknown
  Description of Unknown: Integrase A1164 sequence
  IPR006119,cd00338,PF07508,G3DSA:3.40.50.1390,SM00857, IPR038109,PTHR30461:SF21,IPR036162,PTHR30461,G3DSA:1.10.10.2600, SSF53041,PS51737,PF00239,IPR011109
MRLPAQPLPSDLIDALYALPPGDTTGVVYLRISRDRDHDADGEVNQLWDILPLARRMGVRVVGVYLDNDISATTGSRKRTEYYEMLEILKRDSARVVLSWHSDRMHRNNRELEDYIDICEPRGILTHTVRAGTMDLSTAVGQAAARTFTAWAGAQARQTGERLALRQAANRREGRWAGGIRPFGWELDGESLRAAEAAEIRWATQAVVEGDSLRVIARQMNARGSRGTRGKEWIASTVKQILMRPRNCGLMSHEGQIVGRGRWAPAVSEEEWRACVDVLERRGARSVERGGRPPRWLGAMLYICGGCGQPTLRGMPVAGGKGQAKYACAPKVDRLPGVRHVTRQAAALDAWVQEALIERLSRPDAVKLLRRPDHARAEIDVAALHAELARLHGVLEALAEDYADGALTRSAMLLGTERARHRITVVGDELAAASEADPLAAIVGTDVRREWFGTEDGGMPGYSLERRRAILRRLVDVWVMPASPGRRAPSKEWWKDIDLRWKD

SEQ ID NO: 12597 - protein, 502 aa, Unknown
  Description of Unknown: Integrase A1165 sequence
  IPR006119,cd00338,PF07508,PS51736, G3DSA:3.40.50.1390,SM00857,IPR038109,Coil, IPR036162,PTHR30461,G3DSA:1.10.10.2600,SSF53041, PS51737,PF00239,IPR011109
MEGLVVLKKTVAYYRSSSKKQEHSVRMQKYYAKAYCRDHYMKLDYEYEDPYVSARIIHKNQRSGLRKLLEAIQNDEIEHLILYKRDRLARNVIEYMEIYELLQEKQIKVHFTTVGEPVMEYTPMNRYLEVIMAGFAQHEGEQINKRFDAMRQSKFDAGKAVSRIPYGFQNNKKKKEIEVVKDEMDIVMFIFNEFLNDTCTSLQQIKDSLDGKDFKKRKGLPWELQDIRRTLENSFYMGVYSIRLKGVQQEHQLEGTIPIEPHQWEAAQEKLNRILNKRGSTKMKKEIDKEDILYRMEGLLQCSYCKKQLEGVVKRRRDTFLIGYQCKEHRLYIDKEYIEQKTFEKMKCFFLNLREKEFDGLFQRYYKQNIKEIERIIQGHSQRLDQKKKTVHTKVQRWLTEKKNEKLHKELLGSYQHFQEYKQIKEELELKLNVLKKVPDVVKNLEGNIHKQLMLDSLSDYKSMELFQDLIFTVIVDRHGYEIIFKHPFLHYPEVHTCEDNS

SEQ ID NO: 12598 - protein, 499 aa, Unknown
  Description of Unknown: Integrase A1166 sequence
  IPR006119,PTHR30461:SF3,PF00239,cd00338,PF07508, PS51736,G3DSA:3.40.50.1390,IPR038109,SM00857,IPR011109, PTHR30461,G3DSA:1.10.10.2600,PS51737,SSF53041,IPR036162
MSTEHQQYSTQNQAQTIREYAERRGIRIVKTYSDDAKSGLIIGGRMALQQMIADVESGVADFSVILVYDVTRWGRFQDTDESAYYEYRCRKAGMQVAYCAEQFENDGSPTSTIVKSVKRAMAGEYSRELSVKVFAGQCRLIELGYRQGGPAGFGLRRALLNERGEVKTELKRGEHKSLQTDRVVLVPGPDDEVRTVRWIYSQFLKKGLSETEIATELNARGILTDLGRAWTRATVHQILTNEKYIGNNVYNRRSFKLKRKRVANGPEMWIRSDGAFDAIVEPKQFQKAQAIIAARNRRFSDEVMLERLARLFQRHGYISGLVIDEADGMPSSGAYAHRFGSLLRAYSLVGFTPDRDYRYIEANRLLRQFHGDEIERVIHEITLLGGAVIRNPATDLLTINGEFTASVVVARCRETSSGGLRWKIRFDTGLAPDITIAIRMNRTNTDALDYYLLPQFEMRSKPLGLAEENGLMLDAFRFETLNFFFDMARRVSVSEVTPW

SEQ ID NO: 12599 - protein, 499 aa, Unknown
  Description of Unknown: Integrase A1167 sequence
  IPR006119,PTHR30461:SF3,PF00239,cd00338,PF07508,PS51736,G3DSA:3. 40.50.1390,SM00857,IPR038109,Coil,IPR036162,PTHR30461,G3DSA:1. 10.10.2600,PS51737,SSF53041,IPR011109
MKAVIFARVSSRDQEDGHSLDAQIQCCYEYAIKKNFKVIEQFKIVESSTATGRPEFSKMVNFVKGQKDKIIVLCYGVDRLQRDFDEQYIELQRLIKQGRIEIHYAKSEFIEHKDMDSSDKFRKNLDVLLANDYRNKISDNVKRSARKKLADGTILGDSPLGYLNSKRMDKKKEKVNVYIDPLRGSLVKKMFEDYATGMYSMNEIRLRITEEGLRSKKGCQIGKSQVEQILQNPFYYGYMKYNDILYKHVHPALISKELYDECQLVRQGKRKSKSKRTQKPFVLKGLLKCHHCGCGYSPELKKEKYVYMRPTKSKGDCSYCHHLSEEKILIQIEDVLKGIKIPDNILAELNTELKKSSAAEYEHQIQESNKLQTQYQTIQTRIKRARELFLDAQVSKEEYDEMITGLQAERHNVEVRLQRLTEADDGFNKSLSTIFALASKAHDLFKSSELEEKRRIITILFPNLEMNAGKLMFTTRKPFDVFLNMPHRPKWLPGQDLNL

SEQ ID NO: 12600 - protein, 497 aa, Unknown
  Description of Unknown: Integrase A1168 sequence
  IPR006119,PTHR30461:SF3,cd00338,PF07508,G3DSA:3.40.50.1390, SM00857,IPR038109,IPR036162,PTHR30461,G3DSA:1.10.10.2600, SSF53041,PS51737,PF00239,IPR011109
MSTEHQKYSTENQAIEIAKYARENDYVIVKTYMDSGKSGLKLDGRDALQSLIEDVSNGQTDFSIILVYDVSRWGRFQNADESAYLEYLCTRAGIAVEYCAEQFANDGSLTTTIIKNMKRAMAGEYSRDLSRKVFEGQRHLVELGYRQGGTAGFGLRRQLIDERGEPKALLAHGERKSIQTDRVILVPGPATEVAVVDRIYRLFVEKGQNECSIAGILNSENLFTDMGRPWTRGTVHQVLTNEKYVGNNVFNRISFKLKMRRVRNPPDAIIRASGVFQPIVSKDLFQRAAAIIAERTVRLRDDEMLALLAQLLLKSGKLSAIIIDEQEGMPSSSIYGSRFGSLLRAYKLIGYTPDRDYRYVEINRLLRSLFPDVLSGIIAAVEHAGGRIIRDAATDLLKVNGEFTVSVVVCRCIETPAGNLRWKIRLDNGLHPDLSIAVRMAPGNEKILDYYLLPAIDFASANLAVAEDNAIGIDAYRCADLSRFIRLTERVPIRRAA

SEQ ID NO: 12601 - protein, 497 aa, Unknown
  Description of Unknown: Integrase A1169 sequence
  IPR006119,PTHR30461:SF3,cd00338,PF07508, PS51736,G3DSA:3.40.50.1390,SM00857,IPR038109, IPR011109,PTHR30461,G3DSA:1.10.10.2600,SSF53041, PS51737,PF00239,IPR036162
MSTDHQRYSTENQSEAIRDYARARGIEIVRTYADSGKSGLKIEGRDALRQLIEDVQIGTTDFTMVLVYDVSRWGRFQDADESAYYEYICRRAGISVQYCAEQFENDGSPVSTIVKGVKRAMAGEYSRELSAKVFAGQGRLIEKGYRQGGPAGFGLRRTLIDERGQVKGILQRGEHKSIQTDRVILTLGPVEEVELVREIYRRFVHHGESESEIATDLNKRGIKSDLGRNWTRGTVHQILINEKYAGDNVWNRQSFKLKKRHVRNDPDMWVRANGVFDAVIERFLFEAARTVINARSFRLSDEEMLQSLRDLYQRTGSLSGIVIDECDGMPSSSAYSSRFGSLLRAYSLVGFNPDRDYSYVEINRELRKLHPEVLEQVIGALKSSGSEAWQDSETDRVTVNEEFTLSIVIARCAQTPTGLLRWNLRFDTSLAPDITVVVRMDSANQKPFDYYLFPRLDLLAERLRMAEDNALQLDAYRFDDLAILYQIAAPVNLSEAA

SEQ ID NO: 12602 - protein, 497 aa, Unknown
  Description of Unknown: Integrase A1170 sequence
  IPR006119,PTHR30461:SF3,PF00239,cd00338,PF07508, PS51736,G3DSA:3.40.50.1390,IPR038109,SM00857,IPR036162, PTHR30461,G3DSA:1.10.10.2600,PS51737,SSF53041,IPR011109
MSTDHQRYSTENQSEAIRDYARARGIEIVRTYADSGKSGLKIEGRDALRQLIEDVQIGTTDFTMVLVYDVSRWGRFQDADESAYYEYICRRAGISVQYCAEQFENDGSPVSTIVKGVKRAMAGEYSRELSTKVFAGQGRLIEKGYRQGGPAGFGLRRTLIDERGQTKGILHRGEHKSIQTDRVILTLGPSEEVELVREIYRRFVHHGESENQIAADLNNRGIKSDLGRNWTRGTIHQILINEKYAGDNVWNRRSFKLKKKHVRNDPDMWIRADGVFDAVIERALFEAARTIINARSFRLSDEEMLRSLRDLYRQRGSLSGIVIDECDGMPSSSAYSSRFGSLLRAYSLVGFDPDRDYRYVEINRELRKLHPAVLDEVMGALKSSGSEAWQDNDTDHVTVNEEFTLSIVIARCFQTPTGLLRWNLRFDTSLAPDITIVVRMDSANQKPFDYYLFPRLDLLADRLRIAEDNALQLDAYRFDDLAILYQIAAPVNLSEAA

SEQ ID NO: 12603 - protein, 497 aa, Unknown
  Description of Unknown: Integrase A1171 sequence
  IPR006119,PTHR30461:SF3,cd03768,PF07508, PS51736,G3DSA:3.40.50.1390,SM00857,IPR038109, IPR011109,IPR025827,PF13408,PTHR30461, G3DSA:1.10.10.2600,SSF53041,PS51737,PF00239,IPR036162
MPNASLRAATYRRVSTEEQVSNHSLGNQADKLAAFAEQQGYAVVRDYVDPGHSGATRKRPGLEQLLHDARLGLFDTVLIYRLDRLARSTHLAYSVIQELMDVGVGVRSSSEPQIDSTTPMGKVSLGVTAIFAELERDTFMQRSQEGREKSLAAGIYNGGSVSYGYEIKDRRLVIQPQEAEVVRMIFQWYLEHRWATVRIAEELTALNIPTRFRGDGRLFRGKETLGCWRGGSIYRMLKSRTYIGEFQYGRRTASGKKDPDRVIKVAVPPIVDLEVWEAAQEMMVTNRVTALRNAKNIYMLKGLIRCAACGRSYLGAKTNGWAGYRCCGRVVPGAGPRHLACKNTHVPARMVEDPVWERITAILLDPGEVLGQQPLTLIPAELPLVEKALADARTSRERLTDLYLDANAGLSKEGYLSRLAGIDAQLAGLEARVLVLRDTQAQRRQQEQSEKRIYDLSAQYRDRLEHADDQLRQTLAHQLVKRITVQTDGSVDIEWVV

SEQ ID NO: 12604 - protein, 497 aa, Unknown
  Description of Unknown: Integrase A1172 sequence
  IPR006119,PTHR30461:SF3,cd00338,PF07508,G3DSA:3.40.50.1390, IPR038109,SM00857,IPR036162,PTHR30461,G3DSA:1.10.10.2600, SSF53041,PS51737,PF00239,IPR011109
MSTEHQQYSTLNQSDKIREYAERRGILIVRTYADEGRSGLRIDGRLGLQQLIHDVQSGTADFSVVLVYDVSRWGRFQDADESAYYEYICRRAGIQVAYCAEQFENDGSPVSTIVKGVKRAMAGEYSRELSVKVFAGQCRQVELGFRQGGAAGYGLRRLLIDQSGSVKFQLGRGEHKSLQTDRVVLTPGPQAEVDMVLQVYRWFVDDDMSEATIAVKLNTAGISTPTGREWSRAAVHEILTNEKYIGNNVYNRTSFKLKKVHVFNTPDMWIRKDGAFEGIVPRDLFFTVQGIIRARARRFSDEELIERLRRLFERRGFLSGLVINETDDMPSSSVYALRFGSLLRAYQLVGFTPGRDYRYLEINRYLRQLHPRIVAETAAQVAALGGQIVVDPATDLLDVNQEFRASIVLSRCRSNEFGRRHWRVRLDTSLRPDITVVVRLQPENKVALDYYLLPHLQFGASALSLAEQNAIELESFRFDSLDYFYGMAERFRLRRAA

SEQ ID NO: 12605 - protein, 497 aa, Unknown
  Description of Unknown: Integrase A1173 sequence
  IPR006119,PTHR30461:SF3,PF00239,cd00338, PF07508,G3DSA:3.40.50.1390,SM00857,IPR038109, IPR036162,PTHR30461,G3DSA:1.10.10.2600,PS51737, SSF53041,IPR011109
MSTEHQRYSTENQADAIRDYAARYNCAIVRTYADEGKSGLNIDGRAGLQKLIADVTGGHADFEIVLVYDISRWGRFQDADESAYYEYLCRRAGVRVEYCAEPFDNDGSLGSDIQKMLKRKMAGEYSRELSVKVFAGQCRLIEKGFRQGGPAGFGLRRQLVDEAGRSKALLARLEHKSIQTDRVVLVPGPSDEIEVVRHIYQSFVEDGRNEGEIAIMLNAEGIRTDLGRDWTRGTVHQVLINEKYIGNNVWNRGTAALKRKRTRNEPSMLIRAEGAFPAIVDRLLFDAAQAIIRGRSARLSDADMLDVLRRLLAEHGYLSGLMIDEAADCPSSSAYRSRFGSLLRTYSLVGYAPDRDFAYVESNRRLRQRNPQVVDEVLAALRAAGASVVLDPETAILTINEEVTAALLLCRCTQTAAGSLRWLIRLDGPVPPDITIAVRMEPGEEAVRDYYLLPSLDGRAARLRLAERNEAGLDTFRFATLEALYELMRRIPLAEVA

SEQ ID NO: 12606 - protein, 495 aa, Unknown
  Description of Unknown: Integrase A1174 sequence
  IPR006119,PTHR30461:SF3,cd00338,PF07508,PS51736, G3DSA:3.40.50.1390,SM00857,IPR011109,PTHR30461,SSF53041, PS51737,PF00239,IPR036162
MRAAGYVRMSSDRQELSIGTQLAAIHGYAQANHIEVVRVYEDAAKSGLQISNREGMKRLLRDVMDEPRPFDLVLVYDVSRWGRFQDIDAAAYYEYTCRLHGAKVIYVQEVFGSDDEPMTALLKTLKRAMAAEYARELGVKTRAGQDRAVHLGYQMGPLPCIGLTRMAVDRVGKRRPLARGQSKASQGERIAWGPGPPAEVALTRKIFSMYADTNATIRGVARQLRAVGTTAQDGRLFTESMVDRLLRCEALAGNFVWGSERYIGGLSRKKRPVTRADNVIEPVVPADLWMRVQAKLWARRRLRRDKEQLLQVLRERLTEHPELNALDLDALGLHSKKAYTNAFGSVSRALELAGRDSGAVRALHERRKLVGRKVGDRMTSDIAGLLQEIGMDCRVHPRSRVLVIGGTVKLRLQLLWPRTYRGVQRWHVLKSRRPVAHLVLLAQMDDGGSATRFVLLNPKEYRETAPWLDEELPPYLEPIATGVELIQALRVRLAQ

SEQ ID NO: 12607 - protein, 494 aa, Unknown
  Description of Unknown: Integrase A1175 sequence
  IPR006119,PTHR30461:SF3,cd00338,PS51736, G3DSA:3.40.50.1390,SM00857,IPR025827,PF13408, PTHR30461,SSF53041,PF00239,IPR036162
MIAAVYIRKSREDKNKPSHRLTVQREQLPAYALAQGWQVEIYDDGHASAARGKVEELHERARLESDVRSGKINLILVIELSRLSRDDSLQDYVSWLYLCSQHGVKLATPSRQLDPSQHSDWMLLLMEGGFSSVEMKVLQARMAEGRAEAYRAGKWLSGNPPMPYKYDRGAGGLIVDPDQMPTFRKMMRLAELYPASQVADRVGIPSVTVRRAISDDRLLMYQGARRDPDSGATIDGQWPAVIDHLQAERIRRNRGSRRKAPRRQYAAMLSNLDILTCGYCGHSYRAWKNGRTRVDGTRLDYYGCRHKDKSDACQSRMIPTHILEERVLTNLFGLLSKAAELQRAWEARQDSDDTPGKLADIDREIEKCHTKKQRLVEAVADGLLSPADVRQKRNEIDNTIGTLNQKRAGLLSAQAIAPDWDALKITRQAFDHLYQAEQREVIASLIAQIRIFPTYALITYRFPRNENGDNIARIHLPERQKPAGPRQVYKVKKQ

SEQ ID NO: 12608 - protein, 487 aa, Unknown
  Description of Unknown: Integrase A1176 sequence
  IPR006119,PTHR30461:SF3,PF00239,cd00338,PF07508, PS51736,G3DSA:3.40.50.1390,SM00857,IPR038109,IPR011109, PS51737,IPR025827,PF13408,PTHR30461,G3DSA:1.10.10.2600, Coil,SSF53041,IPR036162
MTRVALYARYSSDNQREASIEDQLRICREQAKREKWKIVGTYKDAGISGASMILRPGIQALLQDAQAGQFDIVLAEALDRISRDQADVATFYKHLKFAGVPIVTLSEGEISELHVGLKGTMNALFLKDLAAKTHRGIRGRVEDGKSGGGLCFGYNVVKQLDARGDPIRGDREINEAEANIVRRIFREFAAGVGPRTIARTLNEEGVPGPAGKLWSDTTIRGHVKRGTGLVNNELYIGRLIWNRLRYIKDPSTGKRVSRLNPESDWIIKDVPELRIVDDELWHSVRVRQGEIAEKFANVTEAVRKHHKKNRLNGTRRPKSLLSGLVFCGCCGGPYSLRGADRFACSNHISKGACSNSRTIPRECLEARVLSGLKDRMMAPEIVEEAMRAYAEETNRLNRERRSSGDSWKAELVKIEKQIRGIIEAIKAGMFHESMKAEMDTLEARKTELNTLLADAPEDTPDILPSASAIYAKKVSALTKALNRKEER

SEQ ID NO: 12609 - protein, 485 aa, Unknown
  Description of Unknown: Integrase A1177 sequence
  IPR006119,cd00338,PF07508,PS51736,G3DSA:3.40.50.1390, SM00857,IPR011109,PTHR30461,PS00397,SSF53041, PF00239,IPR006118,IPR036162
MKLKPIIGYARVSTEEQANTHALEQQISRLINTGVQKVYFDIESGREQDRDQFKKVLELVIRQEISELRAIRWDRLARNAYLYLEVKKIFKISGVKLILLDQGEVDFNTASGELHSDLQVLFSVHESRMLQERVNRGLDYRRSRNAAWMQPPWSYLIVNEKYELDHTPLPYCFLIHKPDNAAELSHEPDDSPKLVRISRAKIAREVFEYFLLVRKPTKVLKHLHEVYGLQKNSEDNLPEFKNFPISIWGLKYWLQNPVFQGHTAYHKLKSNGSLKSPDDWDIRRDTHPEQRLINEEEAQEIKAIFASNTKRFGQVDAKFYLTGHIFCEKCRAKCNLKQNRDYAYYGCPHSATVCDNRPNVRLFKIEQAIIAQLVLRSKQVSESPSNTTKSERLVELERQYFELDQIAGSDFNPALKEAKEKLLKAIEAEPTPTQDIAQQILRHPMAKKINFWYTLTQTEREIFYDLLLARVVIGKGEVTSVLLKV

SEQ ID NO: 12610 - protein, 484 aa, Unknown
  Description of Unknown: Integrase A1178 sequence
  IPR006119,cd00338,PF07508,PS51736, G3DSA:3.40.50.1390,SM00857,IPR038109,PS51737, IPR036162,PTHR30461,G3DSA:1.10.10.2600,SSF53041, Coil,PF00239,IPR011109
MKTVAYYRSSIDSQENSIEMQQNSVLTRSIDMALIIDEEYIDEAVSARKIGLKKRSALQKLLQDIKNNNVETLFVFKRDRLARNVMEYYEIYQILRNKKINVILTAPNEPPVYYTPIGEYLELIMAGMAQREGEQIIERLKQTLKSNFQSGKNPGRLPYGFKWNKETKEIELIDEQVQIVKRIYQELVSGKYESLKELCSVLGLKENGKFWTSADIRKIALNPTYIGLRTMNIFGEDVTSKYERLSIIDKNTWEKACSIVTVLSPKKTHQDYVFEQVLFPLQDLLICSKCNESLQKVKARRKDNLKYKCLNHSSVYVFKSTIEPLVFERCKEYFHSLLTSHFYELFDRYEQDAKKQVKQKIQTIEEKIKLMNEKLITKVDTWYHETDAPYKEQKEIEIMALYDELAKYKKQKERVIQELSDVKQLREKISNYQSSISLSYDDIKENRQLGSFFQDLIQQVKTDGKNCEIVFKHPFLRTQEVLTS

SEQ ID NO: 12611 - protein, 479 aa, Unknown
  Description of Unknown: Integrase A1179 sequence
  IPR006119,PF00239,cd00338,PF07508,PS51736, G3DSA:3.40.50.1390,SM00857,IPR011109,PTHR30461:SF21,IPR025827, PF13408,PTHR30461,PS51737,SSF53041,IPR036162
MAKAKTPGQRVGVGSAAIYARISADVEGTGLGVARQVQDCRKLAADRGWQVGDEYVDNDVSAYSGKPRREYARMLDDLKSGARDAVIVYNLDRLHRRPVELEEFVALCESVGVRDVATVTADIDLGNDDGLFMARIFAAFAAKESGRKSARIRRKMLQNAEQGLPHGSARPFGYEPDKITVCSKEAKVIREMVARYLAGASIRSLTIWLNDAGLAPAVAKSWQTTAVRQILASGRIAGLREHHGEVIGPAAWPAIITHAERDRILARMTARSVTKTRAPRTYLLSGLLRCGRCGNRLFSQARHNNPQNRVRRYVCLKGPDHGGCGRLTVVALPVEELLTDAVLTRLDSPHLANVLAGKASVDADVAALSAQLEADTTRLDELAALYAQGAVTAREWIAARDPITDRITATRRDIAAATDTTNVTELAGTGHLLRGQWDDLDIDRQQTIIKAVLDHAVIAAGTPGARSLDINRVRPHWGV

SEQ ID NO: 12612 - protein, 477 aa, Unknown
  Description of Unknown: Integrase A1180 sequence
  IPR006119,cd03768,PF00239,PS00398, PS51736,G3DSA:3.40.50.1390,SM00857,IPR036162, PTHR30461,PS00397,mobidb-lite,Coil, SSF53041,IPR006118,PTHR30461:SF2
MSDQRIGYVRVSSVDQNTDRQLDGIPLSRVFTDKASGADTKRPELDRLLAFVREGDTVVVHSLDRLARNLDDLRRLVQRMTLQGVRIEFVKESLTFTGEDSPMANLMLSVMGAFAEFERALLRERQREGIGQAKLRGVYRGRKPSLTEKQIAAEYGDPHRQNRVDLSRHPLHTPTIQSPASPIAVGSISQYAVPQRPQRTPSLSSTRSRTSLIVLFSIRTSPCCSFRIRIRRNRRRGRSPREEIFRRKILGRSWPESPGPLPFSDCGRYAPLSSRFRTSRNRQGPPSLPSSGNPRSSPETRREPPEHLFWKGGKSRKRIPPIRSCSLKLLRVGIMDGAGPSKCRIPKTEKHGPQFTQVGLFPAIPTEKRKPSPGGSCEGQSPDMGQGFPAPVRKIGGVRSTNVFVFVLPSLVSPCEKIFKPIKTGREEARERSDPCSSSFALRAPVPAPFFPGKKMKNSVRLPPPLLFFEGGSYLTL

SEQ ID NO: 12613 - protein, 476 aa, Unknown
  Description of Unknown: Integrase A1181 sequence
  PTHR30461:SF3,G3DSA:3.40.50.1390,SM00857,SSF53041,IPR006118, IPR011109,PF07508,IPR038109,PS00397,G3DSA:1.10.10.2600, IPR036162,cd00338,PS51736,PF13408,IPR006119, IPR025827,PTHR30461,PS51737,PF00239
MTETRCALYARVSSEAQTRDNTIASQVVALQERIAADGFLLEPDHSYVDDGYSGSLLLRPALERLRDAVAGGQVDRLYVHAPDRLARRYAHQALLIDEFRRAGVEIVFLNRPIGGTAEDDLLLQVQGVIAEYERAKILERSRRGRRHAACSGSVSALTGAPFGYRYVSRDQGGGLARFEVVEAEAHIVRLIFAWVGLDRMSLREVCRRLEQIGCRTRTGTTPCYASTIRGILANPAYVGRAAFGRARYLPPRPRLRPIRGHLQPSPHATSRVAVPPEEWIEIPVSSLVDPAVFEAVHAQFEENRKRKRQRTPSSDWLLQGLTVCRRCGYAYYGKRAPRVHKYDPTDTLRYYRCIGTDGHRFSGHRVCDNPQVRGDHLEEAVWDQVKGLLEDPHRVAGEYRRRLLAARDQVREPEEIVRLERQMATLRRGIGRLIDSYAEGIIDKAEFEPRIAGLKQRFSQLQERHQAAVEVAECEL

SEQ ID NO: 12614 - protein, 472 aa, Unknown
  Description of Unknown: Integrase A1182 sequence
  IPR006119,PF00239,cd00338,PF07508,PS51736, G3DSA:3.40.50.1390,SM00857,PTHR30461:SF21,PS51737,IPR036162, PTHR30461,Coil,SSF53041,IPR011109
MTSTIVRVVIYCRISKDRIGAHLGVDRQEFECREMARKRGWTVVAVFADNDLSAYSGKPRPGYRRLLALIEAGEADAVLCWHTDRLHRHGDPMELENYIDLCQPRNIPTYAKQAGTLDLTTAWGRKDARNRAVDARYESEHASERLVEKMTELARDGLFLGGPRPFGFDSDGLTPRPAEIAAIARAIQDVLAGASIGSVARAWNELGLKPPQGAKEWIPASVRSVLMRPRNAGLSVHRRQVVGNATWAPIVSEAQWRALKSMLDDPERRPKGNLSLKWQGSNGYYCGKCDGKATMRSNSVWSPKRKILQPAYRCRAVNHNTIIAEPVDDLVNAVIADLLRRENVSLLPSADPDELRSAQAELTALGNRKKQLAALYGANEIDEQEWSEARASLTGALERAQAKVAELSAGSTLAGIADAPDPGRAFLASTVERRRAVITAVAVVSIMPNNPKGYTREAGKIDPNRVDITPIG

SEQ ID NO: 12615 - protein, 467 aa, Unknown
  Description of Unknown: Integrase A1183 sequence
  PTHR30461:SF3,G3DSA:3.40.50.1390,SM00857,SSF53041, IPR011109,PF07508,IPR038109,PS50157, G3DSA:1.10.10.2600,IPR036162,cd00338,IPR013087, PS51736,PF13408,Coil,IPR006119,IPR025827,PTHR30461,PS51737,PF00239
MKCVIYRRVSTDMQVEEGISLDMQKLRLEQYAKSQDWLVVNDYCDEGYSAKNTERPAFQQMIRDMKKKQFDIILVYRLDRFTRSVSDLHSILKIMDEYNVKFKSSTEIFDTTTATGRMFITLVATLAQWERETTAERVRDSMHKKAELGLRNGAKAPMGYNLKKGNLYINHTEAEIVKYIFEMYKTKGVVSIVKSLNSRGVKTKQGKIFNYDAVRYIINNPIYIGKIRWGEDILTDIAQEDFETFINKDTWYTVQQIQDSRKVGKVRLQNFFVFSNVLKCARCGKHFLGNRQVRSHNRIAVGYRCSSRHHQGICDMPQVPENILEKEFLNLLEDAVVELDASDEKPVELSNLQEQYNRIQDKKARLKFLFIEGDIPKKEYKKDMLTLNQEENIIQKQLANITDTVSSIEIKELLNQLKDEWNNLNNESKKAAVNAIISSITVDIIKPARAGKNPIPPVIKVMDFKLK

SEQ ID NO: 12616 - protein, 463 aa, Unknown
  Description of Unknown: Integrase A1184 sequence
  IPR006119,PTHR30461:SF3,PF00239,cd00338,PF07508, PS51736,G3DSA:3.40.50.1390,IPR038109,SM00857,IPR011109, PS51737,PTHR30461,PS00397,G3DSA:1.10.10.2600,Coil, SSF53041,IPR006118,IPR036162
MKVAIYARVSTDEQAKEGFSIPAQRERLRAFCASQGWEIVQEYIEEGWSAKDLERPQMKQLLKDIKKGNIDIVLVYRLDRLTRSVLDLYLLLQTFEKYNVAFRSATEVYDTSTAMGRLFITLVAALAQWERENLAERVRFGIEQMIDEGKKPGGHSPYGYKFDKDFNCTIIEDEANVVRMIYRMYCDGYGYRSIADRLNELGIKPRIAKEWNHNSIRDILTNDIYIGTYRWGNKVVLNNHPPIVSEALFRKVQKEKNNRSVDRKRVGKFILTGLLHCGNCNGHKMQGSFDKREQKTYYRCLKCNRITHEKNILESLLAEVQQLITSKEYFMSKFSHQFDEPKTIDASALTKELEKIKRQKEKWYDLYMDDNNPIPKEELFAKINELNEKEKEIYETLSECELEEKESIEEKYNRISKMTDFKQQFEQADDFTKKELLFSIFEKIVMYREKGRGKKISLDYTLK

SEQ ID NO: 12617 - protein, 463 aa, Unknown
  Description of Unknown: Integrase A1185 sequence
  IPR006119,PTHR30461:SF3,cd00338,PF07508,PS51736, G3DSA:3.40.50.1390,SM00857,IPR038109,PS51737,IPR036162, PTHR30461,PS00397,G3DSA:1.10.10.2600,SSF53041,Coil, PF00239,IPR006118,IPR011109
MRVAIYVRVSTDEQAKEGFSIPAQRERLRAFCESQGWEIVQEYIEEGWSAKDLNRPQMQRLLKDIKKGNIDIVLVYRLDRLTRSVLDLYLLLQTFEKYNVAFRSATEVYDTSTAMGRLFITLVAALAQWERENLAERVKFGIEQMIDEGKKPGGHSPYGYKFDKDFNCTIIEDEANVVRMIYRMYCDGYGYRSIADRLNELGIKPRIAKEWNHNSVRDILTNDIYIGTYRWGNKVVLNNHPPIISKSLFRKAQKEREKRKVDRTRVGKFLLTGLLYCGNCDGHKMQGSFDKREQKTYYRCLKCNRITNEKNILEPLLDEIQLLITSKEYFMSKFSDQYDQQEAFDVSTLTRELEKIKRQKEKWYDLYMDDHNPIPKEELFSKINELNKKEEEIYSQLNEVEPEENEPIEEKYNRLSKMLDFKKQFEQANFFTKKELLLSIFEKIVIYREKGKFKKITLDYTLK

SEQ ID NO: 12618 - protein, 463 aa, Unknown
  Description of Unknown: Integrase A1186 sequence
  IPR006119,PF00239,cd00338,PF07508,PS51736, G3DSA:3.40.50.1390,SM00857,IPR011109,PTHR30461,PS51737, SSF53041,IPR036162
MTSANAIIYARISKDRTGAGLGVERQAEDCRALAERLGWTVLRVESDNDISAYSGKRRPGYERTLAALESGEASAVIAWHSDRLHRRNTELEPFLDIVERTGAQVATVQSGPVDLASPSGRMTARILGAVAQQEVEHTTARIKAQKAQTAAAGGYRGGMRPFGYERDGMTIREHEAAIIRRAIADVTAGKTISAVRRELNAAEIRTSSGREWSLPGVRNVLTRWRNAGKVEREGEPVADAQWPAIVTVDELLAVRAVLANPARRVSPGNQRRWQGAGVYIDAYTGDPMVCTKSSGTNPTPVYRPAARTAGCASVVAVDLDEYVSAAVCARLGQPDARELLAAPEVDTRGLSGQREALDARLREAASLFSSGAITGAQLTEITADLRAQLDTIDAQLDAATADPELAELLRADDIRAAWDGPNGLHVDTRARLIKSLARVTVHKMTVKGVKRTFKPECVDIEWL

SEQ ID NO: 12619 - protein, 456 aa, Unknown
  Description of Unknown: Integrase A1187 sequence
  IPR006119,PF00239,cd00338,PF07508, PS51736,G3DSA:3.40.50.1390,IPR038109,SM00857, PTHR30461:SF21,Coil,IPR036162,PTHR30461, G3DSA:1.10.10.2600,PS51737,SSF53041,IPR011109
MEAAVYLRQSVDKYGDELAITRQREDCLKLCGARAWIPHEYVDNDRSATKGPRPAYEQMLDDIRTGVIGAVVVWDLDRLHRRPMELEHFIDLADDKHLALASVGGDADLSTDNGRLFARIKGAVSRAEIERKSARQKRAARQRAEAGIWWIGPRPFGYTEAGEVVDTEAGALREAYSAILASASLYSIAAQWNSAGIKTTRGNAWTGRSVKQTLVRPRYAGFRFYRDEILGKADWPAIVPEALWRAVRDILADPSRRAPWTGRKYLLTGLARCGKCGATVTTTTKAQVGRVVYVCKHCYGISRKQAEVDNWVIWRVANALAQPDAWRALLGGTSEDAALLREEQAALRSRLDMLATDFADGVLTRDQLRTATERIRRRLADVESQMFGPDAHRYFGDVIDADDPRVAFRELPLDRKRALIETMATVTIMPIGHGGTKVFDPLMVEILPRNGFVCRP

SEQ ID NO: 12620 - protein, 453 aa, Unknown
  Description of Unknown: Integrase A1188 sequence
  IPR006119,PF00239,cd00338,PF07508,PS51736, G3DSA:3.40.50.1390,SM00857,IPR025827,IPR036162,PF13408, PTHR30461,PS51737,SSF53041,IPR011109
MNSESHQKITSAHLSRMAYLYVRQSTLRQVLENTESTQRQYALRERAAALGWPLEHIVVIDRDLGQSGASAADREGFQQLVSEVSLGHVGIVLGLEVSRLARNSTDWHRLLELCAFADTLILDEDGLYNPGLFNDRLLLGLKGTMSEAELHVLKARLRGGILSRARRGELKQMLPVGFVHDVQDRVILDPDVQVQGAVRLFFETFKRTGSCLAVVKDFHARGLLFPRRLRSGAHKGELVWAELLHCRARQIIHNPRYAGAFVFGRTKQRHLPNGKICSRLVPSEEWILLRDMHPGYISWEEYQSNRQQVQGNALSWSDDRRRSPAREGNALLQGLVICGTCGERMTVRYHLHRGQSVPTYWCGRRPMHRGESGLCQTVHGGTLDTAIGDVVIEAMTPFAIEVALTVQEELVSRHEEADRLRRQHVERARYEADLAQRRFPEGGPGQPVGRRCA

SEQ ID NO: 12621 - protein, 452 aa, Unknown
  Description of Unknown: Integrase A1189 sequence
  IPR006119,PTHR30461:SF3,cd03768,PF00239,PF07508,PS51736,G3DSA:3 .40.50.1390,SM00857,IPR038109,IPR011109,PTHR30461,G3DSA:1.10 .10.2600,PS51737,SSF53041,IPR036162
MSKHVIPKRRCAVYTRKSHEEGLDQDYNSIDAQKDAGHAYITAHRSEGWISVNDNYDDPAYSGGTLERPALKRLMRDIEEDKIDTVVVYKIDRLTRSLHDFSQLVEIFERMNVSFVSVTQEFNTTSSMGRLMLNILLSFAQFEREVTAERIRDKVASSKRKGLWMGGIPPLGYDVKDRLLVVNSNEAKTVRHIFSRFLEIGSATLLVKELRLDGISTKSWTTKDNKYRPGKLIDKGFIYKLFQNRTYLGEIGHKGQWYEGKHDAIIDKTLWEAVHKKLADSYKAKGNNTRAKVPFLLKGLLFDTEGRALTTSFANSRHKNGKRYRYYLSIRDAKEGAGTSDLTRFPASELETAVTTQVMTLLKSSEIVKEVTTIAQVHDDELDEAMVAVALTKMTTLWEQLFPDEQARLIHLMIEKIIITPNAMDLRLRKNGLEQLAQEITPETLKKKVVNG

SEQ ID NO: 12622 - protein, 442 aa, Unknown
  Description of Unknown: Integrase A1190 sequence
  IPR006119,PF00239,cd00338,PF07508,PS51736, G3DSA:3.40.50.1390,IPR038109,SM00857,IPR011109,IPR025827, PTHR30461,PF13408,G3DSA:1.10.10.2600,PS51737,SSF53041, IPR036162
MTRIIRKITPKAPKAPIKKRVAAYARVSSGKDAMLQSLSAQISYYSEFIQKRYDWEYAGVYADEAATGTKDNRKEFQRLLSDCRSGKIDMVITKSISRFARNTLTVLETVRELKGISVDVYFEKENIHSISGDGELMLTILSSFAQAESLSVSENCKWRIRKRFAEGELVNLRFMYGYRIEKGRVEVNQKQAKIVRMIFNDYISGLGCTAIANKLRRMGIQSLRGGIWNSDIVAQIIKNEKYIGNALLQKKHVSNHLTKKLIANKGVLPKYYAEGTHPPIIDAATFQLAREIMAKNWILNEGKKAAGTYPFTSKIKCGKCGKNYKRKTTHGQAFWNCSTHIKYGKEVCHTKRIPESILCLVAANALGIEEFDEVTFNRQIEEIQIPDANLLLFVFNDGRTDLREWQSKSRSESWNEEAREKARMRQIEYLEGRKGECVRHVQ

SEQ ID NO: 12623 - protein, 437 aa, Unknown
  Description of Unknown: Integrase A1191 sequence
  IPR006119,PTHR30461:SF3,cd00338,PF07508,PS51736, G3DSA:3.40.50.1390,IPR038109,SM00857,IPR011109,IPR025827, PTHR30461,PF13408,G3DSA:1.10.10.2600,SSF53041,PS51737, PF00239,IPR036162
MKEKKITKIEALSKLPKKTRVAAYARVSNGKDAMLHSLSAQINYYKKMIQDNNDWQFVGVYADEALTGTKDSRQEFQQLLEDSKAGKIDMIITKSISRFARNTMTLLETVRELDKLNVDVFFEEQNIHSISSEGEMVLTLLASVAQEESRSVSENMKWRIKKEFEQGEIWGGRSPLGYSLKNKTFRVIPKEAEVVQLIYKLYVDGNGAEAICQILDAKGIKPKESKKWGPTSIIKILSNRNYTGDLLLQKTYLNNHLSKKQVINKGELDRYLVKGNHEAIISNELFDKVQKLKHQRAIKNKSNLPKKKTFLHGLIQCGICGSTYTPKKMRKKDIWICSKSASKGQDVCDSKLVPHNIIVEASNHILEMDQNNEDTFKSKVTKIIVQENRMLEFHMKDGKILNYRWKHKSRSKSWTPEMKEQARLRALEQHHGGGENA

SEQ ID NO: 12624 - protein, 435 aa, Unknown
  Description of Unknown: Integrase A1192 sequence
  mobidb-lite,cd00569,PF02796,IPR010921,IPR009057, SSF46689,IPR006120,Coil,SSF48295
MTGTAELVIFVTDATGFAMQVYGYKHEKVLTKLLNEALFHYMRNPGWIKVIVKKHRYYACQLVTIPLLAYIKKRVPDKRLQVEAERVMANIAVNYEEKVPETWIMVNENFFTPIPSPEENKFLSQKLNNSLSKMDFIEPEQEKEALGKKKSVKPVKVKSPATSKRKGSPDADKVIERVQLGWRVRDICEEQGCSEAYVYKLIKKRNGCSAMDYRWKQWELISFMYHAEPKVTLEEIEKTCGVTRAAIYHALRKVAERDGKKNEYRERPKKLSAEDVENIKQKLENGALRKEICKEYGITRETLIRYIGRRENYRVIPEELKEAAIRLRIQGKTLQQTADILSVNLHWVKKVWREKKHSPTVIEKRLKYDNRNALTKRDREQAVNAVLKGGHTRNQIYTQYGINALTLRRYIRAAQKREAEALSRKAEDSDKNDDS

SEQ ID NO: 12625 - protein, 432 aa, Unknown
  Description of Unknown: Integrase A1193 sequence
  PTHR30461:SF3,cd03768,G3DSA:3.40.50.1390,SM00857,IPR009057, SSF46689,SSF53041,IPR006118,cd00569,PF02796, IPR006120,IPR036162,PS51736,G3DSA:1.10.10.60, mobidb-lite,IPR006119,PS00398,PTHR30461,PF00239
MLIGYGRVSTADQNPAHQIDALRRAGVEPGDIHIDTASGAKASRPKLDLVLTLARRGDTIVITRLDRLGRSMLHLVNLGADLRARGIGLKVLEQGIDTDTAEGRAMFGMLSVLAEFQRELIVANTRDGLEAARARGRTGGRRPKLTVHQIEQAQRLYDEGRHTVQQIADILGVKRGTLYGHLDKNSIGTRPHSGPATPLPTTSAPAAVVVDQADPAPGIAPAITETATATPQTLGVPAGDPTDGRPGSPGGSSAVVTEAAPTGLVDLGGLVPEPDPIRPLPAADADEHAETNSSTREFARERPNLAWRLKQTARMNLPEPPAVCPNDACGYTAHETSERGRLLEDIKVVWLEPADDGGLIEARHCHRCRPREVPIADIECAACDCGGPLLTGVYATELRDTGEIPALVRRWLSVRRWRVTDAGPVCPDHPDS

SEQ ID NO: 12626 - protein, 432 aa, Unknown; identical to SEQ ID NO: 12625
  Description of Unknown: Integrase A1194 sequence
  PTHR30461:SF3,cd03768,G3DSA:3.40.50.1390,SM00857,IPR009057, SSF46689,SSF53041,IPR006118,cd00569,PF02796, IPR006120,IPR036162,PS51736,G3DSA:1.10.10.60,mobidb-lite, IPR006119,PS00398,PTHR30461,PF00239

SEQ ID NO: 12627 - protein, 416 aa, Unknown
  Description of Unknown: Integrase A1195 sequence
  IPR006119,PTHR30461:SF3,PF00239,cd00338,PF07508, PS51736,G3DSA:3.40.50.1390,SM00857,IPR038109,IPR011109, IPR025827,PF13408,PTHR30461,G3DSA:1.10.10.2600,PS51737, SSF53041,IPR036162
MAQVSVVTPVRPPTPKLVNVAAYTRVSTNAVEQLASLSAQVSYYSRLIQSTPGWAYAGVFTDEGVTGTSMKSRQGLADLMNTARAGKIDLVLCKSISRLARNTVDLLATVRELKDLGVAVRFERERIDTLSADGELLLTLLASFAQEESRSLSQNVKWAIRNRYKNGGTNSFVVYGYSWADGQFTIIEDEAKIVRLLFANYLDGISPEKTAAILNGQGARSRGGGRFYGSVFRRMLENERYKGCQMLQKMYRPTIQAPTCALNDGELPRYWVEQALPPIIDEEMFDAVQAEIAHRREIGPAATPSKNTGVFTGRICCGACGKNYQRKTRTYKSGTSYKFWRCWSACTGNGNPCRGHNLRETLLEQACADMLGTQSFDPVQVGEQIVMIEAFPHQLTFHLADGTMTPVGLTSEGRLA

SEQ ID NO: 12628 - protein, 408 aa, Unknown
  Description of Unknown: Integrase A1196 sequence
  PTHR30461:SF3,cd03768,G3DSA:3.40.50.1390,SM00857,IPR009057, SSF46689,SSF53041,IPR006118,cd00569,PF02796, PS00397,IPR006120,IPR036162,PS51736,G3DSA:1.10.10.60, IPR006119,PS00398,PTHR30461,PF00239
MFVPLLGYARVSTSDQSLTGQIDALRAAGCERVWTDVASGARARRPGLDELVAAVVAGDTVVVTRLDRLGRSLPHLLGLVENLAAAGVGLRSLAEEIDTSSATGRLVLHVFGALAEFERGINHERTMGGLAAARARGRIGGRPPALRGRRLAHARELAAAGMPVAEIADTLLVGRSTVYRALNGSREQDGEEMTSSPIDRVWSVRDAVLKWLYLKAMVDGNRHPVLKADDIANAVEWQGDSLTQQEVAEASEWLRDQEYISGTASWGHGVVRPSITAKGEALADAGKSVRGGNAPADPQGATTIHISNSANVAIGSPGATQTYTVAEQIKRALAVADALEAAADGPPEAVEHAHQIAVEIKREAAEPQPNPSRLKQLLLYAITAGVGALGQTAATDLVHLASQALQTF

SEQ ID NO: 12629 - protein, 408 aa, Unknown; identical to SEQ ID NO: 12628
  Description of Unknown: Integrase A1197 sequence
  PTHR30461:SF3,cd03768,G3DSA:3.40.50.1390,SM00857,IPR009057, SSF46689,SSF53041,IPR006118,cd00569,PF02796, PS00397,IPR006120,IPR036162,PS51736,G3DSA:1.10.10.60, IPR006119,PS00398,PTHR30461,PF00239

SEQ ID NO: 12630 - protein, 402 aa, Unknown
  Description of Unknown: Integrase A1198 sequence
  cd03768,G3DSA:3.40.50.1390,SM00857,IPR009057,SSF46689, SSF53041,IPR006118,cd00569,PF02796,PS00397, IPR006120,PTHR30461:SF2,IPR036162,PS51736,G3DSA:1.10.10.60, mobidb-lite,IPR006119,PS00398,PTHR30461,PF00239
MTRYGTLLGLHGQPTDRVIIVRTGPKTTRVKFPWPDKPGFNPDEVRVGTDTVLDDGGVLWEKYQRTPHAATWLSYSGDPQGLLHVHRVYKNVIKASLYEGNGSWSRVEDFHPDAVRFDAGEGWPKARTDELVTNTSHQPASVATPTTPAPPVKKGPVFHAPTTDPTPAPQPAARSPQQSSVATPPTPTSKPHKTNPIKAIQTAQTPAPPAPKATASGQRVGYLRVSSTDQNLARQREALGVLDREFVDELSARSRAHRPALEECMAYLRTGDELVVASIDRLARSLVDLRTIIDQVTAKGASVRFLKEGLVFSATDQDPRATLMLGILGSFAEFERSIIRERQAEGIALAKKAGKYTGRKRALSPEQVEHARMRVEAGETKTAIAQGLGVGRATLYRALSVD

SEQ ID NO: 12631 - protein, 402 aa, Unknown; identical to SEQ ID NO: 12630
  Description of Unknown: Integrase A1199 sequence
  cd03768,G3DSA:3.40.50.1390,SM00857,IPR009057,SSF46689, SSF53041,IPR006118,cd00569,PF02796,PS00397, IPR006120,PTHR30461:SF2,IPR036162,PS51736,G3DSA:1.10.10.60, mobidb-lite,IPR006119,PS00398,PTHR30461,PF00239

SEQ ID NO: 12632 - protein, 481 aa, Unknown; identical to SEQ ID NO: 11787
  Description of Unknown: Integrase A1200 sequence
  SSF53041,PF13408,PS51737,PF00239,G3DSA:1.10.10.2600, cd00338,PTHR30461,G3DSA:3.40.50.1390,PF07508,SM00857, PS51736

SEQ ID NO: 12633 - protein, 707 aa, Unknown
  Description of Unknown: Integrase A1201 sequence
  cd03770,PF14287,PTHR30461:SF3,SSF53041, SM00857,PF13408,PS51737,PF00239, PTHR30461,G3DSA:3.40.50.1390,PF07508,G3DSA:1.10.10.2600, PS51736
MSRTSRITALYERLSRDDDLTGESNSITNQKKYLEDYARRNGFENIRHFTDDGFSGVNFNRPGFQSLIKEVEAGNVETLIVKDMSRLGRNYLQVGFYTEVLFPQKNVRFLAINNSIDSNNASDNDFAPFLNIMNEWYAKDTSNKIKAIFDARMKDGKRCSGSIPYGYNRLPSDKQTLVVDPVASEVVKRIFTLANDGKSTRAIAEILTEEKVLTPAAYAKEYHPEQYNGNKFTNPYLWAMSTIRNILGRQEYLGHTVLRKSVSTNFKLHKRKSTDEEEQYVFPNTHEPIISQELWDSVQKRRSRVNRASAWGTHSNRLSGYLYCADCGRRMTLQTHYSKKDGSVQYSYRCGGYASRVNSCTSHSISTDNVEALILSSVKRFSRFVLNDEQAFALELQSLWNEKQEEKPKHNQSELQRCQKRYDELSTLVRGLYENLMSGLLPERQYKQLMKQYDDEQAELETKMETMKTELAEEKVSSVDIKHFISLIRKCKNPTEISDTMFNELVDKIVVYEAEGVGKARTQKVDIYFNYVGQVDIAYTEEELAEIETQKEQEEQQRLARQRKREKAYREKRKAQKIAENGGEIVKTKVCPHCNKEFIPTSNRQVFCSKECCYQARQDKKKTDREAERGNHYYRQRVCAVCGNSYWPTHSQQKFCSEECQRVNHNKKTLEFYHHKKEKEKLQCKDLSQTKERVSDMNLSGTITTPA

SEQ ID NO: 12634 - protein, 533 aa, Unknown
  Description of Unknown: Integrase A1202 sequence
  PF14287,SSF53041,PTHR30461:SF3,SM00857,PF13408, PS51737,PF00239,PTHR30461,PF07508,G3DSA:3.40.50.1390, cd03770,G3DSA:1.10.10.2600,PS51736
MLKQQANNKEKVALYSRLSRDDGLDKESNSIANQREMLKRYAKENKFYVYDEYIDDGFSGTTFNRPALNRMFEDIEAGKVNVVLVKDMSRLGRNNALFMYYVEEVFPDLDVRFIAINDMVDTAQDDNEIMPFKSVLNEYYARDISKKIRSSIRTTALTGGFTGAFAPYGYLVDPENKKKLIVDPETAPIVKRIFELSQQGTSTHQIARILCKDGILVPRAYRAKKKGILEQSKGFTFPTDWVGKNVKMILENQVYLGHMVSHKSQTKSFKNKKIVPVPKEDWIVVENTHEAIIDKETFEIVQKFISVKKQPNKTGKPNIFVGLVKCPDCGRNLAYSNPNGNEPRFRCRTYARNTELCTTHAISYKALYEIVQNDIKNHVNSMEELGDHFIKEMRELSETSGSQKIHQFNQELVSLEKRIDEIDSIFTKLIEQNALGKITDERFSKMSMNYETEQAEVVQSYRELKSKIKSEEEKVQGTDRFLETISKYKDVTELNRSMLCELIDSIYVYQAEGIGKERTQKVEINYRFLAVSH

SEQ ID NO: 12635 - protein, 411 aa, Unknown; identical to SEQ ID NO: 11976
  Description of Unknown: Integrase A1203 sequence
  PTHR30461:SF3,SSF53041,PF13408,PS51737, PF00239,G3DSA:1.10.10.2600,PTHR30461,cd00338, G3DSA:3.40.50.1390,PF07508,SM00857,PS51736

SEQ ID NO: 12636 - protein, 513 aa, Unknown
  Description of Unknown: Integrase A1204 sequence
  PTHR30461:SF3,SSF53041,SM00857,PS51737,PF00239, PTHR30461,cd00338,G3DSA:3.40.50.1390,PF07508,G3DSA:1.10.10.2600, PS51736
MKYLALHENSRIAVYSRKSREDRDSEDTLAKHRNELEYLIKRENFKNVQWFEKVVSGETIDERPMFSLLLPRIENGEFDAVCAVAMDRLSRGSQIDSGRILEAFKQSGTLFITPKKTYDLSIEGDEMLSEFESIIARSEYRAIKRRTINGKKNATREGRLHSGSVPYGYKWDKNLKAAVVVEEKKKIYRMMIKWFLEEEYSCTVIAEMLNELKVPSPSGRSIWYGEVVSEILSNDFHRGYVWFGKYKKSKSNNSIVQNKNLDEVLIAKGHHETMKTDEEHALILNRIEKLRTYKVAGRRLNMNTHRLSGIVRCPYCHKAQAIEQPKGRRKHVRKCLRKSAERTKECEETKGIHEEVLFQSIMKEIKKYNESLFSPTEQDVNDDSYTAQLIGLREKAVKKAKGRIERIKEMYLDGDISKTEYKEKLKISQETLQKAENELAELIASTEFQNALSAETKKEKWSHHKVQEMIESTDGMSNSEINLILKMLISHVTYTVEDLGDGTKNLNIKVYYN

SEQ ID NO: 12637 - protein, 512 aa, Unknown; identical to SEQ ID NO: 11588
  Description of Unknown: Integrase A1205 sequence
  SSF53041,SM00857,PS51737,PF00239,PTHR30461, cd00338,G3DSA:3.40.50.1390,PF07508,G3DSA:1.10.10.2600 ,PS51736

SEQ ID NO: 12638 - protein, 592 aa, Unknown
  Description of Unknown: Integrase A1206 sequence
  SSF53041,PTHR30461:SF3,PF13408,PS51737,PF00239, G3DSA:1.10.10.2600,cd00338,PTHR30461,G3DSA:3.40.50.1390,PF07508, SM00857,PS51736
MKITLLYYIKKFNIYCNRYLSQQINISVDIIGFYQFKNVTNSVTDVLKRGDNLDRICIYLRKSRADEELEKTIGVGETLSKHRKALLKFAKEKKLNIMEIKEEIVSADSIFFRPKMIELLKEVENNQYTGVLVMDIQRLGRGDTEDQGIIARIFKESHTKIITPMKTYDLDDDLDEDYFEFESFMGRKEYKMIKKRMQGGRVRSVEDGNYIATNPPFGYDIHWINKSRTLKFNSKESEIVKLIFKLYTEGNGAGTISNYLNSLGYKTKFGNNFSNSSIIFILKNPVYIGKITWKKKDIRKSKDPHKVKDTRTRDKSEWIIADGKHEPIIDEKIWNKAQEILNNKYHIPYKIANGPANPLAGVVICSKCNSKMVMRKYGKKLPHLICNNKECNNKSARFDYIEKAVLEGLDEYLKNYKVNVKANNKTSDIEPYEQQSNALNKELILLNEQKLKLFDFLEREIYTEEIFLERSKNLDERINTTTLAINKIKKILDNEKKKNNKNDIVKFEKILEGYKKTNDIQKKNELMKSLVFKIEYKKEQHQRNDGLLYIYFLSFCVRCISYLTQFISFFVYPYRILEIYLTFSFFIISYEH

SEQ ID NO: 12639 - protein, 540 aa, Unknown
  Description of Unknown: Integrase A1207 sequence
  PTHR30461:SF3,SSF53041,SM00857,PF13408, PS51737,PF00239,PTHR30461,cd00338, G3DSA:3.40.50.1390,PF07508,G3DSA:1.10.10.2600,PS51736
MKAIAIYARKSLFTGKGDSIGAQVDTCKRFIDYKFANEDYEIRTFKDEGWSGKTTDRPDFTNMVNLIKSKKIDYVITYKLDRIGRTARDLHNFLYELDNLGIVYLSATEPYDTTTSAGRFMISILAAMAQMERERLAERVKSGMIQIAKKGRWLGGQCPLGFDSKREIYIDDMGKERQMMRLTPNKEEIKIVKLIYDKYLEMGSMSQVRKYCLENSIRGKNGGDFSTNTLKQLLTSPIYVKSSDNIFKYLESQNINVFGTPNGNGMLTFNKTKEIRIERDKSEWIAAVGKHKGIIDDNKWLQIQQQLQQQSEKQIKSSGRQGTTSTGLLSGIIKCSKCGNNLLIKTGHKSKKNPGTTYSYYVCGKKDNSYGHKCDNKNVRTDEADSAVITQLKLYNKELLIKNLKEALIQNEKTDTDNIEILESKLKEKEKAVSNLVKKLSLIDDESISNIILNEVTNINKEINDIKLQLSNETLKINEVTKATLDTEIYIKILENFNKKIDDITDPIEKMNLLKSALESVEWNGDSGEFKINLIGSKKK

SEQ ID NO: 12640 - protein, 452 aa, Unknown; identical to SEQ ID NO: 11908
  Description of Unknown: Integrase A1208 sequence
  SSF53041,PTHR30461:SF3,PS00397,SM00857,PF13408, PS51737,PF00239,cd00338,PTHR30461,G3DSA:3.40.50.1390, PF07508,G3DSA:1.10.10.2600,PS51736

SEQ ID NO: 12641 - protein, 447 aa, Unknown
  Description of Unknown: Integrase A1209 sequence
  PTHR30461:SF3,SSF53041,SM00857,PF13408, PS51737,PF00239,G3DSA:1.10.10.2600,cd00338, PTHR30461,G3DSA:3.40.50.1390,PS00397,PS51736
MLRCAIYIRVSTEEQAMHGLSMDAQKADLTDYAKKHNYEIIDYYVDSGKTARKRLSKRKDLQRMIEDVKLNKIDIIIFTKLDRWFRNVRDYYKIQEVLEDHNVDWKTIFENYDTSTANGRLHINIMLSVAQDEADRTSERIKRVFENKLKNNEPTSGSLPIGYKIKEKSIIIDEEKAPIAKDVFDFYYYHQSQTKVFKEILNKYNLSLCEKTIRRMLENKLYIGIYREHENFCPPLIDKNKFDEVQLILKRRNIKYIPTKRIFLFTSLLICKECRHKMIGNAQIRNTKAGKIEYILYRCNQSYARHTCNHRKVIYENKIETYLLNNIESELKKFIYDYELEDIPKVKNKVNKTNIKRKLEKLKELYINDLIDIDMYKEDYKKYTEILNTKEEKIEQRNLQPLKDFLNSDFKSLYSSISREEKRLLWRGIISEIQIDCNNDITIIPHP

SEQ ID NO: 12642 - protein, 500 aa, Unknown
  Description of Unknown: Integrase A1210 sequence
  PTHR30461:SF3,SSF53041,PS00397,SM00857,PF13408, PS51737,PF00239,cd00338,PTHR30461,G3DSA:3.40.50.1390, PF07508,G3DSA:1.10.10.2600,PS51736
MIAIYVRVSTEEQAIKGSSIDSQIEACIKKAGTKDVLKYADEGFSGELLERPALNRLREDASKGLISQVICYDPDRLSRKLMNQLIIDDELRKRNIPLIFVNGEYANSPEGQLFFAMRGAISEFEKAKIKERTSSGRLQKMKKGMIIKDSKLYGYKFVKEKRTLEILEEEAKIIRMIFNYFTDHKSPFFGRVNGIALHLTQMGVKTKKGAKVWHRQVVRQILMNSSYKGEHRQYKYDTEGSYVSKQAGNKSIIKIRPEEEQITVTIPAIVPAEQWDYAQELLGQSKRKHLSISPHNYLLSGLVRCGKCGNTMTGKKRKSHGKDYYVYTCRKNYSGAKDRGCGKEMSENKLNRHVWGEIFKFITNPQKYVSFKEAEQSNHLSDELELIEKEIEKTKKGRKRLLTLISLSDDDDLDIDEIKAQIIELQKKQNQLTEKCNRIQSKMKVLDDTSSSENALKRAIDYFQSIGADNLTLEDKKTIVNFIVKEVTIVDSDTIYIETY

SEQ ID NO: 12643 - protein, 460 aa, Unknown
  Description of Unknown: Integrase A1211 sequence
  SSF53041,PTHR30461:SF3,PS51737,PF00239, G3DSA:1.10.10.2600,PTHR30461,G3DSA:3.40.50.1390,PF07508, cd03768,SM00857,PS51736
MKVAIYTRVSSAEQANEGYSIHEQKKKLISYCEIHDWNEYKVFTDAGISGGSMKRPALQKLMKHLSSFDLVLVYKLDRLTRNVRDLLDMLEEFEQYNVSFKSATEVFDTTSAIGKLFITMVGAMAEWERETIRERSLFGSRAAVREGNYIREAPFCYDNIEGKLHPNEYAKVIDLIVSMFKKGISANEIARRLNSSKVHVPNKKSWNRNSLIRLMRSPVLRGHTKYGDMLIENTHEPVLSEHDYNAINNAISSKTHKSKVKHHAIFRGALVCPQCNRRLHLYAGTVKDRKGYKYDVRRYKCETCSKNKDVKNVSFNESEVENKFVNLLKSYELNKFHIRKVEPVKKIEYDIDKINKQKINYTRSWSLGYIEDDEYFELMEEINATKKMIEEQTTENKQSVSKEQIQSINNFILKGWEELTIKDKEELILSTVDKIEFNFIPKDKKHKTNTLDINNIHFKF

SEQ ID NO: 12644 - protein, 463 aa, Unknown
  Description of Unknown: Integrase A1212 sequence
  PTHR30461:SF3,SSF53041,PS00397,SM00857,PS51737, PF00239,cd00338,PTHR30461,G3DSA:3.40.50.1390,PF07508, G3DSA:1.10.10.2600,PS51736
MKVATYVRVSTDEQAKEGFSIPAQRERLRAFCESQGWEIVEEYIEEGWSAKDLDRPQMQRLLKDIKKGNIDIVLVYRLDRLTRSVLDLYLLLQTFEKYNVAFRSATEVYDTSTAMGRLFITLVAALAQWERENLAERVKFGIEQMIDEGKKPGGHSPYGYKFDKDFNCTIIEDEANTVRMIYRMYCDGYGYHSIAKRLNELGIKPRIAKEWNHNSVRDILTNDIYIGTYRWGNKVVLNNHPPIISETLFRKVQKEKEKRRVDRTRVGKFLLTGLLYCGNCNGHKMQGTFDKREQKTYYRCLKCNRITNEKNILEPLLDEIQLLITSKEYFMSKFSDQYDQKEEVDVSALKKELEKIKRQKEKWYDLYMDDRNPIPKEDLFAKINELNKKEEEIYNKLNEVEPEDKEPVEEKYNRLSKMIDFKQQFEQANDFTKKELLFSIFEKIVIYREKGKLKKITLDYTLK

SEQ ID NO: 12645 - protein, 582 aa, Unknown
  Description of Unknown: Integrase A1213 sequence
  SSF53041,PTHR30461:SF3,SM00857,PF13408, PS51737,PF00239,PTHR30461,cd00338, G3DSA:3.40.50.1390,PF07508,G3DSA:1.10.10.2600
MTNPASRPKAYSYIRMSSAIQIKGDSFRRQAEASAKYAAEHDLDLIDDYKLADLGVSAFKSDNLTTGALGRFVAECEAGEIEAGSFLLIESLDRLSRDKILDAFSLFARILKTGVKIVTLSDGQVYDGSSDQVGSIYYAISVMIRSNDESKIKSTRGLANWSQKRKLAAEHGVKMSSQCPAWLKLSVDRKSYLIDKERAKIVQRIFEASASGKGANLITKELNRDKVPTFGRGALWAEAFVSKTLRNRAVLGEFQPGQYVSGKRQPAGDPIPGYFPPVIEEELFDIVQASLRGRLLAGGRRGEGQSNIFTHVAFCGYCGSKMRHRSKGSRVKGNPPHRYLTCFNRFNGPGCDCKPLPYAAFERSFLTFVRDVDLRGLLEGAKRKSEAKTIADRITVNEEKVRKADERIRDYLIKIEGAPDLAEIFMERIRELKAEKDDLVRSIEESNDALSKIKSDNVTDEELASLISTFQNPCGENRIRLADRIKSIIERIDVYPNGEIRKDDPAIDLVRASGDPDAEKIIAAMNAGSRLKDDPYFIVTFRNGAVQTVVPNPSNPDDIRVSVYAGEKTRRVEGSAYEYESD

SEQ ID NO: 12646 - protein, 519 aa, Unknown
  Description of Unknown: Integrase A1214 sequence
  SSF53041,PS51737,PF00239,cd00338,PTHR30461, G3DSA:3.40.50.1390,PF07508,G3DSA:1.10.10.2600
MQLDATLTLRDEGLSAFHQRHIKQGALGVFLRAIEDGRIQPGSVLIVEGLDRLSRAEPIQAQAQLAQIINAGITVVTASDGREYNRERLKAQPMDLVYSLLVMIRAHEESDTKSKRVKAAIRRQCEGWVAGTWRGIIRNGKDPHWVRLGEHGKFEHVPERVLAVRTMIDLFLEGHGAIEITRRLTEQNLYVSNAGNYSVHMYRIVRNQALIGEKRISVDGEEFRLDGYYPPILTREEFAELQQTMSERGRRKGKGEIPNIITGLSITVCGYCGRAMTTQNSKARAPKGKSVVRRLSCPMNSFNEGCPIGGSCESEIVERALMRYCSDQFNLSRLLEGDDGTARRTAQLAVARQRASDIEAQIQRVTDALLSDDGKAPAAFTRRARELETQLEEQRREIEALEHQIAASSAHGIPAAAEAWAQLVDGVLALDYDARMKARQLVADTFRKIVVYQRGFAPIDDAAADRWKRSGTIGLMLVTKRGGMRLLNVDRRTGCWQAEDDLDPSLIPSDGLPMLPLDA

SEQ ID NO: 12647 - protein, 547 aa, Unknown; identical to SEQ ID NO: 11488
  Description of Unknown: Integrase A1215 sequence
  SSF53041,PTHR30461:SF3,PF00239,PTHR30461,cd00338, G3DSA:3.40.50.1390,PF07508,SM00857

SEQ ID NO: 12648 - protein, 500 aa, Unknown; identical to SEQ ID NO: 11649
  Description of Unknown: Integrase A1216 sequence
  PTHR30461:SF3,SSF53041,PS51737,PF00239, PTHR30461,cd00338,G3DSA:3.40.50.1390,PF07508, SM00857,PS51736

SEQ ID NO: 12649 - protein, 463 aa, Unknown
  Description of Unknown: Integrase A1217 sequence
  SSF53041,SM00857,PTHR30461:SF21,PS51737,PF00239, cd00338,PTHR30461,G3DSA:3.40.50.1390,PF07508,mobidb-lite, PS51736
MRAAVYLRISEDRSGEQLGVARQREDCLKLCGQRKWVPVEYLDNDVSASTGKRRPAYEQMLADITAGKIAAVVAWDLDRLHRRPIELEAFMSLADEKRLALATVAGDVDLATPQGRLVARLKGSVAAHETEHKKARQRRAARQKAERGHPNWSKAFGYLPGPNGPEPDPRTAPLVKQAYADILAGASLGDVCRQWNDAGAFTITGRPWTTTTLSKFLRKPRNAGLRAYKGARYGPVDRDAIVGKAQWSPLVDEATFWAAQAVLDAPGRAPGRKSVRRHLLTGLAGCGKCGNHLAGSYRTDGQVVYVCKACHGVAILADNIEPILYHIVAERLAMPDAVDLLRREIHDAAEAETIRLELETLYGELDRLAVERAEGLLTARQVKISTDIVNAKITKLQARQQDQERLRVFDGIPLGTPQVAGMIAELSPDRFRAVLDVLAEVVVQPVGKSGRIFNPERVQVNWR

SEQ ID NO: 12650 - protein, 509 aa, Unknown
  Description of Unknown: Integrase A1218 sequence
  SSF53041,PS51737,PF00239,G3DSA:1.10.10.2600,PTHR30461, cd00338,G3DSA:3.40.50.1390,PF07508,SM00857
MPIAPEFLSLAYPGQEFPAYLYGRASRDPKRKGRSVQSQLDEGRATCLDAGWPIAGEFKDVDRSASAYARRTRDEFEEMIAGIQAGECRILVAFEASRYYRDLEAYVRLRRVCREAGVLLCYNGQVYDLSKSADRKATAQDAVNAEGEADDIRERNLRTTRLNAKRGGAHGPVPDGYKRRYDPDSGDLVDQIPHPDRAGLITEIFRRAAAAEPLAAICRDLNERGETTHRGKAWQRHHLHAILRNPAYIGHRRHLGVDTGKGMWAPICDDEDFAETFQAVQEILSLPGRQLSPGPEAQHLQTGIALCGEHPDEPPLRSVTVRGRTNYNCSTRYDVAMREDRMDAFVEESVITWLASDEAVAAFEDNTDDERTRKARIRLKVLEEQLEAAQKQARTLRPDGMGMLLSIDSLAGLEAELTPQIDKARQESRSLHVPALLRDLLGKPRADVDRAWNEALTLPQRRMILRMVVTIRLFKAGSRGVRAIEPGRITLSYVGEPGFKPVGGNRAKQ

SEQ ID NO: 12651 - protein, 474 aa, Unknown
  Description of Unknown: Integrase A1219 sequence
  SSF53041,PTHR30461:SF3,PS00397,SM00857,PS51737, PF00239,PTHR30461,G3DSA:3.40.50.1390,PF07508, cd03768,G3DSA:1.10.10.2600,PS51736
MAVGIYIRVSTQEQASEGHSIESQKKKLASYCEIQGWDDYRFYIEEGISGKNTNRPKLKLLMEHIEKGKINILLVYRLDRLTRSVIDLHKLLNFLQEHGCAFKSATETYDTTTANGRMSMGIVSLLAQWETENMSERIKLNLEHKVLVEGERVGAIPYGFDLSDDEKLVKNEKSAILLDMVERVENGWSVNRIVNYLNLTNNDRNWSPNGVLRLLRNPALYGATRWNDKIAENTHEGIISKERFNRLQQILADRSIHHRRDVKGTYIFQGVLRCPVCDQTLSVNRFIKKRKDGTEYCGVLYRCQPCIKQNKYNLAIGEARFLKALNEYMSTVEFQTVEDEVIPKKSEREMLESQLQQIARKREKYQKAWASDLMSDDEFEKLMVETRETYDECKQKLESCEDPIKIDETYLKEIVYMFHQTFNDLESEKQKEFISKFIRTIRYTVKEQQPIRPDKSKTGKGKQKVIITEVEFYQ

SEQ ID NO: 12652 - protein, 464 aa, Unknown
  Description of Unknown: Integrase A1220 sequence
  PTHR30461:SF3,SSF53041,PS00397,SM00857, PF13408,PS51737,PF00239,PTHR30461, G3DSA:3.40.50.1390,PF07508,cd03768,G3DSA:1.10.10.2600, PS51736
MKRAALYIRVSTMEQAKEGYSIPAQTDKLKAFAKAKDMAVAKVYTDPGFSGAKMERPALQEMISDIQNKKIDVVLVYKLDRLSRSQKNTLYLIEDVFLKNNVDFISMQESFDTSTPFGRATIGMLSVFAQLERDTITERMHMGRTERAKQGYYHGSGIVPLGYDYVHGELIINDYEAQIIQEIYDLYVNQGKGQQYITKRMVAKYPDKVKTLTIVKYALTNPLYIGKISWDGKVYDGHHSPIIDKSMYDKAQEIIARMAQKGGEQHGNQLGLLLGITYCGKCGAEVFRYVSGGKKYRYNYYMCRSVKKMLPSLVKDWNCKQPSLRQEVVEKKVIDSLKSLDFKKIERELKQVENKTKSKITTINNQISKKHNEKQKILDLYQYGTFDVTMLNERMKKIDNEINALTANIANLEGTKSESLINKLETLKTFNWETETTENKILIIKEFVERIELFDDEVIIKYKF

SEQ ID NO: 12653 - protein, 452 aa, Unknown
  Description of Unknown: Integrase A1221 sequence
  SSF53041,PTHR30461:SF3,SM00857,PF13408,PS51737,PF00239, G3DSA:1.10.10.2600,PTHR30461,G3DSA:3.40.50.1390,PF07508, cd03768,PS00397,PS51736
MKAAIYIRVSTQEQVENYSIQAQTEKLTALCRSKDWDVYDTFIDGGYSGSNMNRPALNEMLSKLHEIDAVVVYRLDRLSRSQKDTITLIEEYFLKNNVEFVSLSETLDTSSPFGRAMIGILSVFAQLERETIRDRMVMGKIKRIEAGLPLTTAKGRTFGYDVIDTKLYINEEEAKQLRLIYDIFEEEQSITFLQKRLKKLGFKVRTYNRYNNWLTNDLYCGYVSYKDKVHVKGIHEPIISEEQFYRVQEIFSRMGKNPNMNKESASLLNNLVVCSKCGLGFVHRRKDTVSRGKKYHYRYYSCKTYKHTHELEKCGNKIWRADKLEELIIDRVNNYSFASRNIDKEDELDSLNEKLKIEHAKKKRLFDLYINGSYEVSELDSMMNDIDAQINYYEAQIEANEELKKNKKIQENLADLATVDFNSLEFREKQLYLKSLINKIYIDGEQVTIEWL

SEQ ID NO: 12654 - protein, 452 aa, Unknown
  Description of Unknown: Integrase A1222 sequence
  SSF53041,PTHR30461:SF3,PS00397,SM00857,PF13408,PS51737, PF00239,PTHR30461,G3DSA:3.40.50.1390,PF07508,cd03768, G3DSA:1.10.10.2600,PS51736
MKAAIYIRVSTQEQIENYSIQAQTEKLTALCRSKDWDVYDIFIDGGYSGSNMNRPALNEMLSKLHEIDAVVVYRLDRLSRSQRDTITLIEEYFLKNNVEFVSLSETLDTSSPFGRAMIGILSVFAQLERETIRDRMVMGKIKRIEAGLPLTTAKGRTFGYDVIDTKLYINEEEAKQLQMIYDIFEEEKSITTLQKRLKKLGFKVKSYSSYNNWLTNDLYCGYVSYADKVHTKGVHEPIISEEQFYRVQEIFSRMGKNPNMNRDSASLLNNLVVCGKCGLGFVHRRKDTVSRGKKYHYRYYSCKTYKHTHELEKCGNKIWRADKLEELIIDRVNNYSFASRNVDKEDELDSLNEKLKTEHVKKKRLFDLYISGSYEVSELDAMMADIDAQINYYEAQIEANEELKKNKKIQENLADLATVDFDSLEFREKQLYLKSLINKIYIDGEQVTIEWL

SEQ ID NO: 12655 - protein, 465 aa, Unknown; identical to SEQ ID NO: 11864
  Description of Unknown: Integrase A1223 sequence
  PTHR30461:SF3,SSF53041,SM00857,PF13408,PS51737, PF00239,G3DSA:1.10.10.2600,cd00338,PTHR30461, G3DSA:3.40.50.1390,PF07508,PS00397,PS51736

SEQ ID NO: 12656 - protein, 470 aa, Unknown
  Description of Unknown: Integrase A1224 sequence
  PTHR30461:SF3,SSF53041,PS00397,PF13408, PS51737,PF00239,G3DSA:1.10.10.2600,PTHR30461, cd00338,G3DSA:3.40.50.1390,PF07508,SM00857, PS51736
MKGESELDKKAAIYIRVSTQEQATEGYSIQAQTDRLIKYVEAKDFILYKKYIDAGYSASKLERPAMQDLIQDVQSKKVDVVIVYKLDRLSRSQKDTMYLIEDIFRPNDVELISMQESFDTSTAFGSATVGMLSVFAQLERKSISERMITGRVERAKKGFYHTGGQDRPPAGYQFNSDNQLIINEYEAAAIKDLFRLYNDGLGKSSISEYLKKNYPGKNKWLPSSIDRMLKNSLYIGKVKFSGAEYDGIHEPIIDEVTFYKTQKEIARRKQTNTKRYNYVALLGGLCECGICGAKMANRRAVGRKGKVYRYYRCYSKKGSPKHMMKTDGCSSKAQQQFIIDEAVINNLKNIDVEAELKRRSAPQTNTSLISSQIESIDKQINKLIDLFQVDSMPLDVISEKIDKLNKEKQSMEKLLERKNKLDKTELQHRFDVLKSFDWDNSSIESKRVVIEMLVQKVIIHDNSIEIILVE

SEQ ID NO: 12657 - protein, 452 aa, Unknown
  Description of Unknown: Integrase A1225 sequence
  SSF53041,PTHR30461:SF3,PS00397,SM00857,PF13408, PS51737,PF00239,PTHR30461,G3DSA:3.40.50.1390,PF07508, cd03768,G3DSA:1.10.10.2600,PS51736
MKAAIYIRVSTQEQIENYSIQAQTEKLTALCRSKDWDVYDIFIDGGYSGSNMNRPALNEMLSKLHEIDAVVVYRLDRLSRSQRDTITLIEEYFLKNNVEFVSLSETLDTSSPFGRAMIGILSVFAQLERETIRDRMVMGKIKRIEAGLPLTTAKGRTFGYDVIDTKLYINEEEAKQLQMIYDIFEEEKSITTLQKRLKKLGFKVKSYSSYNNWLTNDLYCGYVSYADKVHTKGVHEPIISEEQFYRVQEIFSRMGKNPNMNRDSASLLNNLVVCGKCGLGFVHRRKDTISRGKKYHYRYYSCKTYKHTHELEKCGNKIWRADKLEELIIDRVNNYSFASRNVDKEDELDNLNEKLKTEHKKKKRLFDLYISGSYEVSELDAMMADIDAQINYYEAQIEANEELKKNKKIQENLADLATVDFDSLEFREKQLYLKSLINKIYIDGEQVTIEWL

SEQ ID NO: 12658 - protein, 504 aa, Unknown
  Description of Unknown: Integrase A1226 sequence
  PTHR30461:SF3,SSF53041,SM00857,PS51737, PF00239,cd00338,PTHR30461,G3DSA:3.40.50.1390, PF07508,G3DSA:1.10.10.2600,PS51736
MRICMYLRKSRADEELEKTLGEGETLSKHRKALLKFAKEKNLNIVEIKEEIVSGESLFFRPKMLELLKEIENKQYSGVLVMDMQRLGRGNMQDQGIILETFKKSNTKIITPMKTYDLSNDFDEEYSEFEAFMSRKELKMINRRMQGGRVRSVEDGNYIATNAPYGYDIHWINKARTLKPNQKESEIVKLIFKLYIEGNGAGTIAKHLNSLGYKTKFGNSFNNSSIIFILKNPVYIGKITWKKKDIRKSKDPNKVKDTRTRDKSEWIIVDGKHDPIIDQITWKQAQEILNNRYHVPYKLVNGPANPLAGLIICTTCKSKMVMRKLRGTDRILCKNNKCNNISNRFDAVEKSVVESLENYLKAYKVNLPELNKTSNLKLYEQQISTLKKELKILNEQKLKLFDFLERGIYDEDTFLKRSKNLDERIEITNESLSNLNQIIAKENKAIKKEDIIKFEKVLDSYKSTADIRLKNELMKTLIFKIEYTKNKKGNDFKIKVFPKLKPLNI

SEQ ID NO: 12659 - protein, 545 aa, Unknown
  Description of Unknown: Integrase A1227 sequence
  PTHR30461:SF3,SSF53041,PF13408,PS51737,PF00239, G3DSA:1.10.10.2600,PTHR30461,G3DSA:3.40.50.1390,PF07508,cd03768, SM00857,PS51736
MIAAIYSRKSKFTGKGESVENQIEMCKEYLKRNFNNIDDIEIYEDEGFSGKDTNRPKFKKMIKAAKNKKFNILICYRLDRISRNVADFSNTIEELQKYNIDFISIKEQFDTSTPMGRAMMNIAAVFAQLERETIAERIKDNMVELAKTGRWLGGTSPLGYKSEPIEYSNEDGKSKKMYKLTEVENEMNIVKLIYKLYLEKRGFSSVATYLCKNKYKGKNGGEFSRETARQIVINPVYCISDKTIFKWFKSKGATTYGTPDGIHGLMVYNKREGGKKDKPINEWIIAVGKHRGVISSDIWLKCQNLIQQNNAKSSPRSGTGEKFLLSGMVVCKECGSGMSSWSHFNKKTNFMERYYRCNLRNRASNRCSTKMLNAYKAEEYVANYLKELDINAIKKMYHSNKKNIIDYDAKYEVNKLNKSIEENKKIIQGIIKKIALFDDLDILGMLKNELERLKKENDEMKIKLKELKSILELEDEEEIFLSTMEENISNFKKFYDFVNITQKRILIKGLVESIVWDTGGEEKILEINLIGSNTKLPSGKVKRRE

SEQ ID NO: 12660 - protein, 461 aa, Unknown; identical to SEQ ID NO: 11887
  Description of Unknown: Integrase A1228 sequence
  SSF53041,PTHR30461:SF3,PS51737,PF00239, G3DSA:1.10.10.2600,PTHR30461,G3DSA:3.40.50.1390,PF07508, cd03768,SM00857,PS51736

SEQ ID NO: 12661 - protein, 471 aa, Unknown
  Description of Unknown: Integrase A1229 sequence
  SSF53041,PTHR30461:SF3,PS00397,PF13408,PS51737, PF00239,G3DSA:1.10.10.2600,cd00338,PTHR30461,G3DSA:3.40.50.1390, PF07508,SM00857,PS51736
MTVGIYIRVSTEEQVKEGFSISAQKEKLKAYCTAQGWEDFKFYVDEGKSAKDMHRPLLQEMISHIKKGLIDTVLVYKLDRLTRSVVDLHNLLSIFDEFNCAFKSATEVYDTSSAMGRFFITIISSVAQFERENTSERVSFGMAEKVRQGEYIPLAPFGYTKGTDGKLIVNKIEKEIFLQVVEMVSTGYSLRQTCEYLTNIGLKTRRSNDVWKVSTLIWMLKNPAVYGAIKWNNEIYENTHEPLIDKATFNKVAKILSIRSKSTTSRRGHVHHIFKNRLICPACGKRLSGLRTKYINKNKETFYNNNYRCATCKEHRRPAVQISEQKIEKAFIDYISNYTLNKANISSKKLDNNLRKQEMIQKEIISLQRKREKFQKAWAADLMNDDEFSKLMIDTKMEIDAAEDRKKEYDVSLFVSPEDIAKRNNILRELKINWTSLSPTEKTDFISMFIEGIEYVKDDENKAVITKISFL

SEQ ID NO: 12662 - protein, 580 aa, Unknown
  Description of Unknown: Integrase A1230 sequence
  PTHR30461:SF3,SSF53041,PF13408,PS51737, PF00239,G3DSA:1.10.10.2600,cd00338,PTHR30461, G3DSA:3.40.50.1390,PF07508,SM00857,PS51736
MDPQHKPTRALIVIRLSRLTDETTSPERQLEACERFCAARGWEVVGVAEDLDVSAGTTSPFERPSLSQWIGDGKDNPGRIGEFDTVVFYRVDRLVRRVRHLHDVIAWSERFDVNMVSATESHFDLSTTIGALIAQLVASFAEMELEGISQRATSAHRHNVQLGKFVGGSPPFGYMPEETPDGWRLVHDPDVVPIILEVVDRVLEGEPLRRITDDLNARGATTARDLVKQRKGKETEGHKWHSNVLKRRLMSPAMLGYALRREPLTDSKGKPKLSAKGAKLYGPEEIVRGPDGLPVQRAEPILPKPLFDRVVAELEARELQKEPTKRINSMLLRVLYCGVCGQPVYRAKGQGGRSDRYRCRSIQDGANCGNPSVLTYELDDLVEESILVLMGDSERLAHVWNPGEDNASELAEVEARLADRTGLIGVGAYKAGTPQRATLDTLIEADAKLYERLKAATPRPAGWTWEPTGETFAEWWAALDTGARNVYLRNMGVRVTYDKRPVPEQVSAGEKPRVHLELGEVRKMAEQVAVTGTIGTLTRNYTRLGEIGITHVDIDAGSGKAVFVTKSGERFELPLNIPEE

SEQ ID NO: 12663 - protein, 516 aa, Unknown
  Description of Unknown: Integrase A1231 sequence
  SSF53041,PTHR30461:SF3,SM00857,PS51737,PF00239, cd00338,PTHR30461,G3DSA:3.40.50.1390,PF07508,G3DSA:1.10.10.2600, PS51736
MYRPESLDVCIYLRKSRKDVEEERRAIEEGSSYNALERHRKRLFAIAKAENHNIIDIFEEVASGESIQERPQMQQLLRKLEGNEIDGVLVIDLDRLGRGDMLDAGMIDRAFRYSSTKIITPTDVYDPDDESWELVFGIKSLISRQELKSITKRLQNGRIDSVKEGKHIGKKPPYGYLKDENLRLYPDPEKAWIVKKIFELMCDGKGRQMIAAELDRLGIDPPVTKRGAWDSSTITSIIKNEVYTGVIVWGKFKHKKRNGKYTRHKNPQEKWIMYENAHEPIISKELFDAANEAHSSRHKPAVITSKKLTNPLAGILKCKLCGYTMLIQTRKDRPHNYLRCNNPACKGKQKQSVFNLVEEKLLYSLQQIVDEYQAQKVEEVEIDDSKLISFKEKAIISKEKELKELQAQKGNLHDLLEQGIYTVEIFLERQKNLVERITSIENDIEVLQKEIETEQIKEHNKTEFIPALKTVIESYHKTTNIELKNQLLKTILSTVTYYRHPDWKTNEFEIQVYFKI

SEQ ID NO: 12664 - protein, 515 aa, Unknown
  Description of Unknown: Integrase A1232 sequence
  PTHR30461:SF3,SSF53041,PF13408,PS51737, PF00239,G3DSA:1.10.10.2600,cd00338,PTHR30461, G3DSA:3.40.50.1390,PF07508,SM00857,PS51736
MKTAIYLRKSRADLEAEARGEGETLAKHRSTLLKIAKEMNLNVLSVREEIVSGESLVKRPEMLALLEEIEDNKYDAVLCMDMDRLGRGGMKEQGIILETFKRSNTKIMTPRKTYDLNDEWDEEYSEFEAFMARKELKIITRRMQRGRIASVEAGNYLGTHAPFGYDIHRLNKRERTLTINSEEASVVRMIFDWYANEDMGASAIRNKLNDLGYKSKLGNDWNPYSILDILKNNIYIGKVTWQKRKEVKRPDAVKRSCARQDKSDWIIADGKHEPIIPESLFEQAQEKLNSRYHVPYNTNGIKNPLAGIIKCSKCGYSMVQRYPKNRKETMDCKHRGCENKSSYTELIEKRLLEALKEWYINYKADFEAHKQGDKLKETQVIQMNEAALRKLEKELVDVQKQKNNLHDLLERGVYTVDMFLERSQVISDRINEITSTMENLKKEIKTEIKKEKVKKDTIPQVEHVLDLYFKTDDPKKKNSLLKSVLEKAVYKKEKWQRLDDFELVLYPKLPQDGDI

SEQ ID NO: 12665 - protein, 471 aa, Unknown; identical to SEQ ID NO: 11845
  Description of Unknown: Integrase A1233 sequence
  SSF53041,PTHR30461:SF3,PF13408,PS51737,PF00239, G3DSA:1.10.10.2600,PTHR30461,G3DSA:3.40.50.1390,PF07508,cd03768, SM00857,PS51736

SEQ ID NO: 12666 - protein, 485 aa, Unknown
  Description of Unknown: Integrase A1234 sequence
  PTHR30461:SF3,SSF53041,SM00857,PF13408, PS51737,PF00239,PTHR30461,G3DSA:3.40.50.1390, PF07508,cd03768,G3DSA:1.10.10.2600,PS51736
MSKKVAIYTRVSTTNQAEEGYSIDEQIDKLKMYCEAMDWKVSEIYTDAGFTGSKLTRPAMEKMITDIGLKKFDTVIVYKLDRLSRSVRDTLYLVKDVFTKNEIDFISLSESIDTSSAMGSLFLTILSAINEFERENIKERMTMGKIGRAKSGKSMMWAKTAFGYSHNQETGILEINPLEASIVEQIFNEYLKGTSITKLRDKLNEDGHIAKELPWSYRTIRQTLDNPVYCGYIKYKNNTFEGLHKPIISHETYLSVQKELEARQQQTYEKNNNPRPFQAKYLLSGIARCGYCGAPLRIVLGHRRKDGSRTMKYQCVNRFPRKTKGVTTYNDNKKCDSGAYDMQWIEDIVLKTLNGFQKSDKKLRKILNIKEESKVDTSGFQKQLKSINNKIQKNSDLYLNDFITMDDLKKRTEMLQGEKKLIQARINEVDKPSTSEIFDLVKSELGETTISKISYEDKKKIVNNLISKVDVTADNIDIIFKFQLA

SEQ ID NO: 12667 - protein, 475 aa, Unknown
  Description of Unknown: Integrase A1235 sequence
  PTHR30461:SF3,SSF53041,PS00397,SM00857,PF13408, PS51737,PF00239,PTHR30461,G3DSA:3.40.50.1390,PF07508, cd03768,G3DSA:1.10.10.2600,PS51736
MITTNKVAIYVRVSTTNQVEEGYSIDEQKDKLEAYCKIKDWKIYDVYVDGGFSGANTQRPELERLISDVKRKKVDIVLVYKLDRLSRSQKDTLFLIEDVFAKNDVAFISLQENFDTSTPFGKASIGMLSVFAQLEREQIKERMMLGKEGRAKNGKSMSWTTIAFGYDYSKETGVLSVNPTQALIVNRIFTEYLNGKPVVKIIRDLNAEGHVGRKRPWGETITKYLLKNETYLGKVKYKDKVYEGQHEPIITQELFDLVQLEVERRQISAYEKYNNPRPFRAKYMLSGLMKCGYCGASLGLRYTRKDKNGISHHKYQCRNRHSKDLEKRCESGWYSKEELERGVIKELERIKFDPKYKNETLAKKEETIKVEEIKKQLERINNQVSKLTELYLDEIITRKELDEKNDKIKTERQFLEEQLENQKSNVLSIRKRKLTRLLKDFDVEKLSYEDASKIVKNIIKEIIVTKDGMSITLDF

SEQ ID NO: 12668 - protein, 473 aa, Unknown; identical to SEQ ID NO: 11830
  Description of Unknown: Integrase A1236 sequence
  SSF53041,PTHR30461:SF3,SM00857, PF13408,PS51737,PF00239,G3DSA:1.10.10.2600,PTHR30461, G3DSA:3.40.50.1390,PF07508,cd03768,PS00397,PS51736

SEQ ID NO: 12669 - protein, 485 aa, Unknown; identical to SEQ ID NO: 11761
  Description of Unknown: Integrase A1237 sequence
  PTHR30461:SF3,SSF53041,PF13408,PS51737,PF00239, G3DSA:1.10.10.2600,PTHR30461,cd00338,G3DSA:3.40.50.1390,PF07508, SM00857,PS51736

SEQ ID NO: 12670 - protein, 477 aa, Unknown; identical to SEQ ID NO: 11819
  Description of Unknown: Integrase A1238 sequence
  SSF53041,PTHR30461:SF3,SM00857,PF13408, PS51737,PF00239,G3DSA:1.10.10.2600,PTHR30461,G3DSA:3.40.50.1390, PF07508,cd03768,PS00397,PS51736

SEQ ID NO: 12671 - protein, 461 aa, Unknown
  Description of Unknown: Integrase A1239 sequence
  SSF53041,PTHR30461:SF3,SM00857,PS51737,PF00239, G3DSA:1.10.10.2600,PTHR30461,G3DSA:3.40.50.1390,PF07508,cd03768, PS00397,PS51736
MKVAVYCRVSTLEQKEHGHSIEEQERKLKSFCDINDWTVYDTYIDAGYSGAKRDRPELQRLMNDINKFDLVLVYKLDRLTRNVRDLLDLLEIFEKNDVSFRSATEVYDTTTAMGRLFVTLVGAMAEWERETIRERTQMGKLAALRKGIMLTTPPFYYDRVDNKFVPNKYKDVILWAYDEAMKGQSAKAIARKLNNSDIPPPNNTQWQGRTITHALRNPFTRGHFDWGGVHIENNHEPIITDEMYEKVKDRLNERVNTKKVRHTSIFRGKLVCPVCNARLTLNSHKKKSNSGYIFVKQYYCNNCKVTPNLKPVYIKEKEVIKVFYNYLKRFDLEKYEVTQKQNEPEITIDINKVMEQRKRYHKLYASGLMQEDELFDLIKETDQTIAEYEKQNENREVKQYDIEDIKQYKDLLLEMWDISSDEDKEDFIKMAIKNIYFEYIIGTGNTSRKRNSLKITSIEFY

SEQ ID NO: 12672 - protein, 460 aa, Unknown
  Description of Unknown: Integrase A1240 sequence
  SSF53041,PTHR30461:SF3,SM00857,PF13408, PS51737,PF00239,PTHR30461,G3DSA:3.40.50.1390,PF07508,cd03768, G3DSA:1.10.10.2600,PS51736
MKVAIYTRVSTLEQREKGHSIDEQERKLRSFCDINDWTVKDVYVDAGFSGAKRDRPELTRLLDDISEFDLVLVYKLDRLTRSVRDLLDLLEVFENNNVAFRSATEVYDTTTAIGRLFVTLVGAMAEWERETIRERSLMGKRAAIKKGMILTAPPFYYDRVNNTYIPNQYKDVVLDVYNKVKKGYSIAHIARLYNNSDVKPPNGNEEWTTRMLMHALRNPVTRGHYQWGEIYIEDSHEPIITDEMYNTIIDRLDKHTNTKVVAHTSVFRGKLICPNCGYALTLNSQKRKRKNDTIVYKTYYCNNCKITKGMKPHHITETETLRVFKDHLSKIDLKQYETQEKEKQSHVTIDLSKVMEQRKRYHKLYASGMMQENELFELIKETDEMIEEYEKQRKQVDVKEFDICKIKEIKDVLLKSWDIFTLEDKADFIQMSIKAINIEYTKLKRGKSSNSMKIKDIEFY

SEQ ID NO: 12673 - protein, 458 aa, Unknown; identical to SEQ ID NO: 11895
  Description of Unknown: Integrase A1241 sequence
  SSF53041,PTHR30461:SF3,PS51737,PF00239,G3DSA:1.10.10.2600, PTHR30461,G3DSA:3.40.50.1390,PF07508,cd03768,SM00857, PS51736

SEQ ID NO: 12674 - protein, 462 aa, Unknown
  Description of Unknown: Integrase A1242 sequence
  PTHR30461:SF3,SSF53041,PS00397,PF13408,PS51737, PF00239,G3DSA:1.10.10.2600,cd00338,PTHR30461,G3DSA:3.40.50.1390 ,PF07508,SM00857,PS51736
MKVAIYVRVSTDEQAKEGFSIPAQRERLRAFCASQGWEIVQEYIEEGWSAKDLDRPQMQRLLKDIKKGNIDIVLVYRLDRLTRSVLDLYLLLQTFEKYNVAFRSATEVYDTSTAMGRLFITLVAALAQWERENLAERVKFGIEQMIDEGKKPGGHSPYGYKFDKDFNCTIIEEEADVVRMIYRMYCDGYGYRSIADRLNELMVKPRIAKEWNHNSVRDILTNDIYIGTYRWGDKVVPNNHPPIISETLFKKAQKEKEKRGVDRKRVGKFLFTGLLQCGNCGGHKMQGHFDKREQKTYYRCTKCHRITNEKNILEPLLDEIQLLITSKEYFMSKFSDRYDQQEVVDVSALTKELEKIKRQKEKWYDLYMDDRNPIPKEELFAKINELNKKEEEIYSKLSEVEEDKEPVEEKYNRLSKMIDFKQQFEQANDFTKKELLFSIFEKIVIYREKGKLKKITLDYTLK

SEQ ID NO: 12675 - protein, 545 aa, Unknown
  Description of Unknown: Integrase A1243 sequence
  PTHR30461:SF3,SSF53041,SM00857,PS51737,PF00239, cd00338,PTHR30461,G3DSA:3.40.50.1390,PF07508,G3DSA:1.10.10.2600, PS51736
MELKNIVNSYNITNILGYLRRSRQDMEREKRTGEDTLTEQKELMNKILTAIEIPYELKMEIGSGESIDGRPVFKECLKDLEEGKYQAIAVKEITRLSRGSYSDAGQIVNLLQSKRLIIITPYKVYDPRNPVDMRQIRFELFMAREEFEMTRERMTGAKYTYAAQGKWISGLAPYGYQLNKKTSKLDPVEDEAKVVQLIFKIFLNGLNGKDYSYTAIASHLTNLQIPTPSGKKRWNQYTIKAILQNEVYIGTVKYKVREKTKDGKRTIRPEKEQIVVQDAHAPIIDQEQFQQSQVKIANKVPLLPNKDEFELSELAGVCTCSKCGEPLSKYESKRMRKNKDGTESVYHVKSLTCKKNKCTYVRYNDVENAILDYLSSLNDLNDSTLTKHINSMLSKYEDDNSNMKTKKQMSEHLSQKEKELKNKENFIFDKYESGIYSDELFLKRKAALDEEFKELQNAKNELNGLQDTQSEIDSNTVRNNINKIIDQYHIESSSEKKNELLRMVLKDVIVNMTQKRKGPIPAQFEITPILRFNFIFDLTATNNFH

SEQ ID NO: 12676 - protein, 481 aa, Unknown; identical to SEQ ID NO: 11790
  Description of Unknown: Integrase A1244 sequence
  SSF53041,PTHR30461:SF3,SM00857,PF13408,PS51737, PF00239,G3DSA:1.10.10.2600,PTHR30461,G3DSA:3.40.50.1390, PF07508,cd03768,PS00397,PS51736

SEQ ID NO: 12677 - protein, 552 aa, Unknown
  Description of Unknown: Integrase A1245 sequence
  PTHR30461,PTHR30461:SF3,PF00239,PF07508,G3DSA:3.40.50.1390, SM00857,SSF53041
MPGMTTETGPDPAGLIDLFCRKSKAVKSRANGAGQRRKQEISIAAQETLGRKVAALLGMQVRHVWKEVGSASRFRKGKARDDQSKALKALESGEVGALWCYRLDRWDRGGAGAILKIIEPEDGMPRRLLFGWDEDTGRPVLDSTNKRDRGELIRRAEEAREEAEKLSERVRDTKAHQRENGEWVNARAPYGLRVVLVTVSDEEGDEYDERKLAADDEDAGGPDGLTKAEAARLVFTLPVTDRLSYAGTAHAMNTREIPSPTGGPWIAVTVRDMIQNPAYAGWQTTGRQDGKQRRLTFYNGEGKRVSVMHGPPLVTDEEQEAAKAAVKGEDGVGVPLDGSDHDTRRKHLLSGRMRCPGCGGSCSYSGNGYRCWRSSVKGGCPAPTYVARKSVEEYVAFRWAAKLAASEPDDPFVIAVADRWAALTHPQASEDEKYAKAAVREAEKNLGRLLRDRQNGVYDGPAEQFFAPAYQEALSTLQAAKDAVSESSASAAVDVSWIVDSSDYEELWLRATPTMRNAIIDTCIDEIWVAKGQRGRPFDGDERVKIKWAART

SEQ ID NO: 12678-13000 - skipped (323 entries)

SEQ ID NO: 13001 - DNA, 260 bp, Unknown
  Description of Unknown: LeftRegion for integrase B2 sequence
ataatcgtcaactcctttctttgattgcattatagcacacgtttgcaaaaatatcaaccggttagtcgataaatttactgataaatatattgtatgctgaaaggatgactttgatacacagctaatagcattttttcctttagcctgtctgcttcgtgcagatgggcttttttcatgcctgcgaggaggtggttacgcaaatggcatccagaatccagggcatcaccgttgagatcggcggcgataccacaaagctctcc

SEQ ID NO: 13002 - DNA, 260 bp, Unknown
  Description of Unknown: LeftRegion for integrase B3 sequence
gatacggattacacggtagatcaaaagcgcaacccgtctctgccagaggatgttactactatgctttctgggctcgacagcgcggacctcgaaaaagttatgatctacgcccgcggtttgctggacggggacaagtatcagaaacgccgtccgcggtaaagcaggaagtgcttctggcacgaaatagaaaggggcagacaatgagagtatccgtaaacttaaacgcacaaaagccggataccacgacaaacgccgtcatt

SEQ ID NO: 13003 - DNA, 260 bp, Unknown; identical to SEQ ID NO: 13002
  Description of Unknown: LeftRegion for integrase B4 sequence

SEQ ID NO: 13004 - DNA, 260 bp, Unknown; identical to SEQ ID NO: 13002
  Description of Unknown: LeftRegion for integrase B5 sequence

SEQ ID NO: 13005 - DNA, 260 bp, Unknown
  Description of Unknown: LeftRegion for integrase B6 sequence
atacggattacacggtagatcaaaagcgcaacccgtctctgccagaggatgttactactatgctttctgggctcgacagcgcggacctcgaaaaagttatgatctacgcccgcggtttgctggacggggacaagtatcagaaacgccgtccgcggtaaagcaggaagtgcttctggcaacgaaatagaaaggggcagacaatgagagtatccgtaaacttaaacgcacaaaagccggataccacgacaaacgccgtcatt

SEQ ID NO: 13006 - DNA, 260 bp, Unknown; identical to SEQ ID NO: 13002
  Description of Unknown: LeftRegion for integrase B7 sequence

SEQ ID NO: 13007 - DNA, 260 bp, Unknown
  Description of Unknown: LeftRegion for integrase B8 sequence
gatacggattacacggtagctcaaaagtgcgacccgtctctgccagaggatgttactactatgctttctgggctcgacagcgcggacctcgaaaaagttatgatctacgcccgcggtttgctggacggggacaagtatcagaaacgccgtccgcggtaaagcaggaagtgcttctggcacgaaatagaaaggggcagacaatgagagtatccgtaaacttaaacgcacaaaagccggataccacgacaaacgccgtcatt

SEQ ID NO: 13008 - DNA, 260 bp, Unknown; identical to SEQ ID NO: 13002
  Description of Unknown: LeftRegion for integrase B9 sequence

SEQ ID NO: 13009 - DNA, 260 bp, Unknown
  Description of Unknown: LeftRegion for integrase B10 sequence
ctgactatcttctcggtctaagtaaagttagattttcacaggacgaactttcggaagaagaattgcttttactcaacgcttatagaactgccagtgtacagggacgatttcatattatccaagtctgtatgaacgaaaaggattcaaaaggggaaactatcattgcaggataataagcattgaggaatggaggaagaaccatgtacgaagagattaagactgcttgtctatatctacgatattcaagtagcaaccaaact

SEQ ID NO: 13010 - DNA, 260 bp, Unknown
  Description of Unknown: LeftRegion for integrase B11 sequence
tttccttttccgtgaaatgcacccaagaagagacattcaagaaggaaaacaaggaagggaaagcgtataagtttcacaatattaacgaactcacatatcgttttaccgcccctagtgatataccagatgccgaaacaatccctgatccattatatagcacaatagtaaaatggctcaacaaaaagtgaggtgattcggttttggctaagtataagcaagtcgtgcaggaacaaatcggcgtaatctatgcccggtattcc

SEQ ID NO: 13011 - DNA, 260 bp, Unknown
  Description of Unknown: LeftRegion for integrase B12 sequence
tgctaaatttggagatgcttgtatctcttttgaggccgcaaaaggcaacggcgttacggcaacaatttccggttgccctgatatttgctttttcccggatgatgaaattactcgactgcttacgctgtatgggcataatagatgtctcggcggatatcgtcccaagttaaaagcggaaatttggccggaggagcaaggcaatgcagaagagtagtaatcacttgggcagccaagtcggcgtaatctatgccaggtattct

SEQ ID NO: 13012 - DNA, 260 bp, Unknown
  Description of Unknown: LeftRegion for integrase B13 sequence
acaggtcttttgattgtgtgtagtgacccggcgcaaaagaaaattgatagagccgatgccctgaatattccgattgtttcggagcagcaatggtttgaacttatgccggaacttgaggccgttggaatgtggaacggaaagcaaattctgtttgcggacaatgatggcatctaccgtgttgaagtgggcggtgaaagctgatggccagaaaaaagaatattgctgctggcctcgatgccgtcatctatgcccggtactca

SEQ ID NO: 13013 - DNA, 260 bp, Unknown
  Description of Unknown: LeftRegion for integrase B14 sequence
gacacacctcctgaaacagatactcttatggttgtcattgttgatgacgaagaaggatttgttaagaaaatcagcattgatgaagatactgtgacccttcgctcttttaatccacactatcctccccgtgtttttggcggtgttgaaattggacgattgcgctttgtcggtagagtcatggagttaaaaaggagatttgcatgaaaaaatttccaatcgacctctcctgtctgacagaggaagaaatctctcaatttcag

SEQ ID NO: 13014 - DNA, 260 bp, Unknown
  Description of Unknown: LeftRegion for integrase B15 sequence
tgcagccattataagccttgtcggcatcggaatcatcgccattccgacgggcattatttccgctggattcacgtctttgattggaaaggatagagaagaaaccgacaaaaagaactattgcccatattgcggccataggctcgacgaataacaaagcgtttttgcattttctgaaaaaaagtttacgagtaggtgattgcatgaaagcggccatatacgcccgtttttcgagccataatcaacgtgaggaatccattgaa

SEQ ID NO: 13015 - DNA, 260 bp, Unknown
  Description of Unknown: LeftRegion for integrase B16 sequence
taactctcaaagatcgcttgttttctcaaccttccttaaatgaacaagaagtagaattggttaatttattccgctcttgtaaaccgtctgtgcaattccaagttgttcatattatgatgacggaaaaagaaaaaacagactctacggaagagtctgctatcgtctaaggtcatcgacctaaatgaatggagaaagaccctatgaagaagttcaagttccctatcgacttgtctatgctgacagaagaagagatcaaccaa

SEQ ID NO: 13016 - DNA, 260 bp, Unknown
  Description of Unknown: LeftRegion for integrase B17 sequence
ccagtgataacgagcctgattgggcgtatatggacgagtacatgcgaacaataatggaaagcgcagcgtccgatttgtctgctatgcagtcaatcggttaatagcgtgtaagcccgccgttccatctgggcggtgggcttatttccaaaggagtgaaccatgaaaacctataagcagaaaagaagggagggggtaaacctatggcacgtaagaagaaattcgcgccgaacgacaacaatcttgcgatagcgtactatcgc

SEQ ID NO: 13017 - DNA, 260 bp, Unknown; identical to SEQ ID NO: 13012
  Description of Unknown: LeftRegion for integrase B18 sequence

SEQ ID NO: 13018 - DNA, 260 bp, Unknown
  Description of Unknown: LeftRegion for integrase B19 sequence
atccgacagttttttgattttggcaaagatatccgaccattcgctcgtagtcatacggcatggctcctttctcaaatttactgtcggcagcaactgaattatatcaaatacgcacccgcttttcagggattcgtagaattataccgaaaatcggaaaaatattgcgaattttgaagaagataatcgtgaggtgatggttgatggcccgaaaaaagaatattgctgcgggtcagaatgccgtcatttatgcccgctattcc

SEQ ID NO: 13019 - DNA, 260 bp, Unknown
  Description of Unknown: LeftRegion for integrase B20 sequence
ctggatcattgacatggttatgatctgttgcaacaaattcaccgacagcaccggcgcggtggttggtctgaaggttgctgagtataccagacagccggatcctgatcttgcagaggcttctctggaggagcagcgggaggcagcggccgagactgccagagcttacggctataccgtaatagagtcaggcgctcaggataatgccgacaagtaaaaacacggctcgaaaatatgccgcaggaggtagctcggataattcc

SEQ ID NO: 13020 - DNA, 260 bp, Unknown
  Description of Unknown: LeftRegion for integrase B21 sequence
cttcgatcaaggacttatgacggttctgcctgatcttacgattcaggtctcggactatgtgaaggacagctatgacgaccagaatacaagagactggctgcttggcgtagagggtacaaaaatcatcaggccaaagagattcgcgccaaatcgcgatatgctggcctatcacaatgagttcgtcttcctgaggtgattccatgcagcgagcagtgatatacgccaggtacagtcctggaccaaatcagacagagcagtcg

SEQ ID NO: 13021 - DNA, 260 bp, Unknown
  Description of Unknown: LeftRegion for integrase B22 sequence
aagaccggcggcttttatcgcatcattactcacagtgccgttgctatttgatctattgattcatggctacatcggttcagaaccatcaaaagaagggttttggtttgactttgggatattggttgctgagtggatcgtagtccgatatgggctttcttggatatggaagaagatttctggcgggaaataaaaggtcctttatgtatggatgccttagaaagggaaacgatatggatgaatttgctgcccgcccggtagcc

SEQ ID NO: 13022 - DNA, 260 bp, Unknown
  Description of Unknown: LeftRegion for integrase B23 sequence
ccccaagacggcccggaacaagaatgtgctggtgatcggcggctccggcagcggcaagacccgcttctatgtgaagcccaacctcatgcaatgctttcccacttccgactatcccacctcattcgtggtcacagacccgaatggtaatttacaataaggataaagggagcgcgcaccctcaagaaaggaggttacaccccatgaagaaacagccggacaagggaaaaatcacagccctgtacgagcgtctttcccatgac

SEQ ID NO: 13023 - DNA, 260 bp, Unknown
  Description of Unknown: LeftRegion for integrase B24 sequence
aatttttgggcatatcagccaaaaatacttggcgttgttcgatgcggccataacatatatgaaataaaaaaaccgcccacggcggcaaccgtaggcggtttacatagacagcttgttcaaaagaggaacaatgcagcccaagcaactgcattatacctctttcgggcgggcttttacaagtctcccggaggtgtttttttatgagtttggcgctggagctggcacaaacgcaaattgcacgggcgaagccggcagaagat

SEQ ID NO: 13024 - DNA, 260 bp, Unknown
  Description of Unknown: LeftRegion for integrase B25 sequence
ttcggacggtggtcctgcggatgcagccgatgagatggagaatctgttgggaggaggtggaagctgatggattccaatattgaagattaccgcaacaccgccagctactatgatggacaggcaatgagagatggtagttggcgaaagcggtatgtaaaaaggtaagagccagtcataaggctggcgggaaggagagcattatgacaagacagaaagtagaagtgatcccagccagtgttcgttctgtccagaacggcgga

SEQ ID NO: 13025 - DNA, 260 bp, Unknown; identical to SEQ ID NO: 13024
  Description of Unknown: LeftRegion for integrase B26 sequence

SEQ ID NO: 13026 - DNA, 260 bp, Unknown
  Description of Unknown: LeftRegion for integrase B27 sequence
acagcatacagttccagtattgcccaagttttaattatgaaaacataatgaaaaatttggacaagttgccttgtcgcttaaccgaacaagaaatgaacaaattagatccatacagacaatacagattataaaaaagcccgctccgacagaaacgggcacaatgacgcaaccaacgaaaagtaataaagcggagagagagtatgacaaatgcagtgatatatgcccggtatagcccggggccgaatcaaacggatcaatca

SEQ ID NO: 13027 - DNA, 260 bp, Unknown
  Description of Unknown: LeftRegion for integrase B28 sequence
gttcatctcgcggggctcctttctcgaacttttgttcgatttatattgtagactcattttttgaggttgtcaatagaaactttaaagaaaaatatcggttcctatcagcaccgatgtgtaaaataaataaaaaagcccgctcccgtgagaacaggaacgagcgagaaagtgacaatgaaaagtaagaaagcggagagagtatgacaaatgcagtaatatatgcccggtatagcccggggccaaatcaaacggatcaatca

SEQ ID NO: 13028 - DNA, 260 bp, Unknown
  Description of Unknown: LeftRegion for integrase B29 sequence
gttcatctcgcggggctcctttctcgaacttttgttcgatttatattgtagactcattttttgaggttgtcaatagaaactttaaagaaaaatatcggttcctatcagcaccgatgtgtaaaataaataaaaaagcccgctcccgtgagaacaggaacgagcgagagagtgccacagaaaagtaagaaagcggagagagtatgacaaatgcagtgatatatgcccggtatagcccgggaccaaatcaaacggatcaatca

SEQ ID NO: 13029 - DNA, 260 bp, Unknown
  Description of Unknown: LeftRegion for integrase B30 sequence
ccttgcggtctgcatcgtgtcgctcccggtcggcttgatcattgtagccgttggagcgtaccgggcggtaaaagccggggatatttatgatgctgcagttgctcggtacgagcagcaaatctcggactatgttgactggctggatgaagtcaacgcaaaataaaaagccgccctctgtgggcggcgggaggttgctctgaatgcgcgcaaaaaagaaaccggccatgcttgagccggatatgcaggatgccgtgatctac

SEQ ID NO: 13030 - DNA, 260 bp, Unknown
  Description of Unknown: LeftRegion for integrase B31 sequence
acttgggatgctggaggactggccgaaggtcagtcgtagtggaagcaaggctgcgctggaagatgcacaggctgaaattgagcggtggaggcaagagttccttgctgggaatatctcggcgaagaaatacgttaaaattgcggatgctctcatatccaaataaaaagccgccctcggtgggcggcgggaggttgctctgaatgtgcgcaaaaaagaaaccggccatgcttgagccggatatgcaggatgccgtgatctac

SEQ ID NO: 13031 - DNA, 260 bp, Unknown
  Description of Unknown: LeftRegion for integrase B32 sequence
aaattcgtagatggtctttttgttcttctaaaagtcgaggtgtgataaagccgctttataaataagaatgaattgaaatataatttatatatgaaaagattgttatgagacattctggaaagacttgaaaactgtcaatgttatatatataataatatgtgaaatatacaacattggatattgtagaagggagcaatacggtgaaaaaaagtaaacctccacaaaggattgctggctatctgcgcattagcgatgaagac

SEQ ID NO: 13032 - DNA, 260 bp, Unknown
  Description of Unknown: LeftRegion for integrase B33 sequence
ccatattccgataccctatggatagggtatctataccgtatccataccgtaccgatacctcgcgtgcgcgcgtgcgtgtgcgcgcgatcgtgcgcgcactgtctctgtacctgtatctgtatctgagactgtatctgtaatctgtttctgattctgaatatctactactgcaaatctatcgttagaagggggtggcgctgttgccgagaaaacctgcaaagcacccggcgaagccgaagcggggcaagaagctggaagtc

SEQ ID NO: 13033 - DNA, 260 bp, Unknown
  Description of Unknown: LeftRegion for integrase B34 sequence
catattccgataccctatggatagggtatctataccgtatccataccgtaccgatacctcgcgtgcgcgcgtgcgtgtgcgcgcgatcgtgcgcgcactgtctctgtacctgtatctgtatctgagactgtatctgtaatctgtttctgattctgaatatctactactgcaaatctatcgttagaaggggggcggcgctgttgccgagaaaacctgcaaagcacccggcgaagccgaagcggggcaagaagctggaagtc

SEQ ID NO: 13034 - DNA, 260 bp, Unknown
  Description of Unknown: LeftRegion for integrase B35 sequence
tatctatgaattgtttagaagacaataaacttatatgttttataagtaaataaaaaagacacgtcatgcgcgaacatgaagtgtcaaaatgaaaaaccacaaaagctatcacactcttaacaataatagagaaactataattgtataggtttttctatacgattatagcataaaatttaaaagaaagaaagtgctataatatgaatttagaaacatttttgagaattttacacatacctagtaatctatctattgacgag

SEQ ID NO: 13035 - DNA, 260 bp, Unknown
  Description of Unknown: LeftRegion for integrase B36 sequence
ttgctcgaaatgtacgttttcttgctcgaatggtaaaaaagcataaaaaaagacgcctcgcgcgcgaacacgaagcgttgaaatgaaaaaccacaaaagctatcacacttaaaacaaaaatagaagaaacaaccaactataattgtataggtttttctatacgattatagcataaaattataaagaaagaaagtgctataatgaatttagatacatttttacaaataatgaacgtatctagggaccttactgtcgacgag

SEQ ID NO: 13036 - DNA, 260 bp, Unknown
  Description of Unknown: LeftRegion for integrase B37 sequence
atgctcgaaatgtacgttttcttgctcgaaaggtaaaaaaacataaaaaaagacgcctcgcgcgcgaacacgaagcgttgaaatgaaaaaccacaaaagctatcacacttaaaacaaaaatagaagaaacaaccaactataattgtataggtttttctatacgattatagcataaaattataaagaaagaaagtgctataatgaatttagatacatttttacaaataatgaacgtatctagggaccttactgtcgacgag

SEQ ID NO: 13037 - DNA, 260 bp, Unknown
  Description of Unknown: LeftRegion for integrase B38 sequence
tgaattgtttagatcataataaactaatttgttttattgaaaagtaaaaaagacgcctcatgcgcgaacatgaagcgttgaaatgaaaaaccacaaaagctatcacacttaaaacaataatagaagaaacaaccaactataattgtataggtttttctatacgattatagcataaaattataaagaaagaaagtgctataatgaatttagatacatttttacaaataatgaacgtatctagggaccttactgtcgacgag

SEQ ID NO: 13038 - DNA, 260 bp, Unknown
  Description of Unknown: LeftRegion for integrase B39 sequence
ttgctcgaaatgtacgttttcttgctcgaatgggaaaaaaacataaaaaaagacgcctcgcgcgcgaacacgaagcgttgaaatgaaaaaccacaaaagctatcacacttaaaacaaaaatagaagaaacaaccaactataattgtataggtttttctatacgattatagcataaaattataaagaaagaaagtgctataatgaatttagatacatttttacaaataatgaacgtatctagggaccttactgtcgacgag

SEQ ID NO: 13039 - DNA, 260 bp, Unknown
  Description of Unknown: LeftRegion for integrase B40 sequence
aattgtttagatcacaacagactaatttgttttattgaaaaataaaaaaaagacgcctcgcgcgcgaacacgaagcgttgaaatgaaaaaccctaaaagctatcacactcaaaacaaaaatagaagaaacaaccaactataattgtataggtttttctatacgattatagcataaaattataaagaaagaaagtgctataatgaatttagatacatttttacaaataatgaacgtatctagggaacttactgtcgacgag

SEQ ID NO: 13040 - DNA, 260 bp, Unknown
  Description of Unknown: LeftRegion for integrase B41 sequence
gaattgtttagatcataataaactaatttgttttattgaaaaataaaaaaagacgcctcgcgcgcgaacacgaagcgttgaaatgaaaaaccctaaaagctatcacacttaaaacaaaaatagaagaaacaaccaactataattgtataggcttttctatacgattatagcataaaattataaagaaagaaagtgctataatgaatttagatacatttttacaaataatgaacgtatctagggaccttactgtcgacgag

SEQ ID NO: 13041 - DNA, 260 bp, Unknown; identical to SEQ ID NO: 13035
  Description of Unknown: LeftRegion for integrase B42 sequence

SEQ ID NO: 13042 - DNA, 260 bp, Unknown
  Description of Unknown: LeftRegion for integrase B43 sequence
tgctcgaaatgtacgttttcttgctcgaaaggtaaaaaagcataaaaaaaagacgcctcgcgcgcgaacacgaagcgttgaaatgaaaaaccctaaaagctatcacacttaaaacaaaaatagaagaaacaaccaactataattgtataggcttttctatacgattatagcataaaattataaagaaagaaagtgctataatgaatttagatacatttttacaaataatgaacgtatctagggaccttactgtcgacgag

SEQ ID NO: 13043 - DNA, 260 bp, Unknown; identical to SEQ ID NO: 13035
  Description of Unknown: LeftRegion for integrase B44 sequence

SEQ ID NO: 13044 - DNA, 260 bp, Unknown; identical to SEQ ID NO: 13042
  Description of Unknown: LeftRegion for integrase B45 sequence

SEQ ID NO: 13045 - DNA, 260 bp, Unknown; identical to SEQ ID NO: 13040
  Description of Unknown: LeftRegion for integrase B46 sequence

SEQ ID NO: 13046 - DNA, 260 bp, Unknown; identical to SEQ ID NO: 13035
  Description of Unknown: LeftRegion for integrase B47 sequence

SEQ ID NO: 13047 - DNA, 260 bp, Unknown
  Description of Unknown: LeftRegion for integrase B48 sequence
tgaattgtttagatcataataaactaatttgttttattgaaaagtaaaaaagacgcctcgcgcgcgaacacgaagcgttgaaatgaaaaaccacaaaagctatcacacttaaaacaaaaatagaagaaacaaccaactataattgtataggtttttctatacgattatagcataaaattataaagaaagaaagtgctataatgaatttagatacatttttacaaataatgaacgtatctagggaccttactgtcgacgag

SEQ ID NO: 13048 - DNA, 260 bp, Unknown
  Description of Unknown: LeftRegion for integrase B49 sequence
tgctcgaaatgtacgttttcttgctcgaaaggtaaaaaaacataaaaaaaagacgcctcgcgcgcgaacacgaagcgttgaaatgaaaaaccacaaaagctatcacacttaaaacaaaaatagaagaaacaaccaactataattgtataggtttttctatacgattatagcataaaattataaagaaagaaagtgctataatgaatttagatacatttttacaaataatgaacgtatctagggaccttactgtcgacgag

SEQ ID NO: 13049 - DNA, 260 bp, Unknown
  Description of Unknown: LeftRegion for integrase B50 sequence
ttgctcgaaatgtacgttttcttgctcgaatggtaaaaaagcataaaaaaagacgcctcatgcgcgaacatgaagcgttgaaatgaaaaaccacaaaagctatcacacttaaaacaaaaatagaagaaacaaccaactataattgtataggtttttctatacgattatagcataaaattataaagaaagaaagtgctataatgaatttagatacatttttacaaataatgaacgtatctagggaccttactgtcgacgag

SEQ ID NO: 13050 - DNA, 260 bp, Unknown
  Description of Unknown: LeftRegion for integrase B51 sequence
ttgctcgaaatgtacgttttcttgctctaatggtaaaaaagcataaaaaaagacgcctcgcgcgcgaacacgaagcgttgaaatgaaaaaccacaaaagctatcacacttaaaacaaaaatagaagaaacaaccaactataattgtataggtttttctatacgattatagcataaaattataaagaaagaaagtgctataatgaatttagatacatttttacaaataatgaacgtatctagggaccttactgtcgacgag

SEQ ID NO: 13051 - DNA, 260 bp, Unknown
  Description of Unknown: LeftRegion for integrase B52 sequence
ttgttcgaaatgtacgttttcttgctcgaatggtaaaaaagcataaaaaaagacgcctcatgcgcgaacatgaagcgttgaaatgaaaaaccacaaaagctatcacacttaaaacaaaaatagaagaaacaaccaactataattgtataggtttttctatacgattatagcataaaattataaagaaagaaagtgctataatgaatttagatacatttttacaaataatgaacgtatctagggaccttactgtcgacgag

SEQ ID NO: 13052 - DNA, 260 bp, Unknown
  Description of Unknown: LeftRegion for integrase B53 sequence
ttgctcgaaatgtacgttttcttgctcgaatggtaaaaaagcatagaaaaagacgcctcgcgcgcgaacacgaagcgttgaaatgaaaaaccacaaaagctatcacacttaaaacaaaaatagaagaaacaaccaactataattgtataggtttttctatacgattatagcataaaattataaagaaagaaagtgctataatgaatttagatacatttttacaaataatgaacgtatctagggaccttactgtcgacgag

SEQ ID NO: 13053 - DNA, 260 bp, Unknown
  Description of Unknown: LeftRegion for integrase B54 sequence
tgctcgaaatgtacgttttcttgctcgaaaggtaaaaaagcataaaaaaaagacgcctcgcgcgcgaacacgaagcgttgaaatgaaaaaccctaaaagctatcacacttaaaacaaaaatagaagaaacaaccaactataattgtataggcttttctatacgattatagcataaaattataaagaaagaaagtgctataatgaatttagatacatttttacaaatgatgaacgtatctagggaccttactgtcgacgag

SEQ ID NO: 13054 - DNA, 260 bp, Unknown
  Description of Unknown: LeftRegion for integrase B55 sequence
ttgctcgaaatgtacgttttcttgctcgaaaggtaaaaaaacataaaaaaagacgcctcgcgcgcgaacacgaagcgttgaaatgaaaaaccacaaaagctatcacacttaaaacaaaaatagaagaaacaaccaactataattgtataggtttttctatacgattatagcataaaattataaagaaagaaagtgctataatgaatttagatacatttttacaaataatgaacgtatctagggaccttactgtcgacgag

SEQ ID NO: 13055 - DNA, 260 bp, Unknown
  Description of Unknown: LeftRegion for integrase B56 sequence
tgctcgaaatgtaggttttcttgctcgaaaggtaaaaagacataaaaaaaagacgcctcatgcgcgaacatgaagcgttgaaatgaaaaaccacaaaagctatcacacttaaaacaaaaatagaagaaacaaccaactataattgtataggtttttctatacgattatagcataaaattataaagaaagaaagtgctataatgaatttagatacatttttacaaataatgaacgtatctagggaccttactgtcgacgag

SEQ ID NO: 13056 - DNA, 260 bp, Unknown
  Description of Unknown: LeftRegion for integrase B57 sequence
tgctcgaaatgtacgttttcttgctcgaaaggtaaaaaaacataaaaaaaagacgcctcgcgcgcgaacacgaagcgttgaaatgaaaaaccctaaaagctatcacacttaaaacaaaaatagaagaaacaaccaactataattgtataggcttttctatacgattatagcataaaattataaagaaagaaagtgctataatgaatttagatacatttttacaaataatgaacgtatctagggaccttactgtcgacgag

SEQ ID NO: 13057 - DNA, 260 bp, Unknown
  Description of Unknown: LeftRegion for integrase B58 sequence
tgaattgtttagatcataataaactaatttgttttattgaaaagtaaaaaagacgcctcatgcgcgaacatgaagcgttgaaatgaaaaaccacaaaagctatcacacttaaaacaaaaatagaagaaacaaccaactataattgtataggtttttctatacgattatagcataaaattataaagaaagaaagtgctataatgaatttagatacatttttacaaataatgaacgtatctagggaccttactgtcgacgag

SEQ ID NO: 13058 - DNA, 260 bp, Unknown
  Description of Unknown: LeftRegion for integrase B59 sequence
gaattgtttagatcataacaaactaatttgttttattgaaaaataaaaaaagacgcctcgcgcgcgaacacgaagcgttgaaatgaaaaaccctaaaagctatcacacttaaaacaaaaatagaagaaacaaccaactataattgtatagatttttctatatgattatagcataaaattataaagaaagaaagtgctataatgaatttagatacatttttacaaataatgaacgtatctagggaacttactgtcgacgag

SEQ ID NO: 13059 - DNA, 260 bp, Unknown; identical to SEQ ID NO: 13042
  Description of Unknown: LeftRegion for integrase B60 sequence

SEQ ID NO: 13060 - DNA, 260 bp, Unknown; identical to SEQ ID NO: 13042
  Description of Unknown: LeftRegion for integrase B61 sequence

SEQ ID NO: 13061 - DNA, 260 bp, Unknown; identical to SEQ ID NO: 13037
  Description of Unknown: LeftRegion for integrase B62 sequence

SEQ ID NO: 13062 - DNA, 260 bp, Unknown; identical to SEQ ID NO: 13035
  Description of Unknown: LeftRegion for integrase B63 sequence

SEQ ID NO: 13063 - DNA, 260 bp, Unknown
  Description of Unknown: LeftRegion for integrase B64 sequence
aattgtttagatcataataaactaatttgttttattgaaaaataaaaaaaagacgcctcgcgcgcgaacacgaagcgttgaaatgaaaaaccctaaaagctatcacacttaaaacaaaaatagaagaaacaaccaactataattgtataggcttttctatacgattatagcataaaattataaagaaagaaagtgctataatgaatttagatacatttttacaaataatgaacgtatctagggaccttactgtcgacgag

SEQ ID NO: 13064 - DNA, 260 bp, Unknown; identical to SEQ ID NO: 13054
  Description of Unknown: LeftRegion for integrase B65 sequence

SEQ ID NO: 13065 - DNA, 260 bp, Unknown
  Description of Unknown: LeftRegion for integrase B66 sequence
tgaattgtttagatcataataaactaatttgttttattgaaaagtaaaaaagacgcctcgcgcgcgaacacgaagcgttgaaatgaaaaaccctaaaagctatcacacttaaaacaaaaatagaagaaacaaccaactataattgtataggtttttctatacgattatagcataaaattataaagaaagaaagtgctataatgaatttagatacatttttacaaataatgaacgtatctagggaccttactgtcgacgag

SEQ ID NO: 13066 - DNA, 260 bp, Unknown; identical to SEQ ID NO: 13057
  Description of Unknown: LeftRegion for integrase B67 sequence

SEQ ID NO: 13067 - DNA, 260 bp, Unknown; identical to SEQ ID NO: 13054
  Description of Unknown: LeftRegion for integrase B68 sequence

SEQ ID NO: 13068 - DNA, 260 bp, Unknown
  Description of Unknown: LeftRegion for integrase B69 sequence
ttattatagatatcatggactttaataaagtaacttatatatgatgcaatttagatatattaaataaaattaattttctatttgcatcatatatttttatatacagattttactttttgaaatataagtaatgtgtttacatattggaaatactatatttaagggtattttcaatataaaaccttagggaggtttgacttatgaaggctgcaatttattcaagaaaatcaaaatttactggaaaaggagactctatagaa

SEQ ID NO: 13069 - DNA, 260 bp, Unknown
  Description of Unknown: LeftRegion for integrase B70 sequence
aagacggatggattgtaaaaacagaattataaagttgcgtgaaagcacaggactgaaccggaaagatttttgcaagctcgtccatattccttaccggactatgactgaatgggaattggacaaccgccatgcaccggattatgtgctgtggcttttggagtattatatccgcaacgagggacttatggtaaaaggaaggaatgagggaggtggagattctgaaaaagaaacaacttaaatgctatctttatacaagagtg

SEQ ID NO: 13070 - DNA, 260 bp, Unknown
  Description of Unknown: LeftRegion for integrase B71 sequence
aagacggatggattgtaaaaacagaattattaagttgcgtgaaagcacaggactgaaccggaaagatttttgcaagctcgtccatattccttaccggactatgactgaatgggaattggacaaccgccatgcaccggattatgtgctgtggcttttggagtattatatccgcaacgagggacttatggtaaaaggaaggaatgagggaggtggagattctgaaaaagaaacaacttaaatgctatctttatacaagagtg

SEQ ID NO: 13071 - DNA, 260 bp, Unknown
  Description of Unknown: LeftRegion for integrase B72 sequence
atggttgagctttatacgatacaaagatatttgcaatataacactcttgcagaaaatcatttactgcattttgacgaatgggcaagtacatttggagaaactgtaactgcaatcgaacttaatcctgagggctatactttaataggacgataaaattaactgtcctaaattgaaaatacataaggaaggaggttaagagaatgtcaaggacttcaaagattacagcactttatgagagattatcaagagatgatgacctg

SEQ ID NO: 13072 - DNA, 260 bp, Unknown
  Description of Unknown: LeftRegion for integrase B73 sequence
agggctatactttagtaggacgataaataatgcgtttctaaattgaaaataggctatcaaaatcggtcttggaacttcaaaaaaatattttgattttcttgaaaaacagttccgctttgtacccctattttctcctattagcagagggagtaatccctgtaatgctaaatcggattacataaggaaaggaggataagagaatgtcaaggagttcaaagattacagcactctatgagcgtttgtcgagagatgatgatctt

SEQ ID NO: 13073 - DNA, 260 bp, Unknown
  Description of Unknown: LeftRegion for integrase B74 sequence
acgtatttgtcaatatgaatatacgtgttttacgtaatataaattcaaagggcgcaataaccacaaaaaacgcccccggtgctaccaacaccgagagcgtttccgaatcagattgccccataaggtgatatggtaacaaccgaccaacagccatattgtaccaccttgcgggcaggattgcaaacccaaaaggtgataccatgaaaaagaagcaaccaaatacccgccatggccgggctgcgatttacgcccggtattcg

SEQ ID NO: 13074 - DNA, 260 bp, Unknown
  Description of Unknown: LeftRegion for integrase B75 sequence
gagaacagtaatttttcttatatgactcgccgcattggcggcaccacctataaagttaaagtagtattcagtgatacagagaaggaaacgatggaggataaaattttacggatgattcgcaatgaaacggttacaactggcggaacttgtggtataatagattcaccacaaatgagccgacagtctgaaaggagcgcatcatgagcgtaaaacagactgaaggaaaaatcacagctttatatgaaaggctgtcccgtgat

SEQ ID NO: 13075 - DNA, 260 bp, Unknown
  Description of Unknown: LeftRegion for integrase B76 sequence
acgttcaaggccgatcatttaccttgtaagcacatttacaagctggccttaattaaagggctgattcagtagttttataataaaataaaaacagccggtcaacgactgcaatcactgaccggctttaataccaggcaaccgaaaaaggtcttctgatattggaaataagcaccctatattatagcaaagaaggccagaaaatgcaatcggctttcttttttataccctttttcggttcctggagaaaggggcttttcatg

SEQ ID NO: 13076 - DNA, 260 bp, Unknown
  Description of Unknown: LeftRegion for integrase B77 sequence
acccggatagtgacaatgtcgaagacgacgagacgctcaatctgattttcgacgaagaagggtctgagggaactgagaatcgccttgacgctctcgtggaagcagcagtcgcagctggatttgaaattgtcgagcgcgacttcacgaaggacgctatcgagcgcgacgaaagagacgcacaagcaaggggcgctaaataggtggcacgaaaaaatcccaagataccagatgccacccatccactctcctgcgtcctgtac

SEQ ID NO: 13077 - DNA, 260 bp, Unknown
  Description of Unknown: LeftRegion for integrase B78 sequence
acgctttacttcatgatgacaagttaataaatcaatttaaagataaccataatggaaattatgagtttgaagcaaatttatttgcagtagcattactatttaatgaagaagactttaatattaagtttaataaattagataattacatcctacagggaattcttgatagcaatatagaattagtctaaggagatgataaattgaacaccattgctatttatactcgtaaatctaaattcactggaaaaggtgaatctatt

SEQ ID NO: 13078 - DNA, 260 bp, Unknown
  Description of Unknown: LeftRegion for integrase B79 sequence
cgttcaaggccgatcatttaccttgtaagcacatttacaagctggccttaattaaagggctgattcactagttttataataaaataaaaacagccggtcaacgactgcaatcactgaccggctttaataccaggcaaccgaaaaaaggtcttctgatattggaaataagcaccctatattatagcagagaaggccaggaaatgcaatcggctttcttttttataccctttttcggttcctggagaaaggggcttttcatg

SEQ ID NO: 13079 - DNA, 260 bp, Unknown; identical to SEQ ID NO: 13075
  Description of Unknown: LeftRegion for integrase B80 sequence

SEQ ID NO: 13080 - DNA, 260 bp, Unknown
  Description of Unknown: LeftRegion for integrase B81 sequence
gtactttctggccgcccaaacaatgcgttgcaacatttcagaagtaaacggaaaatatgaacttgagaaattaaactaactgaataaaaaacagccggtcaacgactgcaatcactgaccggctttaataccaggcaaccgaaaaaggtcttctgatattggaaataagcaccctatattatagcagagaaggccaggaaatgcaatcggctttcttttttataccctttttcggttcctggagaaaggggcttttcatg

SEQ ID NO: 13081 - DNA, 260 bp, Unknown
  Description of Unknown: LeftRegion for integrase B82 sequence
gtactttttggccgctcaaacaatgcgttgcaacatttcagaagtaaacggaaagtatgaactagagaaattaaattaactgaataaaaaacagccggtcaacgactgcaatcactgaccggctttaataccaggcaaccgaaaaaggtcttctgatattggaaataagcaccctatattatagcagagaaggccaggaaatgcaatcggctttcttttttataccctttttcgattcttggggaaaggggtttttcatg

SEQ ID NO: 13082 - DNA, 260 bp, Unknown
  Description of Unknown: LeftRegion for integrase B83 sequence
tattttctggccgctcaaacaatgcgttgtaacatttcggaagtaaacggaaaatatgaactagaaaaattaaactaactgaataataaaacagccggtcaacgactgcaatcactgaccggctttaataccaggcaaccgaaaaaggtcttctgatattggaaataagcaccctatattatagcagagaaggccaggaaatgcaatcggctttcttttttataccctttttcgattcctggggaaaggggcttttcatg

SEQ ID NO: 13083 - DNA, 260 bp, Unknown
  Description of Unknown: LeftRegion for integrase B84 sequence
cgttcaaggccgatcatttaccttgtaaacatatttacaagttggccttaatcaaagggctgattcagtagttttacaataaaataaaaaacagccggtcaacgactgcaatcattgaccggctttaataccaggcaaccgaaaaaggtcttctgatattggaaataagcaccctatattatagcaaagaaggccagaaaatgcaatcggctttcttttttataccctttttcggttcctggagaaaggggcttttcatg

SEQ ID NO: 13084 - DNA, 260 bp, Unknown
  Description of Unknown: LeftRegion for integrase B85 sequence
tattttctggccgctcaaacaatgcgttgtaacatttcggaagtaaacggaaaatatgaactagaaaaattaaactaactgaataataaaacagccggtcaacgactgcaatcattgaccggctttaataccaggcaaccgaaaaaggtcttctgatattggaaataagcaccctatattatagcaaagaaggccagaaaatgcaatcggctttcttttttataccctttttcggttcctggagaaaggggcttttcatg

SEQ ID NO: 13085 - DNA, 260 bp, Unknown
  Description of Unknown: LeftRegion for integrase B86 sequence
gtactttttggccgctcaaacaatgcgttgcaacatttcagaagcaaacggaaagtatgaactagagaaattaaattaactgaataaaaaacagccggtcaacgactgcaatcactgaccggctttaataccaggcaaccgaaaaaggtcttctgatattggaaataagcaccctatattatagcagagaaggccaggaaatgcaatcggctttcttttttataccctttttcggttcctggagaaaggggcttttcatg

SEQ ID NO: 13086 - DNA, 260 bp, Unknown
  Description of Unknown: LeftRegion for integrase B87 sequence
cgttcaaggccgatcatttaccttgtaagcacatttacaagctggccttaattaaagggctgattcagtagttttataataaaataaaaacagccggtcaacgactgcaatcactgaccggctttaataccaggcaaccgaaaaaaggtcttctgatattggaaataagcaccctatattatagcaaagaaggccagaaaatgcaatcggctttcttttttataccctttttcggttcctggagaaaggggcttttcatg

SEQ ID NO: 13087 - DNA, 260 bp, Unknown; identical to SEQ ID NO: 13075
  Description of Unknown: LeftRegion for integrase B88 sequence

SEQ ID NO: 13088 - DNA, 260 bp, Unknown
  Description of Unknown: LeftRegion for integrase B89 sequence
acgttcaaggccgatcatttaccttgtaagcacatttacaagctggccttaattaaagggctgattcagtagttttataataaaataaaaacagccggtcaacgactgcaatcactgaccggctttaataccaggcaaccgaaaaaggtcttctgatattggaaataagcaccctatattatagcaaagaaggccagaaaatgcaatcggctttcttttttataccatttttcggttcctggagaaaggggcttttcatg

SEQ ID NO: 13089 - DNA, 260 bp, Unknown
  Description of Unknown: LeftRegion for integrase B90 sequence
gttcaaggccgatcatttaccttgtaaacatatttacaagttggccttaatcaaagggctgattcagtagttttacaataaaataaaaaacagccggtcaacgactgcaatcattgaccggctttaataccaggcaaccgaaaaaaggtcttctgatattggaaataagcaccctatattatagcagagaaggccaggaaatgcaatcggctttcttttttataccctttttcggttcctggagaaaggggcttttcatg

SEQ ID NO: 13090 - DNA, 260 bp, Unknown
  Description of Unknown: LeftRegion for integrase B91 sequence
cgttcaaagccgatcacttaccttgtaagcacatttacaagttggccttaattaaagggctgattcagtagttttacaataaaataaaaaacagccggtcaacgactgcaatcactgaccggctttaataccaggcaaccgaaaaaggtcttctgatattggaaataagcaccctatattatagcagagaaggccaggaaatgcaatcggctttcttttttataccctttttcggttcctggggaaaggggcttttcatg

SEQ ID NO: 13091 - DNA, 260 bp, Unknown
  Description of Unknown: LeftRegion for integrase B92 sequence
cctggcgaaaatagcagctatgggagttcttgtgaatcttacccagggcagctatgaatttgatataccaatcagcgaaattaaagatgtgcaggaaaagaaacggcttttcagcaaaaccctttctgtgactacagcttccggagaggaatatcaatttgcatttactaaactggtggagtggcaaatcgctttttccaatgccctttctgctgaaagataacggggttactgacactatggcaaagagagaattgatg

SEQ ID NO: 13092 - DNA, 260 bp, Unknown
  Description of Unknown: LeftRegion for integrase B93 sequence
ttgtcagaccccacagaccctatattgtcagaccctgacaaaccccttgtagagaacatagtttcagtacttgtagattccttatttaaacagacctttatggaaaaatctgatggttgttcataaggcatatctgcgttacaataggcaccaccaaaggacttatgagcagattgtttgtttttgaaaggagtttagttatggctatattgaataatgagatgcaggtaatactttccacagatgcagaggaaatgtct

SEQ ID NO: 13093 - DNA, 260 bp, Unknown
  Description of Unknown: LeftRegion for integrase B94 sequence
atatcgccaactggtcggccgctcaaggtgcaactaccgcaccgcagcccgttcagcaggtagtggagcagaaaccgtctcccgccgatgaaatccgcaaatacaagggcctgctggatgacggtatcatcacgcaggaagaatttgaagctaagaaaaagcaactgctgggcctgtaaatttgaaaggagcgtgacggcatgagaaaaaagtccaacctcaatgcggctactcgtgccgtcatctatgccaggtattcc

SEQ ID NO: 13094 - DNA, 260 bp, Unknown
  Description of Unknown: LeftRegion for integrase B95 sequence
ctgtagcgattgcggatttagctttgactttacaacgcaaaaagatatcgatgacaagtgtaaatcattgttaaatggcggaataggctctattgtagttgcggtcattttggggattgctatgtttgctataaatggatatctgcattgaaaacgaataaaagtgttatgtgttgattaaaaggttagggggtgacagtttgagttcagttgacaaaatcgccgtcgtttacgcgcggtattcatcccacggtcagacc

SEQ ID NO: 13095 - DNA, 260 bp, Unknown
  Description of Unknown: LeftRegion for integrase B96 sequence
gaatacgtgacatgccttgcagggcgtagatggtctttgactaagcgggcaaagcaagtgatagagaagtatcccggcctgttggacgaaggacgaaagagagccgaaatactatccggtgagaaataaagcgccccggtgcgtccgccaagacacatcaccggggcaacagtctctcctagaaaggagacgattagattatggcacacaagacggcggttctatacgcccgctattcctcggacaagcagcgcgaggcg

SEQ ID NO: 13096 - DNA, 260 bp, Unknown
  Description of Unknown: LeftRegion for integrase B97 sequence
gcttcgcaatttggaaaacatctgcaagctaaaatccaagagcaagtgaacagcgaaagcaattcttctcttttacttgaacagatgaacgaattgtttaacaatgtttccaaattgtccgaaactgaacaaaaggctttttataccggacttgtaaaagggatagagcgttgggaaaatgaacagaagggggaataataatgccggaagcattaaacgcggtcatatacgcccgctattcctccgatcgtcagacagaa

SEQ ID NO: 13097 - DNA, 260 bp, Unknown
  Description of Unknown: LeftRegion for integrase B98 sequence
gacggaataaggcattttcacaactaaataaaaacagccggccaacgactgcaatcatcgaccggctttaataccaggcaaccgaaaaacggccttctgatattggaaataagcaccatatattatagcaaagaaggcctgaaaaatcaatcggctttcttttttataccctttttcggtgcctggggaaagggctatttatggcatacgccaagaagaaaaaaatcctgaatttctggacaaagaaaaaggcggcttta

SEQ ID NO: 13098 - DNA, 260 bp, Unknown
  Description of Unknown: LeftRegion for integrase B99 sequence
acggaataaggtattttgtaaccgaataaaaacagccggtcaacgactgcaatcatcgaccggctttaataccaggcaaccgaaaaacggccttctgatattggaaataagcaccctatattatagcaaagaaggccggaaaaatcaatcggctttcttttttatacccttttttcggtgcctggggaaaggggctatttatggcatacgccaaagcgaaaaaacacctgaaaatctggacgaagaaaaaggcggcgtta

SEQ ID NO: 13099 - DNA, 260 bp, Unknown
  Description of Unknown: LeftRegion for integrase B100 sequence
cggaataagtgtatttaacaataaaataaaaaacagccggtcaacgactgcaatcactgaccggctttaataccaggcaaccgaaaaacggccttctgatattggaaataagcaccctatattatagcaaagaaggccaggaaaatcaatcggctttctttttatacccttttttcggtgcctggggaaaggggcttttcatggcttatgtcaggaataagaaaaagatcctgaaattctggtcgaaaaagaaagcggct

SEQ ID NO: 13100 - DNA, 260 bp, Unknown
  Description of Unknown: LeftRegion for integrase B101 sequence
ggaataagtgtatttaacaataaaataaaaaacagccggtcaacgactgcaatcatcgaccggctttaataccaggcaaccgaaaaaacggccttctgatattggaaataagcaccctatattatagcaaagaaggccaaaaaaatcaatcggctttcttttttataccttttttcggtgcctggggaaaggggctatttatggcatacgccaaagcgaaaaagcacctgaaaatctggacgaagaaaaaggcggctttg

SEQ ID NO: 13101 - DNA, 260 bp, Unknown
  Description of Unknown: LeftRegion for integrase B102 sequence
acggaataaggtattttgtaaccgaataaaaacagccggtcaacgactgcaatcatcgaccggctttaataccaggcaaccgaaaaacggccttctgatattggaaataagcaccatatattatagcaaagaaggcctgaaaaatcaatcggctttcttttttatacccttttttcggtgcctggggaaaggggctatttatggcatacgccaaaacaaaaaaacacctgaaaatctggacgaagaaaaaggcggcttta

SEQ ID NO: 13102 - DNA, 260 bp, Unknown
  Description of Unknown: LeftRegion for integrase B103 sequence
acggaataaggtattttgtaaccgaataaaaacagccggtcaacgactgcaatcatcgaccggctttaataccaggcaaccgaaaaacggccttctgatattggaaataagcaccatatattatagcaaagaaggcctgaaaaatcaatcggctttcttttttatacccttttttcggtgcctggggaaaggggatatttatggcatacgccaaaacaaaaaaacacctgaaaatctggacgaagaaaaaggcggcttta

SEQ ID NO: 13103 - DNA, 260 bp, Unknown
  Description of Unknown: LeftRegion for integrase B104 sequence
ggctgattcagtagttttataataaaataaaaacagccggtcaacgactgcaatcactgaccggctttaataccaggcaaccgaaaaaggtcttctgatattggaaataagcaccctatattatagcagagaaggccaggaaatgcaatcggctttcttttttatacccttttttcggttcctggggaaaggggcttttcatggcttatgtcaggaacaagaaaaagatcctgaaattctggtcgaaaaagaaagcggcc

SEQ ID NO: 13104 - DNA, 260 bp, Unknown
  Description of Unknown: LeftRegion for integrase B105 sequence
acggaataaggtattttgtaaccgaataaaaacagccggtcaacgactgcaatcatcgaccggctttaataccaggcaaccgaaaaacggccttctgatattggaaataagcaccatatattatagcaaagaaggcctgaaaaatcaatcggctttcttttttatacccttttttcggcgcctggggaaaggggctatttatggcatacgccaaaacaaaaaaacacctgaaaatctggacgaagaaaaaggcggcttta

SEQ ID NO: 13105 - DNA, 260 bp, Unknown; identical to SEQ ID NO: 13098
  Description of Unknown: LeftRegion for integrase B106 sequence

SEQ ID NO: 13106 - DNA, 260 bp, Unknown
  Description of Unknown: LeftRegion for integrase B107 sequence
agacggaataaggtattttgtaaccgaataaaaacagccggtcaacgactgcaatcatcgaccggctttaataccaggcaaccgaaaaacggccttctgatattggaaataagcaccctatattatagcaaagaaggcctgaaaaatcaatcggctttcttttttataccctttttcggtgcctggggaaagggctatttatggcatacgccaagaagaaaaaaatcctgaatttctggacaaagaaaaaggcggcttta

SEQ ID NO: 13107 - DNA, 260 bp, Unknown
  Description of Unknown: LeftRegion for integrase B108 sequence
gctgattcagtagttttataataaaataaaaacagccggtcaacgactgcaatcactgaccggctttaataccaggcaaccgaaaaaaggtcttctgatattggaaataagcaccctatattatagcaaagaaggccaggaaaatcaatcggctttcttttttatacccttttttcggcgcctggggaaaggggcttttcatggcttatgtcaggaataagaaaaagatcctgaaattctggtcgaaaaagaaagcggct

SEQ ID NO: 13108 - DNA, 260 bp, Unknown
  Description of Unknown: LeftRegion for integrase B109 sequence
cggaataagtgtatttaacaataaaataaaaaaacagccggtcaacgactgcaatcatcgaccggctttaataccaggcaaccgaaaaacggccttctgatattggaaataagcaccctatattatagcaaagaaggccgaaaaaatcaatcggctttcttttttatacccttttcggtgcctggggaaaggggctatttatggcatacgccaaagtgaaaaaacacctgaaaatctggacgaagaaaaaggcggcttta

SEQ ID NO: 13109 - DNA, 260 bp, Unknown
  Description of Unknown: LeftRegion for integrase B110 sequence
ctgattcagtagttttacaataaaataaaaaacagccggtcaacgactgcaatcactgaccggctttaataccaggcaaccgaaaaaggtcttctgatattggaaataagcaccctatattatagcagagaaggccaggaaatgcaatcggctttcttttttataccccttttttcggttccttgggaaaggggcttttcatggcttatgtcaggaataagaaaaagattctgaaattctggtcgaaaaagaaagcggcc

SEQ ID NO: 13110 - DNA, 260 bp, Unknown
  Description of Unknown: LeftRegion for integrase B111 sequence
acggaataaggcattttgtaaccgaataaaaacagccggtcaacgactgcaatcattaaccggctttaataccaggcaaccgaaaaacggccttctgatattggaaataagcaccctatattatagcaaagaaggccggaaaaatcaatcggctttcttttttatacccttttttcggtgcctggggaaaggggctatttatggcatacgccaaagcaaaaaaacacctgaaaatctggacgaagaaaaaggcggcgtta

SEQ ID NO: 13111 - DNA, 260 bp, Unknown
  Description of Unknown: LeftRegion for integrase B112 sequence
gacggaataaggcattttgtaaccgaataaaaacagccggtcaacgactgcaatcattaaccggctttaataccaggcaaccgaaaaacggccttctgatattggaaataagcaccctatattatagcaaagaaggccggaaaaatcaatcggctttcttttttataccttttttcggtgcctggggaaaggggctatttatggcatacgccaaagcaaaaaaacacctgaaaatctggacgaagaaaaaggcggcgtta

SEQ ID NO: 13112 - DNA, 260 bp, Unknown
  Description of Unknown: LeftRegion for integrase B113 sequence
cggaataagtgtatttaacaataaaataaaaaaacagccggtcaacgactgcaatcatcgaccggctttaataccaggcaaccgaaaaacggccttctgatattggaaataagcaccctatattatagcaaagaaggccgaaaaaatcaatcggctttcttttttataccctttttggtgcctggggaaaggggctatttatggcatacgccaaagtgaaaaaacacctgaaaatctggacgaagaaaaaggcggcttta

SEQ ID NO: 13113 - DNA, 260 bp, Unknown
  Description of Unknown: LeftRegion for integrase B114 sequence
acggaataaggtattttgtaaccgaataaaaacagccggtcaacaactgcaatcatcgaccggctttaataccaggcaaccgaaaaacggccttctgatattggaaataagcaccctatattatagcaaagaaggccggaaaaatcaatcggctttcttttttatacccttttttcggtgcctggggaaaggggctatttatggcatacgccaaagcgaaaaaacacctgaaaatctggacgaagaaaaaggcggcgtta

SEQ ID NO: 13114 - DNA, 260 bp, Unknown
  Description of Unknown: LeftRegion for integrase B115 sequence
agacggaataaggtattttgtaaccgaataaaaacagccggtcaacgactgcaatcatcgaccggctttaataccaggcaaccgaaaaacggccttctgatattggaaataagcaccatatattatagcaaagaaggcctgaaaaatcaatcggctttcttttttataccctttttcggcgcctggggaaagggctatttatggcatacgccaagaagaaaaaaatcctgaatttctggacaaagaaaaaggcggcttta

SEQ ID NO: 13115 - DNA, 260 bp, Unknown; identical to SEQ ID NO: 13098
  Description of Unknown: LeftRegion for integrase B116 sequence

SEQ ID NO: 13116 - DNA, 260 bp, Unknown
  Description of Unknown: LeftRegion for integrase B117 sequence
gacggaataaggtattttgtaaccgaataaaacagccggtcaacgactgcaatcatcgaccggctttaataccaggcaaccgaaaaacggccttctgatattggaaataagcaccctatattatagcaaagaaggccggaaaaatcaatcggctttcttttttatacccttttttcggtgcctggggaaaggggctatttatggcatacgccaaagcgaaaaaacacctgaaaatctggacgaagaaaaaggcggcgtta

SEQ ID NO: 13117 - DNA, 260 bp, Unknown
  Description of Unknown: LeftRegion for integrase B118 sequence
ctgattcagtagttttacaataaaataaaaaacagccggtcaacgactgcaatcactgaccggctttaataccaggcaaccgaaaaaaggtcttctgatattggaaataagcaccctatattatagcagagaaggccaggaaatgcaatcggctttcttttttatacccttttttcggttcctggggaaaggggcttttcatggcttatgtcaggaacaagaaaaagatcctgaaattctggtcgaaaaagaaagcggcc

SEQ ID NO: 13118 - DNA, 260 bp, Unknown
  Description of Unknown: LeftRegion for integrase B119 sequence
acggaataagtgtatttaacaataaaattaaaaacagccggtcaacgactgcaatcatcgaccggctttaataccaggcaaccgaaaaatggccttctgatattggaaataagcaccctatattatagcaaagaaggccagaaaaatcaatcggctttcttttttatacccttttcggtgcctggggaaaggggctatttatggcatacgccaaagcaaaaaaacacctgaaaatctggacgaagaaaaaggcagctttg

SEQ ID NO: 13119 - DNA, 260 bp, Unknown
  Description of Unknown: LeftRegion for integrase B120 sequence
ggctgattcagtagttttataataaaataaaaacagccggtcaacgactgcaatcactgaccggctttaataccaggcaaccgaaaaaggtcttctgatattggaaataagcaccctatattatagcagagaaggccaggaaatgcaatcggctttcttttttatacccttttttcggttcctggggaaaggggcttttcatggcttatgtcaggaataagaaaaagatcctgaaattctggtcgaaaaagaaagcggct

SEQ ID NO: 13120 - DNA, 260 bp, Unknown
  Description of Unknown: LeftRegion for integrase B121 sequence
ggaataagtgtatttaacaataaaataaaaaaaacagccggtcaacgactgcaatcatcgaccggctttaataccaggcaaccgaaaaacggccttctgatattggaaataagcaccctatattatagcaaagaaggccgaaaaaatcaatcggctttcttttttatacccttttcggtgcctggggaaaggggctatttatggcatacgccaaagtgaaaaaacacctgaaaatctggacgaagaaaaaggcggcttta

SEQ ID NO: 13121 - DNA, 260 bp, Unknown
  Description of Unknown: LeftRegion for integrase B122 sequence
aactagaaaaattaaactaactgaataataaaacagccggtcaacgactgcaatcactgaccggctttaataccaggcaaccgaaaaaggtcttctgatattggaaataagcaccctatattatagcagagaaggccaggaaatgcaatcggctttcttttttatacccttttttcggttcctggggaaaggggcttttcatggcttatgtcaggaataagaaaaagatcctgaaattctggtcgaaaaagaaagcggcc

SEQ ID NO: 13122 - DNA, 260 bp, Unknown
  Description of Unknown: LeftRegion for integrase B123 sequence
gaacttgagaaattaaactaactgaataaaaaacagccggtcaacgactgcaatcactgaccggctttaataccaggcaaccgaaaaaaggtcttctgatattggaaataagcaccctatattatagcagagaaggccgggaaatgcaatcggctttcttttttataccctttttcggttcctgaagaaaggggcttttcatggcttatgtcagaaataagaaaaagatcctgaaattctggtcgaaaaagaaagcggct

SEQ ID NO: 13123 - DNA, 260 bp, Unknown
  Description of Unknown: LeftRegion for integrase B124 sequence
ggctgattcagtagttttataataaaataaaaacagccggtcaacgactgcaatcactgaccggctttaataccaggcaaccgaaaaaggtcttctgatattggaaataagcaccctatattatagcaaagaaggccagaaaatgcaatcggctttcttttttatacccttttttcggttcctggagaaaggggcttttcatggcttatgtcaggaataagaaaaagatcctgaaattctggtcgaaaaagaaagcggct

SEQ ID NO: 13124 - DNA, 260 bp, Unknown
  Description of Unknown: LeftRegion for integrase B125 sequence
aactagaaaaattaaactaactgaataataaaacagccggtcaacgactgcaatcactgaccggctttaataccaggcaaccgaaaaaggtcttctgatattggaaataagcaccctatattatagcagagaaggccaggaaatgcaatcggctttcttttttatacccttttttcggttcctggggaaaggggcttttcatggcttatgtcaggaacaagaaaaagatcctgaaattctggtcgaaaaagaaagcggct

SEQ ID NO: 13125 - DNA, 260 bp, Unknown; identical to SEQ ID NO: 13103
  Description of Unknown: LeftRegion for integrase B126 sequence

SEQ ID NO: 13126 - DNA, 260 bp, Unknown
  Description of Unknown: LeftRegion for integrase B127 sequence
gacggaataaggtattttgtaaccgaataaaaacagccggtcaacgactgcaatcatcgaccggctttaataccaggcaaccgaaaaacggccttctgatattggaaataagcaccctatattatagcaaagaaggccggaaaaatcaatcggctttcttttttataccctttttcggtacctggggaaaggggctatttatggcatacgtcaaagcgaaaaaacacctgaaaatctggacgaagaaaaaggcggcttta

SEQ ID NO: 13127 - DNA, 260 bp, Unknown
  Description of Unknown: LeftRegion for integrase B128 sequence
cggaataaggcatttttgttactaaataaaaaacagccggtcaacgactgcaatcattaaccggctttaataccaggcaaccgaaaaacggccttctgatattggaaataagcaccctatattatagcaaagaaggccagaaaaatcaatcggctttcttttttataccctttttcggtgcctggggaaaggggctatttatggcatacgccaaagcaaaaaaacacctgaaaatctggacgaagaaaaaggcggctttg

SEQ ID NO: 13128 - DNA, 260 bp, Unknown
  Description of Unknown: LeftRegion for integrase B129 sequence
gaataagtgtatttaacaataaaataaaaaaaaacagccggtcaacgactgcaatcatcgaccggctttaataccaggcaaccgaaaaacggccttctgatattggaaataagcaccctatattatagcaaagaaggccgaaaaaatcaatcggctttcttttttatacccttttcggtgcctggggaaaggggctatttatggcatacgccaaagtgaaaaaccacctgaaaatctggacgaagaaaaaggcggcttta

SEQ ID NO: 13129 - DNA, 260 bp, Unknown
  Description of Unknown: LeftRegion for integrase B130 sequence
gacacacctcctgaaacagatactcttatggttgtcattgttgatgacgaagaaggatttgttaagaaaatcagcattgatgaagatactgtgacccttcgctcttttaacccacactatcctccccgtgtttttggcggtgttgaaattggacgattgcgctttgtcggtagagtcatggagttaaaaaggagatttgcatgaaaaaatttccaatcgacctctcctgtctgacagaggaagaaatctctcaatttcaa

SEQ ID NO: 13130 - DNA, 260 bp, Unknown
  Description of Unknown: LeftRegion for integrase B131 sequence
taatggggtctttgatagcgaaatacgccgataaaatagatttagacagcttacctgacgttcctaaatatgttgagaatgtaaataataaagaaaaaactttgaattgtttggtcgatgctcttgtattttagagattgttgcgttataataatataatcgtgacttatagttccaaactcttatgaggagtgagaatgatgagaaaaaaggtctacatatatacgagagtatcaaccagtatgcaagttgacggttat

SEQ ID NO: 13131 - DNA, 260 bp, Unknown
  Description of Unknown: LeftRegion for integrase B132 sequence
cgtaactactaatgaattgttaggtattgatatagtagaatatacagttacagatttagaagaaactcttaaaattattttgcaatcagatgaattagaaatagatggattgacagttactgaaaatgaaaaagaagaattaaaagatttctttagcttggctgtaaatagtataaaaagaaggaggaaaaaagaataaaatggaaacagtggggatatactctaggaagagtaaatttactggcaaaggtgaaagcata

SEQ ID NO: 13132 - DNA, 260 bp, Unknown
  Description of Unknown: LeftRegion for integrase B133 sequence
ttagaggtttctaccaacgaactacttggaattgatatagtagaacacaccgtagatgatatcttagatactgttgaagccatatttgaatctgatgagttaaagatagatgatattaaattgacttctaaagaaaaggaaattcttaaatctatatatataaacggaatagatataattagattaatgaggtcaaactcatgaaaagagtagctgtttatagccgaaaatcaaagtttactggaaaaggtgattctatc

SEQ ID NO: 13133 - DNA, 260 bp, Unknown
  Description of Unknown: LeftRegion for integrase B134 sequence
ccttacggtctgtgtcgtgtcgctcccggttggcttgatcattgtagccgttggagcgtaccgggcggtaaaggctggggatatttatgacgctgcggttgctcggtacgagcagcaaatctcggactatgttgactggctggatgaagtcaacgcaaaataaaaagccgccctcggtgggcggcgggaggttgctctgaatgtgtgcaaaaaagaaaccggccatgcttgagccggatatgcaggatgccgtgatctac

SEQ ID NO: 13134 - DNA, 260 bp, Unknown
  Description of Unknown: LeftRegion for integrase B135 sequence
ccttgcggtctgcattgtgtcgctcccggtcggcttgatcattgcgtccgttggagtgtaccgggcggtaaaggccggggatatttatgacgctgcggttgctcggtacgagcagcaaatctcggactatgttgactggctggatgaagtcaacgcaaaataaaaagccgccctcggtgggcggcgggaggttgctctgaatgtgcgcaaaaaagaaaccggccatgcttgagccggatatgcaggatgccgtgatctac

SEQ ID NO: 13135 - DNA, 260 bp, Unknown
  Description of Unknown: LeftRegion for integrase B136 sequence
agacaaaaacggaaatggcttgcgctcttttgaagcagtatcttgtaaaaggtgatatggcatcaaaagaaatctatgaaaggcttggagaagctggaataagtcgcagaaccatagctgagacaaaacatgtgctgggaatacaaagctatagaaaaatgcgccagtggtactggacgctcagggaataaggtgaaaccgtgaaagaaaacagtggacaagaccgtaagcagaaaatccgtgataaatataaaggcacg

SEQ ID NO: 13136 - DNA, 260 bp, Unknown
  Description of Unknown: LeftRegion for integrase B137 sequence
acaggtcttttgattgcgtgtagtgacccggcgcaaaagaaaattgacagagccgatgccttgaatattccaatcatttcagagcagcaatggtatgaactcatgccagaacttgaagccgttggaatgtggaacggaaagcaaattctgtttgcggacaatgatggcatctaccgtgttgaagtgggcggtgaaagctgatggccagaaaaaagaatattgctgctggcctcgatgccgtcatctatgcccggtactca

SEQ ID NO: 13137 - DNA, 260 bp, Unknown
  Description of Unknown: LeftRegion for integrase B138 sequence
acaatattttcgagccaatcatttataagtcgccaatggtgggcgggcaatattttgataacagaaatgctctgtatctaacttaattatacgattggcgaagaaatgcgtcaatacggaaaataagtattgaaaatagttggaacaagtactaaaataaggttgggacaataaaacagagttatactgcgaggaagattatgaagaataaaaagattaaatgcgatatatataccagagtatccacaaccatgcaggta

SEQ ID NO: 13138 - DNA, 260 bp, Unknown
  Description of Unknown: LeftRegion for integrase B139 sequence
ggaaagcactggcatgaatcgcaaggaattttgtaaatattttcagattccctatcggactgtgacagaatgggaactggataaccgccatgcgccggaatatgtactccgtttgttggagtactacattcagaatgaaggtctggcgaagaagaaagtaacggatgaatgtttagagctggaagaaaggggcggcctgcatgaagaaaactaaaacaaaatgttatctctacacacgggtatctacatccatgcaggtg

SEQ ID NO: 13139 - DNA, 260 bp, Unknown
  Description of Unknown: LeftRegion for integrase B140 sequence
ctttaatctgaaagaacgggtagacatcataaccgacgatgacaagttcaacatcaacacgattctcaacgcagacaagcagcgtgaggcactgataaaaatggctgaagactacatttatctgaatccgcctgaccaccagaagtggttgaatggagtggtttctgccatcacaaacttacgggaggacggataaggatatggcaaaggatgaaaacaaggaatcggaaatccgaggcgatgagcaagaaatcgtagac

SEQ ID NO: 13140 - DNA, 260 bp, Unknown
  Description of Unknown: LeftRegion for integrase B141 sequence
ttgcaaagcaacaatggctacttgatgtatgtcaagtgcaatgaactaaaaatagtgattgtggaaaaaaatcaagagaacgtactcttatagtatagagcagcaacgctcatgcaaggatggcaagtgtaccagtgtttttgtacatttcccttatgaatttgccccttgtacaatgaaagaacaaggaggcgttcgaaatgacagactatattgggaattacaagaatcgaccgcgcagggtggtgttttatggccgc

SEQ ID NO: 13141 - DNA, 260 bp, Unknown
  Description of Unknown: LeftRegion for integrase B142 sequence
atatttcacatatctgccaacaaaggaacagctaaaagcagagattgaaaggcagaaagaaatattttatatgcagcatcctgcattgtctgaaaaagataaagaagatatgaagaaatagtaagacagctaatacaattcagttgttcggaattcccgaacagctgaagggagaattttgacacaggagataacatctgatgaaaaaacagcagaaatgttacatatatacaagagtttccatttccatgcaggtagat

SEQ ID NO: 13142 - DNA, 260 bp, Unknown
  Description of Unknown: LeftRegion for integrase B143 sequence
agacgaaaacggaagtggcttgcacccttctaaagcaatatcttgtaaaaggtgatatggcatcaaaagaaatctatgaaaggcttggagaggcaggaattagccgcagaaccatagctgagacaaaacgtgtgttaggaatacagagctatagaaaaatgcgccagtgggactggacgcttaaagaataaggtgaaaccgtgaaggaaaacagtggacaagaccgtaagcagaaaattcgtgataaatataaaggcaca

SEQ ID NO: 13143 - DNA, 260 bp, Unknown
  Description of Unknown: LeftRegion for integrase B144 sequence
aattttcgggcatatcagccaaaaatacttggcgttgttcgatgcggccataacatatatgaaataaaaaaaccgcccacggcggcaaccgtaggcggtttacatagacagcttgttcaaaagaggaacaatgcagcccaagcaactgcattatacctctttcgggcgggcttttacaagtctcccggaggtgtttttttatgagtttggcgctggagctggcacaaacgcaaattgcacgggcgaagccggcagaagat

SEQ ID NO: 13144 - DNA, 260 bp, Unknown
  Description of Unknown: LeftRegion for integrase B145 sequence
cataaagataagcttcttttgaattcatctttcactatgaatttaaaagaagaatatcaagctgatctattcgctacttacatgtatatgaactataaagatataaatcaatctaaggatatatgtatttaccctaaaagaatatcagaacttaaagaaaaattttaactaagatattgaaattactaggaggtttatatatgaaaactgtcgctatatatagtagaaaatctcgttttactggtaaaggtgattctatt

SEQ ID NO: 13145 - DNA, 178 bp, Unknown
  Description of Unknown: LeftRegion for integrase B146 sequence
agcttcatagcgctggcgatagtgatcgaatatattcatggcatgccgtccttttgtataatctgggaacatttgcgaatcagcacttttagcgtaattcttcaacgggataaaaaaaatgctccgtccaataagttatgaacgcgtctcaacttttcagcaagtggagatgggcaaa

SEQ ID NO: 13146 - DNA, 247 bp, Unknown
  Description of Unknown: LeftRegion for integrase B147 sequence
ctctaggggttggcgaagtacttcaagtacacttctgttaaattccggcaactcaatcaagcgaaaacacttgcacagttgtgattttcgctgtaactttgcacttactagaatgagtaagaggtatgtagttatactgtatctcagattcatactacaaagttaacgattaaaaacggaatataatatgaaagcagccttcttaattagatgctccactaaatatcaagacttggataggcaagtt

SEQ ID NO: 13147 - DNA, 260 bp, Unknown
  Description of Unknown: LeftRegion for integrase B148 sequence
ggtggtgggtggttccggcagcggcaagacccggttttggctcaagcccaaccttttacaatgtcacagttcctatgtggttactgacccaaagggttataattatcaaggataaagcaaagatgcgtttacaaagttagaaaaatatcgtatctttgttacatatcgtgttcccactaaaaataaaagaaggtgaaactatggcgaaatccaaccaaggaaaaatcacggcactgtacgaaaggctttccagagatgat

SEQ ID NO: 13148 - DNA, 260 bp, Unknown
  Description of Unknown: LeftRegion for integrase B149 sequence
agtatttctatataggtaatttagagaataagtatccaattgctagactgcaagatatggtaaactaatattttaagtgtatttgattttttctactaacatcacaacaaaataacatataaatatatttagagtattagtttagcatataaatgcttctaatactcttttgtgtttttatgagaaaggagacgatataaatggattcaaagaatcaagaagaaaaaagaattgctggtatttatattcgtgttagtaca

SEQ ID NO: 13149 - DNA, 260 bp, Unknown
  Description of Unknown: LeftRegion for integrase B150 sequence
cgttctgccgcattggcataggcactgcgatcttgccggcagatggtaagaaactcctgcagtgtgaactcttcgtccttggcagcttcgtagcgctggcgatagtgatcgaatatattcatggcatgccgtcctttcgtatactatgggaacattttgatttaatacttttagcgtagttcttcaacgggataaaaattatgctccgtcctatatgttatgagcgagtatcaagcattcagcaaatcgaagggggcgga

SEQ ID NO: 13150 - DNA, 109 bp, Unknown
  Description of Unknown: LeftRegion for integrase B151 sequence
acattttgatttaatacttttagcgtagttcttcaacgggataaaaattatgctccgtcctatatgttatgagcgagtatcaagcattcagcaaatcgaagggggcgga

SEQ ID NO: 13151 - DNA, 260 bp, Unknown
  Description of Unknown: LeftRegion for integrase B152 sequence
taaaatagctaaaatttgacatttctgaaaatcgtgatataatactatcagtaaattatttatgtttacctgttaggagttgattatatgtttttggtttgttccaagaaaatatattgtaatataaacagatttaagagatgtcaaggataacttgtgtgttttctttgatatctcttttttgttaggaggtttataaattggttgatgaaaagaaaaaatgtggattgtatatgagggtttctacagaagaccaagct

SEQ ID NO: 13152 - DNA, 260 bp, Unknown
  Description of Unknown: LeftRegion for integrase B153 sequence
atcacggaagattcacgaagtttccatctgcgcaaggatgcttgccgcgcggaatccgcctgtcgggatctattttatctcagaagatatgtacacacttgcctcgtattatcgcgaagatcttcgggagccttgcttctttcccacacctgattgggagatactgcccgatgatgaattggacctgagaggtatgctccatgagtaactccacaaagaaagcagctgaacaggcagaacgcgaaaaggtaaagagacgg

SEQ ID NO: 13153 - DNA, 260 bp, Unknown
  Description of Unknown: LeftRegion for integrase B154 sequence
tgacatttcttgaaatcgtgatataatatagccaattaatgcatatagctgttcgtcaaaagctatatgtttacgagcactttgaaaaatttatattatattacaattatattgtattttgttaaacggatttaagagatgtcaaaagtactcgtattgtactttgatgtctcttttttgttagattggaggtttgaaaattgaaagatgaaaagaaaaaatgtggcttatatatgagagtatcaacagaagaccaagca

SEQ ID NO: 13154 - DNA, 260 bp, Unknown
  Description of Unknown: LeftRegion for integrase B155 sequence
atccaggaagatccacgaaatttccatctgtgcaaggatgcttgccgcacggaatccgcctgtcggaatctactttatctcagaagatatgtatacacttgcttcgtattatcgtgacgatcttcgggaaccgtgcttctatcccgcacctgactgggagatactgcccgatgatgaattggacctgagaggtatgcttcatgagtaactccacaaagaaagcagctgaacaggcagagcgggaaaaggtaaaaaaacgg

SEQ ID NO: 13155 - DNA, 260 bp, Unknown
  Description of Unknown: LeftRegion for integrase B156 sequence
ttttgacatttctaaaaatcgtgatataatgttgccagtaaaattattatgtttattaggagatgttgtatatgattttaagcaaattgtatttaacaatagatatatttaatgcaaagaggtgtcaatagtagttttgagtgctattgtgcctcttttctttatttttatataaatttttagaatggaggttttacaagttgaacaatgaaaagaaaaaatgtggattatacttaagagtatcaacagatgatcaagca

SEQ ID NO: 13156 - DNA, 260 bp, Unknown
  Description of Unknown: LeftRegion for integrase B157 sequence
ctaactattgactttttaagacaaaaatattattatatatagcaactgaaagtatattcctaaatgtattaatgggggttatgcattatgggaataaaaaagaaattttattttaatagtaaaagttagagagataaaggtagtagtatgtatttctattgcttttatctctctttttttgaagaaaggatgtgttatgtgtggaaagcaaagttaaaaatctatgtggactatatttaagggtatcaactgaagatcaa

SEQ ID NO: 13157 - DNA, 260 bp, Unknown
  Description of Unknown: LeftRegion for integrase B158 sequence
tgaagttggtaaaaaggttcgtgaaaccattgccgaattaggcggtaccatgcccgaagatttgcccaccccagaaaaaagcataaaacagatagaaaaagagcataagaaagcttctattgaaattgatgaatagtaaagcgattgcatctatcattggttagcttgcttatagtttataagcatttgaggtgatttttgtgtactgcatttatttaagaaaatcccgtgccgatatggaggccgaggccagaggcgaa

SEQ ID NO: 13158 - DNA, 260 bp, Unknown
  Description of Unknown: LeftRegion for integrase B159 sequence
gttatgatattttccgtgacaaagagggcgtattcgttattccatacggagcgcagcaggtaaaacagcccgatgggcaatatgtttatgattttccgaacgatgaagtaaccgatatgctgaataagcatcattgcaatagatgtgctggcggttatgttacaaaggcgcgcgagtaagcccgaaaggagcgtgacggcatgaaaaagcgaatcaacactaattccgcagcccgtgctgtcatctatgcccggtattcc

SEQ ID NO: 13159 - DNA, 260 bp, Unknown
  Description of Unknown: LeftRegion for integrase B160 sequence
gtttgtaagctattgacattgttttcaaaaatgatattataaataaccaatgaaagagtattctctagaaagagaggtacatctatgataaaatatatatgtaaacaaaattttataataattaacgttttgaggagtcagtagtatttagactttactaatactactttctcctctttttttgtaaaggagttgagtttatgggaatattaaataacgacattaaagttcgtgctggtctttatatgagggtatcaact

SEQ ID NO: 13160 - DNA, 260 bp, Unknown
  Description of Unknown: LeftRegion for integrase B161 sequence
cgtcagataatcctactctctctgacatggaacaattattagtaactacattccgtaatacggatacattaggacaggctaatatcatacacgcttgtttggctgagcgtgatagagttgaaaaaggtaaagtcgaacatactgaaaaagaaaagagcattgctgccgtataataaatttgtcagaatggaggaaacgccatgtatgaggatataaaaacagcctgcctatatgtcagattctcaagccataaccagact

SEQ ID NO: 13161 - DNA, 260 bp, Unknown
  Description of Unknown: LeftRegion for integrase B162 sequence
cgctgcacttcaaagaaaacggcaaggaggatatgaacgataaaatcaagcggctgatcaaaatgggctgcgaaggttgagaaagcgaggaattacgatgaaaacccggaaatatttacattgtccgctttactgcggcttagaaatcggctatactgtaattgccacaaatgagctggctgtctgaaagaggtatcgttatgaacaacagacagtcacaagaaaaaatcaccgccatctattgccgcctgagccgcgac

SEQ ID NO: 13162 - DNA, 260 bp, Unknown
  Description of Unknown: LeftRegion for integrase B163 sequence
gcgtattggaacaacttgaaacagccgaaacggctattcttagattctcctgcgaggaaagcggagaagtttatgatcacactcttacccaaaatgagatagatgcgctatattgcggattactattgagggtaaacaacagagagttaagcaatcttatttatcgttacaataatccaaagtgaagcgggaggtgcagaatgtctccacgcaagaaactggcggaccagcaggaacgctattccggcaccgccgtcatc

SEQ ID NO: 13163 - DNA, 260 bp, Unknown
  Description of Unknown: LeftRegion for integrase B164 sequence
gatacacctcctgaaacagatactcttatggttgtcattgttgatgacgaagaaggatttgttaagaaaatcagcattgatgaagatactgtgacccttcgctcttttaacccacactatcctccccgtgtttttggcggtgttgaaattggacgattgcgctttgtcggtagagtcatggagctaaaaaggagatttgcatgaaaaaatttccaatcgacctctcctgtctgacagaggaagaaatctctcaatttcaa

SEQ ID NO: 13164 - DNA, 260 bp, Unknown
  Description of Unknown: LeftRegion for integrase B165 sequence
ttcgttccggacggctgagggtaaggacgtttctgaaaagctgctccctgccctgaacaatctcggcacggcttttgcccatatcattccgtcatttcatccgattgatctgctggttggaattgctgttggcgttgctatgaaatttgtgatgaaaatgagagccgccaataaaaagaagttccggcaaggcacagagtatggctctgccgtatgtggtgcataatcttaactgtaaggaaaactatgtggacgcagga

SEQ ID NO: 13165 - DNA, 260 bp, Unknown
  Description of Unknown: LeftRegion for integrase B166 sequence
tgcgttccggacagctgagggtaaggacgtttcggaaaaactgctccctgccctgaacaatctcggcacagcgtttgcccatatcattccatcttttcacccggttgatctgctggttggaattgctgttggcgttgctatgaaatttgtgatgaaaatgagagctgccaacaaaaagaagttccggcaaggcacagagtatggctctgctgtatgtggtgcataatcttaactgtaaggaaaactatgtggacgcagga

SEQ ID NO: 13166 - DNA, 260 bp, Unknown
  Description of Unknown: LeftRegion for integrase B167 sequence
tggcttaaaataggcaaataatagcaaatatgtcttgactttaaataaaaaatatttataataaatggtaattaatttgtttcgtgtattgggggttgatatatatgaaacaaataaaatttaagtataacataaacaagattattataagaggtgtcaaaggcataatttgattaagtgtctttgtcacctcttttttgatgaagaataagaagaaaggaaatgatttattaatgagtgaagaaaagaaaattgcaggt

SEQ ID NO: 13167 - DNA, 260 bp, Unknown
  Description of Unknown: LeftRegion for integrase B168 sequence
acagctgcaggggaagtgatcgagtgtgccggtggtcttttggggctgccggtctttttgtgctatgggaaccgcatagggaaaggcagcttttggagtgatatttttggtcgttctgcgagttggcggtaagtgctgactccgatatattatatgcaaggcaaccgtatgacgatgggcaaccgaaatgaggtggaaatttgagaaagaaatgttacatatatacccgtgtttctacggcagtgcaggtggacggatac

SEQ ID NO: 13168 - DNA, 260 bp, Unknown
  Description of Unknown: LeftRegion for integrase B169 sequence
tgagattacgatcctgactcgtatgcttgctgctcttgaaaaaccggtcgggatctactttgtttcggagaacatcttcacgcttgcctcctattaccagcatgacaatcatgacagggagttctttccctcaggagattgggaagtgctgccggaggatgaggcggaagaacttccgctcttaatgggaggtgtagaagatgcttgataccgagagcaagcgtcggaaagaacagcagaagcagaaggttaagaagcgg

SEQ ID NO: 13169 - DNA, 260 bp, Unknown
  Description of Unknown: LeftRegion for integrase B170 sequence
cgctgtcgataaagccacaggtattgacgatcaccatgtcggcgtcgtcgtagctcggtacgacgtcatagccttcggtacgcagttcagtcaggattcgctccgaatcaaccaggtttttcgggcatcctaatgatataaaaccaatcttagacatttttttgtacaattatttgctcacaatgccggggattatatagatgccgcaactttatagctacatcaggtggtcaagtgatcgccaagagaaagggacaacc

SEQ ID NO: 13170 - DNA, 260 bp, Unknown
  Description of Unknown: LeftRegion for integrase B171 sequence
ctacgagatcacatttcttgcaagaatcctcgcagcgttggcgaaaccagtcggcatctattttgtatccgaagatatttttacgatggcttcctgctatcaggataccctgcacgattggggcatgttccccgatcattggtcagtcctcccggacaatatttccgaggaaagtcttcttttagcaggagaacattcagatgcataattcggaagccagacgacgcaaggagcggcaaaaggaacagatcaagcagcga

SEQ ID NO: 13171 - DNA, 260 bp, Unknown
  Description of Unknown: LeftRegion for integrase B172 sequence
aaacgattatgttactgggtacgagtcgcggcaggcttccgcatccgctgcacaatcagtctcatccaacacggttgtttcagttgtggatgaaattcgcggcttgaagcagctgttggacgagggtattctaacggaagaagaatttacagcaaagaaaaagcagcttctcggaatttgaaagtgaacggtgatggttgatggccagaaaaaagaatatcgctgctggcctcgatgccgtcatctatgcccggtactcg

SEQ ID NO: 13172 - DNA, 260 bp, Unknown
  Description of Unknown: LeftRegion for integrase B173 sequence
ttttgactagtaactgaataatcgtgcatagttagagcttccgctaggaggctctattttttgttctcacgagctacttctttcaaaaaatattacttttcaataaccagagggatgctgctatacctctggttattttcaatttgatcggaggtccaatatactaattgcaaagactttgtaccattggagctaaatcgatgaatcagaatgaagcaaagctctctaaagaagagcagaaagctaaaatacgagaacga

SEQ ID NO: 13173 - DNA, 260 bp, Unknown
  Description of Unknown: LeftRegion for integrase B174 sequence
ctcagagctgtaactgaataatggttttcaaatgagagcttccttcctgggggctcttttctcattgctttagcaaactttttcaaaaaaatatcgtttttcaataaccagagggatgcttgtatacctctggttattttcattttgatcggcggctcaatatactaaatgcaacatcatctatcattggagcacagtatatgaaccagaacgaagcgaagctctcaaaggaagagcagaaagcgaaaatacgagagcga

SEQ ID NO: 13174 - DNA, 260 bp, Unknown
  Description of Unknown: LeftRegion for integrase B175 sequence
tatttattctttaattatcacgattatttctacataaatgatttaactaatcaatatccactctcaagtttaagagaatttatcaaggctaactgatactaaaagttatttttgtttttgtaaagtataacgtaaaaaaggtgttagttagcaaataagctagtctaacgccttttttgttagagaatggaggttatttgatggaatataatgaacaaaataacactgaaaaaaagaatgttgcaggaatttatattcgt

SEQ ID NO: 13175 - DNA, 260 bp, Unknown
  Description of Unknown: LeftRegion for integrase B176 sequence
ttccaagaagacttatgaggtcgtgctctgtgccaggttgttggcagctcataagcctcctattgggatctatttcatttctgaggatctgtttaccctggcaagctactatcgtgaagacttatttgatacttacttccttccgagccctgactgggaggtgcttccggatgatgatgatgaaagacgaggttatttgaatgattgatctggacaagcgccgccttaaagaacagcagaaagcaagacaaagacaacgt

SEQ ID NO: 13176 - DNA, 260 bp, Unknown
  Description of Unknown: LeftRegion for integrase B177 sequence
aatctgcttttgttgatctacgctgagtgcttcaaacatggccaaggcttccttgtcagaaaccttaccttctttgttagtgatatgacatattctactccaatcttaggaagttcttcctatgtattagcgccaagtgatattatagcactttatctttcgtttgccattggtaaatagaggaaaggataacggacattatgacagttaaaaaatttccaatcgacctctcctgtctgacagaggaagaaatctctcaa

SEQ ID NO: 13177 - DNA, 109 bp, Unknown
  Description of Unknown: LeftRegion for integrase B178 sequence
agacatttttttgtacaatcagttgctcacaatgccggggattatatagatgccgcaactttatagctatatcaggtggtcaagtgatcgccaagaaaaaggaacaacc

SEQ ID NO: 13178 - DNA, 260 bp, Unknown
  Description of Unknown: LeftRegion for integrase B179 sequence
gatacaccccctgaaacagatactcttatggttgtcattgttgatgacgaagaaggatttgttaagaaaatcagcattgatgaagatactgtgacccttcgctcttttaatccacactatcctccccgtgtttttggcggtgttgaaattggacgattgcgctttgtcggtagagtcatggagttaaaaaggagatttgcatgaaaaaatttccaatcgacctctcctgtctgacagaggaagaaatctctcaatttcag

SEQ ID NO: 13179 - DNA, 260 bp, Unknown
  Description of Unknown: LeftRegion for integrase B180 sequence
gatacacctcccgaaacagatactcttatggttgtcattattgatgacgaagaaggatttgttaagaaaatcagtattgatgaagatactgtgacccttcgttcttttaacccgcactatcctccccgtgtttttggcggtgttgaaattggacgattgcgctttgttggtagagtcatggagctaaaaaggagatttgcatgaaaaaatttccaattgacctctcctgtctgacagaggaagaaatctctcaatttcaa

SEQ ID NO: 13180 - DNA, 260 bp, Unknown
  Description of Unknown: LeftRegion for integrase B181 sequence
gatttatcattgtttgaacgaggaaagtataacacagaatttcaaatttttctaccgtctatgtgacatgacaagccttttttgaaaaatcgtcactttgacgggcgataaagaagcagaaaccactatacagacagccgccccgtatggtatactatttgtacggaatagcggggcggctgtcggaaatggaggaaaccatgattagacagaccacccaattagcacccgttaccgccctttacgcaagattgagtaaa

SEQ ID NO: 13181 - DNA, 260 bp, Unknown
  Description of Unknown: LeftRegion for integrase B182 sequence
acaagcgacaaacaggcataagaaaacggcagaaatcctttattttcaaaggtttctgccgttttgaatatactccttctcagaagatctatacactttggcatcgtattatcgcgacgatcttcgagagccttgttttctcccagctccagactggaagatcctacctgatgatgagctggacgtgagaggtgcactccatgagtaaatcaaccaaaaaagcagccgatcaagcagaacgcgagaaagtacacaagcga

SEQ ID NO: 13182 - DNA, 260 bp, Unknown
  Description of Unknown: LeftRegion for integrase B183 sequence
gtccagagatgcccaagaaatgacgatttgtgcaagaatactcgccgctcgcaagcctcctgttggcatctacttcatatcagaagatctatacactttggcctcatattatcgtgatgaccttcgggagccctatttcttcccaacatccggctggaaaatcttgcctgatgacgagctggatatgagaggtgctctccatgagtaaatcagcaaagaaagcagccgaccaagcagaacgtgagaaagtacataagcga

SEQ ID NO: 13183 - DNA, 260 bp, Unknown
  Description of Unknown: LeftRegion for integrase B184 sequence
gtccagagatgctcaagaaatggcgatttgcgcaagaatgctcgctgctcgcaagcctcctgttggcatctacttcatatcagaagatctatacactttggcatcgtattatcgcgacgatcttcgagagccttgttttctcccaacccctgactggaagatcctgcctgatgacgagctggatatgagaggtgcactccatgagtaaatcagccaagaaagccgctgatcaagcagaacgcgagaaagtacataagcga

SEQ ID NO: 13184 - DNA, 260 bp, Unknown
  Description of Unknown: LeftRegion for integrase B185 sequence
gtccagagatgcccaagaaatgacgatttgcgcaagaatgctcgctgctcgcaagcctcctgttggcatctacttcatatcagaagatctatacactttggcctcatattatcgtgatgaccttcgggaaccctgtttcttcccaacaccagactggaaaatcttgcctgatgacgagctggatatgagaggtgctctccatgagtaaatcagcaaagaaagcagccgaccaagcagaacgcgagaaagtacataagcga

SEQ ID NO: 13185 - DNA, 260 bp, Unknown; identical to SEQ ID NO: 13184
  Description of Unknown: LeftRegion for integrase B186 sequence

SEQ ID NO: 13186 - DNA, 260 bp, Unknown
  Description of Unknown: LeftRegion for integrase B187 sequence
gtccagagatgctcaagaaatggcgatttgcgcaagaatgctcgctgctcgcaagcctcctgttggcatctacttcatatcagaagatctatacactttggcatcgtattatcgcgacgatcttcgagatccttgttttctcccaacccctgactggaagatcctgcctgatgacgagctggatatgagaggtgcgctccatgagtaaatcagcaaagaaagcagccgaccaagcagaacgtgagaaagtacataagcga

SEQ ID NO: 13187 - DNA, 109 bp, Unknown
  Description of Unknown: LeftRegion for integrase B188 sequence
agacatttttttgtacaatcagttgctcacattgccggggattatatagatgccacaactttatagctacatcaggtggtcaacagatcgccaggacaaagggacaacc

SEQ ID NO: 13188 - DNA, 260 bp, Unknown
  Description of Unknown: LeftRegion for integrase B189 sequence
aaaggaatccgagcaagtcggcccaacagtcacctcatttcaacgagaggggtggctgttgggtcaattgttcaaaaagaaaaactgaagataataaaaagtcttgatttctccatcaaaacatggtatatacattatacgaaacagtgctttgaaagaacgctccaccgttcaatgacgtgtaaagagaggtgcttgccatgaccgctgtgatctacgcccgctattccagtgataaccagcgcgaagaatccatcgaa

SEQ ID NO: 13189 - DNA, 260 bp, Unknown
  Description of Unknown: LeftRegion for integrase B190 sequence
catgaaactggccggataatctagactgtatttagctcgtgagatggatatatacctgtcctctaggggttggcgaagtacttcaagtacacttctattaaattccggcaactcaatataaagaaatcacttgcatagttctgtgacttttggtaatttcgcttccgaaacgaagataacgaatttaaaaccaacagaatatgaaggcagcatttctaatcagatgttctactaagaatcaagatttaaacagacagacc

SEQ ID NO: 13190 - DNA, 199 bp, Unknown
  Description of Unknown: LeftRegion for integrase B191 sequence
tccagcggttggcgaagaacctccaatacgttgcggctgtactctggcagttcaatataaagaaatcacttgcatagttctgtgacttttggtaatttcgcttccgaaacgaagataacgaatttaaaaccaacagaatatgaaggcagcatttctaatcagatgttctactaagaaccaagatttaaacagacagacc

SEQ ID NO: 13191 - DNA, 109 bp, Unknown
  Description of Unknown: LeftRegion for integrase B192 sequence
ggtaatttcgcttccgaaacgaagataacgaattaaataccaaacaaatatgaaagcagcatttctaatcagatgttctactaagaaccaagatttaaacagacagacc

SEQ ID NO: 13192 - DNA, 236 bp, Unknown
  Description of Unknown: LeftRegion for integrase B193 sequence
ggcgcatgacctcgagcacgctccggttgaattcgggcaattcaatcaagcgaaaacacttgcacagttgtgattttcgctgtaactttgcacttactagaatgagtaagaggtatgtagttatactgtatctcagattcatactacaaagttaacgattaaaaacggaatataatatgaaagcagccttcttaataagatgctctactaaatatcaagacttggataggcaagtt

SEQ ID NO: 13193 - DNA, 260 bp, Unknown
  Description of Unknown: LeftRegion for integrase B194 sequence
cataaaacttgccgggtactctacattgcatcggatgcgtgacacggtaatcttcctatcttccagcggttggcgaagaacctccaatacgttgcggctgtactctggcagttcaatataaagaaatcacttgcatagttctgtgacttttggtaatttcgcttccgaaacgaagataacgaatttaaaaccaacagaatatgaaggcagcatttctaatcagatgttctactaagaaccaagatttaaacagacagacc

SEQ ID NO: 13194 - DNA, 260 bp, Unknown
  Description of Unknown: LeftRegion for integrase B195 sequence
catgaaactggccggataatctagactgtatttagctcgtgagatggatatatacctgtcctctaggggttggcgaagtacttcaagtacacttctattaaattccggcaactcaacatagtaaaatcacttgcacagttctgtaacttttggtaatttcgcttccgaaacgaagataacgaattaaataccaaacaaatatgaaggcagcatttctaatcagatgttctactaagaaccaagatttaaacagacagacc

SEQ ID NO: 13195 - DNA, 260 bp, Unknown
  Description of Unknown: LeftRegion for integrase B196 sequence
cataaaactggcagggtattccacattgcttttcacacgggaaatggtgatctttcggtcttccagcggttggcggaggacttccagtacgctgcgattgaattctggcaattcaatataaagaaatcacttgcatagttctgtgacttttggtaatttcgcttccgaaacgaagataacgaatttaaaaccaacagaatatgaaggcagcatttctaatcagatgttctactaagaaccaagatttaaacagacaaacc

SEQ ID NO: 13196 - DNA, 201 bp, Unknown
  Description of Unknown: LeftRegion for integrase B197 sequence
cctctaggggttggcgaagtacttcaagtacacttctgttaaattccggcaactcaacataaagaaatcacttgcacagttatgtaacttttggtaatttcgcttccgaaacgaagataacgaattaaataccaaacaaatatgaaagcagcatttctaatcagatgttctactaagaaccaagatttaaacagacagacc

SEQ ID NO: 13197 - DNA, 260 bp, Unknown
  Description of Unknown: LeftRegion for integrase B198 sequence
catgaagttggccggataatcaacagataagcgggcacgagagaccgttatcgtccggtcttccaatggttggcgcatgacctcgagcacgctccggttaaattcgggcaattcaacataaagaaattacttgcatagttctgtgacttttggtaatttcgcttccgaaacgaagataacgaattaaataccaaacaaatatgaaagcagcatttctaatcagatgttctactaagaaccaagatttaaacagacagacc

SEQ ID NO: 13198 - DNA, 260 bp, Unknown
  Description of Unknown: LeftRegion for integrase B199 sequence
atgcagggcttcagcgccgatcttctttggctgcgagtacgccgcagcatcgcacaataaaaatattccccgatacgcgtcgcgcggcacctcgcgtatcgggttttgtttttttgaggggggtaaagctcccagcccttgacaaaaaaaccgtttgcggttactatagccgcaaacgggttttttgtgaggtggttttaatgcatggcgcatatatccttgcgcgctactccacggacaggcaaaacgaggacagcata

SEQ ID NO: 13199 - DNA, 260 bp, Unknown
  Description of Unknown: LeftRegion for integrase B200 sequence
catgaaactggccggataatctagactgtatttagctcgtgagatggatatatacctgtcctctaggggttggcgaagtacttcaagtacacttctattaaattccggcaactcaacataaagaaatcacttgcatagttctataacttttggtaatttcgcttccgaaacgaagataacgaatttaaaaccaacagaatatgaaggcagcatttctaatcagatgttctactaagaaccaagatttaaacagacaaacc

SEQ ID NO: 13200 - DNA, 260 bp, Unknown
  Description of Unknown: LeftRegion for integrase B201 sequence
catgaaactggccggataatctagactgtatttagctcgtgagatggatatatacctgtcctctaggggttggcgaagtacttcaagtacacttctattaaattccggcaactcaacataaagaaattacttgcatagttctgtgacttttggtaatttcgcttccgaaacgaagataacgaatttaaaaccaacagaatatgaaggcagcatttctaatcagatgttctactaagaatcaagatttaaacagacagacc

SEQ ID NO: 13201 - DNA, 109 bp, Unknown
  Description of Unknown: LeftRegion for integrase B202 sequence
ggtaatttcgcttccgaaacgaagataacgaatttaaaaccaacagaatatgaaggcagcatttctaatcagatgttctactaagaaccaagatttaaacagacagacc

SEQ ID NO: 13202 - DNA, 260 bp, Unknown
  Description of Unknown: LeftRegion for integrase B203 sequence
catgaaactggccggataatccagactgtatttagctcgtgcgatggatatatgcctgtcctctaggggttggcgaagtacttcaagtacacttctgttaaattccggcaactcaacataaagaaattacttgcatagttctgtaacttttggtaatttcgcttccgaaacgaagataacgaatttaaaaccaacagaatatgaaggcagcatttctaatcagatgttctactaagaaccaagatttaaacagacagacc

SEQ ID NO: 13203 - DNA, 260 bp, Unknown
  Description of Unknown: LeftRegion for integrase B204 sequence
cataaagctggcagggtattctacattgctttttacacgggagatagtaattttacggtcctccaaaggttggcggagaacttccagcacactgcgattgaattccgggagttcaacataaagaaatcacttgcatagttctgtgacttttggtaatttcgcttccgaaacgaagataacgaatttaaaaccaacagaatatgaaggcagcatttctaatcagatgttctactaagaaccaagatttaaacagacagacc

SEQ ID NO: 13204 - DNA, 109 bp, Unknown
  Description of Unknown: LeftRegion for integrase B205 sequence
ggtaatttcgcttccgaaacgaagataacgaattaaataccaacagaatatgaaggcagcatttctaatcagatgttctactaagaaccaagatttaaacagacagacc

SEQ ID NO: 13205 - DNA, 260 bp, Unknown
  Description of Unknown: LeftRegion for integrase B206 sequence
cataaaactggcagggtattccacattgcttttcacacgggaaatggtgatctttcggtcttccagcggttggcggaggacttccagtacgctgcgattgaattctggcaactcaacataaagaaatcacttgcatagttctgtaacttttggtaatttcgcttccgaaacgaagataacgaatttaaaaccaacagaatatgaaggcagcatttctaatcagatgttctactaagaaccaagatttaaacagacagacc

SEQ ID NO: 13206 - DNA, 109 bp, Unknown; identical to SEQ ID NO: 13191
  Description of Unknown: LeftRegion for integrase B207 sequence

SEQ ID NO: 13207 - DNA, 221 bp, Unknown
  Description of Unknown: LeftRegion for integrase B208 sequence
tgacacggtaatcttcctatcttccagcggttggcgaagaacctccaatacgttacggctgtactctggcagttcaacataaagaaatcacttgcatagttctgtaacttttggtaatttcgcttccgaaacaaagataacgaacttaaaaccaacagaatatgaaggcagcatttctaatcagatgttctactaagaaccaagatttaaacagacagacc

SEQ ID NO: 13208 - DNA, 260 bp, Unknown
  Description of Unknown: LeftRegion for integrase B209 sequence
catgaaactggccggataatctagactgtatttagctcgtgagatggatatatacctgtcctctaggggttggcgaagtacttcaagtacacttctattaaattccggcaactcaacataaagaaatcacttgcatagttctgtgacttttggtaatttcgcttccgaaacgaagataacgaacttaaaaccaacagaatatgaaggcagcatttctaatcagatgttctactaagaaccaagatttaaacagacagacc

SEQ ID NO: 13209 - DNA, 151 bp, Unknown
  Description of Unknown: LeftRegion for integrase B210 sequence
aactcaatataaagaaatcatttgcatagttctgtgacttttggtaatttcgcttccgaaacgaagataacgaatttaaaaccaacagaatatgaaggcagcatttctaatcagatgttctactaagaatcaagatttaaacagacagacc

SEQ ID NO: 13210 - DNA, 260 bp, Unknown
  Description of Unknown: LeftRegion for integrase B211 sequence
catgaaactggccggataatccagactgtatttagctcgtgcgatggatatatgcctgtcctctaggggttggcgaagtacttcaagtacacttctgttaaattccggcaactcaacataaagaaatcacttgcatagttctgtgacttttggtaatttcgcttccgaaacgaagataacgaacttaaaaccaacagaatatgaaggcagcatttctaatcagatgttctactaagaaccaagatttaaacagacagacc

SEQ ID NO: 13211 - DNA, 201 bp, Unknown
  Description of Unknown: LeftRegion for integrase B212 sequence
cctctaggggttggcgaagtacttcaagtacacttctgttaaattccggcaactcaacataaagaaattacttgcatagttctgtgacttttggtaatttcgcttccgaaacgaagataacgaattaaataccaaacaaatatgaaagcagcatttctaatcagatgttctactaagaaccaagatttaaacagacagacc

SEQ ID NO: 13212 - DNA, 260 bp, Unknown
  Description of Unknown: LeftRegion for integrase B213 sequence
catgaaactggccggataatctagactgtatttagctcgtgagatggatatatacctgtcctctaggggttggcgaagtacttcaagtacacttctattaaattccggcaactcaacataaagaaatcacttgcatagttctgtaacttttggtaatttcgcttccgaaacgaagataacgaacttaaaaccaacagaatatgaaggcagcatttctaatcagatgttctactaagaaccaagatttaaacagacagacc

SEQ ID NO: 13213 - DNA, 260 bp, Unknown
  Description of Unknown: LeftRegion for integrase B214 sequence
catgaaactggccggataatctagactgtatttagctcgtgagatggatatatacctgtcctctaggggttggcgaagtacttcaagtacacttctattaaattccggcaactcaacataaagaaattacttgcatagttctgtgacttttggtaatttcgcttccgaaacgaagataacgaattaaataccaaacaaatatgaaagcagcatttctaatcagatgttctactaagaaccaagatttaaacagacagacc

SEQ ID NO: 13214 - DNA, 148 bp, Unknown
  Description of Unknown: LeftRegion for integrase B215 sequence
tcaatataaagaaatcacttgcatagttctgtgacttttggtaatttcgcttccgaaacgaagataacgaatttaaaaccaacagaatatgaaggcagcatttctaatcagatgttctactaagaatcaagatttaaacagacagacc

SEQ ID NO: 13215 - DNA, 260 bp, Unknown
  Description of Unknown: LeftRegion for integrase B216 sequence
cataaaactggcagggtattccacattgcttttcacacgggaaatggtgatctttcggtcttccagcggttggcggaggacttccagtacgctgcgattgaattctggcaactcaacatagtaaaatcacttgcatagttctgtaacttttggtaatttcgcttccgaaacgaagataacgaatttaaaaccaacagaatatgaaggcagcatttctaatcagatgttctactaagaaccaagatttaaacagacagacc

SEQ ID NO: 13216 - DNA, 260 bp, Unknown
  Description of Unknown: LeftRegion for integrase B217 sequence
ttttagaatcacgtttatatatcctctcaattccaaaatagtcaacacaaatttaaaaggcataccaaaccttattttatacacactttttcttattatgaaatgtactggaaggataatactatccctctggtccatttttatttataaatccattccttataattaaagtacttatggtaaagaaaggttgatatgcgatgaaggaaaacgaagaaaagctgagtagtgcggctgctcaaaaagaaaaaataagacag

SEQ ID NO: 13217 - DNA, 260 bp, Unknown
  Description of Unknown: LeftRegion for integrase B218 sequence
cataaaacttgccggatactctacattgcatcggatgcgtgacacggtaatcttcctatcttccagcggttggcgaagaacctccaatacgttgcggctgtactctggcagttcaacataaagaaatcacttgaatagttctgtaacttttgctaatttcgcttccgaaacgaagataacgaattaaataccaaacaaatatgaaagcagcatttctaatcagatgttctactaagaaccaagatttaaacagacagacc

SEQ ID NO: 13218 - DNA, 260 bp, Unknown
  Description of Unknown: LeftRegion for integrase B219 sequence
catgaaactggccggataatctagactgtatttagctcgtgagatggatatatacctgtcctctaggggttggcgaagtacttcaagtacacttctattaaattccgacaactcaacataaagaaatcacttgcatagttctgtaacttttggtaatttcgcttccgaaacgaagataacgaacttaaaaccaacagaatatgaaggcagcatttctaatcagatgttctactaagaaccaagatttaaacagacagacc

SEQ ID NO: 13219 - DNA, 260 bp, Unknown
  Description of Unknown: LeftRegion for integrase B220 sequence
catgaaactggccggataatccagactgtatttagctcgtgcgatggatatatgcctgtcctctaggggttggcgaagtacttcaagtacacttctgttaaattccggcaactcaacataaagaaatcacttgcatagttctgtgacttttggtaatttcgcttccgaaacgaagataacgaatttaaaaccaacagaatatgaaggcagcatttctaatcagatgttctactaagaatcaagatttaaacagacagacc

SEQ ID NO: 13220 - DNA, 260 bp, Unknown
  Description of Unknown: LeftRegion for integrase B221 sequence
aacaaaagggaggagcgataatgaaaaagaaaatcgatagcttatatgcggcacttatgcttatagaaattctatatgagcgtgggcttataaacaaagccacacttgacgccgtgagagaaaaagttaaatccgaaaatccgcacaattcacaggcagcataatgtcaaatatacttaaaaacacaaggaggaatttttatgacaaacacaatttttaaaaacaatacgaaaatcggaaatccttacgattttcttgac

SEQ ID NO: 13221 - DNA, 260 bp, Unknown
  Description of Unknown: LeftRegion for integrase B222 sequence
cataaaacttgccgggtactctacattgcatcggatgcgtgacacggtaatcttcctatcttccagcggttggcgaagaacctccaatacgttgcggctgtactctggcagttcaacataaagaaattacttgcatagttctgtgacttttggtaatttcgcttccgaaacgaagataacgaattaaataccaaacaaatatgaaagcagcatttctaatcagatgttctactaagaaccaagatttaaacagacagacc

SEQ ID NO: 13222 - DNA, 260 bp, Unknown
  Description of Unknown: LeftRegion for integrase B223 sequence
cataaagcttgccggatagtcgaggctgtatttggcgcgcgagatggagatgtggcggtcttccaaaggttgccggagcacttcgatcacactgcggttgaattccggtaactcaacataacaaaatcacttgcatagttctgtaacttttggtaatttcgcttccgaaacgaagataacgaattaaataccaaacaaatatgaaggcagcatttctaatcagatgttctactaagaaccaagatttaaacagacagacc

SEQ ID NO: 13223 - DNA, 109 bp, Unknown
  Description of Unknown: LeftRegion for integrase B224 sequence
ggtaatttcgcttccgaaacgaagataacgaatttaaaaccaacagaatatgaaggcagcatttctaatcagatgttctactaagaatcaagatttaaacagacagacc

SEQ ID NO: 13224 - DNA, 260 bp, Unknown
  Description of Unknown: LeftRegion for integrase B225 sequence
acaggtcttttgattgtgtgtagtgacccggcgcaaaagaaaatcgacagagccgatgccttgaatattccaatcatttcagagcagcaatggtatgaactcatgccagaacttgaagccgttggaatgtggaacggaaagcaaattctgtttgcggacaatgatggcatctaccgtgttgaagtgggcggtgaaagctgatggccagaaaaaagaatattgctgctggcctcgatgccgtcatctatgcccggtactcg

SEQ ID NO: 13225 - DNA, 260 bp, Unknown
  Description of Unknown: LeftRegion for integrase B226 sequence
tcgtttagtgtaagaatcttttttacttcttacacgaaccttgaaaacgaaacagcctgcccgtagtgataccagaactgaataggcattcagcgtgtcttttttggttaatacgtcccggaaacatcagaacccggtacaggaacggatatgggatgagaacaggcaattaataaacaaaggaaggaggacatctgactatgacagagaaacagggattcatgacagcgttgtatgaacgtcttagtcgtgatgatgaa

SEQ ID NO: 13226 - DNA, 260 bp, Unknown
  Description of Unknown: LeftRegion for integrase B227 sequence
acgtcgtggaataccaaaacccggtggattttctttttgaagaactggcaaaaaagaagcccaacagctttgccgggcggcagtacaaactttacaagctggctgccggtgatatatgctctaagtgacttcttaatcatgattttgtcatggttagtgaagcaatcacttagagcatttttgtttcaggaggtacagccatgagaaatgaaaaaattaccccactgtacgagcgcctgagccgggacgatgagttacag

SEQ ID NO: 13227 - DNA, 260 bp, Unknown
  Description of Unknown: LeftRegion for integrase B228 sequence
ttcacttttgatttcaccacgcaaaaagaccttgacaacgagtataaaaagctcaataacggggagattggttctgtagtagcgacagttatattcggtgccttatttattgcagttttaggtttcctaaaatagtaatcgtttttcagccattaaatgcaaatttgaggctgttttcgttaaataaggggggtgacagtttgagttcagttgacaaaatcgccgttgtttacgcgcggtattcgtcccacggtcagacc

SEQ ID NO: 13228 - DNA, 260 bp, Unknown
  Description of Unknown: LeftRegion for integrase B229 sequence
aatttacgtattttttaccaatatcaatacttttataaacaaaagaatcccccggtgttaccagcaccgagggacctgcaagaacgtgttaccagcacgctcaattatcaacccctaacaccacatcaagagtcgatataatattataacatattatgcacggctcttacaatcatagctattgaaaggagccgtgtattatggctaaacatgctattactataccccaaaacccaaaagctgctctgtatatccgcgtt

SEQ ID NO: 13229 - DNA, 260 bp, Unknown
  Description of Unknown: LeftRegion for integrase B230 sequence
atttacttttgatttcaccacgcaaaaagacctcgacaacgagtataaaaagctcaataacggggagattggttctgtagtagcgacagttatattcggtgccttatttattgcagttttaggtttcctaaaatagtaatcgttttacagccattaaatgcaaatttaaggctgttttcgttaaataggggggtgacagtttgagttcagttgacaaaatcgccgttgtttacgcacggtattcttcccacgggcagacc

SEQ ID NO: 13230 - DNA, 260 bp, Unknown
  Description of Unknown: LeftRegion for integrase B231 sequence
gggacgccgagacgcgcacgatcgtgcaccgcacggtgaagaagatctatgacgtgtctgcggtcagcatccccgcaaacgataatacagaaatcaatgctcgcagctggtgttgtatgctctaaaagacttcttaatcagatgatttggaagtctcttagaacacacaactttacataccgaagaaaggagacaaaaccatgagcaaaagcgagaaaatcactgctctttacgagcgtttgagccgagacgatgatatg

SEQ ID NO: 13231 - DNA, 260 bp, Unknown
  Description of Unknown: LeftRegion for integrase B232 sequence
aaacctcgttcggaggatggaatggcaactggatctggcgctaagagagcagcaaagaaccgggaggtttccttacggaaggaaacagaggtgcagtgtggaattgtacggttactgtacgaggacggaagtttatcagagaaggaatatgaggacattgtagagttgttgtatgcaaaagaaaaaggaggaaaacagaaatgagcgagctttcaaaattttcgccgcagacacgggtggcaatctacaaccgggtgtct

SEQ ID NO: 13232 - DNA, 260 bp, Unknown
  Description of Unknown: LeftRegion for integrase B233 sequence
aaacctcgttcggaggatggaatggcaactggatctggcgctaagagagcagcaaagaaccgggaggtttccttacggaaggaaacagaggtgcagtgtggaattgtacggttactgtacgaggacggaagtttatcagagaaggaatatgaggacattgtggagttgttgtatgtaaaagaaaaaggaggaaaacagaaatgagcgagctttcaaaattttcgccgcagacacgggtggcaatctacaaccgggtgtct

SEQ ID NO: 13233 - DNA, 260 bp, Unknown; identical to SEQ ID NO: 13231
  Description of Unknown: LeftRegion for integrase B234 sequence

SEQ ID NO: 13234 - DNA, 260 bp, Unknown
  Description of Unknown: LeftRegion for integrase B235 sequence
aaacctcgttcggaggatggaatggcaactggatctggcgctaagagagcagcaaagaaccgggaggttttcttacggaaggaaacagaggtgcagtgtggaattgtacggttactgtacgaggacggaagtttatcagagaaggaatatgaggacattgtggagttgttgtatgcaaaagaaaaaggaggaaaacagaaatgagcgagctttcaaaattttcgccgcagacacgggtggcaatctacaaccgggtgtct

SEQ ID NO: 13235 - DNA, 260 bp, Unknown
  Description of Unknown: LeftRegion for integrase B236 sequence
aaacctcgttcggaggatggaatggcaactggatctggcgctaagagagcagcaaaggaccgggaggtttccttacggaaggaaacagaggtgcagtgtggaattgtacggttactgtacgaggacggaagtttatcagagaaggaatatgaggacattgtggagttgttgtatgcaaaagaaaaaggaggaaaacagaaatgagcgagctttcaaaattttcgccgcagacacgagtggcaatctacaaccgggtgtct

SEQ ID NO: 13236 - DNA, 260 bp, Unknown
  Description of Unknown: LeftRegion for integrase B237 sequence
aaacctcgttcggaggatggaatggcaactggatctggcgctaagagagcagcaaagaaccgggaggtttccttacggaaggaaacagaggtgcagtgtggaattgtacggttactgtacgaggacggaagtttatcagagaaggaatatgaggacattgtggagttgctgtatgcaaaagaaaaaggaggaaaacagaaatgagcgagctttcaaaattttcgtcgcagacacgggtggcaatctacaaccgggtgtct

SEQ ID NO: 13237 - DNA, 260 bp, Unknown
  Description of Unknown: LeftRegion for integrase B238 sequence
gtggtctattttctttactgcaactgccttctataatggcagcatgtctttaagttcaccaattcaattctacaagaaagtataaaattccctcaaattttgactgtaggtttatagcttaacctgtggtcgattttatactgctctcattccttttataatgatagggacaatattttattaaaggaatgatatttgatatgaaagaaacggaaaaactgggaaatgctcagtcccaaaaagaaaaaatcagagagcgt

SEQ ID NO: 13238 - DNA, 200 bp, Unknown
  Description of Unknown: LeftRegion for integrase B239 sequence
ctgaccactttgcggtcaagcaataccgcaaatacaagctggcggcgggtgctgtatgctttagaagacttcttaatcagtcgattaggaagtcgcctaaaacatacaaccttacataatcgaagaaaggagacaatcgcatggatacaagaatgataactgccctgtacgagcgactaagccgtgatgatgacttagag

SEQ ID NO: 13239 - DNA, 260 bp, Unknown
  Description of Unknown: LeftRegion for integrase B240 sequence
cgcagatgcgttggcaacttcagaccaggttcggatagaaaatatttcggcgaaccagaagtttgaagcgtttatcacttcgttggcgcatatagtcgaaaagtacggcatgaaagtgcttaatgagggtgatggagctgcgtgaaaatcgcagctttacataatggatatttccccaaaataattttggaggtatagaaatgaaccgatatggaaagagatgtgttctatatccgcgtgtcagcacagaaatgcaggta

SEQ ID NO: 13240 - DNA, 260 bp, Unknown
  Description of Unknown: LeftRegion for integrase B241 sequence
ttgtgaaagcgaccgtcaaagacggcgcgaaagaaaccgcagtcaagaaaatccgtcggctgctccaaaacgatttgaacaaggcagccacttaaaaattaaagattttttcatttcctacaagcagacggatggggcatgatatggtataatatacttgtatcatgcctcgttttccggctgcggaataggaggaacttatgagcaaacagccggaaatggtgattgcacggaacccccgtgcgacacggaataacgat

SEQ ID NO: 13241 - DNA, 260 bp, Unknown
  Description of Unknown: LeftRegion for integrase B242 sequence
attatgaccggcctgaacacagcgtttcactcccttgtccccagctttcatcccattgacctgtgcgtgggcgttgccgccgccatcgccattcggctggcggtctatatcaagggcaaaaacgcaaagaaattccgcaaaaatcttgagtacggcagcgcccgttggagtgcataattttaagtgtaaaggacacctatatggacgcacaggaggttatgcacatgactgattatagcaaaattaccgccctttactcc

SEQ ID NO: 13242 - DNA, 260 bp, Unknown
  Description of Unknown: LeftRegion for integrase B243 sequence
gcatggcgcaatatttaatggcacatactgtaatggagtatggttctgtatggacggttatatcaatgatgtatacaaagacagtcctatttatagttcgctatttgaaaaatacttgcatagttgtgatgttgtttatatatttgtaggcagaactgatttaatagatgtaaatgtagtaaaaacaactggaataagatatgaaagcggcatttttaataagatgttctactaagaatcaagatttagataggcagaca

SEQ ID NO: 13243 - DNA, 260 bp, Unknown
  Description of Unknown: LeftRegion for integrase B244 sequence
cggtggaacgcaaggtactggcagacattctgaatcgaaaacaggaactcaccgccctgcccaatgcggcagaaaacgagtgcggtatcctcaatgcagagctgaaggagggtcaaacgtccccaccgaagcattttaccgatgtgatatgttatcatcgtgggtagttgatatgcagaattggaggtgagaaacgacccatgaaaaagaaaaaagtcaaagaaattggcattacagcgttatatgaacgcctttctcgt

SEQ ID NO: 13244 - DNA, 260 bp, Unknown
  Description of Unknown: LeftRegion for integrase B245 sequence
tgcaagactgacgactacagtcgtgaaattgttcgggaaaaggcggctgacggaagcgtggtgtgtgaaaccgagggcaagtgggtgtacaacactgatatgcttttaccaggtgttgtatgctttaagagacttattcatcacgatatgagtaagtctcttaaaacatataaggctacaaagcagaaaggagaccccccatgagcaaacagaaaataaccgccctatatgagcgtttgagccgtgacgacgaactgcaa

SEQ ID NO: 13245 - DNA, 260 bp, Unknown
  Description of Unknown: LeftRegion for integrase B246 sequence
caatgtaacgaagaaaccgcaggagattacaatcatgtcccgctatcttgcaacactgccgcatccggtcggaatctactttatctccgaagatattttcacccttgcttcttattatcaagaagatatgcgggacacagacttcttccccgatggatgggtgagcctgccggacgatgattccgagaggaggctgctgcatgattgacaaaacgaaacgcttagaaaaagagcaagccaaggcaaagaccaaaaagcgc

SEQ ID NO: 13246 - DNA, 260 bp, Unknown
  Description of Unknown: LeftRegion for integrase B247 sequence
tccgatctcggaatttctcttgcggaagccttgcataaagaattaaattacgaacaaaaccaagccgcaaagggcgtttattcggctattcacgctttattagaaaatcttaaacagcttcccgaaaatgagcgactttcgataataaaagagctttgccatttctgtaatgagtatttgaaaatgaagggggaagaataatgcagcaagcattaaacgcggtcatatacgcccgctattcttcccatagccagcaggaa

SEQ ID NO: 13247 - DNA, 260 bp, Unknown
  Description of Unknown: LeftRegion for integrase B248 sequence
aagatattcttcggagcaatgattggtctttaattgaaaaaatacttttaaaggacagcaatttaaaagacctataattgaatcacaaatccatttcactttatataaaccatccgttattcaattaactggtggtttatgtctttttctcacaaaaaaattataatgaaaataaatcgcaatacaaggaatgataacctatgaaagaatatgaagaaagaactgaaacaatcgaacaacaaaaagcccttattcgtgag

SEQ ID NO: 13248 - DNA, 260 bp, Unknown
  Description of Unknown: LeftRegion for integrase B249 sequence
tgaccgtggcggcagaaattcgctttggaaagatattgttaagcatcacaaggaattagagcaaatcagggcgattgaggactttgacagcgatacagttatcgttgagcagggtgttgtatgctttaagagacttattcatcacgatatgagtaagtctcttaaaacatataaggctacaaagcagaaaggagacccccatgagcaaacagaaaataaccgccctgtatgagcgtttgagccgtgacgatgaactgcaa

SEQ ID NO: 13249 - DNA, 260 bp, Unknown
  Description of Unknown: LeftRegion for integrase B250 sequence
ttgatatggcggtcttccaatggctggcggagtacttccagagtggttttattgaactccggaagttcacaaaacaaaaaatacttgcataattgggagaaaagttgtatctttgcagtcggaatagggaatgtaactgctttatacagagcatgattccccgagcattaataaaaagtataatataaaacaagataattatgaaggctgcatttttgatacgctgctctacaaagaagcaggattataaccgtcaggta

SEQ ID NO: 13250 - DNA, 260 bp, Unknown
  Description of Unknown: LeftRegion for integrase B251 sequence
ttgatgtggcggtcttccaatggctggcggagtacttccagagtggttttattgaactcaggaagttcacaaaactaaaaatacttgcataattgggagaaaagttgtatctttgcagtcggaatagggaatgtaactgctttatacagagcatgattccccgagcattaacaaaaagtataatataaaacaagataattatgaaggctgcatttttaatacgctgctctacaaagaagcaggattataaccgtcaggta

SEQ ID NO: 13251 - DNA, 260 bp, Unknown
  Description of Unknown: LeftRegion for integrase B252 sequence
ctttgaatattttgttacaagtatcatatagattttttaggttctcttttgtctgtattgatgggtttatgaagtttattgttgtattgcctatctgcacttttaccacctcaaagatatgtatgttgtgtatcaatcatttatgtatgaatactttataattaaatattaactatttgaatactttattacaataaggaatgaatataaaaaatatgacaattacaccaatttttgaagaaatagatttaatgctacta

SEQ ID NO: 13252 - DNA, 260 bp, Unknown
  Description of Unknown: LeftRegion for integrase B253 sequence
ctgtagcgattgcggatttagctttgactttacaacgcaaaaggatatcgatgacaagtgtaaatcattgttaaatggcggaataggatctattgtagttgcggtcattttgggtattgctctgtttgttataaacggatacctgcattgaaaatgaataaaagtgttatatattgattaagagggtagggggtgacagtttgaatccagttgacaaaatcgccgttgtttacgcacgatattcttcccacgggcagacc

SEQ ID NO: 13253 - DNA, 260 bp, Unknown
  Description of Unknown: LeftRegion for integrase B254 sequence
ttgatacgttatagcattcagcttgcttttttgaagcagctgttggaaagaaagctcataaccgatagagagtattcccttatcaaacagcgcttaatgaaagattatcgtgtggtttccgaactatcctcttgattttgtgtcgcattggcgttatgattaacgcaatgaaaggaacacattcaacaaggaggtcaagcatgaaagacgttgaagtcattaaagcgcgcaacacgctctctccacgagcgcgtacgaac

SEQ ID NO: 13254 - DNA, 260 bp, Unknown
  Description of Unknown: LeftRegion for integrase B255 sequence
atattgaaaaaagataaccagaatattgacaatgagatgatatacgcagctttaaagttaattcaaaatttacataaacaaggaaagattaagaaacatattttttgcaatatactagaagagtattctgatcgtattgacatatctaattttcaatgataaaattaatcacaaaattaggattataaaggaggaatagcgtgtaccaatatagccaagaatgcctacctgctagaaatgtcgttgtatatgctagagta

SEQ ID NO: 13255 - DNA, 260 bp, Unknown
  Description of Unknown: LeftRegion for integrase B256 sequence
atactgcgaggattgcggatacagctttgactttaccacacaggatgacctcaatgcccaatataataaactgaacacaaacgagggatgcgccattttggtggcgatcattctcggcgttattcttataacaatttggttttacagccattaaatgcaaatttgaggccgttttcgttaaataagaggggggtgacagtttgagttcagttgacaaaatcgccgttgtttacgcacggtattcttcccacgggcagacc

SEQ ID NO: 13256 - DNA, 260 bp, Unknown
  Description of Unknown: LeftRegion for integrase B257 sequence
acaggtcttttgattgtgtgtagtgacccggcgcaaaagaaaatcgacagagcggatgccctgaatattccgatcgtttcggagcagcaatggtttgagctcatgccagaacttgaagccgttggaatgtggaacggaaagcaaattctgtttgcggacaatgatggcatctaccgtgttgaagtgggcggtgaaagctgatggccagaaaaaagaatattgctgctggcctcgatgccgtcatctatgcccggtactca

SEQ ID NO: 13257 - DNA, 260 bp, Unknown
  Description of Unknown: LeftRegion for integrase B258 sequence
aacagaggtgaggagcgataatgaataagaaaatcgacagcttatatgcagcgcttatgcttattgaaattctatatgagcgtgggcttataaacaaggccacatttgatgccgtgagagaaaaagttaaatccgaaaatccgcacaattcacaggcggcttaatgtcaaatatacttaaaaacacaaggaggaatttttatgacaaacacaatttttaaaaacaacacgaaaatcgggaatccttacgattttcttgac

SEQ ID NO: 13258 - DNA, 260 bp, Unknown
  Description of Unknown: LeftRegion for integrase B259 sequence
agcacccgttaatgtcataaaactttagataaaattatatgaggaggatttagaatgaataatgaactattaagatatagcctccaattatctatgctgtctatgttactttctaagcacttgctcagtgatattgaatataaaaagataaaactaaagctgatgaaaaagtataatatctctacagaattatatttataatgttttgcaagtgtggtataatagaactgcatagaaagatacaaaaaggaggcagtgca

SEQ ID NO: 13259 - DNA, 260 bp, Unknown
  Description of Unknown: LeftRegion for integrase B260 sequence
aaccgaagggaggagcgataatgaataagaaaatcgacagcttatatgcggcgtttatgcttattgaaattctatatgagcgtgggcttataaacaaagccacacttgacaccgtgagagaaaaagttaaatccgaaaatccgcacaattcacaggcggcttaatgtcaaatatacttaaaaacacaaggaggaatttttatgacaaacacaatttttaaaaacaacacgaaaatcggaaatccttacgattttcttgac

SEQ ID NO: 13260 - DNA, 260 bp, Unknown
  Description of Unknown: LeftRegion for integrase B261 sequence
tattgcaagtatcatatagattttttaggttgtcttttgtttgtgtaggtgggtttataaaattaattgttgtgtttcctatttgcatttgatcacctcaaaaaattctatgttatgtacgattgatttatgatgaatactttatgattaaatattaactatttgaaaactttatgacaataagaaaaaggtgttaatcaatgaatgaaattccaatatttgaagaaatagatttaatgctattgaggaaatcaagaagt

SEQ ID NO: 13261 - DNA, 260 bp, Unknown
  Description of Unknown: LeftRegion for integrase B262 sequence
attgcaagtatcatatagattttttaggttgtcttttgtttgtgctggtgggtttataaaattgattgtagtatttcctatttgcatttgatcacctcaaaaaattctatgttatgtatgattgatttatgtatgaatactttatatttaaatattaactatttgaaaactttatgacaataagaaaaaggtgttaattaatgaacgaaattccaatatttgaagaaatagatttaatgctattaagaaaatcaagaagt

SEQ ID NO: 13262 - DNA, 260 bp, Unknown; identical to SEQ ID NO: 13261
  Description of Unknown: LeftRegion for integrase B263 sequence

SEQ ID NO: 13263 - DNA, 260 bp, Unknown
  Description of Unknown: LeftRegion for integrase B264 sequence
caaaagcaccagtgcagatgataatcagccgtgaatatgtcggcacacagaccgttacagaagcgtttgtcccgattatctccgaggatattcggaagaagattgccgagggcgacaccttcgacaatgaggggctgtccgcttagaatgtacgcaatgggacatgaaaacagataggacagatacggaggttttacagtatggcaggaatcaaagaagaaaagaaaatctatttagtcggcatttattgccgcttatct

SEQ ID NO: 13264 - DNA, 260 bp, Unknown
  Description of Unknown: LeftRegion for integrase B265 sequence
aaatggaagcattactcataagcaggctgttgataaagcgactggagaatatcgaaaatataagacaagaacgctcagcgacgtggaaaatgattatttaaattcgataaagatgttggaacagaaaactgacggcaaaaaataacagacgatgaaagctgaattatgccacaggctgtggcacaaatgaggatggcgatatgaaagaaaaaacaaaagtatatatttatacgagagtatctactgccgttcaggtagac

SEQ ID NO: 13265 - DNA, 260 bp, Unknown
  Description of Unknown: LeftRegion for integrase B266 sequence
attgcaagtatcatatagattttttaggttgtcttttgtttgtgctggtgggtttataaaattgattgtagtatttcctatttgcatttgatcacctcaaaaaattctatgttatgtatgattgatttatgtatgaatactttatatttaaatattaactatttgaaaactttatgacaataagaaaaaggtgttaattaatgaacaaaattccaatatttgaagaaatagatttaatgctattaagaaaatcaagaagt

SEQ ID NO: 13266 - DNA, 260 bp, Unknown; identical to SEQ ID NO: 13265
  Description of Unknown: LeftRegion for integrase B267 sequence

SEQ ID NO: 13267 - DNA, 260 bp, Unknown
  Description of Unknown: LeftRegion for integrase B268 sequence
gtggactcatctcgaaacgcccgttccgcgcccctcaccacaccatttctacggtagcaatgaccggtggaggaagtttcccccagcccggtgaaatcagtctggcacataacggcattttatatcttgatgaaaaaacgagaaaagacttgtgccattcggaaattattattacctttgcagcgtaattcgttgaaataatgggtaatgcaactataaaaaaagcagcttttcttgttcgctgctccaccaataaacaa

SEQ ID NO: 13268 - DNA, 260 bp, Unknown
  Description of Unknown: LeftRegion for integrase B269 sequence
agggaattgacaaatcataaaaaagtgatattataaataaccaatgaaagaggtattctctagaaagagaggtacatctatgataaaatatatacataaacaaaaattttataatattgaatattgtgaggagtcagtagtatttagactttattaaatactattggctcctcttttttagtaaaaggagttgaagatttatggataacgaaaagaaagttgcaggattatatatcagggttagtactgaagatcaagct

SEQ ID NO: 13269 - DNA, 260 bp, Unknown
  Description of Unknown: LeftRegion for integrase B270 sequence
aaataatataatcagtgatgaaaatggtgcattgattattataaatatcttatatgaacaaggtattattaataaaagaacttatgataatattttgaaaaagtataagattacataatatagaaaaatactgttgaaaataaggcttattttatatataatagtatataaaataggctttatttttgaaaggagataacatggataattatatagcatccctcgatagaaatagaccaagaaatattgctttttatgga

SEQ ID NO: 13270 - DNA, 260 bp, Unknown
  Description of Unknown: LeftRegion for integrase B271 sequence
aaataatataatcagtgatgaaaatggtgcattgattattataaatatcttatatgaacaaggcattattaataaaagaacttatgataatattttgaaaaagtataagattacataatatagaaaaatactgttgaaaataaggcttattttatatataatagtatataaaataggctttatttttgaaaggagataacatggataattatataacgtccctcgatagaaatagaccaagaaatattgctttttatgga

SEQ ID NO: 13271 - DNA, 260 bp, Unknown
  Description of Unknown: LeftRegion for integrase B272 sequence
attgcatgtatcgtaaatgatttttaatttttcttttgttggtggttgcataataacttttactttcataaaaatcacctcaaaacaatatatgtagttatataaaaaacaatgcttttgtttcattcatacgacaagattttactatttgaaacaattttatttaatcaaataatttcatcaaggggaacataaaaattatggaaattgaaaacatagaacaactttttaatattttatcaacaattaaagtacaccaa

SEQ ID NO: 13272 - DNA, 260 bp, Unknown
  Description of Unknown: LeftRegion for integrase B273 sequence
ttgtcagcgtttcggtagatttttccgtttttcagcaaaataaaaacgcccacggtgttaccagcaacgcaggcgtttcagatcagcttactcagagagatggtacagggataaaacctgtccagagcaatagcagacctcgcagatgttattgtaccacctccgggcaggcttgtcaaagtgtacccggaggtatttttatgggcaaaagacaaaaggcaaccggcggcgatgcggtcatctacgcccgctattcttcc

SEQ ID NO: 13273 - DNA, 260 bp, Unknown
  Description of Unknown: LeftRegion for integrase B274 sequence
ttttacgaatcaatgattggcatctatcctcaaaacacaattacgatgctgataacccgaatgattattaaatcattcaataacaatccaatatctatttctacataaaccatctgttaatcacttaactgatggtttatgtctttttcaatccaaaaattctatgatagttatatcaactataaaggatgtcgctattgatgaaagaaagtgaagaacgaagcagtaatattgatgaacagaaagccagaatccggcaa

SEQ ID NO: 13274 - DNA, 260 bp, Unknown
  Description of Unknown: LeftRegion for integrase B275 sequence
ttttacgaatcaatgattggcatctatcctcaaaacacaattacgatgctgataacccgaatgattattaaatcattcaataacaatcaaatatctatttctacataaaccatctgttaatcacttaactgatggtttatgtctttttcaatccaaaaattctatgatagttatatcaactataaaggatgtcgctattgatgaaagaaagtgaagaacgaagcagtaatattgatgaacagaaagccagaatccggcaa

SEQ ID NO: 13275 - DNA, 260 bp, Unknown
  Description of Unknown: LeftRegion for integrase B276 sequence
gagaacatctcgcccgactgcccatagaaatagtcaaacattctggtttcctcgcttatcctgccttgtcacatccttgacacctccgttcgtagtatgatgaaatatgtatgactatcgttatttttctttacaaagatggcctgccatgctacaatagccgcatctacggccaccggacaacaggaaaggagtatcttatggccaaaactgccgacaccattgccatctattcccgcaaatcccgctacaccggcaag

SEQ ID NO: 13276 - DNA, 260 bp, Unknown
  Description of Unknown: LeftRegion for integrase B277 sequence
attgcatgtatcgtaaatgatttttaatttttcttttgttggcggttgcataataacttttactttcataaaaatcacctcaaaacaatatatgtagttatataaaaaacaatgcttttgtttcattcatacgaactaattttactatttgaaacaattttatttaatcaaataatttcatcaaggggaacataaaaattatggaaattgaaaacatagaacaactttttaatgttttatcaacaattaaagtacaccaa

SEQ ID NO: 13277 - DNA, 260 bp, Unknown
  Description of Unknown: LeftRegion for integrase B278 sequence
ttttacgaatcaatgattggcatctatcctcaaaacacaattacgatgctgataacccgaatgattattaaatcattcaataacaatcaaatatctatttctacataaaccatccgttaatcacttaaccgatggtttatgtctttttcaatccgaaaattctatgatagttatatcaactataaaggatgtcgctattgatgaaagaaagtgaagaacgaagcagtaatattgatgaacagaaagccagaatccggcaa

SEQ ID NO: 13278 - DNA, 260 bp, Unknown
  Description of Unknown: LeftRegion for integrase B279 sequence
ttttacgaatcaatgattggcatctatcctcaaaacacaattacgatgctgataacccgaatgattattaaatcattcaataacaatcaaatatctatttctacataaaccatccgttaatcacttaaccgatggtttatgtctttttcaatccaaaaattctatgatagttatatcaactataaaggatgtcgctattgatgaaagaaagtgaagaacgaagcagtaatattgatgaacagaaagccagaatccggcaa

SEQ ID NO: 13279 - DNA, 260 bp, Unknown
  Description of Unknown: LeftRegion for integrase B280 sequence
aaataatataatcagtgatgaaaatggtgcattgattattataaatatcttatatgaacaaggcattattaataaaagaacttatgataatattttgaaaaagtataagattacataatatagaaaaatactgttgaaaataaggcttattttatatataatagtatataaaataggctttatttttgaaaggagataacatggataattatatagcgtccatcgatagaaatagaccaagaaatattgctttttatgga

SEQ ID NO: 13280 - DNA, 260 bp, Unknown
  Description of Unknown: LeftRegion for integrase B281 sequence
ttttacgaatcaatgattggcatctatcctcaaaacacaattacgatgctgataacccgaatgattattaaatcattcaataacaatcaaatatctatttctacataaaccatccgttaatcacttaaccgatggtttatgtctttttcaatccaaaaattctatgatagttatatcaactataaaggatgtcgctattgatgaaagaaagtgaagaacgaagcagtaatattgatgaacaaaaagccagaatccggcaa

SEQ ID NO: 13281 - DNA, 260 bp, Unknown
  Description of Unknown: LeftRegion for integrase B282 sequence
aaataatataatcagtgatgaaaatggtgcattgattattataaatatcttatatgaacaaggcattattaataaaagaacttatgataatattttgaaaaagtataagattacataatatagaaaaatactgttgaaaataaggcttattttatatataatagtatataaaataggctttatttttgaaaggagataacatgaataattatatagcgtccctcgatagaaatagaccaagaaatattgctttttatgga

SEQ ID NO: 13282 - DNA, 260 bp, Unknown
  Description of Unknown: LeftRegion for integrase B283 sequence
aggcaaaaaatggtaattatgtcttgactttaactacaaactctttataatagaaaaccaagaaaagaagttttatgtttttgaggggttaatataaaacaaatataatttagcagatatactttagaggtgtcaaagacataaaacctaatgtctttgtcgcctcttttttgatgaagaataagaaaggaaatttatttatgagtgaagaaaagaaaatcgcaggaatatacataagagttagtactgaagatcaagct

SEQ ID NO: 13283 - DNA, 260 bp, Unknown; identical to SEQ ID NO: 13278
  Description of Unknown: LeftRegion for integrase B284 sequence

SEQ ID NO: 13284 - DNA, 260 bp, Unknown
  Description of Unknown: LeftRegion for integrase B285 sequence
tttgcaaaccctctgcccagcctgcatccgcttgatttgctggtgggtctgtgctgcggtgcagggttacgactggcggtctatctgcgtggcaaaaatgccaagaagtaccgccacggcatggagtacggctctgcccggtggagtgcataattttaagtgtaaatgacacatacatggacgcacaggaggttatgcacatgactgattatagcaaaattacagccctttactcccgcctttccgtgggcgacgaggac

SEQ ID NO: 13285 - DNA, 260 bp, Unknown
  Description of Unknown: LeftRegion for integrase B286 sequence
ttttacgaatcaatgattggcatctatcctcaaaccataattacgatgctgacaacccgaatgattattaaatcattcaataacaatcaaatatctatttctacataaaccatccgttaatcacttaaccgatggtttatgtctttttcaatccaaaaattctatgatagttatatcaactataaaggatgtcgctactgatgaaagaaagtgaagaacgaagcagtaatattgatgaacagaaagcccgaattcggcaa

SEQ ID NO: 13286 - DNA, 260 bp, Unknown
  Description of Unknown: LeftRegion for integrase B287 sequence
agcagaccgcccccaggcggcagaagccccgtcttattgttcagcgggtattcaccggggaaaagagcatggaagatgttcttttccccgttatttacgaggatttgcggcggcagcttgaacgccgccgcaccttggacaaggagggcgagagcggataaactgtccgtaaagtctgttcaacacaaggaggtatcacgatgggaacgaagaaagacagcaccatttatgacgtggcgatttattgcagactgtcaaaa

SEQ ID NO: 13287 - DNA, 260 bp, Unknown
  Description of Unknown: LeftRegion for integrase B288 sequence
tttgcgtcgcccctgccgagcttttccccggtagatatgctgataggcattgccggagctatccttatccggctgattgtctacactaaaggcaagaacgcaaagaaataccgtaagggcgtagaatatggctctgcccgttggagtgcataattttaagtgtaaatgacacatacatggacgcacaggaggttatgcacatgactgattatagcaaaattacagccctttactcccgcctttccgtgggcgacgaggac

SEQ ID NO: 13288 - DNA, 260 bp, Unknown
  Description of Unknown: LeftRegion for integrase B289 sequence
tttgcaaccccgcttccgagccttgcccctatggatttgcttatcggtattgtgggggctgtccttatccggcttatggtgtacttcaaaggcaagaacgcgaagaaataccgaaaaggtatcgaatacggttcagcccgttggagtgcataattttaagtgtaaatgacacatacatggacgcacaggaggttatgcacatgactgattatagcaaaattacagccctttactcccgcctttccgtgggcgacgaggac

SEQ ID NO: 13289 - DNA, 260 bp, Unknown
  Description of Unknown: LeftRegion for integrase B290 sequence
ttcggcatgaacatattttactatattttagcacaatgttgcttgtagaagaagatttcaaacaaaataaaaagcgttcacagtgctaccaacactatgaacgccacagaccagtttaccctatatggtaatagctgacctcacagaagctattgtatcatatcaaggggagcttatcaagttttaccttggaggatttcatggcaaaaaagaaaaagcccaccgggggcgttgccatcatctatgcccgctactcatct

SEQ ID NO: 13290 - DNA, 260 bp, Unknown
  Description of Unknown: LeftRegion for integrase B291 sequence
ttccgattgctctttttgagttcttcaaactctgcgtttgaatagaaccaatcagagcagtcgcgccccctcttttcatgattgcgggcaatgtgattaatagtttcatagacgttcaaaaggttttgtctgttcatacggctgacctcaattttttacatcaacggtataacaaaaatttgaaagaagtgtgaaaagaaatgcacaataaatatgatatcaacgaatatgttgtcaaacttgataaactcggaaagata

SEQ ID NO: 13291 - DNA, 260 bp, Unknown
  Description of Unknown: LeftRegion for integrase B292 sequence
ggctactggctgtaaaatgctggtagccctcattttttagttgtatctagtatataaggggtgtataatagataggaactgaaaacagcctcataaagccctctattttatcgagggtaaagaagtctacacctaatatataaaagtggctgtatgaggcacacaggagctcacaggactattacaggagggtaaacaggatggcatacaggaaaataacggatataagagatactattggtatgagagcggtattttat

SEQ ID NO: 13292 - DNA, 260 bp, Unknown
  Description of Unknown: LeftRegion for integrase B293 sequence
tagtgtaaaaatatttttcttccttgaatattttgttgcaagtatcataaatctgttttaatttttctttcgttaaaggttttttgttaaatgtaatattcattttgtaccccctttaatgaattgtatgtattttataagttttcaattacttaaattaagtttactatctgaaacataattataggagtggtaaattaatgcaatcctcagaagaagctataaaatttttagatgaataccttatatatttaaggaaa

SEQ ID NO: 13293 - DNA, 260 bp, Unknown
  Description of Unknown: LeftRegion for integrase B294 sequence
tgcgaacatttcggcataccgctgcgctccctgcagcactgggagattggcgacaggaagcccgccccattcgtcatcggcctcatgcgcaaatgctacgagcttgagcgcgagaacgagcgcctgcgcgactgcatcgacacgctcgaccgtcagaacgacgagctgaaggcactcctcaaaggcgagggggtggttcaatgacgagaaaggcaaagacctgtttcatctatgtccgcgtctcaacgaagatgcaggtg

SEQ ID NO: 13294 - DNA, 260 bp, Unknown
  Description of Unknown: LeftRegion for integrase B295 sequence
aaaggagcgcgacatgaataaagcgttattactagcattgaacgaacacatataccttcagggactaatcagcagagaaatgaaagaaaaaattgatgttgagattctttctgaaaattaagccaaactattgagcagagatgagattgaaggtataataatcttatctctgctcttccgactagaagggagaacggggcatgaacgtttatcgtactagagaaatactgaaaacttgcagcatttttgacttgaaatta

SEQ ID NO: 13295 - DNA, 260 bp, Unknown
  Description of Unknown: LeftRegion for integrase B296 sequence
atatcgccaactggtcggccgctcaaggtgcggctaccgcaccgcagcccgttcagcaggtagtggagcagaaaccgtctcccgccgatgaaatccgcaaatacaagggcctgctggatgacggtatcatcacgcaggaagaatttgaagctaagaaaaagcaactgctgggcctgtaaatttgaaaggagcgtgacggcatgagaaaaaagtccaacctcaatgcagctactcgtgccgtcatctatgccaggtattcc

SEQ ID NO: 13296 - DNA, 174 bp, Unknown
  Description of Unknown: LeftRegion for integrase B297 sequence
tgttgttgtaaaatttagtgaacattttacagcaccgccgaaacattatacggatgtaatacactttgagagtaggcagtggaaatattcaaaatgcaaaggagcaggatagcaatgaaaatcaaggataagagatttaaaatcacagctttatacgagcgactctcaaaggat

SEQ ID NO: 13297 - DNA, 260 bp, Unknown
  Description of Unknown: LeftRegion for integrase B298 sequence
catatcgtatgttaggaattgagaagcaagccaagttgattcaatatttgcttcaattaaaaagtgataaaagtgagaataattgactttttccataaagtcctctatatattcgttcttatagaacactttaccgaaaacgctaaaatcgccacttttatcactttccgtaaatcatatattatataaggattacagaaatggatgtagtattgtatttaagatatagttccgaaagacaaaatgaacaatcaatcgag

SEQ ID NO: 13298 - DNA, 260 bp, Unknown
  Description of Unknown: LeftRegion for integrase B299 sequence
ggctactggctgtaaaatgctggtagccctcattttttagttgtatctagtatataaggggtgtataatagatagaaactgaaaacagcctcataaagccctctattttatcgggggtaaagaagtctacacctaatatataaaagtggctgtatgaggcacacaggagctcacaggactattacaggagggtaaacaggatggcatacaggaaaataacggatataaaagatactattggtatgagagcggtattttat

SEQ ID NO: 13299 - DNA, 260 bp, Unknown; identical to SEQ ID NO: 13265
  Description of Unknown: LeftRegion for integrase B300 sequence

SEQ ID NO: 13300 - DNA, 260 bp, Unknown
  Description of Unknown: LeftRegion for integrase B301 sequence
aaattgataaaaaagaatacaataaaatattcgccgcattgaaactaatagaagcattgtttattgatggaaaaataaaatatcatgtatttaggaatatcctagatgactataaagatgttgttgatttatctgagtttaaatgctatacttgatacatctattaacaaacatcgtattattatgaggaataaaaataaatgtatgatatttacaatcaaaaaccaaccagccgaaaagttgtaatttatgcacgcgtt

SEQ ID NO: 13301 - DNA, 260 bp, Unknown
  Description of Unknown: LeftRegion for integrase B302 sequence
tgttgccaaaagataaaatatcagaagctaaagaattaataatgaattgccttcaaaatgaagatatgattttggtttcaacaattaaggaattggctaatgataaaaatatatctttaagaacattaaataaggcaaaaaaagaattagaaatcgcatcagttagaagtaatgataaatggtattggaagttgtaggtgatgtatgttatgtcaactgaggaggaaaaacaaaaagtaagggaaagacaaaaaggttat

SEQ ID NO: 13302 - DNA, 260 bp, Unknown
  Description of Unknown: LeftRegion for integrase B303 sequence
tgttgccaaaagataaaatatcagaagctaaagaattaataatgaattgtctacaaaatgaggatatgattttggtttcaacaattaaggaattggctaatgataaaaatatatctttaagaacattaaataaggcaaaaaaagaattagaaatcgcatcagttagaagtaatggtaaatggtattggaagttgtaggtgatgtatgttatgtcaactgaggaggaaaaacaaaaagtaagggaaagacaaaaaggttat

SEQ ID NO: 13303 - DNA, 260 bp, Unknown
  Description of Unknown: LeftRegion for integrase B304 sequence
aaattgataaaaaagaatataataaaatatttgccgcattgaaactaatagaagcattgtttattgatggaaaaataaaatatcatgtatttaagaatatcctagacgattataaagatgtcgttgatttatctgagttcaaatgatatacttaatacatctattaacaaacatcgtattattatgaggaataaaaataaatgtatgatatttataatcaaaaaccaaccaaccgaaaagttgtgatttatgcgcgcgtt

SEQ ID NO: 13304 - DNA, 260 bp, Unknown
  Description of Unknown: LeftRegion for integrase B305 sequence
aattgataaaaaaagaatataataaaatatttgccgcattgaaactaatagaagcattgtttattgatggaaaaataaaatatcatgtatttaagaatatcctagacgattataaagatgtcgttgatttatctgagttcaaatgatatacttaatacatctattaacaaacatcgtattattatgaggaataaaaataaatgtatgatatttataatcaaaaaccaaccaaccgaaaagttgtgatttatgcgcgcgtt

SEQ ID NO: 13305 - DNA, 260 bp, Unknown; identical to SEQ ID NO: 13265
  Description of Unknown: LeftRegion for integrase B306 sequence

SEQ ID NO: 13306 - DNA, 260 bp, Unknown
  Description of Unknown: LeftRegion for integrase B307 sequence
tatttaatggaagtgataaagtttttataaatgattattctaaatgtattaaattaaaagatatgggagttcatattaaaaacaattaaatgtttttaaactaggcgtacaaaaaggaagtgaaatacttgaggttaaaagtatggactttttgtgcttttaatctctttcaaaaaaataatagaaagagagatgaaattatgaacgatgaaaagaaaattgcagatgtttatattagagttagtacactcgaccaagca

SEQ ID NO: 13307 - DNA, 260 bp, Unknown
  Description of Unknown: LeftRegion for integrase B308 sequence
cccgaggctatcggcgtatttaacgccaaaggaaagcagctcggaaacgtaaatgcagagttagcaagcgatttgatacataaatatcctaacaacaaaatgaaagttacaatttcagatataacaggcggcggagacaagaattacggttgtaatcttcacgtcgttatctacaaggcataattaaggaggcgggcaaaatggcaagagccgcaaagcaagacaataattcagaaataattgacggcgtgatatatgcc

SEQ ID NO: 13308 - DNA, 260 bp, Unknown
  Description of Unknown: LeftRegion for integrase B309 sequence
gaaaggtcagtatttccggcgcgtcagagttagaagaacggctactcagatacttttctttttgtgacgcagagggtaaattgcgtattattcaatgcgccatgaatgaatttgaccgaacagcaaaagaaaaaacagacccttcggaagagcctgttgttggctaaggtcatcgacctgtctgaatggagaaagacgctatgaaaatcacaaaattccctattgacctctccatgttgaccgaagaggaaatagaccag

SEQ ID NO: 13309 - DNA, 260 bp, Unknown
  Description of Unknown: LeftRegion for integrase B310 sequence
aaattgataaaaatgaatataataaaatattcgccgcattgaaactaatagaagcattgtttattgatgggaaaataaaatatcatgtatttaggaatatcctagatgactataaagatgttgttgatttatctgagtttaaatgctatacttgatacatctattaacaaacatcgtattattatgaggaataaaaataaatgtatgatatttacaatcaaaaaccaaccagccgaaaagttgtaatttatgcgcgtgtt

SEQ ID NO: 13310 - DNA, 260 bp, Unknown
  Description of Unknown: LeftRegion for integrase B311 sequence
taaatcgttttactttgttgcatttttatgctatattattaaagcaatgcaacataatgacacaattcagcataattgcaacatttgcgaaaagaatgaaaaggaagtgacatatttgtgaatgaaagtattggcacgaagctgaaaatattaaggcgcgggagaaagctgacacaaatttgaaaaaaggaagaaatataatgaaatacaacttgaacgattacagaattgaagttgacaaactcggtaaaatcatcatt

SEQ ID NO: 13311 - DNA, 260 bp, Unknown
  Description of Unknown: LeftRegion for integrase B312 sequence
aattgataaaaaagaatacaataaaatattcgccgcattgaaactaatagaagcattgtttattgatggaaaaataaaatatcatgtatttaggaatatcctagatgactataaagatgttgttgatttatctgagtttaaatgctatacttgatacattctattaacaaacatcgtattattatgaggaataaaaataaatgtatgatatttacaatcaaaaaccaaccagccgaaaagttgtaatttatgcgcgtgtt

SEQ ID NO: 13312 - DNA, 260 bp, Unknown; identical to SEQ ID NO: 13309
  Description of Unknown: LeftRegion for integrase B313 sequence

SEQ ID NO: 13313 - DNA, 260 bp, Unknown
  Description of Unknown: LeftRegion for integrase B314 sequence
atgttgttccgcttgcacgatttaatccgctgaaattcctcatcggaataaaaccaagcggaacgttctacccctttgattctatgtttatgcgcgataagattgatagtttcatagacatttaatagatggtatttgttcattcagatcacctcttgaatagattaaaaaacaaaaatttgaaaaaaggaagaaatataatgaaatacaacttgaacgattacagaattgaagttgacaaactcggtaaaatcatcatt

SEQ ID NO: 13314 - DNA, 260 bp, Unknown
  Description of Unknown: LeftRegion for integrase B315 sequence
ctcctgtcttccaatggttgccgcagtacctcaagtacgtttctattaaactccggcagttcgctattcttaaaatacttgcaccattgttggacctttcttatctttgcgagaggtaaggactattatctgtgctattagattgtattatagatagttagctaatagtcttgattgcaataatattaaatgtaacagatatgagagctgcatttttgattaggtgctcaactaagaagcaagactatgagcgacaggta

SEQ ID NO: 13315 - DNA, 253 bp, Unknown
  Description of Unknown: LeftRegion for integrase B316 sequence
cttccaatggttgacgcaacacttccaacactcctcggttgaattccggcaattcgctattcttaaaatacttgcaccattgtagaaactttcttatctttgcgagaggtaaagactattatctgtgctattatattgcattatagatagttagctaatagtcttgattgcaataatattaaatgtaacagatatgagagctgcatttttgattaggtgctcaactaagaagcaagactatgagcgacaggta

SEQ ID NO: 13316 - DNA, 260 bp, Unknown
  Description of Unknown: LeftRegion for integrase B317 sequence
gagtattagaaaacgcatgttgggaaaaatatgacctctcctaaaattaattttcaagatcatgaaaggataattgcaatgtttaatgaaaaagtactgatgataaagatggcagatatactacagcaagagaatctcatatcatatgatgaacagcagaaaatgaaggcattgattcgtgaaagcgaggaaatttagtcatgcttcgagctgtaatttactgccgatgctcaacagaagaagagtctcaaaaggacgca

SEQ ID NO: 13317 - DNA, 260 bp, Unknown
  Description of Unknown: LeftRegion for integrase B318 sequence
tggcggtcttccaatggttgacgcaacacttccagcactcctcggttgaattccggcaattcgctattcttaaaatacttgcaccattgttggaactttcttatctttgcgagaggtaaggactattatctgtgctattagattgtattatagatagttagctaatagtcttgattgcaataatattaaatgtaacagatatgagagctgcatttttgattaggtgctcaactaagaagcaagactatgagcgacaggta

SEQ ID NO: 13318 - DNA, 253 bp, Unknown
  Description of Unknown: LeftRegion for integrase B319 sequence
tttccagtttggccaaccgggaaacatagaatgaagggatatgtttcccggattcgctattcttaaaatacttgcaccattgtagaaactttcttatctttgcgagaggtaaagactattatctgtgctattatattgcattatagatagttagctaatagtcttgattgcaataatattaaatgtaacagatatgagagctgcatttttgattaggtgctcaactaagaagcaagactatgagcgacaggta

SEQ ID NO: 13319 - DNA, 260 bp, Unknown
  Description of Unknown: LeftRegion for integrase B320 sequence
aacagaaaaggcagcatatctgataaaaaagttgctttctgatggcgatatgagagcaagagaaatctatatgcggatgaaagatgaaggaatcagccgcagaaccgcagaaaatacgaagaaagaactcggtatccgaagttatcggaagatgcgacagtggtattggagcatccatacgggagaatgaggaaaagcacatgattaccggtgaagtagaagcagtagaccgtaagcaaaaaatcagagaccgctataag

SEQ ID NO: 13320 - DNA, 260 bp, Unknown
  Description of Unknown: LeftRegion for integrase B321 sequence
tgacggtcctccaatggttggcgcaatacttctagcactcctcggttgaattccggtaactcgctattcttaaaatacttgcaccattgtagaaactttcttatctttgcgagaggtaaagactattatctgtgctattatattgcattatagatagttagctaatagtcttgattgcaataatattaaatgtaacagatatgagagctgcatttttgattaggtgctcaactaagaagcaagactatgagcgacaggta

SEQ ID NO: 13321 - DNA, 260 bp, Unknown
  Description of Unknown: LeftRegion for integrase B322 sequence
tggcggtcttccaatggttgacgcaacacttccaacactcctcggttgaattccggcaattcgctattcttaaaatacttgcaccattgttggaactttcttatctttgcgagaggtaaggactattatctgtgctattagattgtattatagatagttagctaatagtcttgattgcaataatattaaatgtaacagatatgagagctgcatttttgattaggtgctcaactaagaagcaagactatgagcgacaggta

SEQ ID NO: 13322 - DNA, 196 bp, Unknown
  Description of Unknown: LeftRegion for integrase B323 sequence
gcggctaacgacgtaaaggcacgtttccacacgctgccggagactctggaggacgccagatcactggctgcatccagattgtattatagatagttagctgatagtcttgattgcaataatattaaatgtaacagatatgagagctgcatttttgattaggtgctcaactaagaagcaagactatgagcgacaggta

SEQ ID NO: 13323 - DNA, 260 bp, Unknown
  Description of Unknown: LeftRegion for integrase B324 sequence
tgacggtcctccaatggttggcgcaatacttctagcactcctcggttgaattccggtaactcgctattcttaaaatacttgcaccattgttggaactttcttatctttgcgagaggtaaggactattatctgtgctattagattgtattatagatagttagctaatagtcttgattgcaataatattaaatgtaacagatatgagagctgcatttttgattaggtgctcaactaagaagcaagactatgagcgacaggta

SEQ ID NO: 13324 - DNA, 260 bp, Unknown
  Description of Unknown: LeftRegion for integrase B325 sequence
tgccggtcttccagtggctggcgcaggacttctaatacccctctgttgaattcgggtaattcgctattattaaaatacttgcaccattgtagaaactttcttatctttgcgagaggtaaagactattatctgtgctattatattgcattatagatagttagctaatagtcttgattgcaataatattaaatgtaacagatatgagagctgcatttttgattaggtgctcaactaagaagcaagactatgagcgacaggta

SEQ ID NO: 13325 - DNA, 260 bp, Unknown
  Description of Unknown: LeftRegion for integrase B326 sequence
tggcggtcttccaatggttgacgcaacacttccagcactcctcggttgaattccggcaattcgctattcttaaaatacttgcaccattgtagaaactttcttatctttgcgagaggtaaagactattatctatgctattatattgcattatagatagttagctaatagtcttgattgcaataatattaaatgtaacagatatgagagctgcatttttgattaggtgctcaactaagaagcaagactatgagcgacaggta

SEQ ID NO: 13326 - DNA, 260 bp, Unknown
  Description of Unknown: LeftRegion for integrase B327 sequence
aaccaaaaaaggttctgagagtttgaattaaggctcaactcttgtaataacgtcttttattaatgtaaccacccaactatacatatgataataatagtcaagtattaattttctcaatacttgactattgtttattgacttacaccatttattgtggtatgctgtatgatacccaataaaataaaaaaggagaacctcatatgagtacaagcaatactgactgcgataatcggaagtacgccatatatgcccgtaaatcg

SEQ ID NO: 13327 - DNA, 260 bp, Unknown
  Description of Unknown: LeftRegion for integrase B328 sequence
tatccccatcctgcagaacgtatttctggatattaagttgttgcacgtcagcatcttcttcttcaacgccggggttgtcggcgaggaactcttcacgagcggcatcaatagcttcttccagcgtactatagaatacatattctttatcggacataatgagttcctcaatgattatgtttatcaaatgtataggtgcatgaatgcgaactgtcaaagcctacatctatagtagggtatcaagcttgcagcaggttgatgct

SEQ ID NO: 13328 - DNA, 260 bp, Unknown
  Description of Unknown: LeftRegion for integrase B329 sequence
tttaaatgttagacttcgtaaaattaactttaaaatgtcaaacaagtgagaggtgtcttttaaaatatctatattttagactacacttttctcatttaagatgccaaacatatgagaagcatatttaaattttttaaaattttagacttaacttttctcatttaagatgccaaacatatgaaaggagatatttaaaaaatatgaataaagaaaataaaatagcaggtatttacattagggtcagtacagaggatcaagct

SEQ ID NO: 13329 - DNA, 260 bp, Unknown
  Description of Unknown: LeftRegion for integrase B330 sequence
tttaaatgttagacttcgtaaaattaactttaaaatgtcaaacaagtgagaggtgtcttttaaaatatctatattttagactacacttttcaagcttaaagtgccaaacatatgagaagtatatttaaattttttaaaattttagacttaacttttctcatttaagatgccaaacatatgaaaggagatatttaaaaaatatgaataaagaaaataaaatagcaggtatttacattagggtcagtacagaggatcaagct

SEQ ID NO: 13330 - DNA, 260 bp, Unknown; identical to SEQ ID NO: 13329
  Description of Unknown: LeftRegion for integrase B331 sequence

SEQ ID NO: 13331 - DNA, 260 bp, Unknown
  Description of Unknown: LeftRegion for integrase B332 sequence
atctgagaaggcggcgtatctgatcaagaagctgctttccgggggtgacatgagatccagagaaatctatatgcggatgagcgatgaaggtatcagccgcaggacagcagaaaatacaaagaaagaactcggcatccggagttatcggaagatgcgacagtggtactggagcatgaagccggaggaatgagaggaagcaaatgataagcagtggagcagaggcggcagaccgcaagcagagaatcagagacagatataaa

SEQ ID NO: 13332 - DNA, 260 bp, Unknown
  Description of Unknown: LeftRegion for integrase B333 sequence
cactataccaatccgcatattcacattatacataacttctcaagactactttctgaaaaacagattaccgtgactattttcatctatataaagttataaagctcttgcaatctgacccaaactatggtatatacattatacgaaacatgattttgaaagaacgaattaccgttcaatgatgttagagtgaggtgcctgccatgaccgccgtgatctatgctcgctattcctcggacaaccagcgcgaagaatccatcgaa

SEQ ID NO: 13333 - DNA, 109 bp, Unknown
  Description of Unknown: LeftRegion for integrase B334 sequence
ccatagatgcccggtcacagaggtatggatacctcggaaaggagattttatgaagagaccggacaacaacaaaataacagcactttacgagagactgtcacgagatgat

SEQ ID NO: 13334 - DNA, 260 bp, Unknown
  Description of Unknown: LeftRegion for integrase B335 sequence
cgccgaaatcgagagcggctgtattgccgtggtcgtggtagacggtacagacgggtttttaaaacaagtcgagttcggtgagaactccacctcgcttcactcgttcaatccgtattatcccgacatggagtttgtagatgccgaccagaaacgtttgcactttgttggtcgcgtccgggaaatgaagcggagattctgatatgcgtaaaaagtttaatatcgacctttctatgctgaccccggaagaacagcagcagttt

SEQ ID NO: 13335 - DNA, 260 bp, Unknown
  Description of Unknown: LeftRegion for integrase B336 sequence
ggctactggctgtaaaatgctggtagccctcattttttagttgtatctagtatataaggggtgtataatagataggaactgaaaacagcctcataaagccctctattttatcgagagtaaagaagtctacacctaatatataaaagtggctgtatgaggcacacaggagctcacaggactattacaggagggtaaacaggatggcatacaggaaaataacggatataagagatactattggtatgagagcggtattttat

SEQ ID NO: 13336 - DNA, 260 bp, Unknown
  Description of Unknown: LeftRegion for integrase B337 sequence
ttgcccggcggattgtgatggagatgctctgcgaacatgatgcgcacagcacggatatcctgaacaagctgaagctgatggggatatccgaacggacgatacattctgccaagaaggagcttggcgttcaatcatacagaagtgacggcgtctggtactggcatctggacgacccgtcgggatcataaaggaggaaagcgatgcaggatgatggccgcagagagcaactgcgtcagatttaccagcgggaggacaccggc

SEQ ID NO: 13337 - DNA, 260 bp, Unknown
  Description of Unknown: LeftRegion for integrase B338 sequence
agattattcctctgttaagagacggaaagttgattgactgaatatgctaattattgagcagtatgtaagaggaataatcttatggtcgaaaatgagaacagaattatattaaaattagcagaattattactgcaggagaaattaataacacctgaagaaaaaagtaaactgtacatattggtaaagaaggaaggcaatatatgatacgagctgttatctattgccggtgtagtacagaagaagaaagccagaaaaacgcc

SEQ ID NO: 13338 - DNA, 260 bp, Unknown
  Description of Unknown: LeftRegion for integrase B339 sequence
ttacaacgtccgcaattcagcgcaaatgtaaatgcggaaacaactgtgcgtatgcagttcttcaaaacctacaggtctacggaatgattcgagagattcggcaattcacatacgaatggacagaaaaagccctcctgctgggcgcagaagggcgtaacgggtaaacagatatgtcgatagatattaaatggcaggtgccaatggcacagccggaggcaaacgaactggccgtcgtatatgctcggtactcaagtcacagt

SEQ ID NO: 13339 - DNA, 260 bp, Unknown
  Description of Unknown: LeftRegion for integrase B340 sequence
tttgagggaggtcaataatgaatgaaattaaggtagataaaaatgtagcggctctgaaactcattgagatacttcttgaaaaaggaatgataaatcaagccacatatacaaatatcgtgaaacacgcaaattcgcacatttcacaggcggcttgataatcagtacaatatattcagaaaaatgaattggaggtatgcttaatgaacacagcagtaaatgaatataattacagatttaagctcacagattattctctgttt

SEQ ID NO: 13340 - DNA, 260 bp, Unknown
  Description of Unknown: LeftRegion for integrase B341 sequence
gccagtatccttatggaaatgctggagaacgggccggagaaagcatccgatatccatgcgatatttaagcaaaagaacataagcgaaagaactgcgaatatagcgaaaaaagcattaggaatacactctgtaaaaagagacggaatatggtactgggaattaccgaaagactaacattgcacataaagaggttatagttgatgtccaattattcgagcagagaagagttacggcaggtatatcagcgtgaggatcaaggc

SEQ ID NO: 13341 - DNA, 260 bp, Unknown
  Description of Unknown: LeftRegion for integrase B342 sequence
aagacaggtcttttgattgtgtgtagtgacccggcgcaaaagaaaatcgacagagcggatgccctgaatattccgatcgtttcggagcagcaatggtttgagctcatgccagaacttgaagccgttggaatgtggaacggaaagcgaatcctgttttcagacgacggcatctaccgtgttgaagtgggcggtgaaagctgatggccagaaaaaagaatattgctgctggcctcgatgccgtcatctatgcccggtactca

SEQ ID NO: 13342 - DNA, 260 bp, Unknown; identical to SEQ ID NO: 13339
  Description of Unknown: LeftRegion for integrase B343 sequence

SEQ ID NO: 13343 - DNA, 260 bp, Unknown; identical to SEQ ID NO: 13339
  Description of Unknown: LeftRegion for integrase B344 sequence

SEQ ID NO: 13344 - DNA, 260 bp, Unknown
  Description of Unknown: LeftRegion for integrase B345 sequence
ttgatggtgaaaacatcaatattcctgaattttgtcagactcttttattcttctttgaaaactgtgatgcacctggtcaactgcgcataatccaattagccatgaatgaatatgaccgaacacaaaaagaaaaaacaaatccaacgaaagactctgctatcggctaagatcatcgacctatctgaatggagaaagacgctatgaaaatcacgaaatttcccattgacctctccatgctgaccgaagaagagatagaccag

SEQ ID NO: 13345 - DNA, 260 bp, Unknown
  Description of Unknown: LeftRegion for integrase B346 sequence
aagaaatatgatccaaattacgttccatctaaaaagaaaattcgtgcaaccgtaccttccaaataattgttcttttcaaggagctccccgccgggtgctccttgttttataaacgcacaaacccctccagctgtttccagccggaggggtctgccccgtcgtcaaaaggtaaggataaaaaaacaagaaggtttctttccatgcgtcgcctgcccttacagcatagcacgctttttggatatgggcaagcaaaagccccg

SEQ ID NO: 13346 - DNA, 260 bp, Unknown
  Description of Unknown: LeftRegion for integrase B347 sequence
gatacacctcccgaatcagatactcttatggttgtcattgttgatgacgaagaaggatttgttaagaaaatcagcattgatgaagatactgtgacccttcgctcttttaacccacactatcctccccgtgtttttggcggtgttgaaattggacgattgcgctttgtcggtagagtcatggagctaaaaaggagatttgcatgaaaaaatttccaatcgacctttcctgtctggcagaggaagaaatctctcaatttcag

SEQ ID NO: 13347 - DNA, 260 bp, Unknown
  Description of Unknown: LeftRegion for integrase B348 sequence
ccatcttctccgcagaaaagacagggcgttttggaacgagttgaacctaaatgtgcaactctacttatataatggctctcagatatgatatttcggaaatgaatttaactttttgactgttgaaagtgtggaaagatttattttccccagaacttgcaacggcttgcaacaaacttaaaactacttgaaaggtggtatttatgcctcgcaaaaagaaactgcaagaggtaggcggactgcggctggtggcatactatcgc

SEQ ID NO: 13348 - DNA, 260 bp, Unknown
  Description of Unknown: LeftRegion for integrase B349 sequence
cgcacggatcattgtagagattctgaatgagcaggacacatacagcgcagatatacttaagaaactaaagtcaatgggcatttcggaaagaacgatacagacagtaaaaaaagaacttggcatcacttcctatcgtaaaaacggtgtgtggctttggcatcttcatgacggtgctgattcatcaagttgggagattaagaatgcataataacagccgtgaaaaactgagagaaatatatcagcgtgaagacaacagtcag

SEQ ID NO: 13349 - DNA, 260 bp, Unknown
  Description of Unknown: LeftRegion for integrase B350 sequence
aaaggagtgcgacatgaacaaagcgttattactggcgttgaacgaacacatataccttcagggactaattagcagggaaatgaaagaaaaaattgatattgagattctttctgaaaattaagccaaactattgagcggagatgagattgaaggtataataatcttatctctgctcttccgactagaagggagaacggggcatgaacgtttatcgcactagagaaatactgaaaacttgcagtattttcgatctgaaatta

SEQ ID NO: 13350 - DNA, 260 bp, Unknown
  Description of Unknown: LeftRegion for integrase B351 sequence
aaggagtgcgacatgaacaaagcgttattactggcgttgaacgaacacatataccttcagggactgatcagcagagaaatgaaagaaaaaattgatatggagattctttctgaaaattaaatcaaaactattgagcggagatgagattgacgttataataaccttatctctgctcttccaactagaagggagaacggggcatgaacgtttatcgcactagagaaatactgaaaacttgcagtattttcgatctgaaatta

SEQ ID NO: 13351 - DNA, 260 bp, Unknown
  Description of Unknown: LeftRegion for integrase B352 sequence
tgcatcgagtgaccccgattgggcgtacgtggacgagtatatgcgagacgtgatggaacgcgcgcaatccgatttgtccactatgcagtcaatcggctaagcgcaagtcaagcccgccgttccatctgggcggcgggcttatatccaaaggagcgaaccatgaaaatctataagcagaaattacagggggtggtaaacctatggcacgcaagaagaaattcgcgccgaacgacaacaacctcgcgatagcgtactatcgc

SEQ ID NO: 13352 - DNA, 260 bp, Unknown
  Description of Unknown: LeftRegion for integrase B353 sequence
tatcttattcttatccgagaaaatcaaatttaataaaagtgccgctgggcaacgtgctcttatgacaagcaagcttcgccagcatattaaagagcgcgatggattcacttgtcagctatgtggcgcttctgttgaacaggaacctcatttactacttgaaatcgaccacataaaaccgatttccaaaggcggtatgaccgttgaagataatttacaaactctttgttggcgctgtaaccgcagtaaaggctctaaatttt

SEQ ID NO: 13353 - DNA, 260 bp, Unknown
  Description of Unknown: LeftRegion for integrase B354 sequence
tgtacaacaagaagcaattatattagctgcttatcagtacataaaagatttatttgaagagggaaaaataacaaaacatgaacttaataaagtgaagaaaaagtacaatatagatattgaataaattgacatattaagttataataaataccatactaaggtacatctagtatggtatttattggtttaagaggtgtatcatgaaaagaaaaattgcaatatatgctagagtttctacggaacatgaagcgcagatatct

SEQ ID NO: 13354 - DNA, 153 bp, Unknown
  Description of Unknown: LeftRegion for integrase B355 sequence
ttaacgggcattgggtccgcttccagcacggtttttgcatgataatcatacaaatgtgttatgcttatacaaacaaaaactagaaggttgccaatgaaaaaagtctttgtgtatcatcgagttagttccgatcagcagctcgacgggtcaggc

SEQ ID NO: 13355 - DNA, 260 bp, Unknown; identical to SEQ ID NO: 13351
  Description of Unknown: LeftRegion for integrase B356 sequence

SEQ ID NO: 13356 - DNA, 260 bp, Unknown
  Description of Unknown: LeftRegion for integrase B357 sequence
gtcgtaaatatcggcggttctgttggcaacggcgtcacaaagaaaaccgactttctcgttgtcggctctacggattattgtgcctctgtaaagggcggcaaaactggcaagctgaaaaaagccgaggatttgcagaaaaagggcgcaaaccttgccattatcgacgagggtgctttttacgatatgttgggcgagtgattatggcacaacaaaaaaaggccgccggggccgagtttgacggtactccgcgggcggtaatt

SEQ ID NO: 13357 - DNA, 260 bp, Unknown
  Description of Unknown: LeftRegion for integrase B358 sequence
agagcagccacagcagtatcgccatctggtggacgagaaaaaatgcgcccagacagagcaccgctatggccccatcacagggaaattcgtcctctaccgtgggaaaagccaagtggtagagggcattcaatatcaaaatgtggaagaatacccgcgcacccttgtgtgacaaggatacgctatcgtaaggggggctgacaatggcaaaaaataaagactgtattgctgtgtattcccgaaagtcaaagtttaccggcaag

SEQ ID NO: 13358 - DNA, 260 bp, Unknown
  Description of Unknown: LeftRegion for integrase B359 sequence
ttttataatatgaaggaggtcaatcatgctagtctatacgatccgcaaaagtgatttgtatgcgcccggcattgaaccaacccgtgaagttctggacattgccagtgaaaatgagaatgtggactttgcccttgtccttgcaaagattctcagggaactgactgcccagaccgggaacataacttaaggagtgaaaacatatgacagtcgttgagcggttaagaagcaggggagtgaccccgagagcggttttgtatgcc

SEQ ID NO: 13359 - DNA, 260 bp, Unknown
  Description of Unknown: LeftRegion for integrase B360 sequence
cgcagaaattgagagcggctgtattgccgtggtcgtggtagacggcacagaaggatttttaaaacaggtcgagttcggtgaaaactccacctcgcttcactccttcaacccttactatcctgatatggagttcgtaggtgccgatcagaaacgcttgcactttatcggccgcgtccgggaaatgaagcggaggttctgatatgcgtaaaaagtttaatatcgacctctccatgctaaccccggaggaacagcagcaattt

SEQ ID NO: 13360 - DNA, 260 bp, Unknown
  Description of Unknown: LeftRegion for integrase B361 sequence
acataacatagaacggcaaagcattttagagtttttaaaaaattatactatattggtttatttgtgttattataagaaaattaaagagatagtaataataaatataaaaactctaaaagtgctaatagctaaaactatgctatgtggcacttttttgttgcctttctattcataaaaatttggaaggaggatatgtaaaaatgaacgaagaaaggaaagtagcaggaatttatattcgtgttagcacagaagatcaagta

SEQ ID NO: 13361 - DNA, 260 bp, Unknown
  Description of Unknown: LeftRegion for integrase B362 sequence
ttatttaacggacacgaatttgcttactacagagatttaaataccaaaattaaactatctgatttaaaagatttcattaaaaaactaaaataatgacaaaatctgtgctataatggttatagaaaatattaaacctattgggtgaagtagtatttatagcctaaatattgcttcacctttttttgttaaggaggattaaaatgtgtgaagaagaaataaagaatgctggtatttacattagggttagtaccgacgatcaa

SEQ ID NO: 13362 - DNA, 260 bp, Unknown
  Description of Unknown: LeftRegion for integrase B363 sequence
caatggtactgaaaaccacgaaaacaaccagcgtgatgacctcttgaataactttcaactggatcaagctgaacggaccaccattgtcgcggaaaccgatacggttggcaggaacctgaaaacaatattcacttaactaaatagacttgcccaagtgaaattttatacctatatttgcttcataatcaatatattacattatgataaaaattataggatacgcacgagtttctactacaaaacaagacttatctcgacaa

SEQ ID NO: 13363 - DNA, 260 bp, Unknown
  Description of Unknown: LeftRegion for integrase B364 sequence
tttaaatgttagacttcgtaaaattaactttaaaatgtcaaacaagtgagaggtgtcttttaaaatatctatattttagactacacttttcaagcttaaagtgccaaacatatgagaagcatatttaaattttttaaaattttagacttaacttttctcatttaagatgccaaacatatgaaaggagatatttaaaaaatatgaataaagaaaataaaatagcaggtatttacattagggtcagtacagaggatcaagct

SEQ ID NO: 13364 - DNA, 260 bp, Unknown; identical to SEQ ID NO: 13018
  Description of Unknown: LeftRegion for integrase B365 sequence

SEQ ID NO: 13365 - DNA, 260 bp, Unknown
  Description of Unknown: LeftRegion for integrase B366 sequence
gaaccgttgtaaacaccgtaaagattatcaaagtgattacttcctgaatcactttgagttgcatcaatgagaacgggcctccattgcctaaaaagcctatccgattggccggaacctgacaagaatactcacttaactaaatagacttgcccaagtgaaattttatacctatatttgcttcataatcaatatattacattatgataaaaattataggatacgcacgagtttctactacaaaacaagacttatctcgacaa

SEQ ID NO: 13366 - DNA, 260 bp, Unknown
  Description of Unknown: LeftRegion for integrase B367 sequence
tatgtttaataaaagaacttggcagggacaaaaacataccggaagaattagttagagcagtggaaataaaatatgataacgaatagttcaaaaagccaaggtgttttgcaccttggctttgtaaatattgaattaaccaggttatgatgctatactatgctaaaatctatatttgataacctggtggataggagtaaattatgaagagaaaagttgcaatatacgccagagtatcaacggagcatgaagcacagattaat

SEQ ID NO: 13367 - DNA, 260 bp, Unknown
  Description of Unknown: LeftRegion for integrase B368 sequence
attggtgttttggttgcgtgcagcaatccaatgcagaagaaaatcgatcaggccaaagctctaaatattccggtcatttcagaacagcagtggtttgagcttatgccagagctggaagcactcggaatgtggaacggaaagccaattccgtttgcagatgataatggaatttaccatattgatgtgggcggtgatggttgatggcccgaaaaaagaatattgctgcgggtcagaatgccgtcatttatgcccgctattcc

SEQ ID NO: 13368 - DNA, 260 bp, Unknown
  Description of Unknown: LeftRegion for integrase B369 sequence
gcgaatgacatgcccggtcgggtgctcatagaccattgcatcatcgacatacatcagaccgtgaatgtggtgttcattcagcatctcaatgagttgcagggctttaataacgggcattgggtccgcttccagcacggtttttgcatgataatcatacaaatgtgttatgattatacaaacaaatataaaattttacgataatgaaaaaagtttttgtatatcatcgtgttagctcagaccaacagttggatggatctggt

SEQ ID NO: 13369 - DNA, 260 bp, Unknown
  Description of Unknown: LeftRegion for integrase B370 sequence
caatcatggagaaaatggtaaacacggccagcgtaatcacttcctgaatcactttcagctgcatgatgtcaaacggtcccccactatctctgaaccccagacggttagccggaacctgcagacagtattcacttaactaaatagacttgcccaagtgaaattttatacctatatttgcttcataatcaatatattacattatgataaaaattataggatacgcacgagtttctactacaaaacaagacttatctcgacaa

SEQ ID NO: 13370 - DNA, 260 bp, Unknown; identical to SEQ ID NO: 13361
  Description of Unknown: LeftRegion for integrase B371 sequence

SEQ ID NO: 13371 - DNA, 260 bp, Unknown
  Description of Unknown: LeftRegion for integrase B372 sequence
acttactgggtcttagtgaagtcagaaaaccagaagtcttagttttgtcagaaaaagagaaaatcctcattgacgcataccgtactgctaatgacatgggacagttgaacataatctatgtctgcatggacgaaatgaaaaaagcaaaaggagaaggcgtacttgtagggtaattgatttcatagaatggaggaagaaccatgtatgaggatataaaaacagcctgcctatacgttagattctcaagccataaccagact

SEQ ID NO: 13372 - DNA, 260 bp, Unknown
  Description of Unknown: LeftRegion for integrase B373 sequence
ccggtctgcatttttattgtagcatgatccccctcagaacacaatccgacaaaaaagaatccccggcagctctgtacgatagagccgccggggccagatggggaatctgtctgtcggagaataatcataggataagaaaacacctgctgagtaatttcattgtaccatgatcctgctcagcgcacaagctgaggaaaaccatgaaaaagaaattttcttctgtacccgatccagatattcaggacgcggtgatctatgca

SEQ ID NO: 13373 - DNA, 260 bp, Unknown
  Description of Unknown: LeftRegion for integrase B374 sequence
aaaatcagagcttttattttggaaatagaaaatagtacctatatagtaataaacgataaactttcggaggaagaaaaaaacaaagcatttcagacacgaaatgttacattataagttaggacatctcaataattatgatgtcaataaaattaaagaatatgaaaaagaagttgataagcttatgaatgaggaggtgtaagatgtatataacagtaactttagatcctaacggaatatatgacgcatatttaagaaaatca

SEQ ID NO: 13374 - DNA, 260 bp, Unknown
  Description of Unknown: LeftRegion for integrase B375 sequence
ggtctgcatttttattgtagcatgatccccctcagaacacaatccgacaaaaaaaaatccccggcagctctgtacgatagagccgccggggccagatggggaatctgtctgtcggagaataatcataggataagaaaacacgcctgctgagcaatttcattgtaccatgatcctgctcagcgcacaagctgaggaaaaccatgaaaaagaaattttcttctgtacccgatccggatattcaggacgcggtgatctatgca

SEQ ID NO: 13375 - DNA, 260 bp, Unknown
  Description of Unknown: LeftRegion for integrase B376 sequence
aaaatttcttcataaaaaatatagccacagctgggcagaccatgttaatataaaaatgtaactgttccaaactgactttgcattatggatttttccctaacgcactttccaaaggtttgattttagtatctgacttttcggagcagttcttataaaataaatatatatggttgagccggttgtgtgaaaggagattttaaatgaaacaatcggacaacacaaaaataacagccctttatgagcggctttcacgtgatgat

SEQ ID NO: 13376 - DNA, 260 bp, Unknown
  Description of Unknown: LeftRegion for integrase B377 sequence
aaaattagagcttttattttggaaatagaaaatagtacctatatagtaataaacgataaactttcggaggaagaaaaaaacaaagcatttcagacacgaaatgttacattataaattaggacatctcgataattatgatgtcaataaaattaaagaatatgaaaaagaagttgataagcttatgaatgaggaggtgtaagatgtatataacagtaactttagatcctaacggaatatatgacgcatatttaagaaaatca

SEQ ID NO: 13377 - DNA, 260 bp, Unknown
  Description of Unknown: LeftRegion for integrase B378 sequence
ttctctcgctttggaagacaataccaccatctacaaagatcccgaatctaaaatagagataccgaacataaaagttgtgtccgtggtggatgaaatccgtggtttgaagcagctgctggatgagggaatcctgacagaagaagaatttgctgcaaagaaaaagcagcttcttgggatttgaaaacggacggtgatggttgatggctcgaaaaaagaatatcgctgcgggtcaggatgccgtcatctatgcccgctactcc

SEQ ID NO: 13378 - DNA, 260 bp, Unknown
  Description of Unknown: LeftRegion for integrase B379 sequence
ttgatacgttatagcattcagcttgcttttttgaagcagctgttagaaagaaagctcataaccgatagagagtattcccttatcaagcagcgcttaatgaaagattatcgtgtggtttccgaactatcctcttgattttgtgttgcattggcgttatgattaacgcaatgaaaggaacacattcaacaaggaggtcaagcatgaaagatgttgaagtcattaaagcgcgaaacacgctctctccacgagcgcgcacaaac

SEQ ID NO: 13379 - DNA, 260 bp, Unknown
  Description of Unknown: LeftRegion for integrase B380 sequence
atttccttatccttggtaatagcgattatctcgcatcttctgaaggtgaaaaaagctcaaagcagaagaaagccgaaaagctcaagttgtctggcattgatattgaaatcattcccgaaaatgtcttttatgatatgcttgaatcctacttcgatagtcaaaacaatcaataacaagaatgtttgagggctctgcacgctatggcaaagagaacatccgttgaaaactcaataatcaccggtgtaatatacgcgcggtat

SEQ ID NO: 13380 - DNA, 260 bp, Unknown
  Description of Unknown: LeftRegion for integrase B381 sequence
ttagagcatttatattagaattagacaataatatctatattgttgttaatgaatcgttaagcgatattgagaaagaaaaagcctttcgaacacgagctgttacattataaattgggacatttaaaaaactatgatatatctaaaattagtgagtttgaaaaagaagtaaataaaattatgagagataaggaggtgtagtaatgcttaatatcattaaactagatccaaatggaatatatgacgcttatttaagaaaatct

SEQ ID NO: 13381 - DNA, 260 bp, Unknown; identical to SEQ ID NO: 13018
  Description of Unknown: LeftRegion for integrase B382 sequence

SEQ ID NO: 13382 - DNA, 260 bp, Unknown
  Description of Unknown: LeftRegion for integrase B383 sequence
cccgatgctcggctcgctcgatcttatcattgctggctttcacgagccggtgtttgcgccgcaggatgaagcggcccataccgaagcgatgatcgccacgatggccagcggctacgcccatatcattagtcatccgggcaacccaaagagaaattctacacattaatataacttattgatttgtatggaatatgtagaatatggctcagaaattatacagttatcagcgttggtcaagtgcggtacaggccgatggtaca

SEQ ID NO: 13383 - DNA, 260 bp, Unknown
  Description of Unknown: LeftRegion for integrase B384 sequence
gagaagtaaaaaggctgtatgaggcaaatagagggcttattcatgtgagagcatgggtaggctcttttttagtgcatgaaaataattatatagcccctgtataattttcccctaaaaaatgaggagggctgtgattatgtttattaaggctaagtagagccacaggataataaacaggatcataaaggaggatatacaggatgatagataattgtgtaagagcggtattctatgccagagtatccacacaggaggaggaa

SEQ ID NO: 13384 - DNA, 154 bp, Unknown
  Description of Unknown: LeftRegion for integrase B385 sequence
agcggcaacgtgcacattatcagccacccgggaaacccgaagagaaattctacacattaagataagctattgatatatatagaaggtgtagggtatggctcagaaactatacagttatcagcgttggtctagtgcggtacaggccgatggtaca

SEQ ID NO: 13385 - DNA, 260 bp, Unknown
  Description of Unknown: LeftRegion for integrase B386 sequence
ttacaatacttgaatacaaagttaatgaaatatcaaataagcctttttatattaaagagcataatcaaaagtataatattaaagaaattgcacaatttttgaaaaaattttaattttagactatacattttgcctatttgtgaggaaacatatgagaagtattttaatatttctcgaattttaatgaaaggaggaaaactatgagatgtggtgtttatgtaagagtatctactgacgaccaaagagataatggttattct

SEQ ID NO: 13386 - DNA, 260 bp, Unknown
  Description of Unknown: LeftRegion for integrase B387 sequence
aagaggtaaaagggctgtatgaggcaaatagagggcttattcatgtgagagcatgggtaggctcttttttagtgcatgaaaataattatatagcccctgtataattttcccctaaaaaatgaggagggctgtgattatgtttattaaggctaagtagagccacaggataataaacaggatcataaaggaggatatacaggatgatagataattgtgtaagagcggtattctatgccagagtatccacacaggaggagcaa

SEQ ID NO: 13387 - DNA, 260 bp, Unknown
  Description of Unknown: LeftRegion for integrase B388 sequence
aagcggtaaaagggctgtatgaggcaaatagagggcttattcatgtgagagcatgggtaggctcttttttagtgcatgaaaataattatatagcccctgtataattttcccctaaaaaatgaggagggctgtgattatgtttattaaggctaagtagagccacaggataataaacaggatcataaaggaggatatacaggatgatagataattgtgtaagagcggtattctatgccagagtatccacacaggaggagcaa

SEQ ID NO: 13388 - DNA, 260 bp, Unknown
  Description of Unknown: LeftRegion for integrase B389 sequence
aaggagtgcgacatgaacaaagcgttattactggcgttgaacgaacacatataccttcagggactgatcagcagagaaatgaaagaaaaaattgatatggagattctttctgaaaattaaatcaaaactattgagcggagatgagattgacgttataataaccttatctctgctcttccaactagaagggagaacggggcatgaacgtttatcgcactagagaaatactgaaaacttgcagtattttcgatatgaaatta

SEQ ID NO: 13389 - DNA, 260 bp, Unknown
  Description of Unknown: LeftRegion for integrase B390 sequence
tacgctcgctgcaacattgggagattggagaccgcaagccggctccgtttctgattttccttattcgcaaggtgtacgacctcgaacaggagaataaatacttgcaagagtgcatcgacacactcgaccgtcaaaacgatgagctgaaagcacttattaagtctcaggcaaatacacagtaataaccgaggtggattttcatgagtacaaataaagaattacgcgagggggtggccgacaaggcaaaaacctgcttcctg

SEQ ID NO: 13390 - DNA, 260 bp, Unknown
  Description of Unknown: LeftRegion for integrase B391 sequence
agggacaattaatggaaaaagctatattgtatgccataaacgaaagaatgttctcacttggtctgatagatgagaaaacaagagataaaattaaagctgaaatcagcattagaaagtaacgacaatgtattgagtggatttatatgaggtgttatactttatatgattccactccctgtttattaagggagaaatgcactatgaatatttattatgtcagagaaaaattaagaaattgctctatttacgacattgaacta

SEQ ID NO: 13391 - DNA, 260 bp, Unknown
  Description of Unknown: LeftRegion for integrase B392 sequence
cagtacgacaaactgaacgcaaacgagggatgctccattctggtggctgtcgttctcggcgttatcctcgcagtgatttggtttttcggtcattaaatgcaaattttgatgatttttgtatctgatttggctttttaagcacaaaatcaaagccttaattgcaaatttgaggctattttcgttaaatagggggtgatagtttgagttcagttgaaacaaccgccgttgtttacgcacggtattcatcccacggccagacc

SEQ ID NO: 13392 - DNA, 260 bp, Unknown
  Description of Unknown: LeftRegion for integrase B393 sequence
gccgccgctgccgagcggtatgccggcctgaacgatccaacgccggcccacaggctggcactgctgcggcagaagctggagctggaaccggagaacgaagaaaccctgtgggaactttttgagtcggcagtaacccatgtgtgcatcggcaaaggcggagagatcagcctatcccaaaaagatcaaaaggagtgtgcctcatgaacatacagaaaaccgcccccacccccaaactggtcactatgattccggctgaccct

SEQ ID NO: 13393 - DNA, 260 bp, Unknown
  Description of Unknown: LeftRegion for integrase B394 sequence
aatatgacatcatcaacacccgatatgtcgtcgagggcagatttgccgaggcgacgctgacagacaaggacaagaccctttccgacgcgatggaggacattatcagcgacgaatttacagatttgaccgcaaagaaggaagagcctaaaatgaaaccgaaacccgtgcgttcgactgccggaaaggagagataatttattatgcagtcggataaaaagcaaaaacaattaaccggaattaccgctctgtattgccgtctc

SEQ ID NO: 13394 - DNA, 260 bp, Unknown
  Description of Unknown: LeftRegion for integrase B395 sequence
aatcaataatatagaaaaatatgaattatcattttttaagatagcaatgcaattaagagcaattaattatttggaagaaaagaatgcattaaatgaaaaaatttgcaaatgtgcaaaagcaaaaattaaagaaaatttacagctttgtactattacaccaaaacctttagaattttacaaagaaaggttaggtggtaaatgtggagataattaaaataccgaaaaaagaaggaataattgatagaacaacaggaaaagtg

SEQ ID NO: 13395 - DNA, 260 bp, Unknown
  Description of Unknown: LeftRegion for integrase B396 sequence
ttgtcagcgtttcggtagatttttccgtttttcagcaaaataaaaacgcccacggtgttaccagcaacgcaggcgtttcagatcagcttactcagagagatggtacagggataaaacctgtccagagcaatagcagacctcgcagatgttattgtaccacctccgggcaggcttgtcaaagtgtacccggaggtatttttatgggcaaaaaacaaaaggcaaccggcggcaatgcggtcatctacgcccgctattcttcc

SEQ ID NO: 13396 - DNA, 260 bp, Unknown
  Description of Unknown: LeftRegion for integrase B397 sequence
ggctactggctgtaaaatgctggtagccctcattttttagttgtatctagtatataaggggtgtataatagataggaactgaaaacagcctcataaagccctatattttatcgagggtaaagaagtctacacctaatatataaaagtggttgtatgaggcacacaggagctcacaggactattacaggagggtaaacaggatggcatataggaaaataacggatataagagatactattggtatgagagcggtattttat

SEQ ID NO: 13397 - DNA, 260 bp, Unknown
  Description of Unknown: LeftRegion for integrase B398 sequence
ggccgatgttaacctcgcttgatctgatcattgccggattccatgagccggtgttcccgccgcaggatcgtgatacccatacgcaggcgatgattgccgcgatggccagcggtaaggtgcatatgattagccatccgggtaatcctaaacgaatttctacacattaaaataagttattgtttttcaaggaaaatgtgtagatgaagcagaaattgtactcctatcagcgttggtctagtgcggttcagtcagacggtact

SEQ ID NO: 13398 - DNA, 260 bp, Unknown
  Description of Unknown: LeftRegion for integrase B399 sequence
caattccgccctctgccgtgccggtgagggcggttcttttactctggttctggtgccggtactgtttatggttatggtgctggttatggtactggttatggttacgagggattttccaccgacctttcgcgtgactgtcacgcattttctgagcggactgtccgctggatggtcgcaaaattattgccggagggtttgatatgccgaagaagagagggagcaacgaggagtttttgaatccgggggcgaggcggttccgg

SEQ ID NO: 13399 - DNA, 260 bp, Unknown
  Description of Unknown: LeftRegion for integrase B400 sequence
agactatacattttgcttatttgtgaggaaacatatagagaaatatattaaatttaacttcgtaaaactcactttaattgagaaaattaataagaaatattaaaaaatttcaatttagtgtctgatattttgtgtttgagtgaggaaacatatgagaagtattttaatatttctcgaaatttaatgaaaggaggaaaaatatgagatgtggtatttatgtaagagtatctactgacgaccaaagagataatggttattct

SEQ ID NO: 13400 - DNA, 260 bp, Unknown
  Description of Unknown: LeftRegion for integrase B401 sequence
ttttagaatccgcgaactcagagcgtgaggaactagtcttagaactccaacggcttctttcgtgctatcaaatggctacagcggatgataagaaggtggtttgggcagtcctcaacaaatacgccccctatatagaaagtatataaatccccttttttacatccaaatttaaggctttttttggcagggaggtctttgctttgcccaagatagcaataaaaaaggttgcgatttatattcgagtttctaccgttcatcag

SEQ ID NO: 13401 - DNA, 260 bp, Unknown
  Description of Unknown: LeftRegion for integrase B402 sequence
tatactatacattttgcttatttgtgaggaaacaaatgagaagtatattaaatttaacttcgtgaaactcactctaattgagaaaattaataagaaatattaaaaattttaaatttggtgtctgatattttgcgtttgagtgaggaaacatatgagaagtattttaatatttctcgaaatttagtgaaaggaggaaaactatgagatgtggtatttatgtaagagtatctactgacgagcaaagagataatggttattct

SEQ ID NO: 13402 - DNA, 260 bp, Unknown
  Description of Unknown: LeftRegion for integrase B403 sequence
gatacacctcccgaaacagatactcttatggttgtcattgttgatgacgaagaaggatttgttaagaaaatcagtattgatgaagatactgtgacccttcgttcttttaacccacactatcctccccgtgtttttggcggtgttgaaattggacgattgcgctttgttggtagagtcatggagctaaaaaggagatttgcatgaaaaaatttccaatcgacctctcctgtctgacagaggaagaaatctctcaatttcag

SEQ ID NO: 13403 - DNA, 260 bp, Unknown
  Description of Unknown: LeftRegion for integrase B404 sequence
ccttgcggtctgcgtcgtgtcgctcccggtcggcttgatcattgtggccattggagcgtaccgggtggcaaaggccggggatatttatgacgctgcggtcgctcggtacgagcagcaaatctcggactatgttgactggctggatgaagtcaacgcaaaataaaaagccgccctcggtgggtggcgggaggttgctctgaatgtgtgcaaaaaagaaaccggccatgcttgagccggatatgcaggatgccgtgatctac

SEQ ID NO: 13404 - DNA, 260 bp, Unknown
  Description of Unknown: LeftRegion for integrase B405 sequence
gatacaccccctgaaacagatactcttatggttgttattgttgatgacgaagaaggatttgttaagaaaatcagcattgatgaagatactgtgacccttcgctcttttaatccacactatcctccccgtgtttttggcggtgttgaaattggacgattgcgctttgtcggtagagtcatggagttaaaaaggagatttgcatgaaaaaatttccaatcgacctctcctgtttaacagaggaagaaatctctcaatttcag

SEQ ID NO: 13405 - DNA, 260 bp, Unknown
  Description of Unknown: LeftRegion for integrase B406 sequence
agaacatgaagaagaacttaaaggacaaatgaatatatatgattttgtgaaatagaggtgggaatatgatgaacaaagcaattatgctgataatcaataaaaaaatgtacgaatccggtctgattacgcaggaagtgtacaataaaattatcatgcagataaataaatgttaaaaatgtgttgagcgagattgtttgaagatgtataatacaaatgatttcgctccttttgaaagggagaatattatgaatatctatcat

SEQ ID NO: 13406 - DNA, 260 bp, Unknown
  Description of Unknown: LeftRegion for integrase B407 sequence
attttagaatccgcgaactcagagcgtgaggaactagtcttagagctccaacggcttctttcgtgctatcaaatggctacagcggatgataagaaggtggtttgggcagtcctcaacaaatacgccccctatatagaaagtatataaatccccttttttacatccaaatttaaggcttttttggcagggaggtctttgctttgcccaagatagcaataaaaaaggttgcgatttatattcgagtttctaccgttcatcag

SEQ ID NO: 13407 - DNA, 260 bp, Unknown
  Description of Unknown: LeftRegion for integrase B408 sequence
attttagaatccgcgaactcagagcgtgaggaactagtcttagagctccaacggcttctttcgtgctatcaaatggctacagcagatgataagaaggtggtttgggcagtcctcaacaaatacgccccctatatagaaagtatataaatccccttttttacatccaaatttaaggcttttttggcagggaggtctttgctttgcccaagatagcaataaaaaaggttgcgatttatattcgagtttctaccgttcatcag

SEQ ID NO: 13408 - DNA, 260 bp, Unknown
  Description of Unknown: LeftRegion for integrase B409 sequence
agaacatgaagaagaacttaaaggacaaatgaatatatatgattttgtgaaatagaggtgggaatatgatgaacaaagcaattatgctgataatcaataaaaaaatgtacgaatccggtctgattacgcaggaagtgtacaataaaattatcatgcagataaataaatgttaaaaatgtgttgagcgagattgtttgaagatgtataatacaaatgatctcgctccttttgaaagggagaatattatgaatatctatcat

SEQ ID NO: 13409 - DNA, 260 bp, Unknown; identical to SEQ ID NO: 13408
  Description of Unknown: LeftRegion for integrase B410 sequence

SEQ ID NO: 13410 - DNA, 260 bp, Unknown; identical to SEQ ID NO: 13406
  Description of Unknown: LeftRegion for integrase B411 sequence

SEQ ID NO: 13411 - DNA, 260 bp, Unknown
  Description of Unknown: LeftRegion for integrase B412 sequence
attttagaatccgcgaactcagagcgtgaggaactagtcttagagctccaacggcttctttcgtgctatcaaatggctacagcggatgataagaaggtgatttgggcagtcctcaacaaatacgccccctatatagaaagtatataaatccccttttttacatccaaatttaaggcttttttggcagggaggtctttgctttgcccaagatagcaataaaaaaggttgcgatttatattcgagtttctaccgttcatcag

SEQ ID NO: 13412 - DNA, 260 bp, Unknown
  Description of Unknown: LeftRegion for integrase B413 sequence
attatctattctgtttatctgattcaccttgcccgaaagtagagatttccctaacggaagaagagcaattactgcttgacgcatttcgttccgctaccccacaaggcagattcaacattattaccacctgtatgtgtgagaagcgaaaaggggacaacgaaagtgtcgggtaattgatttcatagaatggaggaagaaccatgtatgaggatataaaaacagcctgcctatacgttagattctcaagccataaccagact

SEQ ID NO: 13413 - DNA, 260 bp, Unknown
  Description of Unknown: LeftRegion for integrase B414 sequence
caaacgcaacaggaacagttcattatccggcgcatcggcggcaccacctataaggtaagggtcgcattcagcgagacggcagcggagaccatggaggaaaagattctgcggatgatccgcaatgaaggggttacaaatgacggtacttgtggtataatggaggtgccacaaatgagccgtcagtctgaaaggagcgcatcatgagcgtgaaacagactgaggaaaaaatcacggcgttgtatgaacgcctgtcccgtgac

SEQ ID NO: 13414 - DNA, 260 bp, Unknown
  Description of Unknown: LeftRegion for integrase B415 sequence
tattctgtttatctgattcaccttacccgaaagtagagatttccctaactgaaaaagagaaaatccttattgacgcataccgtgctgccgatgacatgggacagttgaacataatctatgtctgcctggatgaaatgaaaaaagcaaaaggagacaacgaaagtgccgtgtgattgattttgtagagtggaggaagaaccatgtatgaggatataaaaacagcctgcctatacgttagattctcaagccataaccagact

SEQ ID NO: 13415 - DNA, 260 bp, Unknown; identical to SEQ ID NO: 13309
  Description of Unknown: LeftRegion for integrase B416 sequence

SEQ ID NO: 13416 - DNA, 260 bp, Unknown
  Description of Unknown: LeftRegion for integrase B417 sequence
ttcttttaggtctaagtgaacttagaaaaccgcagacttgtacactttctgaggaagaacgtcttttattggaagcctaccgttcagccagcacccagggacgtttccatatcattcaggtttgcatgaacgaaaaaacaaccgcacccaaaggggaggtaattgccgggtgattgacttagcagaatggaggaaaaaccatgtttgaggatgtaaaaacagcctgcctttacgtcagattttccagccataatcagacg

SEQ ID NO: 13417 - DNA, 260 bp, Unknown
  Description of Unknown: LeftRegion for integrase B418 sequence
ccgagtacgtgttcttgaacccggtcggtaaggatggacatccgagttgggagcgactgtgcatcttgatggaggcggcgataaagcgcgagtatgcgattgagtttgcgaccaatgcgggatatttcgacgatgcgccgtttaaggtgaggtgacatgggcgtttccgcatgtagagaattacgggagggggtgaacctatggcacgaaaaaatcccaaaacgctagatgccgcccgcctactctcctgcgtcctgtac

SEQ ID NO: 13418 - DNA, 260 bp, Unknown
  Description of Unknown: LeftRegion for integrase B419 sequence
ctcctgatgttttcagcattgatgcaactgcactaaagctgatctccattttatttgacaacaacctgatctctgctgaggtctatcatcaggtccttagcagatattctgcgtaatgtcaaggatgtcgctgacaccggcgacatcctacctattcccttcgcaatcttctatactacgggcaaaggaggtacagcgatatgaacatcacacaaagaatgtactttgggcaattcccattggacaaagaccgtgaccgc

SEQ ID NO: 13419 - DNA, 260 bp, Unknown
  Description of Unknown: LeftRegion for integrase B420 sequence
aacagtgcggcagacttatgcggtatagcatgcagttgattatgttgcaaaaattattgcgttacaagttgttgagcgaaagagagtatatcgctgttaaagaaaggctggtgaaagattacgggattgtttccgactttacagcttagaaaacttgaccgtataaaaatataatggctgcacagcaaaggagtaagaacatggaaatttctggtactaacaaactaatattgcccaaagatattattttggcagacaga

SEQ ID NO: 13420 - DNA, 260 bp, Unknown
  Description of Unknown: LeftRegion for integrase B421 sequence
acaggtcttttgattgtgtgtagtgacccggcgcaaaagaaaattgacagagccgatgccttgaatattccaatcatttcagagcagcaatggtatgaactcatgccagaacttgaagccgttggaacgtggaacggaaagcaaattctgtttgcggacaatgatggcatctaccgtgttgaagtggacggtgaaagctgatggccagaaaaaagaatattgctgctggcctcgatgccgtcatctatgcccggtactca

SEQ ID NO: 13421 - DNA, 260 bp, Unknown
  Description of Unknown: LeftRegion for integrase B422 sequence
attggtgttttggttgcgtgcagcaatccaatgcagaagaaaatcgatcaggccaaagctctaaatattccggtcatttcagaacagcagtggtttgagcttatgccagagctggaagcactcggaatgtggaacggaaagccaattccgtttgcagatgataatggaatttaccatattgatgtgggcggtgatggttgatggcccgaaaaaagaatattgctgctggcctcgatgccgtcatctatgcccggtactcg

SEQ ID NO: 13422 - DNA, 260 bp, Unknown
  Description of Unknown: LeftRegion for integrase B423 sequence
aaacgattatgttaccgggtacgagtcgcggcaggcttccgcatccgctgcacaagcagtcccatctaacacagttgtttcagttgtggatgaaattcgcggcttgaagcagctgttggacgagggtattttgacggaagcagaatttacagcaaagaaaaagcagcttcttggaatttgaaagtgaacggtgatggttgatggccagaaaaaagaatatcgctgctggcctcgatgccgtcatctatgcccggtactcg

SEQ ID NO: 13423 - DNA, 260 bp, Unknown
  Description of Unknown: LeftRegion for integrase B424 sequence
atttctggcgtggactaatcatcttttctctaagggaatgataacagcggataaacaccgccagatgatatcagagattcagcaactcaagaagtaaataaaaaataccacgaagatgtcagtagatttacttgacatcttcgctttggtatggtatcattatcttgttagcaatgcgtcgcaatttcaaggaggcagaaatggatatatataatgtagcgaaccaaatgaagttagagcgtaagactatctttgattta

SEQ ID NO: 13424 - DNA, 260 bp, Unknown
  Description of Unknown: LeftRegion for integrase B425 sequence
tcggaaaatgtcattgaattaaacttcataaaaaaataaaacgccccacggcggcaaccgcgaagcgttttatatagatgttacccgtcaacccgtaggggctgcgctatggtaaaaactaccaagaattattatagcataggcccccacaatttgaaagggcttatttttttacgcccttttttcaaggtggtgtttttatggcttatgccgctatgagaaaagccggactggtaccggaagcggcgcccgatcttcgg

SEQ ID NO: 13425 - DNA, 260 bp, Unknown; identical to SEQ ID NO: 13032
  Description of Unknown: LeftRegion for integrase B426 sequence

SEQ ID NO: 13426 - DNA, 260 bp, Unknown
  Description of Unknown: LeftRegion for integrase B427 sequence
tgatgaatctattaacttatcaatcctatttgatttactaaatttaaacttaataactgaaaaacagttttatatactaaaagaaaaaattaaatgtttttactaaaatatcatgtaaataaattttaaaataagatataatgtttgtagaacgaagcagtagttcaaaatgaaattgaaataaagaaagtgaggtataaatggcacaagttgagattatagctgctaatctcaaagaaaaaaataataatattactatt

SEQ ID NO: 13427 - DNA, 260 bp, Unknown
  Description of Unknown: LeftRegion for integrase B428 sequence
ttctcccttgcaaatcagtagtgatgtcattgccgtgaaactggttgctgttctctaccgtgagggtcttatcaatcacacggtttaccgtcaggtcacagcacaatattccgcacttgtcaagcctgtcaagcaataaaacgacagcctaccatcgtttttcaacttcctatatactgcgaggaaaggaggtaacgcaaatgcagacaacacaacaacagctatatttcgggtctatgaatttagaccgcaaccgtgac

SEQ ID NO: 13428 - DNA, 260 bp, Unknown; identical to SEQ ID NO: 13402
  Description of Unknown: LeftRegion for integrase B429 sequence

SEQ ID NO: 13429 - DNA, 260 bp, Unknown
  Description of Unknown: LeftRegion for integrase B430 sequence
attacaaactcattgagggctattggaacgagctgttcgagcaggccaacagaacgggcttcaaggtcgtggtgcgcgatttcgaaaaagagaacagcatgaaagaggcattgaaagcagaaaggcaacgttggctagacaacgttgagtaggtgacgcgaaatgttgtcacgtagagaattacgggagggggtgaacctatggcacgaaaaaatcccaagacgttagatgccgcccatccactctcctgcgtcctgtac

SEQ ID NO: 13430 - DNA, 260 bp, Unknown
  Description of Unknown: LeftRegion for integrase B431 sequence
tattctgtttatctgattcaccttacccgaaagtagagatttccctaacggaaaaagagaaaatccttattgacgcataccgtactgctgatgacatgggacagttgaacataatctatgtctgcctggatgaaatgaaaaaagcaaaaggaaacaacgaaagtgccgtgtgattgattttgtagagtggaggaagaaccatgtatgaggatataaaaacagcctgcctatacgttagattctcaagccataaccagact

SEQ ID NO: 13431 - DNA, 260 bp, Unknown
  Description of Unknown: LeftRegion for integrase B432 sequence
aagaggtaaaagggctgtaagaggcaaatagagggcttattcatgtgagagcatgggtaggctcttttttagtgcatgaaaataattatatagcccctgtataattttcccctaaaaaatgaggagggctgtgattatgtttattaaggctaagtagagccataggataataaacaggatcataaaggaggatatacaggatgatagataattgtgtaagagcggtattctatgccagagtatccacacaggaggagcaa

SEQ ID NO: 13432 - DNA, 260 bp, Unknown
  Description of Unknown: LeftRegion for integrase B433 sequence
tacgaggaaatggacgaccctgcaaagatgctgcgtgagtatttcaaccgcgtgtacgacggggtgtgcgatgaggagacggaaggttacttgtacaacctggagcaagcagccgaagccgctgggttcgaggtcgtggagaaggactttggagaagcgtaggaggcattgaaggcaatgaatacatataagcagaaattatgggagggggtaagagcttggcacgcaagaagaagttcgagctgaacgacaacaacatc

SEQ ID NO: 13433 - DNA, 260 bp, Unknown
  Description of Unknown: LeftRegion for integrase B434 sequence
cgtgaaaaactttatcaggccaccatgaatgtctttgatggcatgctgaaaaagggcctgatcaccgaggagcaatacgccataattgatacaaaaatgctggaaaaatacaggccattattgggtacattatttcgccaaattgacttgatataattcgcttttagagtgatatatagtagcggaaaggagctgattttatgcgaaaaatcaacaaaatcgagccgttgatgccgaccttgccaagccgcaaaaaggtc

SEQ ID NO: 13434 - DNA, 260 bp, Unknown
  Description of Unknown: LeftRegion for integrase B435 sequence
catttacaaagatgacgaggctgccgtcgatggcagcctagctgagtgcgcaataaagcacggtcttttactgtcacgatatacggggacaaaaatgattttggagttggttgactatctatctccgcaagagcagaagcgattccgcgcagatttgaaaaccatccgaaaagccaagaaagaacaagggggtgcgaatattggcacgaaccgcgaccaaacacccggcaaagccgaagcgcggtaagaaactcgaagcg

SEQ ID NO: 13435 - DNA, 260 bp, Unknown
  Description of Unknown: LeftRegion for integrase B436 sequence
gttatgatattttccgtgacaaagagggcgtattcgttattccatacggagcgcagcaggtaaaacagcccgatgggcaatatgtttatgattttccgaacgatgaagtaaccgatatgctgaataagcatcattgcaatagatgtgctggcggttatgttacaaaggcgcgcgagtaagcccgaaaggagcgtgacggcatgaaaaagcgaatcaacactaattccgcagcccgtgccgtcatctacgctcggtactcc

SEQ ID NO: 13436 - DNA, 260 bp, Unknown
  Description of Unknown: LeftRegion for integrase B437 sequence
aagaggtaaaagggctgtatgaggcaaatagagggcttattcatgtgagagcgtgggtaggctcttttttagtgcgtaaaaataattatatagcccctgtataatttttccctaaaaaatgaggagggctgtgattatgtttattaaggctaagtagagacacaggataataaacaggatcataaaggaggatatacaggatgatagataattgtgcaagagctgtattttatgccagagtatccacacaggaggaggaa

SEQ ID NO: 13437 - DNA, 260 bp, Unknown
  Description of Unknown: LeftRegion for integrase B438 sequence
agtgtaagggtaaagaggtaaaagggctgtatgaggcaaatagagggcttattcatgtgagagcatgggtaggctcttttttagtgcatgaaaataattatatagcccctgtataattttcccctaaaaaatgaggagggctgtgattatgtttattaaggctaagtagagccacaggatcataaaggaggatatacaggatgatagataattgtgtaagagcggtattctatgccagagtatccacacaggaggaggaa

SEQ ID NO: 13438 - DNA, 260 bp, Unknown
  Description of Unknown: LeftRegion for integrase B439 sequence
aaacgaaaagctctatcagaccaccatgcaccttgccaggaagatgctcgaagagggcattatttctgaggaggagtatcgtcagattgatacaattttccttgagaaatataagcctgttttcggcacattattctcggatatatcgttgacttccggggcgtaaagagtgatgtatagtgtcggaaaggagtgatttcatggcaaaaatcacaagggtcgaacaggcagtgccgaccataaaaacgaagaagaaagtc

SEQ ID NO: 13439 - DNA, 260 bp, Unknown
  Description of Unknown: LeftRegion for integrase B440 sequence
attatctattctgtttatctgattcaccttgcccgaaagtagagatttccctaacagaagaagagcaattactgcttgacgcatttcgttccgctaccccacaaggtagattcaacatcattaccacctgtatgtgtgagaagcgaaaaggggacaacgaaagtgtcgggtaattgatttcatagaatggaggaagaaccatgtatgaggatataaaaacagcctgcctatacgttagattctcaagccataaccagact

SEQ ID NO: 13440 - DNA, 260 bp, Unknown
  Description of Unknown: LeftRegion for integrase B441 sequence
accggtcttttaatcgtgtgcagtgacccgatgcaaaagaaaatcgacagagctgccgccctaaacattccaatcatttcagaacagcaatggtttgaacttatgccggaactagaagccctcggaatgtggaatggaaagcctattccgtttgcggatgacaatggcatctaccgttttgatgtgggtggtgttggataatggcaaaaaagaagaagcccgccgggggcaacgccatcatctatgcccgctactcgtcc

SEQ ID NO: 13441 - DNA, 260 bp, Unknown
  Description of Unknown: LeftRegion for integrase B442 sequence
tctggtgatagcgattttgttccagccgcgaaattggctcggagagaaggaatcgattttattctcgatccaatgtgggcagatatcaaggctgatttgtttgaacacatcgacggccttaatagtcaatggaaaaagaaagaaagccaataagggatatttcggtataaggtgccgggttttttaggagggctgaaagagtggaagaacttgatacgcgcccggtagccgatattctggcccggtactcaacagacaat

SEQ ID NO: 13442 - DNA, 260 bp, Unknown
  Description of Unknown: LeftRegion for integrase B443 sequence
gacacacctcctgaaacagatactcttatggttgtcattgttgatgacgaagaaggatttgttaagaaaatcagcattgatgaagatactgtgacccttcgctcttttaatccacactatcctccccgtgtttttggcggtgttgaaattggacgattgcgctttgtcggtagagtcatggagttaaaaaggagatttgcatgaaaaaatttccaatcgacctctcctgtctgacagaggaagaaatctctcaatttcaa

SEQ ID NO: 13443 - DNA, 260 bp, Unknown
  Description of Unknown: LeftRegion for integrase B444 sequence
aactcactatttatgagtacaaagttaatgaaatatctaataagcaattttatataaaagaacataatgaaaaatacacattgcaagaaatatgtaaaattttaaaaaaattataattttagactttactttttgcttataaagtgccaaacaagtgagaggataacttctctcaaatataaaagaatggagatgattttgtgagatgtggagtttatgttagagtttcgactgatgatcaaaaagataatggatattct

SEQ ID NO: 13444 - DNA, 260 bp, Unknown
  Description of Unknown: LeftRegion for integrase B445 sequence
tacttactatttatgaatacaaagttaatgaaatatctaataaacaattttatgtaaaagaacataatgaaaaatatacattgcatgaaatatgtaaagttttaaagaaattataattttacacttaactttttacttaaaaagtgccaaacaagtgagaggataacttctctcaaatataaaagaaaggagatgattttgtgagatgtggagtttatgttagagtttcaactgatgatcaaaaagataatggatattct

SEQ ID NO: 13445 - DNA, 260 bp, Unknown
  Description of Unknown: LeftRegion for integrase B446 sequence
tgcgaacatttcggcataccgatgcgctccctgcagcactgggagattggcgacaggaagcccgcaccgttcgtcatcggcctcatgcgcaaatgctacgagcttgagcgcgagaacgagcgcctgcgcgactgcatcgacacgctcgaccgtcagaacgacgagctgaaggcactcctcaaaggcgagggggtggttcaatgacgagaaaggcaaagacctgtttcatctatgtccgcgtctcaacgaagatgcaggtg

SEQ ID NO: 13446 - DNA, 260 bp, Unknown; identical to SEQ ID NO: 13005
  Description of Unknown: LeftRegion for integrase B447 sequence

SEQ ID NO: 13447 - DNA, 260 bp, Unknown; identical to SEQ ID NO: 13002
  Description of Unknown: LeftRegion for integrase B448 sequence

SEQ ID NO: 13448 - DNA, 260 bp, Unknown
  Description of Unknown: LeftRegion for integrase B449 sequence
cgatatgctctaccatgcagcgatttcaatggcgaaatccatgctcgaaaagggcttgatcaccgatgaggaatacgctgaaattgatacaattctgctcgaaaaataccgaccatatttgggtacattattatccgaaaacgcttgatattcctgtcttttagagtgatatatagacactaccggaaggagggatatcattgaaaacagtagagaaaatcgagcgaaaactgccggttctgaaaacaagaaagcgagtc

SEQ ID NO: 13449 - DNA, 260 bp, Unknown
  Description of Unknown: LeftRegion for integrase B450 sequence
aaataacaggaggtttttatgaacagaaagattactattcaaccacaagcacctctggttccaaaacaggatgcttttgtcctggaacttcaacgtctccttgcctgttaccaattggcagatcagagagacagggaaattgtgtggtctgtactcaacaaatatgtaccacatatcgtttaaaattaaaggacagccccatgcaggggctttctttatgcatttgggagaacattatggcaagaagaaaaaccgcttta

SEQ ID NO: 13450 - DNA, 260 bp, Unknown
  Description of Unknown: LeftRegion for integrase B451 sequence
aagaggtaaaagggcggtatgaggcagatagagggcttattcatgtgagagtgtgggtaggctcttttttattgcgtgaaaataattatatagcccctgtataatttttccctaaaaaatgaggagagctgtgattatgtttattaaggctaagtagagccacaggataataagcaggatcataaaggaggatatacaggatgatagataattgtgcaagagccgtattttatgccagagtatccacacaggaggagcaa

SEQ ID NO: 13451 - DNA, 260 bp, Unknown; identical to SEQ ID NO: 13007
  Description of Unknown: LeftRegion for integrase B452 sequence

SEQ ID NO: 13452 - DNA, 260 bp, Unknown
  Description of Unknown: LeftRegion for integrase B453 sequence
tttgatggagcaaaataatgaacagaaatttgcacattatagtattcaatttgcatgtttgcagaagttaaagaaaaacggtttaattacggtagatgagtacgaagccataaaaaaacggcttatgagtgatttcaatgtcgtttcaaatcttgcggcttaatacttatcagtaaataaaatatcggaggtataatcgtatgaatgatgttcaagtaatcaaagcaaaccgtaacgaaaatcgtattcgtggtagaaag

SEQ ID NO: 13453 - DNA, 260 bp, Unknown
  Description of Unknown: LeftRegion for integrase B454 sequence
atacggattacacagtagcgcaaaagacaggcccgtctctgccagaggatgttaccactatgctttctgggcttgacagcgcggacctcgaaaaagttatgatctacgcccgcggtctgctggacggggacaagtatcagaaacgccgtccgcggtaaagcaggaagtgcttctggcaatgaaatagaaaggggcagacaatgagagtatccgtaaacttaaacgcacaaaagccggataccacgacaaacgccgtcatt

SEQ ID NO: 13454 - DNA, 260 bp, Unknown; identical to SEQ ID NO: 13132
  Description of Unknown: LeftRegion for integrase B455 sequence

SEQ ID NO: 13455 - DNA, 260 bp, Unknown
  Description of Unknown: LeftRegion for integrase B456 sequence
cgatatgctttatcacgcagctatttcaatggcgaaatccatgctcgaaaagggcttgatcaccgaggaggaatacgctgaaattgatacaatcctgctcgaaaaataccgaccatatttgggtacattattatcggaaaacgcttgatattccggccttttagagtgatatatagacactactggaaggaggaatttcattgaaaacagtagagaaaatcgagcgaaaactgccggttctgaaagcaagaaagcgagtc

SEQ ID NO: 13456 - DNA, 260 bp, Unknown; identical to SEQ ID NO: 13353
  Description of Unknown: LeftRegion for integrase B457 sequence

SEQ ID NO: 13457 - DNA, 260 bp, Unknown
  Description of Unknown: LeftRegion for integrase B458 sequence
taatatactgaggttataataaatgcacaaaacaaagccgtttaccggcactatacaagacatagttcctgtttatacagcgaacagcatttaaaaagacctcacatttatgtggggtcttttacgttatatatgttttgttgaagtcaacaagacataataatcgccctgcagctaccaactacagagcgataatatagatgttacctatcaacccgagggctgatatagtaaaaccccagacaagtcttattatatca

SEQ ID NO: 13458 - DNA, 260 bp, Unknown
  Description of Unknown: LeftRegion for integrase B459 sequence
ccgcatgacgagcctgccgagccttccgatgctgaaaaactccgcgccgagaacgcggcccttcgtgcgcagcttgcccagcagcagaagtccctgcgtatgcaccggcttgtgacgctcattctcttgggcattctttcgctgtgtgcccttgtgcttgtggccgacgtgctcatcccatcaatcggctggattcgcacatgaaaattaccgccccggcccgatcagccagagcggtatctttggaggcttttgtggat

SEQ ID NO: 13459 - DNA, 260 bp, Unknown
  Description of Unknown: LeftRegion for integrase B460 sequence
ggtcgtttcagaatgaaacaaccttccaggtgacaatgcatctggcaaggaaaatgatggcggcaaagctcatcacagagaaggagtaccgggatttcgaacaggcgatgattcgccaatatcagccattttcaggggacttatacacttgataattgtatcaaacagagtgatatatagtgttgaaaggagctgatttgatgcggactatccgtaaaatcgaacgaagcataccaaatttaaagaaacgaaagaaagtt

SEQ ID NO: 13460 - DNA, 260 bp, Unknown; identical to SEQ ID NO: 13445
  Description of Unknown: LeftRegion for integrase B461 sequence

SEQ ID NO: 13461 - DNA, 260 bp, Unknown
  Description of Unknown: LeftRegion for integrase B462 sequence
gccaatcgaattcctgttcctgttcgtcgcaccggtgctgtacctcatccacgcggtgctgaccggtctgggctttaccgtgatggcggtgctgggcgtgaccatcggcaacactaaagtaaaatacacctcattaagaattgaggcgtaaaaacagctatacctgtcgccccaatggattaccaaggaggtgatgaccaatgtctgcacatgttacaatcttaagaaatacagtacttccagtgaaattcaataccatg

SEQ ID NO: 13462 - DNA, 260 bp, Unknown
  Description of Unknown: LeftRegion for integrase B463 sequence
gctctttcaggccagcatggcctgcgtgggacggatgcgcagatcgggcttgctcacggatgccgaatatgaaaaatgtcgcgaaatgatgcttgagaagtacaatccgccgctcggtaaaattgtctcaaactgagcaggattctattgactttaggggcgttcagagtgattaatcgtgtctgaaaggagggagtccaatgaccaaaacaatcagaaggatagaagcacaaatccccatcacgacaaagaaaaagcgc

SEQ ID NO: 13463 - DNA, 260 bp, Unknown
  Description of Unknown: LeftRegion for integrase B464 sequence
taaatctggagaaatagtatattgcgatactggatatacagcggataaacaaaatcaaataaaagcagggaaaaccgaaaaagctgaagcaaactgttaccaggaatacgacgatgtaaaagtctatctatcaggaaaagcataaacaaaaacaccgccctcccttactgcaacaggaaagagcggcgcaggaggaacctatgtttttaacgttggaacaatacatagaaagtattcaggccattaacacctctggggaa

SEQ ID NO: 13464 - DNA, 260 bp, Unknown
  Description of Unknown: LeftRegion for integrase B465 sequence
tacaggaatttatgggaggtgcctcgttggaacagacgcgttttcaccataaaatggcagtttgcttaattcacgttttatatgaaaaaggcgagatcccgcgtagcgtctataaggaagccctgcgaatcgcagaggcagatcggcatccttaacaaatctccaagagaagattattctttgcattggaggtgactgatatgaaatcagtattcaagacgctagaccgcagccggccgcgaaaaatggttttctatggg

SEQ ID NO: 13465 - DNA, 260 bp, Unknown
  Description of Unknown: LeftRegion for integrase B466 sequence
attggactggccctctacggtacgattgtggcgagcattctggatgcggagttacacgccgccattcttcccggcatctttatgttgctggcgtttaacgcgcctgacctgatccggctgaaactgggcaagttccgggataacgtgggcgattatctgcggcaataaaaaagcccgcacactggcgggcgggtgatggtatgaaaaaagagaacgaaatccgggcagttgtctacgcccggtactcatcccattcgcaa

SEQ ID NO: 13466 - DNA, 260 bp, Unknown
  Description of Unknown: LeftRegion for integrase B467 sequence
atacaaagatcatttaatagacgaagaaacatacaacaacatgatacatttgatatgattttaaaaaagacgttgggaaaatactcaacgtctcttttttgacaaaatacaacaataaacctatcttttttagttgacagcaaaaattggtatggtatcattgtggtgtaaatttgtattaaaaaaggagagattaaaaaatgaatatctatactttaattgaaaaaatgacattagaacataaaacaatttttgatatg

SEQ ID NO: 13467 - DNA, 260 bp, Unknown
  Description of Unknown: LeftRegion for integrase B468 sequence
agtatatgacaaaaaggcagctccaaatcggagttgcctttctttccatgttcggtgtgccacccagagcctctggtttgctttattttgcgttttgggtggcagatgtaaaaggataaggggaaagctggaaagccttcccggtatctttttgtcaaaaatcaatggtctattttgttcatgttgtataggagatcactatggcaaagaaacgactggcagcggctctggacgagaagaaagccgcgatctacaagcgc

SEQ ID NO: 13468 - DNA, 260 bp, Unknown
  Description of Unknown: LeftRegion for integrase B469 sequence
attatctattctgtttatctgattcaccttgcccgaaagtagagatttccctaacagaagaagagcaattactgcttgacgcatttcgttccgctaccccgcaaggcagattcaacattattaccacctgtatgtgtgagaagcgaaaaggggacaacgaaagtgtcgggtaattgatttcatagaatggaggaagaaccatgtatgaggatataaaaacagcctgcctatacgttagattctcaagccataaccagact

SEQ ID NO: 13469 - DNA, 260 bp, Unknown
  Description of Unknown: LeftRegion for integrase B470 sequence
gcgttcacgattgcttcttgcacatacgctccgggcggagatatttcaaatgcatcagatgttgcggctggtgactactcatcgtttgattacgatgttcacgtcaattctgcttcagatagagatctatataggaaagccggataacacaaaagagcctgtcggcaatcggcaggctcttttaatttaggaggattactgtgacgtcgcaaaaatcatccattgagcgcaagctttcagagcaaagagctgcgctttat

SEQ ID NO: 13470 - DNA, 260 bp, Unknown
  Description of Unknown: LeftRegion for integrase B471 sequence
ggttgcaaagatcgcgctgccgcaaacccaatgcttctggagcagtggagcttcttcgccgttccgacacacgtcattgacgaaaagttcggtacacagagaacggtttctctctccacgctcgagcagctcccggcagtcaaatacacatacgatgaactccgtgacgccatcgacaggatcgtgcaggaggccagcgaatgagccgctccaaggcatcgttggaaagcaaactgtccgagcgaaaagccgcgctttat

SEQ ID NO: 13471 - DNA, 260 bp, Unknown
  Description of Unknown: LeftRegion for integrase B472 sequence
tcgtctggagcgtgctggactcctaccttacgccagaggaaaaaacattcgtatcgcagccaaagcaagacgcgacagccggataaaacggcagcagtctgccttggtgattgacttcgtacaattcaagaaccgcaataccgagaaagccgacctcgctgccagcaaggacggctttcatactatggaggtgaacaaggatggggaagatagctgataagctgaaacagatacgggtagcaatctacgtccgggtgtct

SEQ ID NO: 13472 - DNA, 260 bp, Unknown
  Description of Unknown: LeftRegion for integrase B473 sequence
gctggtaccctctttttttttgttgttgctatttttatataggagctgtataatagatacatactgaaaaattagcctcacagagccgcttatttttcttaccctaagaaatatacctctgtgcggttaaaatcgctctgtggggctcacaagagctcacaggggcattataagcaagaacagtaaaggagaaatgcaggatggcatacaggaaagtaaaatcattggtagacacaatcggattgagggcagtattttat

SEQ ID NO: 13473 - DNA, 260 bp, Unknown; identical to SEQ ID NO: 13469
  Description of Unknown: LeftRegion for integrase B474 sequence

SEQ ID NO: 13474 - DNA, 260 bp, Unknown
  Description of Unknown: LeftRegion for integrase B475 sequence
acccagggcagctatgaatttgatataccaatcagcgagattaaagacgtgcaagaaaagaaacggcttttcagtaaaattctttcggttgctaccgcttccggagaggaatatcaatttgcatttactaaactggtggagtggcaaatcgctttttccaatgccctttctgctggaagataacggagggtactgacactatggcaaagagagaattgatgaaaaccctaatgtcggattctttccggcgagtggcaata

SEQ ID NO: 13475 - DNA, 260 bp, Unknown
  Description of Unknown: LeftRegion for integrase B476 sequence
tcgtctggagcgtgctggactcctaccttacgccagaggaaaaaacattcgtatcgcagccaaagcaagacgcgacagccggatgaagcggcagcaatctgccttggtgattgacttcgtacaattcaagaaccgcaataccgagaaagccgacctcgctgccagcaaggacggctttcatactatggaggtgaacaaggatggggaagatagctgataagctgaaacagattcgagtagcaatctacgtccgagtgtct

SEQ ID NO: 13476 - DNA, 260 bp, Unknown
  Description of Unknown: LeftRegion for integrase B477 sequence
gacacacctcctgaaacagatactcttatggttgtcattgttgatgacgaagaaggatttgttaagaaaatcagtattgatgaagatactgtgacccttcgctcttttaatccacactatcctccccgtgtttttggtggtgttgaaattggacgattgcgctttgtcggtagagtcatggagttaaaaaggagatttgcatgaaaaaatttccaatcgacctctcctgtctgacagaggaagaaatctctcaatttcag

SEQ ID NO: 13477 - DNA, 260 bp, Unknown
  Description of Unknown: LeftRegion for integrase B478 sequence
tcgtgtggagtgttctggactcctatctcacccctgaggaaaaaacattcgtatcgcagccaaagcaagacgtgagcgccggatgaatcgtcggcaatctgctttggtgattgacttcacgcaattcaaaaaccgtagccctgagaaagccgacctcgctgacagcaagggcggctttcctgatgaggaggtgaaagaggatggggaagataactgacaagctcgaccaagtgcgtgtggcaatctacgtccgtgtgtcc

SEQ ID NO: 13478 - DNA, 260 bp, Unknown
  Description of Unknown: LeftRegion for integrase B479 sequence
ctctcaccatgctacaaaagctggagccataccgcgctgactatggcggcatccgagatgccgttatccattcgctggatgtgcagcccccgacaatttgaataattctcagtgttcttttttgtgcataacagaaaagcagccccgcactacgcatggagctgctttttcttcagctattatcttctggaggtttcacaatgggctatgtgacgaagaaggtggcacaacgctttgaggagaagaaagtcgccatatac

SEQ ID NO: 13479 - DNA, 260 bp, Unknown
  Description of Unknown: LeftRegion for integrase B480 sequence
ggctgcaaagatcgcactgccgcaaatccgatgctgctggagcagtggagtttctttgtcgttccgacacacgtcattgacgaaaagctcggcacccagaggacggtttctctctccacgcttgagcagctcccggcagtcaaatgcacatacggcgaactctgcaacgtcatcgacaagatcgtgcggggggtaggcgaatgagccgctccaaggcatcgttggaaaacaaactgtccgagcgaaaagctgcgctttat

SEQ ID NO: 13480 - DNA, 260 bp, Unknown
  Description of Unknown: LeftRegion for integrase B481 sequence
tcgtctggagcgtgttggactcctaccttacgccagaggaaaaaacattcgtattgcagccaaagcaagacgcgacagccggataaaacggcagcagtctgccttggtgattgacttcgtacaattcaagaaccgcaataccgaaaaagccgacctcgctgccagcaaggacggctttcatactatggaggtgaacaaggatggggaagatagctgataagctgaaacagatacgggtagcaatctacgtccgggtgtct

SEQ ID NO: 13481 - DNA, 260 bp, Unknown
  Description of Unknown: LeftRegion for integrase B482 sequence
tggacgcccctttcgaggcggccatataaggatatggaaatcgtctggaggccgacccggaacattttgtcaaaccgggtcctcccggtttgtacaaaatgtcaaggtataggttttggttaaggttacggttttggtactggttacaacggaaaatcaccggattgtcctacggacagtccagattttgaggtgcaaaaatgactgcaaggaaagcgatcagcaaacgaacggcggaaatcctcgatgccctgaacacc

SEQ ID NO: 13482 - DNA, 260 bp, Unknown
  Description of Unknown: LeftRegion for integrase B483 sequence
gaatacacttaatcaggtatatccttgctgatctttgtcgcttcaagtggtcatgtagaacttgacgctggtgactactcatcgtttgattacgatgttcacgtcaattctgcttcagatagagatctatataggaaagccggataacacaaaagagcctgtcggcaatcggcaggctcttttaattgaggaggattactgtgacgtcgcaaaaatcatccattgagcgcaagctgtcagaacaaagagctgcgctttat

SEQ ID NO: 13483 - DNA, 260 bp, Unknown
  Description of Unknown: LeftRegion for integrase B484 sequence
atctctctgagctcgctgctggcgctcggcccggttcgggtcgatttcgacggcatcaaagacgccgttattcattgtattcaaggtgatgaatgtccccccccccgtcatattgcataatttttgtatatccattttgtctataattacgaagcagctccgggaccacggagctgcttcaacgataaagggggactatcatgaaaaaagggattgctctccgcaccgtgaaaaagactgcggaggagctgctcaacacc

SEQ ID NO: 13484 - DNA, 260 bp, Unknown
  Description of Unknown: LeftRegion for integrase B485 sequence
atatccctgaactcgctgcttgcgctcggccctgtccaggccgactacggcggcatcagggatgccgttattcactgtattcaaggggatgaatgtacccccccccgtcatattgcataatttttgaatatccattttgtctataattacgaagcagctccgaggcaccggagctgcttcaacgataaagggggatatccatgaaaagcagtgtaacgctacgcagcttgaagaagactgcggaagaactcgtcaacacc

SEQ ID NO: 13485 - DNA, 260 bp, Unknown
  Description of Unknown: LeftRegion for integrase B486 sequence
gcgttcacgattgcttcctgcacatacgctccgtatggagacatatcaaaggcatcagatgttgcggctggtgactactcatcgtttgattacgatgttcacgtcaattctgcttcagatagagatctatataggaaagccggataacacaaaagagcctgtcggcaatcggcaggctcttttaattgaggaggattactgtgacgtcgcaaaaatcatccattgatcgcaagctttcagaacaaagagctgcgctttat

SEQ ID NO: 13486 - DNA, 260 bp, Unknown
  Description of Unknown: LeftRegion for integrase B487 sequence
accatgctacaaaagctggagccataccgcgctgactatggcggcatccgagatgccgttatccattcgctggatgtgtacccccccccctgacaatttgaataattctcagtgttcttttttgtgcataacagaaaagcagccccgcactacgcacggagctgctttttcttcagctattatcttctggaggtttcacaatgggctatgtgacgaagaaggtggcacaacgctttgaggagaagaaagtcgccatatac

SEQ ID NO: 13487 - DNA, 260 bp, Unknown
  Description of Unknown: LeftRegion for integrase B488 sequence
ctctcaccatgctacaaaagctggagccataccgcgctgactatggcggcatccgagatgccgttatccattcgctggatgtgcagcccccgacaatttgaataattctcagtgttcttttttgtgcataacagaaaagcagccccgcactacgcatggagctgctttttcttcagctattatcttctggaggtttcacaatgggctatgtgacgaagaaggtggcacaacgctttgaggagaagaaagtcgccatatat

SEQ ID NO: 13488 - DNA, 260 bp, Unknown
  Description of Unknown: LeftRegion for integrase B489 sequence
tgaccgtccgccggacaatcctatggacgctatcaaaaagctattttttacagcaatctcattttttatcattatgcgaatgttctaaatccatagtgtaccaacttagctattttcaagtaacaaaacggactttttttcgtgatagtcctatggacagtccaccgggctatccataggactattttcaggagattattatgcctttcaaaaaagcaatagaaactatgccaaattgctgccatcgtgcagctatttat

SEQ ID NO: 13489 - DNA, 260 bp, Unknown
  Description of Unknown: LeftRegion for integrase B490 sequence
gtcgtaaatatcggcggttccgtcggcaacggtgtcacaaagaaaaccgactttctcgttgtcggctctacagattattgcgcctctgtaaagggcggcaaaactggcaagctgaaaaaagccgaggatttgcagaaaaagggcgcaaaccttgccattatcgacgagggcgctttttacgacatgttgggcgagtgattatggcacaacaaaaaaaggccgccgtggccgcgttcgacggaacgccgcgggcggtaatt

SEQ ID NO: 13490 - DNA, 260 bp, Unknown; identical to SEQ ID NO: 13018
  Description of Unknown: LeftRegion for integrase B491 sequence

SEQ ID NO: 13491 - DNA, 260 bp, Unknown
  Description of Unknown: LeftRegion for integrase B492 sequence
tatgtcaacggttttatggttggcaatattcccggcgacgataccgatttcataaaccgggcccgccgccgcggtgtcgaggtcgtcggttttaaggtcgattatttcgagcccgaggacgagcccgagcgcggtcgtgtgtactatgcccgaatcaagctcgagatcgtgcccgttcgtgcggcaaaggcggcgaaataatgccgcgggccgcgcaagccgccggggccgtgttcgacggaacgccgcgggcggtaatt

SEQ ID NO: 13492 - DNA, 260 bp, Unknown
  Description of Unknown: LeftRegion for integrase B493 sequence
ggcctgagctctctcttggcgctcggccctattcaggctgatttcgccggcatcaaagatgccgttattcactgtattcaaggtgatgaatgtaccccccccccccgtcatattgcataatttttgtatatccgttttgtctataattacgaagcggctccgtgacctcggagccgcttcaataataaagggggagcactatgacagccaaaaagctatccagcataaagaaaactgcggaggaacttatcaacaccatc

SEQ ID NO: 13493 - DNA, 260 bp, Unknown
  Description of Unknown: LeftRegion for integrase B494 sequence
gcgaaggttggaatcgatcaggcgtttgacttacgatatcggtatcgttggggtattccgtatagtaaaaaactgatgtgggctgtgggagaagcgatagttaagcaatatgacattgcacactgttattctcctaaatgtgcgataattgactgtgataatgttttgtggggcggagtattatcagaagatattgccgggtgagtacagactcagaggatcagctgaatagctacaaatcgcaggttgagcattatacg

SEQ ID NO: 13494 - DNA, 260 bp, Unknown
  Description of Unknown: LeftRegion for integrase B495 sequence
tgaccgtccgtcggacaatcctatggacgctatcaaaaagctattttttacagcaatctcattttttatcattatgcgaatgttctaaatccatagtgtaccaacttagctattttcaagtaacaaaacggactttttttcgtgatagtcctatggacagtccaccgggctatccataggactattttcaggagattattatgcctttcaaaaaagcaatagaaactatgccaaattgctgccatcgtgcagctatttat

SEQ ID NO: 13495 - DNA, 260 bp, Unknown
  Description of Unknown: LeftRegion for integrase B496 sequence
accgggcttttaatcgtgtgcagtgacccgatgcaaaagaaaatcgacagagctgccgccctaaatattccaaccatttcagagcagcaatggtttgaacttatgccggaactagaagccctcggaatgtggaatggaaagccacttccgtttgcggatgacaatggcatctaccgttttgatgtgggtggtgatggataatggcaaaaaagaagaagcccgccgggggcaatgccatcatctatgcccgctactcatcc

SEQ ID NO: 13496 - DNA, 260 bp, Unknown
  Description of Unknown: LeftRegion for integrase B497 sequence
tactgcgaggattgcggatacagctttgactttaccacacaggatgacctcaatgcccaatataataaactgaacacaaacgagggatgcgccattttggtggcgatcattctcggcgttattcttataacaatttggttttacagccattaaatgcaaatttgaggccgttttcgttaaataagggggggggtgacagtttgagttcagttgacaaaatcgccgttgtttacgcacggtattcttcccacgggcagacc

SEQ ID NO: 13497 - DNA, 260 bp, Unknown
  Description of Unknown: LeftRegion for integrase B498 sequence
gtcgtaaatatcggcggttccgtcggcaacggtgtcacaaagaaaaccgactttctcgttgtcggctctacagattattgcgcctctgtaaagggcggcaaaactggcaagctgaaaaaagccgaggatttgcagaaaaagggcgcaaaccttgccattatcgacgagggcgctttttacgacatgttgggcgagtgattatggcacaacaaaaaaaggccgccggtgccgagtttgacggtacgccgcgggcggtaatt

SEQ ID NO: 13498 - DNA, 260 bp, Unknown
  Description of Unknown: LeftRegion for integrase B499 sequence
gagatacagtatgcagctgtcaatgttgaaacaattacgctcgttaaaacttataagtgaagcagagtatcagctggtagagaaaaagttaaaaaaagattatggtgttatttctaatattaccgcttgactattatagtgttgcgttgtaagattatatcaacactacggtaggaacacaaaaagaaaggggcggtgaaatggaagttgaaatcattaaggcgaagggtgctggtgaggatacttctacgggaagaaag

SEQ ID NO: 13499 - DNA, 260 bp, Unknown
  Description of Unknown: LeftRegion for integrase B500 sequence
aggaggcatacaatgaataaaattgaaatgagcaaaaatccggactattgttttgccgccttaaagctcatagagcagctttataaggacggtaaaataccgaattttatgtaccgaaatatactgaatgaatatgcagacattgttgatgttacggctttcgtcatcggaaattcaaataaaaaggaggatgcgacagcatgatcaattctgattttgtaaaaaagcgagtggtaatttatgctcgtgtttcaaccgag

SEQ ID NO: 13500 - DNA, 260 bp, Unknown
  Description of Unknown: LeftRegion for integrase B501 sequence
gtcgtaaatatcggcggttctgttggcaacggcgtcacaaagaaaaccgactttctcgttgtcggctctacggattattgtgcctctgtaaagggcggcaaaactggcaagctgaaaaaagccgaggatttgcagaaaaagggcgcaaaccttgccattatcgacgagggcgctttttacgatatgttgggcgagtgattatggcacaacaaaaaaaggccgccgggtccgagtttgacggtacgccgcgggcggttatc

SEQ ID NO: 13501 - DNA, 260 bp, Unknown
  Description of Unknown: LeftRegion for integrase B502 sequence
cggacagtccgtaggattatccgccggacagccttaaaaatctttattttacagtgtttctatttttttgctgtcaagtatgatcttataccatgcaatacgccggttccgtaaccattgcaacagcaatcaaaatattttcgtgacagtcctacggactatccaccggattatccgtaggacgattttaggaggttatcatggctttcaagaaaacaatagataccatgccgactctctgccgccgtgtggctatttat

SEQ ID NO: 13502 - DNA, 260 bp, Unknown
  Description of Unknown: LeftRegion for integrase B503 sequence
aagggaaatattatagaactgaaatttgaaaaataaaacgccccacggctgcaaccgtgaagcgctttaaatagattgttacccgtcaaccccgcggggctgcgctatgataacgccctgaacaagtgttattatagcataggcccccaacttttgaaagggcttattttttacgcccatttttaagaaggtgtgattttatggcttatgcagcattgagaaaggccggtcttgtgcctgctgccgcgccggatctgcga

SEQ ID NO: 13503 - DNA, 260 bp, Unknown
  Description of Unknown: LeftRegion for integrase B504 sequence
ccggacagtccgtaggattatccgccggacagccttaaaaatctttattttacagtgtttctattttttgctgtcaagcatgatcttataccacgcaatacgccggttccgtaaccactacaacagcaatcaaaatattttcgtgacagtcctacggactatccaccggattatccgtaggacgattttaggaggttatcatggctttcaagaaaacaatagataccatgccgactctctgccgccgtgtggctatttat

SEQ ID NO: 13504 - DNA, 260 bp, Unknown
  Description of Unknown: LeftRegion for integrase B505 sequence
agggctactggctgtaaaatgctggtagccctcattttttagttgtatctagtatataaggggtgtataatagataggaactgaaaacagcctcataaagccctctattttatcgagggtaaaagtctacacctaatatataaaagtggctgtataaggcacacaggagctcacaggactattacaggagggtaaacaggatggcatacaggaaaataacggatataaaagatactattggtatgagagcggtattttat

SEQ ID NO: 13505 - DNA, 260 bp, Unknown
  Description of Unknown: LeftRegion for integrase B506 sequence
cggactgtccgtaggattatccgccggacagccttaaaattctttgttttacagtgtttctatttttttgctgccaagtatgatcttgtgccatgcaatacgccggttccgtaaccattgcaacagcaagcaaaatattttcgtgacagtcctacggactatccataggattatccgtaggacgattttaggaggttatcatggctttcaagaaaacaatagataccatgccgactctctgccgccgtgtggctatttat

SEQ ID NO: 13506 - DNA, 260 bp, Unknown
  Description of Unknown: LeftRegion for integrase B507 sequence
acaggtcttttgattgtgtgtagtgacccggcgcaaaagaaaattgacagagccgatgccttgaatattccaatcatttcagagcagcaatggtatgaactcatgccagaacttgaagccgttggaatgtggaacggaaagcaaattctgtttgcggacaatgatggcatctaccgtgttgaagtgggcggtgaaagctgatggccagaaaaaagaatattgctgctggccttgatgccgtcatctatgcccggtactca

SEQ ID NO: 13507 - DNA, 260 bp, Unknown
  Description of Unknown: LeftRegion for integrase B508 sequence
tcgaaaattagagtgtagaacattataattaaagcacctacagccatatttggttgtaggtgctttgttttcagcatttggatacacaatttcatttttaagcgtcaaaagtttgctgattttgctattgacttaggactattgtcatggtataatcaataggtaatgatgccttgcaagtaaatctggaggtttaaataatggatatttatgaagctagacgcacaatgcaaacacaaaggaaaaatatatttgactta

SEQ ID NO: 13508 - DNA, 260 bp, Unknown
  Description of Unknown: LeftRegion for integrase B509 sequence
aaagggaatattatagaattaaattttcgaaaataaatgcgccccacggcggcaaccgtgaagcgctttatatagattgttacccgtcaacctatggggctgactatgataaccacccgacaatgattattatagcataagcccccggaattttgaagggcttatttttttacgcccttttttagaaaggtgtgctatttatggcttatgctaaattgcaaaaatctggtcatctcccagatccggcggcaaacatgcag

SEQ ID NO: 13509 - DNA, 260 bp, Unknown; identical to SEQ ID NO: 13501
  Description of Unknown: LeftRegion for integrase B510 sequence

SEQ ID NO: 13510 - DNA, 260 bp, Unknown
  Description of Unknown: LeftRegion for integrase B511 sequence
ttggaaaatgtcattgaattagtaagaaaaaaatgagcgccccacggtgccagccgtgagacgcccagaaagaagttacccgtcaacccgttggggctgcgctatggtaaaatctgccagaaattattatagcacaagccccgaccatttgaaagggcttgtttttttgcgcccttttttaagttaagaaggtgctatttatggcttatgctgccatgagaagggccgggcttgttcctgctgccgcgccggatctgcga

SEQ ID NO: 13511 - DNA, 260 bp, Unknown
  Description of Unknown: LeftRegion for integrase B512 sequence
ccggactgtccgtaggattatccgccggacaaccttaaaattctttattttacagtgtttctatttttttgctgccaagtatgatcttgtgccatgcaatacgccggttccgtaaccattgcaacgcaagcaaaatattttcgtgacagtcctacggactatccgccggattatccgtaggacgattttaggaggttatcatggctttcaagaaaacaatagataccatgccgactctctgccgccgtgtggctatttat

SEQ ID NO: 13512 - DNA, 260 bp, Unknown
  Description of Unknown: LeftRegion for integrase B513 sequence
cggactgtccgtaggattatccgccggacagccttaaaaatctttattttacagcgtttctatttttttgctgtcaagtatgatcttgtgccatgcaatacgccggttccgtaaccattgcaacagcaagcaaaatattttcgtgacagtcctacggactatccataggattatccgcaggacgattttaggaggttatcatggctttcaagaaaacaatagataccatgccgactctctgccgccgtgtggctatttat

SEQ ID NO: 13513 - DNA, 260 bp, Unknown
  Description of Unknown: LeftRegion for integrase B514 sequence
ggcggtgcaactgtcgggtactgcacatacgctccatacggagactttagcagagcttctgaagtaactgctggcgactacactacattcgagttctgcgacatcaagatatattcagaagatgtccgaaacactctacgaggcaaataagcgaaagagcttgtcggaaaacggcaagctctttttcaacggaggcgactatgaaacaaagcaaaaaagtgagcgataagctgtcaaatcagaaatgcgctctttatgtt

SEQ ID NO: 13514 - DNA, 260 bp, Unknown
  Description of Unknown: LeftRegion for integrase B515 sequence
cggacagtccgtaggattatccgccggacagccttaaaattctttattttacagtgtttctatttttttgctgccaagtatgatcttgtgccatgcaatacgccggttccataaccattgcaacagcaagcaaaatattttcgtgacagtcctacggactatccgccggattatccgtaggacgattttaggaggttatcatggctttaaagaaaacaatagataccatgccgactctctgccgccgtgtggctatttat

SEQ ID NO: 13515 - DNA, 170 bp, Unknown
  Description of Unknown: LeftRegion for integrase B516 sequence
ttccccccctttccgcgtaatgtgctggaatgtagaaattttcaacgcatttttatagcgtaacgacattttttcatatctttgtgtaaacttttaaaacacaatggattatgaaagatatagtagcttatttgcgtgtatcaacagaagcgcaagattttgagagacaa

SEQ ID NO: 13516 - DNA, 260 bp, Unknown
  Description of Unknown: LeftRegion for integrase B517 sequence
accggtcttttaatcgtgtgcagtgacccgatgcaaaagaaaatcgacagagctgccgccctaaacattccaatcatttcagaacagcaatggtttgaacttatgccggaactagaagccctcggaatgtggaatggaaagccaattccgtttgcggatgacaatggcatctaccgttttgatgtgggtggtgttggataatggcaaaaaagaagaagcccgccgggggcaacgccatcatctatgcccgctactcgtcc

SEQ ID NO: 13517 - DNA, 260 bp, Unknown
  Description of Unknown: LeftRegion for integrase B518 sequence
ggcggtgcaactgtcgggtactgcacatacgctccatacggagactttagcagagcttctgaggtaactgctggcgactacactacattcgagttctgcgacatcaagatatattcagaagatgtccgaaacactctacgaggcaaataagcgaaagagcttgtcggaaaacggcaagctctttttcaacggaggcgactatgaaacaaagcaaaaatgtgagcgataagctgtcaaatcagaaatgcgctctttatgtt

SEQ ID NO: 13518 - DNA, 260 bp, Unknown
  Description of Unknown: LeftRegion for integrase B519 sequence
tgctttgtagatatggtatctataccgtatctataccgtatccataccgtaccgatacctcgcgtgcgcgcgtgcgtgtgcgcgcgatcgtgcgcgcactgtctctgtacctgtatctgtatctgtatctgtatctgtaatctgtttctgattctgaatatctactactgcaaatctatcgttagaagggggtggcgctgttgccgagaaaacctgcaaagcacccggcgaagccgaagcggggcaagaagctggaaatc

SEQ ID NO: 13519 - DNA, 260 bp, Unknown
  Description of Unknown: LeftRegion for integrase B520 sequence
atccgacagttttttgattttggcaaagatatccgaccattcgctcgtagtcatacggcatggctcctttctcaaatttactgtcggcagcaactgaattatatcaaatatgcacccgcttttcagggattcgtagaattataccgaaaatcggaaaaatattgcgaattttgaagaagataatcgtgaggtgatggttgatggcccgaaaaaagaatattgctgcgggtcagaatgccgtcatttatgcccgctattcc

SEQ ID NO: 13520 - DNA, 260 bp, Unknown
  Description of Unknown: LeftRegion for integrase B521 sequence
caagaaatatgatccaaattacgttccatctaaaaagaaaattcgtgcaaccgtaccttccaaataattgttcttttcaaggagctccccgccgggtgctccttgttttataaacgcacaaacccctccagctgtttccagccggaggggtctgccccgtcgtcaaaaggtaaggataaagaacaagaagatttctttccatgcgttgcctgcccttacagcatagcacgctttttggatatgggcaagcaaaagccccg

SEQ ID NO: 13521 - DNA, 260 bp, Unknown
  Description of Unknown: LeftRegion for integrase B522 sequence
gctactggctgtaaaatgctggtagccctcattttttagttgtatctagtatataaggggtgtataatagatagaaactgaaaaacagcctcataaagccctctattttatcgagggtaaagaagtctacacctaatatataaaagtggctgtatgaggcacacaggagctcacaggactattacaggagggtaaacaggatggcatacaggaaaataacggatataagagatactattggtatgagagcggtattttat

SEQ ID NO: 13522 - DNA, 260 bp, Unknown
  Description of Unknown: LeftRegion for integrase B523 sequence
acggctgggacttctacgtcatgccgaccgctcggctgaacgaagcctgcggcgctcagaagaccatttcgttcccgtcgctgctgaagctcaaccccgtcaaggcggactactccagcatcaaagccgcaatactttccgtggtataagcaaaggcagctcctgcttcggagctgccttcatttcttggagggacatctatgcctatttcaaagcctgccttcgacctcattcagaaggtcgccatctacatccgggtc

SEQ ID NO: 13523 - DNA, 260 bp, Unknown; identical to SEQ ID NO: 13335
  Description of Unknown: LeftRegion for integrase B524 sequence

SEQ ID NO: 13524 - DNA, 260 bp, Unknown
  Description of Unknown: LeftRegion for integrase B525 sequence
gtcgtaaatatcggcggttccgtcggcaacggtgtcacaaagaaaaccgactttctcgttgtcggctctacagattattgcgcctctgtaaagggcggcaaaactggcaagctgaaaaaagccgaggatttgcagaaaaagggcgcaaaccttgccattatcgacgagggcgctttttacgacatgttgggcgagtgattatggcacaacaaaaaaaggccgccggggccgagtttgacggtacgccgcgggcggtaatt

SEQ ID NO: 13525 - DNA, 260 bp, Unknown
  Description of Unknown: LeftRegion for integrase B526 sequence
gctactggctgtaaaatgctggtagccctcattttttagttgtatctagtatataaggggtgtataatagatagaaactgaaaaacagtctcataaagccctctattttatcgagggtaaagaagtctacacctaatatataaaagtggctgtatgaggcacacaggagctcacaggactattacaggagggtaaacaggatggcatacaggaaaataacggatataaaagatactattggtatgagagcggtattttat

SEQ ID NO: 13526 - DNA, 260 bp, Unknown
  Description of Unknown: LeftRegion for integrase B527 sequence
gctactggctgtaaaatgctggtagccctcattttttagttgtatctagtatataaggggtgtataatagataggaactgaaaacagcctcataaagccctctattttatcgagagtaaagaagttctacacctaatatataaaagtggctgtatgaggcacacaggagctcacaggactattacaggagggtaaacaggatggcatacaggaaaataacggatataagagatactattggtatgagagcggtattttat

SEQ ID NO: 13527 - DNA, 260 bp, Unknown
  Description of Unknown: LeftRegion for integrase B528 sequence
ggctactggctgtaaaatgctggtagccctcattttttagttgtatctagtatataaggggtgtataatagataggaactgaaaacagtctcataaagccctctattttatcgaggataaagaagtctacacctaatatataaaagtggctgtatgaggcacacaggagctcacaggactattacaggagggtaaacaggatggcatacaggaaaataacggatataagagatactattggtatgagagcggtattttat

SEQ ID NO: 13528 - DNA, 260 bp, Unknown; identical to SEQ ID NO: 13421
  Description of Unknown: LeftRegion for integrase B529 sequence

SEQ ID NO: 13529 - DNA, 260 bp, Unknown
  Description of Unknown: LeftRegion for integrase B530 sequence
agggctactggctgtaaaatgctggtagccctcattttttagttgtatctagtatataaggggtgtataatagataggaactgaaaacagcctcataaagccctctgttttatcgagggtaaagaagtctacacctaatatataaaagtggctgtacgaggcacacaggagctcacaggactattacaggagggtaaaggatggcatacaggaaaataacggatataaaagatactataggtatgagagcggtattttat

SEQ ID NO: 13530 - DNA, 260 bp, Unknown
  Description of Unknown: LeftRegion for integrase B531 sequence
ggctactggctgtaaaatgctggtagccctcattttttagttgtatctagtatataaggggtgtataatagataggaactgaaaacagcctcataaagccctctgttttatcgagggtaaagaagtctacacctaatatataaaagtggctgtatgaggcacacaggagctcacaggactattacaggagggtaaacaggatggcatacaggaaaataacggatataaaagatactataggtatgagagcggtattttat

SEQ ID NO: 13531 - DNA, 260 bp, Unknown
  Description of Unknown: LeftRegion for integrase B532 sequence
gctttgaataggttggtgaggacaaatggggattgataaaaccatattacttatgataaatgagcggttatacaaaaatggaaagatagataaagacacgaaagaaaaaatagaaaaggagattaataaaaatgattgtaaaacaggaatggatagactaaaataatggtaggttctgtccttccatatggaggattagcatgagtaatatataccagttaagagaactacttagaacacagacaatttatgatttgccg

SEQ ID NO: 13532 - DNA, 260 bp, Unknown; identical to SEQ ID NO: 13335
  Description of Unknown: LeftRegion for integrase B533 sequence

SEQ ID NO: 13533 - DNA, 260 bp, Unknown
  Description of Unknown: LeftRegion for integrase B534 sequence
acggctgggacttctacgtcatgccgaccgctcgactgaacgaagcctgcggcgctcagaagaccatttcgttcccgtcgctgctgaagctcaaccctgtcaaggcggactactccagcatcaaagccgcaatactttccgtggtataagcaaaggcagctcccgcttcggagctgccttcatttcttggagggacatctatgcctatttcaaagcctatcttcgacctcgttcagaaggtcgccatctacatccgggtc

SEQ ID NO: 13534 - DNA, 260 bp, Unknown
  Description of Unknown: LeftRegion for integrase B535 sequence
acaggtcttttgattgtgtgtagtgacccggcgcaaaagaaaattgacagagccgatgccttgaatattccaatcatttcagagcagcaatggtatgaactcatgccagaacttgaagccgttggaatgtggaacggaaagcaaattctgtttgcggacaatgatggcatctaccgtgttgaagtggacggtgaaagctgatggccagaaaaaagaatattgctgctggcctcgatgccgtcatctatgcccggtactca

SEQ ID NO: 13535 - DNA, 260 bp, Unknown
  Description of Unknown: LeftRegion for integrase B536 sequence
ggctactggctgtaaaatgctggtagccctcattttttagttgtatctagtatataaggggtgtataatagataggaactgaaaacagcctcataaagccctctattttatcgagggtaaagaagtctacacctaatatataaaagtgactgtacgaggcacacaggagctcacaggactattacaggagggtaaacaggatggcatacaggaaaataacggatataagagatactattggtatgagagcggtattttat

SEQ ID NO: 13536 - DNA, 260 bp, Unknown
  Description of Unknown: LeftRegion for integrase B537 sequence
ggctactggctgtaaaatgctggtagccctcattttttagttgtatctagtatataaggggtgtataatagataggaactgaaaacagcctcataaagccctctattttatcaagggtaaagaagtctacacctaatatataaaagtggctgtatgaggcacacaggagctcacaggactattacaggagggtaaacaggatggcatacaggaaaataacggatataagagatactattggtatgagagcgatattttat

SEQ ID NO: 13537 - DNA, 260 bp, Unknown; identical to SEQ ID NO: 13421
  Description of Unknown: LeftRegion for integrase B538 sequence

SEQ ID NO: 13538 - DNA, 260 bp, Unknown
  Description of Unknown: LeftRegion for integrase B539 sequence
gctttgaataggttggtgaggacaaatggggattgataaaaccatattacttatgataaatgagcggttatacaaaaatggaaagatagataaatacacgaaagaaaaaatagaaaaggagattaataaaaatgattgtaaaacaggaatggatagactaaaataatggtaggttctgtccttccatatggaggattagcatgagtaatatataccagttaagagaactacttagaacacagacaatttatgatttgccg

SEQ ID NO: 13539 - DNA, 260 bp, Unknown
  Description of Unknown: LeftRegion for integrase B540 sequence
gcgaggtgcagcgcttgatcgaatccgaaaagcgcccgtgatcttctttgcgccatccttggcaaaatagccattaaaaaacgccccgcccatgttactagcatggacgagacgaagtattcaattcacactctttttctttatgcggctcatcaagggattcattcaactgttatcactatttaagggggtgatccaatttgaaagccgtcatatatgcccgcttctccagccacaaccagcgcgaagaatccatcgaa

SEQ ID NO: 13540 - DNA, 260 bp, Unknown
  Description of Unknown: LeftRegion for integrase B541 sequence
gctactggctgtaaaatgctggtagccctcattttttagttgtatctagtatataaggggtgtataatagatagaaactgaaaaatagtctcataaagccctctattttatcgagggtaaagaagtctacacctaatatataaaagtggctgtatgaggcacacaggagctcacaggactattacaggagggtaaacaggatggcatacaggaaaataacggatataaaagatactattggtatgagagcggtattttat

SEQ ID NO: 13541 - DNA, 260 bp, Unknown
  Description of Unknown: LeftRegion for integrase B542 sequence
aagacaggtcttttgattgtgtgtagtgacccggcgcaaaagaaaattgacagagccgatgccatgaatattccgattgtttcggagcagcaatggtttgagctcatgccagaacttgaagccgttggaatgtggaacggaaagcgaatcctgttttcagacgacggcatctaccgtgttgaagtgggcggtgaaagctgatggccagaaaaaagaatattgctgctggcctcgatgccgtcatctatgcccggtactca

SEQ ID NO: 13542 - DNA, 260 bp, Unknown; identical to SEQ ID NO: 13531
  Description of Unknown: LeftRegion for integrase B543 sequence

SEQ ID NO: 13543 - DNA, 260 bp, Unknown
  Description of Unknown: LeftRegion for integrase B544 sequence
gacaaagcagataaattatatataaaaaaggcaacattaaaagcatggacaatgatcttatttaaacaaaagaaaattgacttaacaaaatgcaataaaatgattgcagctattgaaaaaatatccacctaatacgccttgacatatctctattggtatggtatcattaacatataatcattgcataacggagggtaaaaatggatatatacgaaaccgccaatcgaatgaaatatgagcaaaaaacaatctttgattta

SEQ ID NO: 13544 - DNA, 260 bp, Unknown; identical to SEQ ID NO: 13520
  Description of Unknown: LeftRegion for integrase B545 sequence

SEQ ID NO: 13545 - DNA, 260 bp, Unknown
  Description of Unknown: LeftRegion for integrase B546 sequence
gctactggctgtaaaatgctggtagccctcatttttttagttgtatctagtatataaggggtgtataatagataggaactgaaaacagcctcataaagccctctattttatcgagagtaaaggagtctacacctaatatataaaagtggctgtatgaggcacacaggagctcacaggactattacaggagggtaaacaggatggcatacaggaaaataacggatataaaagatactattggtatgagagcggtattttat

SEQ ID NO: 13546 - DNA, 260 bp, Unknown; identical to SEQ ID NO: 13531
  Description of Unknown: LeftRegion for integrase B547 sequence

SEQ ID NO: 13547 - DNA, 260 bp, Unknown
  Description of Unknown: LeftRegion for integrase B548 sequence
gctactggctgtaaaatgctggtagccctcattttttagttgtatctagtatataaggggtgtataatagatagaaactgaaaaacagcctcataaagccctctattttatcgagggtaaagaagtctacacttaatatataaaagtggctgtatgaggcacacaggagctcacaggactattacaggagggtaaacaggatggcatacaggaaaataacggatataagagatactattggtatgagagcggtattttat

SEQ ID NO: 13548 - DNA, 260 bp, Unknown
  Description of Unknown: LeftRegion for integrase B549 sequence
ggctactggctgtaaaatgctggtagccctcattttttagttgtatctagtatataaggggtgtataatagataggaactgaaaacagcctcataaagccctctattttatcgaggataaagaagtctacacctaatatataaaagtggctgtatgaggcacacaggagctcacaggactattacaggagggtaaacaggatggcatacaggaaaataacggatataagagatactattggtatgagagcggtattttat

SEQ ID NO: 13549 - DNA, 260 bp, Unknown
  Description of Unknown: LeftRegion for integrase B550 sequence
cttacgacctctgtgatccaacgtaactgcaagtgcggaatcgaccgcgcgtactcgatactacgcaatcttcaggtctacgggcttattcatgaggccggaaaagacacctatgaatggacagaaaaagccctcctgctgggcgcagaagggcgtaacgggtaacagatatgtcgatagatattaaatggcaagtgccaatggcaaagccggaggtcagcgaactggccgtcgtatatgcccggtattcaagccacagt

SEQ ID NO: 13550 - DNA, 260 bp, Unknown
  Description of Unknown: LeftRegion for integrase B551 sequence
aacgaacagcagcaagaaacttctgcttcctatgtattgaataccagcacgatggtttttcaccatccttactgccgcgatgtgcccaaaatagcaccgcaaaattattctacttcaagccaacctagaaacaatcttatcgaaagtggctaccgtccttgcggtcattgcagcccataatttaagagggggttctttttatgccaagaaaaaacaaatccgccggttccgaccaacgcctggtggcctactaccggtac

SEQ ID NO: 13551 - DNA, 260 bp, Unknown
  Description of Unknown: LeftRegion for integrase B552 sequence
ggaccgtccataggactgtcctacggacggttctggaaagccttgttttatgcagccttctgctttcccggctaaattttcttccgatgatacgatgcgccagcactatctatttcacaacatgaaaaacggattttttttgtgacagtcctacggactgtccataggattatccgtaggacgaaatgcaggagatcaatatggcttttaagaaacttatggatactcacccagataaacgcctccgtgtggcaatttac

SEQ ID NO: 13552 - DNA, 260 bp, Unknown
  Description of Unknown: LeftRegion for integrase B553 sequence
ggctactggctgtaaaatgctggtagccctcattttttagttgtatctagtatataaggggtgtataatagataggaactgaaaacagcctcataaagccctctattttatcgagagtaaagaagtctacacctaatatataaaagtggctgtatgaggcacacaggagctcacaggactattacaggagggtaaacaggatggcatacaggaaaataacggatataaaagatactattggtatgagagcggtattttat

SEQ ID NO: 13553 - DNA, 260 bp, Unknown
  Description of Unknown: LeftRegion for integrase B554 sequence
ttcagaatgaacagaatagaaattgcagcagacgataatcaggacgctttcgctctcgaactacagagacttgtcctctgttaccaggaggcaagccatgacgaccgtaacgttgtctgggctgtccttaataaatacgcaagtaagattgataaattaaaatagccccattttggggctttttccatttggaggtatcaatgaatcgaaaaaccagagtaaaaccaggaaaagccacttccgggctttccaaacggcgc

SEQ ID NO: 13554 - DNA, 260 bp, Unknown
  Description of Unknown: LeftRegion for integrase B555 sequence
gacccgattttcgaaccgccgatagattttctggaagaatgccggaaacgctgggaaaaccgaatgaacccttttacaggtacggtagaacgaaaaatcggaaatacctggtatttgctggagactgtatgtgacggaaatgagccgcttacccacaaggtaaaacggctcattttcttggataaggaggcgctttgttcatgacacagactcaaattcatgctacaatatcatcatgcacaccgattctgtcagctgac

SEQ ID NO: 13555 - DNA, 260 bp, Unknown
  Description of Unknown: LeftRegion for integrase B556 sequence
agatattcaatccatcctctacgaattggaaaaaaagggtcaggttgaacgaaaaaagtccggaagaacatatgtcgttcattacttatagatgaatccacgagacaaataatttgagtgttttatccaaccttacatacaagaatacatgatttttttatccagaacaatcacatacttacacatgcaaggagaacaatttgaatcgtgcagtaatttatgctagatacagcagcgacatgcagcgcgaggaaagtgtg

SEQ ID NO: 13556 - DNA, 260 bp, Unknown
  Description of Unknown: LeftRegion for integrase B557 sequence
accggacttttaatcgtgtgcagtgacccaatgcaaaagaaaatcgacagagctgcagccctgaacattccgattatttcggagcagcaatggtttgaactcatgccggaacttgaggccgctggaatgtggaacggaaagccaatttcattcgcggatgacgatggtatctaccgttttgatgtgggtggtgatggataatggcaaaaaagaagaagcccgccgggggcattgccgtcatctatgcccgctactcgtcc

SEQ ID NO: 13557 - DNA, 260 bp, Unknown
  Description of Unknown: LeftRegion for integrase B558 sequence
aacataccgccagcaaatgaccagcaaattgccgacaaataaaaaaatcccccggtgctaccaacaccgagggacctgcaagaacgtgttaccagcacgctcaattatcaacccccaacaccacatcaagagtcgatataatattataacatattatgcacggctcttacaatcatagctattgaaaggagccgtgtattatggctaaacacgctattactataccccaaaacccaaaagctgctctgtatatccgcgtc

SEQ ID NO: 13558 - DNA, 260 bp, Unknown
  Description of Unknown: LeftRegion for integrase B559 sequence
taatttacgtattttttgccaatatcaatacttttataaataagaaaatcccccggtgttaccagcaccgagggatctgcaagaacgtgttaccatcacgctcaatgtcatcaacccaagcactaccaagagctgatataatattataacatattatacgcggctcttacaatcatagctattgaaaggagccgtgtattatggctaaacacgctattactatactccaaaacccaaaagctgctctgtatatccgcgtc

SEQ ID NO: 13559 - DNA, 260 bp, Unknown
  Description of Unknown: LeftRegion for integrase B560 sequence
aatttacgtattttttaccaatatcaatacttttataaacaaaagaatcccccggtgttaccagcaccgagggacctgcaagaacgtgttaccagcacgctcaattatcaacccctaacaccacatcaagagccgatataatattataacatattatacgcggctcttacaatcttagctattgaaaggagccgtgtattatggctaaacacgctattactataccacaaaacccaaaagctgctctgtatatccgcgtc

SEQ ID NO: 13560 - DNA, 260 bp, Unknown
  Description of Unknown: LeftRegion for integrase B561 sequence
taaaaccgccaatctcttattttctcgctcaatcttactaatacaaaaaatcccccggtgctaccaacaccgagggacctgcaagaacgtgctaccgacacgctcaagtatcaacccccataccaataagagtcgatataatattataacatattatgcacggctcttacaatcttagctattgaaaggagccgtgtattatggctaaacacgctatttctataccccaaaacccaaaagctgctctgtatatccgcgtc

SEQ ID NO: 13561 - DNA, 260 bp, Unknown
  Description of Unknown: LeftRegion for integrase B562 sequence
atttacgtatttttttgccaatatcaatacttttataaataagaaaatcccccggtgttaccagcaccgagggacctgcaagaacgtgctaccaacacgctcaattatcaacccctaacaccacatcaagagccgatataatattataacatataatacgcggctcttacaatcttagctattgaaaggagccgtgtattatggctaaacacactatttctataccccaaaccaccaaagctgctctgtatatccgcgta

SEQ ID NO: 13562 - DNA, 260 bp, Unknown
  Description of Unknown: LeftRegion for integrase B563 sequence
aagtaatttacgtattttttgccaatgtcaatacttttataaataaaaaatcccccggtgttaccagcaccgagggacctgcaagaacgtgttaccagcacgctcaattatcaacccccgaacaaccaagagctgatataatattataacatattatacgcggctcttacaatcatagctattgaaaggagccgtgtattatggctaaacacgctattactataccccaaaacccaaaagctgctctgtatatccgcgtc

SEQ ID NO: 13563 - DNA, 260 bp, Unknown
  Description of Unknown: LeftRegion for integrase B564 sequence
ggttctttttgctcgctattcatccgacacgctggcaaaaataaattgggataacttcatctccgacaaaatcgacaacatcgccgatacttttgagatagattcacaactcaagcaatatatccagtaacgggtcttcatactacaagataaagcgcgaagaaaaattcttcgcgcttcattaactcagagggttacaaatgaatcaagacaaattaaccgataaactatcatctcaaaaatgtgctctttatattcgt

SEQ ID NO: 13564 - DNA, 260 bp, Unknown
  Description of Unknown: LeftRegion for integrase B565 sequence
aagtaatttacgtattttttccaatatcaatacttttataaacaaaagaatcccccggtgttaccagcaccgagggacctgcaagaacgtgttaccagcacgctcaattatcaacccccgaacaaccaagagctgatataatattataacatattatacgcggctcttacaatcatagctattgaaaggagccgtgtattatggctaaacacgctattactataccacaaaacccaaaagctgctctgtatatccgcgtc

SEQ ID NO: 13565 - DNA, 260 bp, Unknown; identical to SEQ ID NO: 13224
  Description of Unknown: LeftRegion for integrase B566 sequence

SEQ ID NO: 13566 - DNA, 260 bp, Unknown
  Description of Unknown: LeftRegion for integrase B567 sequence
taacataccgccagcaaatgaccagcaaattgccgacaaataaaaaatcccccggtgctaccaacaccgagggacctgcaagaacgtgctaccaacacgctcaattatcaacccccaacaccacatcaagagctgatataatattataacatattatacacggctcttacaacgacaacccttgaaaggagccgtgtattatggctaaatacgctatttctataccccaaacccaaaaagctgctctgtatatccgcgta

SEQ ID NO: 13567 - DNA, 260 bp, Unknown; identical to SEQ ID NO: 13562
  Description of Unknown: LeftRegion for integrase B568 sequence

SEQ ID NO: 13568 - DNA, 260 bp, Unknown
  Description of Unknown: LeftRegion for integrase B569 sequence
gttctttttgctcgctattcatccgaaacactggcaaaaataaattgggacaacttcatctccgacaaaatcgacaacatcgccgatacttttgagatagattcacaactcaagcaatatatccagtaacgggtcttcatactacaagataaagcgcgaagaaaaaaatcttcgcgcttcattaactcagagggttacaaatgaatcaagacaaattaaccgataaactatcatctcaaaaatgtgctctttatattcgt

SEQ ID NO: 13569 - DNA, 260 bp, Unknown
  Description of Unknown: LeftRegion for integrase B570 sequence
aagtaatttacgtattttttgccaatatcaatacttttataaataagaaaatcccccggtgttaccagcaccgagggacctgcaagaacgtgttaccagcacgctcaattatcaaccccataccaataagagctgatataatattataacatattatacgcggctcttacaatcatagctattgaaaggagccgtgtattatggctaaacacgctattactataccccaaaacccaaaagctgctctgtatatccgcgtc

SEQ ID NO: 13570 - DNA, 260 bp, Unknown; identical to SEQ ID NO: 13557
  Description of Unknown: LeftRegion for integrase B571 sequence

SEQ ID NO: 13571 - DNA, 260 bp, Unknown
  Description of Unknown: LeftRegion for integrase B572 sequence
ctcaaatataacagcttcttccctgctttgtcagcgtttcggtagatttttccgtttttcagcaaaataaaaacgcccacggcgttaccagcaccgcaggcgttccagatcagcttaccttatatggtaaatagccaacctcacaagagttattgtaccatatcaagggaagcatatcaagttttaccttggaggatttcatggcaaaaaagaagaagccagccgggggtgttgccatcatctatgcccgctactcatcc

SEQ ID NO: 13572 - DNA, 260 bp, Unknown
  Description of Unknown: LeftRegion for integrase B573 sequence
aattctattctgatgatttaatagacagttgtgcatttttaaatcaactacctttttcttatttttctatcgatacatttaaacttatagtaaatgatttaatagaaaatgatgagataaatctgaatgattataaaaaatatattaatgaacctaaataaaactctcacggaaatattttagtctaaggagatgataaattgaacaccattgctatttatactcgtaaatctaaattcactggaaaaggtgaatctatt

SEQ ID NO: 13573 - DNA, 260 bp, Unknown
  Description of Unknown: LeftRegion for integrase B574 sequence
taagtaatttacgtattttttgccaatgtcaatacttttataaataaaaaatcccccggtgctaccaacaccgagggacctgcaagaacgtgttaccagcacgctcaattatcaaccccataccaataagagctgatataatattataacatattatacgcggctcttacaatcatagctattgaaaggagccgtgtattatggctaaacacgctattactataccccaaaacccaaaagctgctctgtatatccgcgtc

SEQ ID NO: 13574 - DNA, 260 bp, Unknown
  Description of Unknown: LeftRegion for integrase B575 sequence
aagcatttcatcagtaaatgacaggcaaattgccggcaaatgaaaagcgcccggtgttaccagcaccgagcgcaacgcggaacgtgttaccagcacgcaaccgcaaatcatcaaccccagtaccaccaagagctgatataatattataacatattatacgcggctcttacaatcatagctattgaaaggagccgtgtattatggctaaacatgctattactataccccaaaaccccaaagctgctctgtatatccgcgtt

SEQ ID NO: 13575 - DNA, 260 bp, Unknown; identical to SEQ ID NO: 13559
  Description of Unknown: LeftRegion for integrase B576 sequence

SEQ ID NO: 13576 - DNA, 260 bp, Unknown; identical to SEQ ID NO: 13569
  Description of Unknown: LeftRegion for integrase B577 sequence

SEQ ID NO: 13577 - DNA, 260 bp, Unknown
  Description of Unknown: LeftRegion for integrase B578 sequence
aatggatattaatataaacttctcttatggagaagaaagtgtccataatctagcctttatcaatgctttgtttataaaatttaacatagaaaaattaaatattagttataggagaaaagaagaattaaggaaaaaaatcctgaaagagcttgaactaagagggaaacagagttaaaatcacaacaaaaaaggagttttttatggaaaaagtaaaaattgcaatatattctagaaaatctaaatattcagataagggtgat

SEQ ID NO: 13578 - DNA, 260 bp, Unknown; identical to SEQ ID NO: 13568
  Description of Unknown: LeftRegion for integrase B579 sequence

SEQ ID NO: 13579 - DNA, 260 bp, Unknown
  Description of Unknown: LeftRegion for integrase B580 sequence
gctgtctaaagcccagcgcttggcgttctgggatgtgatgcaaaaaatcattggttcctctgcgcaatccggaagcgcagaggcctctccgcctggttccggggtagcggctgccgaggccgcctacgaaaagaactttggtactgcatccggcaccccagatgccgaagctacgagtatgcacgaagacaccgggtaaaatgaaaaaagaccacgccccggttggggtgtggtctttggtggtaaaacaaaaaagcgct

SEQ ID NO: 13580 - DNA, 260 bp, Unknown
  Description of Unknown: LeftRegion for integrase B581 sequence
gtaagtaatttacgtattttttgtcaatatcaatacttttataaaaaaaatcccccggtgttaccagcaccgagggacctgcaagaacgtgttaccagcacgctcaattatcaacccccataccaataagagtcgatataatattataacatattatacgcggctcttacaatcttagctattgaaaggagccgtgtattatggctaaacacgctattactataccccaaaacccaaaagctgctctgtatatccgcgtc

SEQ ID NO: 13581 - DNA, 260 bp, Unknown
  Description of Unknown: LeftRegion for integrase B582 sequence
taacaatatagtcagtttgaatgaccgccagcaaattgccggcaaaaaaatcccccggtgttaccagcaccgagggaccttcaagaacgtgctaccaacacgctcaattatcaacccccataccaataagagtcgatataatattataacatattatacacggctcttacaacgacaacccttgaaaggagccgtgtattatggctaaacatgctattactatacccaaaactcccaaagctgctctgtatatccgcgta

SEQ ID NO: 13582 - DNA, 260 bp, Unknown; identical to SEQ ID NO: 13421
  Description of Unknown: LeftRegion for integrase B583 sequence

SEQ ID NO: 13583 - DNA, 260 bp, Unknown
  Description of Unknown: LeftRegion for integrase B584 sequence
aagaggtaaaagggctgtatgaggcaaatagagggcttattcatgtgagagcatgggtaggctcttttttagtgcgtaaaaataattatatagcccctgtataatttccccctaaaaaatgaggagggctgtgattatgtttattaaggctaagtagagccacaggataataagcaggatcataaaggaggatatacaggatgatagataattgtgtaagagcggtattctatgccagagtatccacacaggaggaggaa

SEQ ID NO: 13584 - DNA, 260 bp, Unknown
  Description of Unknown: LeftRegion for integrase B585 sequence
ccatattccgataccctatggatagggtatctataccgtatccataccgtaccgatacctcgcgtgcgcgcgtgcgtgtgcgcgcgatcgtgcgcgcactgtctctgtatctgtatctgtatctgagactgtatctgtaatctgtttctgattctgaatatctactactgcaaatctatcgttagaagggggtggcgctgttgccgagaaaacctgcaaagcacccggcgaagccgaagcggggcaagaagctggaagtc

SEQ ID NO: 13585 - DNA, 260 bp, Unknown; identical to SEQ ID NO: 13562
  Description of Unknown: LeftRegion for integrase B586 sequence

SEQ ID NO: 13586 - DNA, 260 bp, Unknown
  Description of Unknown: LeftRegion for integrase B587 sequence
ttctttttgctcgctattcatccgacacgctggcaaaaataaattgggataacttcatctccgacaaaatcgacaacatcgccgatacttttgagatagattcacaactcaagcaatatatccagtaacgggtcttcatactacaagataaagcgcgaagaaaaaaattcttcgcgcttcattaactcagagggttacaaatgaatcaagacaaattaaccgataaactatcatctcaaaaatgtgctctttatattcgt

SEQ ID NO: 13587 - DNA, 260 bp, Unknown; identical to SEQ ID NO: 13573
  Description of Unknown: LeftRegion for integrase B588 sequence

SEQ ID NO: 13588 - DNA, 260 bp, Unknown
  Description of Unknown: LeftRegion for integrase B589 sequence
cccgcatcctgctacaaacagaatgcgggacagcgccggcggtattaccagtaccggtccggcaataatcattacccacccaaggggctgactatgctttatattataacatgttggcccctttcttcactatatataatgaagaatatttctgcttaaaagtcaggaatatttttccgtgaaaaaaggaggctttttttatgtttgtaagacacaagaaaaatatgaaatatgcattatatggtcgtgtttcttctatc

SEQ ID NO: 13589 - DNA, 260 bp, Unknown
  Description of Unknown: LeftRegion for integrase B590 sequence
taacataccgccagcaaatgaccagcaaattgccgacaaataaaaaatcccccggtgctaccaacaccgagggacctgcaagaacgtgctaccaacacgctcaattatcaacccccaacaccacatcaagagctgatataatattataacatattatacacggctcttacaacgacaacccttgaaaggagccgtgtattatgactaaatacgctatttctataccccaaacccaaaaagctgctctgtatatccgcgta

SEQ ID NO: 13590 - DNA, 260 bp, Unknown
  Description of Unknown: LeftRegion for integrase B591 sequence
agtaatttacgtattttttgccaatatcaatacttttataaataaaaaaatcccccggtgctaccaacaccgagggatctgcaagaacgtgctaccaacacgctcaattatcaacccccataccaataagagccgatataatattataacatattatgcacggctcttacaatcttagctattgaaaggagccgtgtattatggctaaacacactattactataccccaaaacacaaaagctgctctgtatatccgcgtc

SEQ ID NO: 13591 - DNA, 260 bp, Unknown; identical to SEQ ID NO: 13580
  Description of Unknown: LeftRegion for integrase B592 sequence

SEQ ID NO: 13592 - DNA, 260 bp, Unknown
  Description of Unknown: LeftRegion for integrase B593 sequence
gttctttttgctcgctattcatccgaaacactggcaaaaataaattgggataacttcatctccgacaaaatcgacaacatcgccgatacttttgagatagattcacaactcaagcaatatatccagtaacgggtcttcatactacaagataaagcgcgaagaaaaaaatcttcgcgcttcattaactcagagggttacaaatgaatcaagacaaattaaccgataaactatcatctcaaaaatgtgctctttatattcgt

SEQ ID NO: 13593 - DNA, 260 bp, Unknown
  Description of Unknown: LeftRegion for integrase B594 sequence
ccgtatatgccgctttttcaaaaagaacttgatatatcctccgaatggttggaaaactcatacacatacacgccaaggccgtataagccttcaaagcgcgcactccaaatggaggcggacatcaaagaaaccgctcacaagtacataacaaacgaaaaagccctcctgctgggcgcagaagggcgtaacgggtaacagatatgtcagtagatattaaatggcaggtgccaaaggcacagccggaggccagcgaactggcc

SEQ ID NO: 13594 - DNA, 260 bp, Unknown; identical to SEQ ID NO: 13569
  Description of Unknown: LeftRegion for integrase B595 sequence

SEQ ID NO: 13595 - DNA, 260 bp, Unknown; identical to SEQ ID NO: 13007
  Description of Unknown: LeftRegion for integrase B596 sequence

SEQ ID NO: 13596 - DNA, 260 bp, Unknown
  Description of Unknown: LeftRegion for integrase B597 sequence
taacataccgccagcaaatgaccagcaaattgccgacaaataaaaaatcccccggtgctaccaacaccgagggacctgcaagaacgtgctaccaacacgctcaattatcaacccccaacaccacatcaagagtcgatataatattataacatattatgcacggctcttacaatcttagctattgaaaggagccgtgtattatggctaaacacgctatttctataccccaaaacccaaaagctgctctgtatatccgcgtc

SEQ ID NO: 13597 - DNA, 260 bp, Unknown
  Description of Unknown: LeftRegion for integrase B598 sequence
tcgccgcatcttaaaacagtatgcaaaaataaaacgcccacggcggcaaccgtgaacgttttaatagattgttacctgtcgacagaaaaggccggctgtagtaactccctagcaagtgttattatagcataggcctttttcttttgaaagggcttattttttatacccttttttagaaaaatagaaaggttgtgtatattatggcttatgctacgaaagtacctgctgccagtgcagacgatcggatcgttgcgatctat

SEQ ID NO: 13598 - DNA, 260 bp, Unknown
  Description of Unknown: LeftRegion for integrase B599 sequence
tccgatacgcttgttttgtccgcaaacggagagaccaacggtctgcaaaatctgtttgaagatatccgctttgggcaaatcgatggcgtcataattgaagatacaatcttttttggcgaaaattctacccgcttgacgcagattatagacttttttgccgctcatcaaacccgcatccaagttgtcagggagaccgtatcatgtccgaaaaaataatcaattgcgccatttatacccgtaaatctaccgaagaaggactg

SEQ ID NO: 13599 - DNA, 260 bp, Unknown
  Description of Unknown: LeftRegion for integrase B600 sequence
caataagcccgtaatagagctgctgctgaaaagagacgaggatccggaaacctttgtctttgaattgcaacgtctcctgatgtgctaccaggtagccagccgggaagatagaaatgtggtatgggcggctctaaacaaatatgctgctcaggtagataagattagccccgaataggggctttttctgttggagggaatatatgagtaggacaacgaacaaaagacctggaaaagccaaatccggactttccagaaaacaa

SEQ ID NO: 13600 - DNA, 260 bp, Unknown
  Description of Unknown: LeftRegion for integrase B601 sequence
ttacaaattagaaactgaataaagaaaataaaaccgctcccggcggcaaccggaaacggctttatatagattgttacccgtcaaccgtgggctgactatgataactccctagcaagtgttattatagcataggcccacaatctttgaaagggcttatttttatacccttttttagaaaaaatagaaaggttgtgtatattatggcttatgctatgaaagtacctgctgccagtgccgacgatcggatcgttgcgatctat

SEQ ID NO: 13601 - DNA, 260 bp, Unknown
  Description of Unknown: LeftRegion for integrase B602 sequence
ttacaaattagaaactgaataaagaaaataaaaccgctcccggcggcaaccggaaacggctttatatagattgttacccgtcaaccgtgggctgactataataactccctagcaagtgttattatagcataggcccacaatctttgaaagggcttatttttatacccttttttagaaaaaatagaaaggttgtgtatgttatggcttatgctatgaaagtgcctgctgccagtgccgacgatcgggccgttgcgatctat

SEQ ID NO: 13602 - DNA, 260 bp, Unknown
  Description of Unknown: LeftRegion for integrase B603 sequence
agttgtaactcttgttatcaatttaatgcataaaaaatagcgcccctgctctggtaaagtaaggcgctattttttagttactactctatccggcggtcaggtgtgcactgaccaacggttctcttgttaagtacattatatctattcatatactttttgtcaaacagatattacatatatttcaacaaaggagcatccatatggcacgaaagagaactaatctaatcggcaacactccgtctgtacgcgaaacaaaagtc

SEQ ID NO: 13603 - DNA, 260 bp, Unknown
  Description of Unknown: LeftRegion for integrase B604 sequence
gccgcactttaaaacagtatacaaaaaataaaacgcccacggcggcaaccgtgaacgttttaatagattgttacctgtcgacagaaaaggccggctgtagtaactccctcgcaagtgttattatagcataggcctttttcttttgaaagggcttattttttatacccttttttagaaaaattagaaaggttgtgtatattatggcttatgctatgaaagtacctgctgccagtgccgacgatcggatcgttgcgatctat

SEQ ID NO: 13604 - DNA, 260 bp, Unknown
  Description of Unknown: LeftRegion for integrase B605 sequence
agttgtaactcttgttatcaatttaatgcataaaaaatagcgcccctgctctggtaaagtaaggcgctattttttagttactactctatccggcggtcaggtgtacactgaccaacggttctcttgttaagtacattatatctattcatatactttttgtcaaacagatattacatatattccaacaaaggagcatccatatggcacgaaagagaactaatctaatcggcaacactccgtctgtacgcgaaacaaaagtc

SEQ ID NO: 13605 - DNA, 260 bp, Unknown
  Description of Unknown: LeftRegion for integrase B606 sequence
agttgtaactcttgttatcaatttaatgcataaaaaatagcgcccctgctctggtaaagtaaggcgctattttttagttactactctatccggcggtcaggtgtgcactgaccaacggttctcttgttaagtacattatatctattcatatactttttgtcaaacagatattacatatattctaacaaaggagcatccatatggcacgaaagagaactaatctaatcggcaacactccgtctgtacgcgaaacaaaagtc

SEQ ID NO: 13606 - DNA, 260 bp, Unknown
  Description of Unknown: LeftRegion for integrase B607 sequence
gcagtcataactcttgttgttaatattatgcataaaaaatagcgcccctgctctggaaaagtaaggcgctattttcagtgattgctttgccggcggtcaggtgtacactggccaacggttctcttgttaagtacattatatctattcatatactttttgtcaaacagatattacatatattctaacaaaggagtatccatatggcacgaaagagaactaatctaatcggcaacacgccgtctgtacgtgaaacaaaagtc

SEQ ID NO: 13607 - DNA, 260 bp, Unknown
  Description of Unknown: LeftRegion for integrase B608 sequence
caataagcccgtaatagagctgctgctgaaaagagacgaggatccggaaacctttgtctttgaattgcaacgtctcctgatgtgctaccaggtagcaagtcgggaagatagaaatgtggtatgggcggctctaaacaaatatgctgctcaggtagataagattagccccgaataggggctttttctgttggagggaatatatgagtaggacaacgaacaaaagacctggaaatgccaaatccggcctttccaggaaacaa

SEQ ID NO: 13608 - DNA, 260 bp, Unknown; identical to SEQ ID NO: 13602
  Description of Unknown: LeftRegion for integrase B609 sequence

SEQ ID NO: 13609 - DNA, 260 bp, Unknown
  Description of Unknown: LeftRegion for integrase B610 sequence
tacaaattagaaactgaataaagaaaataaaaccgctcccggcggcaaccggaaacggctttatatagattgttacctgtcgacagaaaagaccggctgtagtaactcccttgcaagtgttattatagcataggcctttttcttttgaaagggcttatttttatacccttttttagaattttagaaaggttgtgtatattatggcttatgctatgaaaatatctgctgccagtgccgacgatcggatcgttgcgatctat

SEQ ID NO: 13610 - DNA, 260 bp, Unknown
  Description of Unknown: LeftRegion for integrase B611 sequence
agttgtaactcttgttatcaatttaatgcataaaaaatagcgcccctgctctggtaaagtaaggcgctattttttagttactactctatccggcggtcaggtgtgcactgaccaacggttctcttgttaagtacattatatctattcatatactttttgtcaaacagatattacatatattccaacaaaggagcatccatatggcacgaaagagaactaatctaatcggcaacacgccgtctgtacgcgaaacaaaagtc

SEQ ID NO: 13611 - DNA, 260 bp, Unknown
  Description of Unknown: LeftRegion for integrase B612 sequence
caataagcccgtaatagagctgctgttgaaaagagacgaggatccggaaacctttgtctttgaattgcaacgtctcctgatgtgctaccaggtagccagccgggaagatagaaatgtggtatgggcggctctaaacaaatatgctgctcaggtagataagattagccccgaataggggctttttctgttggagggaatatatgagtaggacaacgaacaaaagacctggaaatgccaaatccggcctttccaggaaacaa

SEQ ID NO: 13612 - DNA, 260 bp, Unknown
  Description of Unknown: LeftRegion for integrase B613 sequence
caataagcccgtaatagagctgctgctgaaaagagacgaggatccggaaacctttgtctttgaattgcaacgtctcctgatgtgctaccaggtagccagtcgggaagatagaaatgtggtatgggcagctctaaacaaatatgctgctcaggtagataagattagccccgtataggggctttttctgttggagggaatatatgagtaggacaacgaacaaaagacctggaaaagccaaatccggactttccaggaaacaa

SEQ ID NO: 13613 - DNA, 260 bp, Unknown
  Description of Unknown: LeftRegion for integrase B614 sequence
agttgtaactcttgttatcaatttaatgcataaaaaatagcgcccctgctctggtaaagtaaggcgctattttttagttactactctatccggcggtcaggtgtgcactgaccaacggttctcttgttaagtacattatatctattcatatactttttgtcaaacagatattacatatattccaacaaaggagcatccatatggcacgaaagagaactaatctaatcggcaacactccgtctgtacgcgaaacaaaagtc

SEQ ID NO: 13614 - DNA, 260 bp, Unknown
  Description of Unknown: LeftRegion for integrase B615 sequence
caataagcccgtaatagagctgctattgaaaagagacgaggatccggaaacctttgtctttgaattgcaacgtctcctgatgtgctaccaagtagccagtcgggaagatagaaatgtggtatgggcggctctaaacaaatatgctgctcaggtagataagattagccccgaataggggctttttctgttggagggaatatatgagtaggacaacgaacaaaagacctggaaaagccaaatccggactttccagaaagcaa

SEQ ID NO: 13615 - DNA, 260 bp, Unknown
  Description of Unknown: LeftRegion for integrase B616 sequence
actggcgcatcgtctattttcgataagtgcgccgaaaaaatactgtggctaacgtattttaataataaaatgctaagcgaaggacagatcacgaaagaagaacatagaaagatacaacagaagatttccaagattgacgcttcgtgaatatcgtagtaaaataataatgactataatgacggaagcggtgtgatttcaaaatggaagatttctataaaatcaaagaagctctcaagattatgccgattactcaaataccc

SEQ ID NO: 13616 - DNA, 260 bp, Unknown; identical to SEQ ID NO: 13613
  Description of Unknown: LeftRegion for integrase B617 sequence

SEQ ID NO: 13617 - DNA, 260 bp, Unknown
  Description of Unknown: LeftRegion for integrase B618 sequence
tacaaattagaaactgaataaagaaaataaaaccgctcccggcggcaaccggaaacggctttatatagattgttacccgtcaaccgtgggctgactataataactccctagcaagtgttattatagcataggcccacaatctttgaaagggcttatttttatacccttttttagaaaaaaatagaaaggttgtgtatattatggcttatgctatgaaagtacctgctgccagtgccgacgatcggattgttgcgatctat

SEQ ID NO: 13618 - DNA, 260 bp, Unknown
  Description of Unknown: LeftRegion for integrase B619 sequence
caataagcccgtaatagagctgctgttgaaaagagacgaggatccggaaacctttgtctttgaattgcaacgtctcctgatgtgctaccaggtagccagccgggaagatagaaatgtggtatgggcggctctaaacaaatatgctgctcaggtagataagattagccccgtataggggctttttctgttggagggaatatatgagtaggacaacgaacaaaagacctggaaaagccaaatccggactttccaggaaacaa

SEQ ID NO: 13619 - DNA, 260 bp, Unknown; identical to SEQ ID NO: 13600
  Description of Unknown: LeftRegion for integrase B620 sequence

SEQ ID NO: 13620 - DNA, 260 bp, Unknown
  Description of Unknown: LeftRegion for integrase B621 sequence
caataagcccgtaatagagctgctgctgaaaagagacgaggatccggaaacctttgtctttgaattgcaacgtctcctgatgtgctaccaggtagccagccgggaagatagaaatgtggtatgggcggctctaaacaaatatgctgctcaggtagataagattagccccgaataggggctttttctgttggagggaatatatgagtaggacaacgaacaaaagacctgtaaaagccaaatccggactttccagaaaacaa

SEQ ID NO: 13621 - DNA, 260 bp, Unknown
  Description of Unknown: LeftRegion for integrase B622 sequence
aaatattatagaattgcgttttcaaaaataaaaacgcccacggcggcaaccgtgaacgttttaatagattgttacctgtcgacagaaagggccggctgtagtaactccctaccaagtgttattatagcatgggcctttttcttttgaaagggcttatttttatacccttttttagaaaaaatagaaaggttgtgtatgttatggcttgtgctatgaaagtacctgctaccagtgtcgacgatcggatcgttgcgatctat

SEQ ID NO: 13622 - DNA, 260 bp, Unknown; identical to SEQ ID NO: 13612
  Description of Unknown: LeftRegion for integrase B623 sequence

SEQ ID NO: 13623 - DNA, 260 bp, Unknown; identical to SEQ ID NO: 13602
  Description of Unknown: LeftRegion for integrase B624 sequence

SEQ ID NO: 13624 - DNA, 260 bp, Unknown
  Description of Unknown: LeftRegion for integrase B625 sequence
aatttagttgtgccattgcttctgaagatgaacaagatattattctgaagttccgcaagatgtcaaaaagaggaaagcgtctctttttggccatgatggaggaactggaagaaaaataaaaacagcgcccctgctctggaaaagtaaggcgctattttgtcaaacagatattacatatattccaacaaaggagcatccatatggcacgaaagagaactaatctaatcggcaacacgccgtctgtacgtgaaacaaaagtc

SEQ ID NO: 13625 - DNA, 260 bp, Unknown; identical to SEQ ID NO: 13559
  Description of Unknown: LeftRegion for integrase B626 sequence

SEQ ID NO: 13626 - DNA, 260 bp, Unknown
  Description of Unknown: LeftRegion for integrase B627 sequence
ggctcatgtgaagctggatttttttatcgcaggattggtgggacagtttacaaaatcagggtattaacgagtgaaaacagtacagataccttttcggacaagatttcccacattatttcaagagaggcgctgacagagaaagcggattatgataagatagagctaccacaaatgagtcagttgccggaagggagttcggcatgaacagaaccagacagacaactgacaaatcgaaaaacagaataactgctctttatgag

SEQ ID NO: 13627 - DNA, 260 bp, Unknown; identical to SEQ ID NO: 13614
  Description of Unknown: LeftRegion for integrase B628 sequence

SEQ ID NO: 13628 - DNA, 260 bp, Unknown; identical to SEQ ID NO: 13612
  Description of Unknown: LeftRegion for integrase B629 sequence

SEQ ID NO: 13629 - DNA, 260 bp, Unknown; identical to SEQ ID NO: 13612
  Description of Unknown: LeftRegion for integrase B630 sequence

SEQ ID NO: 13630 - DNA, 260 bp, Unknown; identical to SEQ ID NO: 13602
  Description of Unknown: LeftRegion for integrase B631 sequence

SEQ ID NO: 13631 - DNA, 260 bp, Unknown; identical to SEQ ID NO: 13614
  Description of Unknown: LeftRegion for integrase B632 sequence

SEQ ID NO: 13632 - DNA, 260 bp, Unknown
  Description of Unknown: LeftRegion for integrase B633 sequence
acaaattagaaactgaataaagaaaataaaaccgctcccggcggcaaccggaaacggctttatatagattgttacccgtcaaccgtgggctgactataataactccctagcaagtgttattatagcataggcccacaatctttgaaagggcttatttttatacccttttttaggaaaaaaatagaaaggttgtgtatgttatggcttatgctatgaaagtacctgctgccagtgccgacgatcggatcgttgcgatctat

SEQ ID NO: 13633 - DNA, 260 bp, Unknown
  Description of Unknown: LeftRegion for integrase B634 sequence
ttacaaattagaaactgaataaagaaaataaaaccgctcccggcggcaaccggaaacggctttatatagattgttacccgtcaaccgtgggctgactataataactccctagcaagtgttattatagcataggcccacaatctttgaaagggcttatttttatacccttttttagaaaaaatagaaaggttgtgtatattatggcttatgctatgaaagtacctgctgccagtgccgacgatcggattgttgcgatctat

SEQ ID NO: 13634 - DNA, 260 bp, Unknown
  Description of Unknown: LeftRegion for integrase B635 sequence
accggtgcgtcgtctattttcgataagtgcgccgaaaaaatactgtggctaacgtattttaataacaaaatgctaagcgaaggacagatcacgaaagaagaacatagaaagatacaacagaagatttccaagattgacgcttcgcgaatatcgtagtaaaataataatgactataatgacggaagcggtgtgatttcaaaatggaagatttctataaaatcaaagaagctctcaagattatgccgattactcaaataccc

SEQ ID NO: 13635 - DNA, 260 bp, Unknown
  Description of Unknown: LeftRegion for integrase B636 sequence
agttgtaactcttgttatcaatttaatgcataaaaaatagcgcccctgctctggtaaagtaaggcgctattttttagttactactctatccggcggtcaggtgtgcactgaccaacggttctcttgttaagtacattatatctattcatatactttttgtcaaacagatattacatatatttcaacaaaggagcatccatatggcgcgaaagagaactaatctaatcggcaacactccgtctgtacgcgaaacaaaagtc

SEQ ID NO: 13636 - DNA, 260 bp, Unknown; identical to SEQ ID NO: 13597
  Description of Unknown: LeftRegion for integrase B637 sequence

SEQ ID NO: 13637 - DNA, 260 bp, Unknown
  Description of Unknown: LeftRegion for integrase B638 sequence
accggcgcgtcgtctattttcgataagtgcgcagaaaaaatactgtggctaacgtattttaataacaaaatgctaagcgaaggacagatcacgaaagaagaacatagaaagatacaacagaagatttccaagattgacgcttcatgaatatcgtagtaaaataataatgactataatgacggaagcggtgtgatttcaaaatggaagatttctataaaatcaaagaagctctcaagattatgccgattactcaaataccc

SEQ ID NO: 13638 - DNA, 260 bp, Unknown
  Description of Unknown: LeftRegion for integrase B639 sequence
cggattacgattcgccgcaccttaaaacagtatacaaaaataaaacgcccacggcggcaaccgtgaacgttttatagattgttacccgtcaacccgtgggctgactataataactctctcgcaaagattattatagcataagcccacaatgtttgaaagggcttatttttgtacccttttttagaaaggttgtgtgtattatggcttatgcttcgcaaaatactgctgccagattcgatgatcggatcgtcgcgatctat

SEQ ID NO: 13639 - DNA, 260 bp, Unknown
  Description of Unknown: LeftRegion for integrase B640 sequence
cgccgcaccttaaaacggtatacaaaataaaaacgcccacggcggcaaccgtgaacgttttagcagtttgttacctgtcgacagaaaaggccggctgtagtaactccccaacagtgttattatagcataggcctttttcttttgaaagggcttatttttatacccttttttagaaaaaaaatagaaaggttgtgtatattatggcttatgctatgaaagtacccgctgccagtgccgacgatcggatcgttgcgatttat

SEQ ID NO: 13640 - DNA, 260 bp, Unknown
  Description of Unknown: LeftRegion for integrase B641 sequence
aaatattatagaattgcgttttcaaaaataaaaacgcccacggcggcaaccgtgaacgttttaatagattgttacctgtcgacagaaagggccggctgtagtaactccctaccaagtgttattatagcatgggcctttttcttttgaaagggcttatttttatacccttttttagaaaaaatagaaaggttgtgtgtattatggcttatgctatgaaagtacctgctgccagtgccgacgatcggatcgttgcgatctat

SEQ ID NO: 13641 - DNA, 260 bp, Unknown; identical to SEQ ID NO: 13612
  Description of Unknown: LeftRegion for integrase B642 sequence

SEQ ID NO: 13642 - DNA, 260 bp, Unknown
  Description of Unknown: LeftRegion for integrase B643 sequence
caataagcccgtaatagagctgctgctgaaaagagacgaggatctggaaacctttgtctttgaattgcaacgtctcctgatgtgctaccaggtagccagccgggaagatagaaatgtggtatgggcggctctaaacaaatatgctgctcaggtagataagattagccccgaataggggctttttctgttggagggaatatatgagtaggacaacgaacaaaagacctggaaaagccaaatccggactttccagaaaacaa

SEQ ID NO: 13643 - DNA, 260 bp, Unknown
  Description of Unknown: LeftRegion for integrase B644 sequence
ttcgccgcactttaaaacagtatacaaaaataaaacgcccgcggcggcaaccgtgaacgttttaatagattgttacctgtcgacagaaaaggccggctgtagtaactccctagcaagtgttattatagcataggcctttttcttttgaaagggcttattttttataccctttttagaaaaatagaaaggttgtgtatattatggcttatgctatgaaagtacccactgccagtgccgacgatcggatcgttgcgatctat

SEQ ID NO: 13644 - DNA, 260 bp, Unknown
  Description of Unknown: LeftRegion for integrase B645 sequence
caataagcccgtaatagagctgctgctgaaaagagacgaggatccggaaacctttgtctttgaattgcaacgtctcctgatgtgctaccaggtagcaagtcgggaagatagaaatgtggtatgggcagctctaaacaaatatgctgctcaggtagataagattagccccgtataggggctttttctgttggagggaatatatgagtaggacaacgaacaaaagacctggaaaagccaaatccggactttccaggaaacaa

SEQ ID NO: 13645 - DNA, 260 bp, Unknown; identical to SEQ ID NO: 13612
  Description of Unknown: LeftRegion for integrase B646 sequence

SEQ ID NO: 13646 - DNA, 260 bp, Unknown
  Description of Unknown: LeftRegion for integrase B647 sequence
ttcgccgcatcttgaaacagtatacaaaaataaaacgcccacggcggcaaccgtgaacgttttaatagattgttacctgtcgacagaaaaggccggctgtagtaactccctaccaagtgttattatagcatgggcctttttcttttgaaagggcttatttttatacccttttttagaaaaacagaaaggttgtgtatattatggcttatgctatgaaagtgcctgctgccagtgccgacgatcggatcgttgcgatctat

SEQ ID NO: 13647 - DNA, 260 bp, Unknown
  Description of Unknown: LeftRegion for integrase B648 sequence
tctctttttggccatgatggaggaactggaagaaaaataaaaacagcgcccctgctctggaaaagtaaggcgctattttcagtgattgctttgccggcggtcaggtgtacactggccaacggttctcttgttaagcacaatctattcatatactttttgtcaaacagatattacatatattccaacaaaggagcatccatatggcacgaaagagaactaatctaatcggcaacacgccgtctgtacgcgaaacaaaagtc

SEQ ID NO: 13648 - DNA, 260 bp, Unknown; identical to SEQ ID NO: 13610
  Description of Unknown: LeftRegion for integrase B649 sequence

SEQ ID NO: 13649 - DNA, 260 bp, Unknown
  Description of Unknown: LeftRegion for integrase B650 sequence
gtttcgatgcgcactgtcggatcgtgggagcgcggagactcttttccgaatgccgaacagctctggaacgctgcggtcgctctaaagtgcacaccaaacgatatcctgatgtggaatccgctgccagatgccgcaccggcatgcgccatgacagacaccgaacgcgatgtgctccaagatttccgccagagctcgcccgcatggcaatcgaacatcgcggtgacggcaaagctcgccgcgaacgagtcaaaggaaaactg

SEQ ID NO: 13650 - DNA, 260 bp, Unknown
  Description of Unknown: LeftRegion for integrase B651 sequence
actaattttagagtttgaacaagattgtaattaatattaaaaaccgtccttgctgcgaacaaggacggttatcggatataccgttgacaggaaatcctgtgatacgatacgacccagacaaccgtattgtatcacaagaacctgaaaaaatcaaagggtcctttttttgtacccttttttaagaaaggattgtgattaatatggcttacagaagcaccattactaccccatctgctgcttcacgcaaggtgaaggcagct

SEQ ID NO: 13651 - DNA, 260 bp, Unknown
  Description of Unknown: LeftRegion for integrase B652 sequence
gcgttgcaacggctcagccctatccgagccgactactccggcattgaatatgcagttatacagagtatacaagtctacccccccccccggcgttttgcataatttttgcatatccgttttgtgcatattaacatggcggtcccgcacagacggggccgcctttccttctacccttatcattcttttttggaggtccgatcatggcaaaactggctaagcgtatatccgaggttctaagtgagctaaaggctgccatatac

SEQ ID NO: 13652 - DNA, 260 bp, Unknown; identical to SEQ ID NO: 13614
  Description of Unknown: LeftRegion for integrase B653 sequence

SEQ ID NO: 13653 - DNA, 260 bp, Unknown
  Description of Unknown: LeftRegion for integrase B654 sequence
ttcgccgcaccttaaaacagtatacaaaaataaaacgcccacggcggcaaccgtgaacgttttaatagattgttacctgtcgacagaaagggccggctgtagtaactccctaccaagtgttattatagcatgggcctttttcttttgaaagggcttatttttataccctttttagaaaaaatagaaaggttgtgtatgttatggcttatgctatgaaagcacctgctaccagtgccgacgatcggatcgttgcgatctat

SEQ ID NO: 13654 - DNA, 260 bp, Unknown
  Description of Unknown: LeftRegion for integrase B655 sequence
aatttagttgtgccattgcttctgaagatgaacaagatattattctgaagttccgcaagatgtcaaaaagaggaaagcgtctctttttggccatgatggaggaactggaagaaaaataaaaacagcgcccctgctctggaaaagtaaggcgctattttgtcaaacagattttacatatattccaacaaaggagcatccatatggcacgaaagagaactaatctaatcggcaacacgccgtctgtacgcgaaacaaaagtc

SEQ ID NO: 13655 - DNA, 260 bp, Unknown
  Description of Unknown: LeftRegion for integrase B656 sequence
tcgccgcatcttaaaacagtatacaaaaataaaaacgcccacggcggcaaccgtgaacgttttaatagattgttacctgtcgacagaaaaggccggctgtagtaactccctaccaagtgttattatagcatgggcctttttcttttgaaagggcttattttttacgcccttttttaaaaaacagaaaggttgtgtatattatggcttatgctatgaaagtacctgctgccagtgccgacgatcggatcgttgcgatctat

SEQ ID NO: 13656 - DNA, 260 bp, Unknown; identical to SEQ ID NO: 13599
  Description of Unknown: LeftRegion for integrase B657 sequence

SEQ ID NO: 13657 - DNA, 260 bp, Unknown
  Description of Unknown: LeftRegion for integrase B658 sequence
tcgccgcaccttaaaacagtatacaaaaataaaacgcccacggcggcaaccgtgaacgttttaatagattgttacctgtcgacagaaaaggccggctgtagtaactccctagcaagtgttattatagcataggcctttttcttttgaaagggcttattttttatacccttttttagaaaaatagaaaggttgtgtatattatggcttatgctgcgaaaacacttgctgccagtgcagacgatcggatcgttgcgatctat

SEQ ID NO: 13658 - DNA, 260 bp, Unknown
  Description of Unknown: LeftRegion for integrase B659 sequence
ttcgccgcaccttaaaacggtatacaaaataaaaacgcccacggcggcaaccgtgaacgttttaatagattgttacctgtcgacgaaaaggccggctgtagtaactccctagcaagtgttattatagcataggcctttttcttttgaaagggcttattttttatacccttttttagaataatagaaaggttgtgtatattatggcttatgctatgaaagtacctgctgccagtgccgacgatcggatcgttgcgatctat

SEQ ID NO: 13659 - DNA, 260 bp, Unknown
  Description of Unknown: LeftRegion for integrase B660 sequence
aggctgcgtaattctgaaatttaactaaataacaaaaaccgccccggtattggcgtaccgaagcggaattgctaagattgtaacctacgaacctcgaaggatcgcgtggcataatctccctgaacaagagcattataccacacatccttccaatttgcatagggtgtattttttataccctttttcaggaaggtgttattatggcatatcgtttttcacagcaaactgctgcccctgataccagaaccgttgccctgtac

SEQ ID NO: 13660 - DNA, 260 bp, Unknown
  Description of Unknown: LeftRegion for integrase B661 sequence
ttacaaatcagaaactgaataaagaaaataaaaccgctcccggcggcaaccggaaacggctttatatagattgttacccgtcaaccgtgggctgactataataactccctagcaagtgttattatagcataggcccacaatctttgaaagggcttattttttatacccttttttagaaaaatagaaaggttgtgtatattatggcttatgctatgaaagtacccgctgccagtgccgatgatcggatcgttgcgatctat

SEQ ID NO: 13661 - DNA, 260 bp, Unknown; identical to SEQ ID NO: 13601
  Description of Unknown: LeftRegion for integrase B662 sequence

SEQ ID NO: 13662 - DNA, 260 bp, Unknown
  Description of Unknown: LeftRegion for integrase B663 sequence
cgccgaaatcgagagcggctgtattgccgtggtcgtggtggacggtacagacgggtttttaaaacaagtcgagttcggtgagaactccacctcgcttcactcgttcaatccgtattatcccgacatggagtttgtagatgccgaccagaaacgtttgcactttgtcggtcgcgtccgggaaatgaagcggaggttctgatatgcgccagaagtttaataccgacctctccatgttaaccccggaggaacagcagcagttt

SEQ ID NO: 13663 - DNA, 260 bp, Unknown
  Description of Unknown: LeftRegion for integrase B664 sequence
cttacaaatcagaaactgaataaagaaaataaaaccgctcccggcggcaaccggaaacggctttatatagattgttacccgtcaaccgtgggctgactataataactccctagcaagtgttattatagcataggcccacaatctttgaaagggcttatttttatacccttttttagaaaaatagaaaggttgtgtatgttatggcttatgctatgaaagtacccgctgccagtgccgacgatcggatcgttgcgatctat

SEQ ID NO: 13664 - DNA, 260 bp, Unknown
  Description of Unknown: LeftRegion for integrase B665 sequence
aatattatagaattgcattttcaaaaataaaaacgcccacggcggcaaccgtgaacgttttaatagattgttacctgtcgacagaaaaggccggctgtagtaactccctagcaagtgttattatagcataggcctttttcttttgaaagggcttattttttataccctttttttagaaaaatagaaaggttgtgtatattatggcttatgctatgaaagtacctgctgccagtgccgacgatcggatcgttgcgatctat

SEQ ID NO: 13665 - DNA, 260 bp, Unknown; identical to SEQ ID NO: 13612
  Description of Unknown: LeftRegion for integrase B666 sequence

SEQ ID NO: 13666 - DNA, 260 bp, Unknown; identical to SEQ ID NO: 13613
  Description of Unknown: LeftRegion for integrase B667 sequence

SEQ ID NO: 13667 - DNA, 260 bp, Unknown
  Description of Unknown: LeftRegion for integrase B668 sequence
cgcagaaattgagagcggctgtattgccgtggtcgtggtagacggtacagacgggtttttaaaacaagtcgagtttggtgagaactccacctcgcttcactcgtttaatccgtattatcccgacatggagtttgtagatgccgatcaaaaacgtttgcactttgtcggtcgcgtccgggaaatgaagcggaggttttaatatgcgtcagaagtttaaaatcgacctctccatgttaaccccggaagaacagcagcagttt

SEQ ID NO: 13668 - DNA, 260 bp, Unknown; identical to SEQ ID NO: 13602
  Description of Unknown: LeftRegion for integrase B669 sequence

SEQ ID NO: 13669 - DNA, 260 bp, Unknown
  Description of Unknown: LeftRegion for integrase B670 sequence
aaatattatagaattgcgttttcaaaaataaaaacgcccacggcggcaaccgtgaacgtttttaatagattgttacctgtcgacagaaaaggccggctgtagtaactccctaccaagtgttattatagcatgggcctttttcttttgaaagggcttatttttatacccttttttagaaaaatagaaaggttgtgtatattatggcttatgctatgaaagtacctgctgccagtgccgacgatctgatcgttgcgatctat

SEQ ID NO: 13670 - DNA, 260 bp, Unknown; identical to SEQ ID NO: 13602
  Description of Unknown: LeftRegion for integrase B671 sequence

SEQ ID NO: 13671 - DNA, 260 bp, Unknown
  Description of Unknown: LeftRegion for integrase B672 sequence
aaatattatagaattgcattttcaaaaataaaaacgcccacggcggcaaccgtgaacgttttaatagattgttacctgtcgacagaaaaggccggctgtagtaactccctagcaagtgttattatagcataggcctttttcttttgaaagggcttattttttatacccttttttagaaaaatagaaaggttgtgtatattatggcttatgctatgaaagtgcctgctgccagtgccgacgatcggatcgttgcgatctat

SEQ ID NO: 13672 - DNA, 260 bp, Unknown
  Description of Unknown: LeftRegion for integrase B673 sequence
acaggtcttttgattgtgtgcagtgacccggcgcaaaagaaaattgacagagccgatgccttgaatattccaatcatttcagagcagcaatggtatgaactcatgccagaacttgaagccgttggaatgtggaacggaaagcaaattctgtttgcggacaatgatggcatctaccgtgttgaagtggacggtgaaagctgatggccagaaaaaagaatattgctgctggcctcgatgccgtcatctatgcccggtactca

SEQ ID NO: 13673 - DNA, 260 bp, Unknown; identical to SEQ ID NO: 13612
  Description of Unknown: LeftRegion for integrase B674 sequence

SEQ ID NO: 13674 - DNA, 260 bp, Unknown; identical to SEQ ID NO: 13605
  Description of Unknown: LeftRegion for integrase B675 sequence

SEQ ID NO: 13675 - DNA, 260 bp, Unknown
  Description of Unknown: LeftRegion for integrase B676 sequence
aagggtaaagtggtaaaagggctgtatgaggcagatagagggcttattcatgtgagagcatgggtaggctcttttttagtgcgtgaaaataattatatagcccctgtataatttccccctaaaaaatgaggagggctgtgattatgtttattaaggctaagtagagccacaggataataagcataacaggaggtagcaggatgagtacaggagcagggcttagagctgtattttacgccagagtatccacagaagaagaa

SEQ ID NO: 13676 - DNA, 260 bp, Unknown
  Description of Unknown: LeftRegion for integrase B677 sequence
aaatattatagaattgcgttttcaaaaataaaaacacccacggcggcaaccgtggacgttttaatagattgttacctgtcgacagaaaaggccggctgtagtaactcccttgcaagtgttattatagcataggcctttttcttttgaaagggcttattttttatacccttttttagaaaaatagaaaggttgtgtatattatggcttatgctacgaaaacacttgctgccagtgccgatgatcggatcgttgcgatctat

SEQ ID NO: 13677 - DNA, 260 bp, Unknown; identical to SEQ ID NO: 13663
  Description of Unknown: LeftRegion for integrase B678 sequence

SEQ ID NO: 13678 - DNA, 260 bp, Unknown
  Description of Unknown: LeftRegion for integrase B679 sequence
tacaaattagaaactgaataaagaaaataaaaccgctcccggcggcaaccggaaacggctttatatagattgttacccgtcaaccgtgggctgactataataactccctagcaagtgttattatagcataggcccacaatctttgaaagggcttatttttatacccttttttagaaaaaaatagaaaggttgtgtgtgttatggcttatgctatgaaagtgcctgctgccagtgccgacgatcgggccgttgcgatctat

SEQ ID NO: 13679 - DNA, 260 bp, Unknown
  Description of Unknown: LeftRegion for integrase B680 sequence
tttttggccatgatggaggaactggaagaaaaataaaaacagcgcccctgctctggaaaagtaaggcgctattttcagtgattgctttgccggcggtcaggtgtacactgaccaacggttctcttgttaagcacattatatctattcatatactttttgtcaaacagatattacatatattccaacaaaggagcatccatatggcacgaaagaaaactaatctaatcggcaacacgccgtctgtacgcgaaacaaaagtc

SEQ ID NO: 13680 - DNA, 260 bp, Unknown
  Description of Unknown: LeftRegion for integrase B681 sequence
tccgatacgcttgttttgtccgcaaacggagagaccaacggtctgcaaaatctgtttgaagatatccgcttcgggcaaatagatggcgtcataattgaagatacaatcttttttggcgaaaattctacccgcttgacgcagattatagacttttttgccgctcatcaaacccgcatccaagtcgtcagggagaccgtgccatgcccgaaaaaataatcaattgtgccatttatacccgtaaatctactgaagaaggcttg

SEQ ID NO: 13681 - DNA, 260 bp, Unknown; identical to SEQ ID NO: 13606
  Description of Unknown: LeftRegion for integrase B682 sequence

SEQ ID NO: 13682 - DNA, 260 bp, Unknown
  Description of Unknown: LeftRegion for integrase B683 sequence
ggacgaactgcacgacgccgtcgcaaacggccacaccgagctgtgggaactggcagacgtttttgacgttacgatagatctcgttcgcaaagcggtgagctggtacaaatacggaaatttatattccgtttgaaactggttcgatttaagaaagaaaagctctccgaaataatcgaagagccaaataggtgatatgtaatatgtctgtagatattaaatgggccatcccacaaaccggatcgcaagtgacaacagagggc

SEQ ID NO: 13683 - DNA, 260 bp, Unknown
  Description of Unknown: LeftRegion for integrase B684 sequence
attcacccccaaaaaccacttgtcccagaaagagatgcctttgttctggaacttcagcggctccttgcctgttatcaactggcagatcaaagagatagggaaattgtatggtccgtactcaataaatatgtaccaaatatcatttagtaataaggacagccccaggcaggggctttctttatgtgcttgggagaaatatcatggcgagaagaaaaacgacttcaaggggcgtatctacgtccattcgagaaactaaagtt

SEQ ID NO: 13684 - DNA, 260 bp, Unknown; identical to SEQ ID NO: 13682
  Description of Unknown: LeftRegion for integrase B685 sequence

SEQ ID NO: 13685 - DNA, 260 bp, Unknown
  Description of Unknown: LeftRegion for integrase B686 sequence
ttcagccacaagcaccacttgttccagaaaaagacgcttttgtcctggagctccaacgtctcctcgcctgctatcaactggcagatcaaagagacagggaaattgtgtggtctgtgctcaacaaatatgtaccacatattgtttaaaatcaaaggatagccccatgcaggggctttctttatgcacttgggagaaatattatggtaagaagaaaaaccgctttaaggggcgtatctgcgtccactcgcataactaaagta

SEQ ID NO: 13686 - DNA, 260 bp, Unknown
  Description of Unknown: LeftRegion for integrase B687 sequence
tcttcaggaagtaagtggaaatattatgtgttgaaatcctcttccataccgcttgccgttcaaaggcttgggtatatctcatacgatgggcttcttactttgaagccacggcaatgccgccgaaaaagattggataaaacaatattggaagtgatggccgcttgatctcaggcggctttcattttacgaaaggagcattgatggaattttcaaaattgacaagagtagcgatatacattcgtgtttccacaactatgcag

SEQ ID NO: 13687 - DNA, 260 bp, Unknown
  Description of Unknown: LeftRegion for integrase B688 sequence
tcttcaggaagtaagtggaaatattatgtgttgaaatcctcttccataccgcttaccgttcaaaggcttgggtatatctcatacgatgggcttcttgctttgaagcctcggcaatgccgccgaaaaagattggataaaacaatattagaagtgatggccgcttgatctcaggcggctttcattttacgaaaggagcattgatggaattttcaaaattgacaagagtagcgatatacattcgtgtttccaccactatgcag

SEQ ID NO: 13688 - DNA, 260 bp, Unknown
  Description of Unknown: LeftRegion for integrase B689 sequence
gattgatatgctctacaagaagggccttgtcaacgaggcaacctatctgaatgtcaagcaaacctatccgcaaaagtgaacacttttccggcaagttgtcaaggatatcaggccagcgtccgtatcattgctgattctgttgttttcgggtattctcgccttgtcagaacaaatcagaagccataaaggaggaagatgctatgtacaatatgtctccgtactcattgtcccgttctttccgggacaaaccctgccgagca

SEQ ID NO: 13689 - DNA, 260 bp, Unknown
  Description of Unknown: LeftRegion for integrase B690 sequence
ttcagccacaagcaccacttgttccagaaaaagacgcttttgtcttggagcttcaacgcctcctcgcctgctatcaactggcagatcaaagagacagggaaattgtgtggtctgtgctcaacaaatatgtaccacatattgtttaaaatcaaaggatagccccatgcaggggctttcttcatgcacttgggagaaatattatggtaagaagaaaaaccgctttaaggggcgtatctgcgtccactcgcataactaaagta

SEQ ID NO: 13690 - DNA, 260 bp, Unknown
  Description of Unknown: LeftRegion for integrase B691 sequence
ctgattgatatgctctacaagaagggacttatcaacgaagcaacctattttaatgtgaaacgaacctatcagaacaagtagttttttgcgctgggttgtcaaggatgtcagcccagtgtccatatcattgcagattaaagattttttgagtattctcgttttgtcagaagaaatcaggaacactaaaggaggaagatgctatgtacaatatgtctccgtactcattatctcgatcttttcgggacaaaccctgtcgggca

SEQ ID NO: 13691 - DNA, 260 bp, Unknown; identical to SEQ ID NO: 13680
  Description of Unknown: LeftRegion for integrase B692 sequence

SEQ ID NO: 13692 - DNA, 260 bp, Unknown
  Description of Unknown: LeftRegion for integrase B693 sequence
ccatattccgataccctatggatagggtatctataccgtatccataccgtaccgatacctcgcgtgcgcgcgtgcgtgtgcgcgcgatcgtgcgcgcactgtctctgtacctgtatctgtatctgaggctgtatctgtaatctgtttctgattctgaatatctactactgcaaatctatcgttagaagggggtggcgctgttgccgagaaaacctgcaaagcacccggcgaagccgaagcggggcaagaagctggaaatc

SEQ ID NO: 13693 - DNA, 260 bp, Unknown
  Description of Unknown: LeftRegion for integrase B694 sequence
tccgatacgcttgctttgtccgcaaacggagagaccaacggtctgcaaaatctgtttgaagatatccgctttgggcagatcgatggcgtcataattgaagatacaaccttttttggcgaaaattctactcgtttaatacagattatggactttttcgccgctcaccaaacccgcatccaagttgtcagggagaccgtatcatgtccgaaaaaataatcaattgcgccatttatacccgtaaatctaccgaagaaggcctg

SEQ ID NO: 13694 - DNA, 260 bp, Unknown
  Description of Unknown: LeftRegion for integrase B695 sequence
ttcagccacaagcaccacttgttccagaaaaagacgcttttgtcctggagctccaacgcctcctcgcctgctatcaactggcagatcaaagagacagggaaattgtgtggtctgtgctcaacaaatatgtaccacatattgtttaaaatcaaagaatagccccatgcaggggctttctttatgcacttgggagaaatattatggcaagaagaaaaaccgctttaaggggcgtatctgcgtccactcgcataactaaagta

SEQ ID NO: 13695 - DNA, 220 bp, Unknown
  Description of Unknown: LeftRegion for integrase B696 sequence
ccggtcgatcacctcgtttatcttcttctcgacctcagccatggcctctgggctaggctcctccgccaatagataatcgcatttagacttcttataattaaatactattgtaaatttcaataagagttgtatatttgtactacacttaaagcaacaagatatgaagaaagctgcaatatatttaagggtttcaacttctgatcagaattatgacaggcaa

SEQ ID NO: 13696 - DNA, 260 bp, Unknown
  Description of Unknown: LeftRegion for integrase B697 sequence
ttcagccacaagcaccacttgttccagaaaaagacgcttttgtcttggaacttcaacgcctcctcgcctgctatcaactggcagatcaaagagacagggaaattgtgtggtctgtgctcaacaaatatgtaccacatattgtttaaaatcaaaggatagccccatgcaggggctttctttatgcacttgggagaaatattatggtaagaagaaaaaccgctttaaggggcgtatctgcgtccactcgcataactaaagta

SEQ ID NO: 13697 - DNA, 260 bp, Unknown
  Description of Unknown: LeftRegion for integrase B698 sequence
accctcagaaaaccttgatttttaggcattttccgtgctctcgctattttgtagattttttctctttcaaaaatgcaatttctaaaaatcagagcattttttattttttctacttcagatggacgttttatacgaaaaaattttgtgactgtccgagagaatgtccaaggacaatccctgaataaataaggaggaatcctatgccaaactatatagacaaactaaataagcaaaaggttgctatatacatcagagtttct

SEQ ID NO: 13698 - DNA, 260 bp, Unknown
  Description of Unknown: LeftRegion for integrase B699 sequence
attcaaccacaacatccattagttccagaaaaagacgcttttgttctggaacttcaacggctcctcgcctgttaccagctggccgaccaaagagacagggaaattgtgtggtctgtactcaataaatatgtaccacatatcatttaaaacaaaggacagccccgtgcaggggctttctttgtgtatttgggagaaacattatggcaagaaggaaaaccgccctaaggggcatatctgcgtctgtgcgtgaaaccaaagta

SEQ ID NO: 13699 - DNA, 260 bp, Unknown
  Description of Unknown: LeftRegion for integrase B700 sequence
ttcaaccacaaacacctttggttcccaaaaaagaggcttttgtcttggaacttcaaaggctccttgcctgctaccagttggcagatcaaagagacagggaaattgtgtggtctgtgctcaacaaatatgtgccacatatcatttaaaatcaaaggacagccccatgcaggggctttctttatgcacttgggagaaatattatggcaagaagaaaaaccgctttaaggggcgtatctgcgcccgctcgcataactaaagta

SEQ ID NO: 13700 - DNA, 260 bp, Unknown
  Description of Unknown: LeftRegion for integrase B701 sequence
ttccatcgctccgcaagctcgaccccatccgggccgactactccggtataacagatgcaattatacagagcatacaagtctacccccccccgttttgcataattattgcatatccgttttgtgcattataacagagcagccccgcacagacgggactgctcttccttttctgtatctcgttttcttttggaggtctgagcatggcgaaactggttagccgcatatccgaggctctttcggagatgaaagtcgcaatctat

SEQ ID NO: 13701 - DNA, 260 bp, Unknown
  Description of Unknown: LeftRegion for integrase B702 sequence
gtcattatgcaagaatgcggaaaagagacagctccagaaaaagaggagttgatcgaagaattgcaacgtcttctggcgtgctatcaaatcgcaagccgggacgacaagcaggtggtttgggcggcgttgaataaatatatgccgcagataaagcaagtatagccccgtgtaggggctatttctttttacggagggaaattatggcttataaggctaaagcgcccgattcaggcgcagaaaaggatatcagagtagcaatc

SEQ ID NO: 13702 - DNA, 260 bp, Unknown
  Description of Unknown: LeftRegion for integrase B703 sequence
atgaatttgtgggatttttatgtgcttccaaccaagaccatcgacagagaaaagcctaggcagaaaacaattactttgccatcattactaacattggatccgatcaaatgcacatacatagaattaaaagaaactgttgataaaattttagccgtctgagaaatcaggcggttttttaaagaacttaggaggacttgctaatgaataatactttatctgcacttaatataacaccctctccgccccggatgtgccgagta

SEQ ID NO: 13703 - DNA, 260 bp, Unknown
  Description of Unknown: LeftRegion for integrase B704 sequence
aataaaaaaagcagcccttagctgggctgcatattttaaacacatgttgcgcaaacatacgttttatttttagtattttatatgcaaacacttgatttagaacgaatcaaatattttatacttctgcttcaaagtttcaaaaatcttatactttttgaaaaattatcgataaaaccattaattaacgaaaggagttctttatgcctaacctaccatattccaacgaatttgcaaaattaattatagcgatttattgccgt

SEQ ID NO: 13704 - DNA, 260 bp, Unknown
  Description of Unknown: LeftRegion for integrase B705 sequence
cagatgaacttcgaaactggtgaaaaaatacaataataaaaaaccgcccttgctgcgaacaaggacggcttatcggatataccgttgacaggaaatcctgtgatacgatacgacccagacaaccgtattgtatcacagaatcctataaaaatcaaagggttctttttttgtacccttttttcagaaaggatgatattaatatggcttacaagaagaacattaccactccccctgctgccccgacgcgcaagttgaaggca

SEQ ID NO: 13705 - DNA, 260 bp, Unknown
  Description of Unknown: LeftRegion for integrase B706 sequence
aataaaaaaagcagcccttaaccgggctgcatattttaaccgcaagtttggcaaacatacgtttcttttttagctttttatatgcaaacacttgatttggactgaatcaaatattttatacttctgcttaaaagttttaaaaatcttatactttttgaaaaattatcgataaaaccattaattaacaaaaggagttctttatgccgaacctaccctattccaacgaatttacaaaattaattatagcgatttattgccgt

SEQ ID NO: 13706 - DNA, 260 bp, Unknown
  Description of Unknown: LeftRegion for integrase B707 sequence
ctgtatgagccatcatccaaaggcaatgacagcgagcgtgatgcttacgttcaggaactccaacgtttgctcgcttgctatcagcttgccagttcagatgataaaaatgtcgtttgggcagtgctgaacaaatatgcaccgcatatcgacacgatatagccccaggcattgggcttttcttgttgtatgggaaaatcattatgagaaataaatcattggcaggaagagccaataaccgggcagaacgccctcgtaaggtt

SEQ ID NO: 13707 - DNA, 260 bp, Unknown
  Description of Unknown: LeftRegion for integrase B708 sequence
acataaaatcgactaaatttaacataaaataacacgaatttgacacgatattgtaatgacttttacaaacaaagtatgatactatagtatcctaggttataattctaggtattgcatttaaggcaatataagtttttattctaaataaacacaaaggaaattcattcttttgtgtttttttgtaaaggggatgataataaatgaatgaaaacaaaaaagtaatcgtaggactttatcctcgtgtttcaactgaagatcaa

SEQ ID NO: 13708 - DNA, 260 bp, Unknown
  Description of Unknown: LeftRegion for integrase B709 sequence
ctgtatgagccatcatccaaaggcaatgacagcgagcgtgatgcttacgttcaggaactccaacgtttgctcgcttgctatcagcttgccagttcagatgataaaaatgtcgtttgggcagtgctgaacaaatatgcaccgcatatcaacacgatatagccccaggcatggggcttttcttgttgtatgggaaaattattatgagaaataaatcattggcaagaagagccaataaccgggcagaacgccctcgtaaggtt

SEQ ID NO: 13709 - DNA, 260 bp, Unknown
  Description of Unknown: LeftRegion for integrase B710 sequence
atatcgccaactggtcggccgctcaaggtgcagctaccgcaccgcagcccgttcagcaggtagtggagcagaaaccgtctcccgccgatgaaatccgcaaatacaagggcctgctggatgacggtatcatcacgcaggaagaatttgaagctaagaaaaagcaactgctgggcctgtaaatttgaaaggagcgtgacggcatgagaaaaaagtccaacctcaatgcggctactcgtgccgtcatctatgccaggtattcc

SEQ ID NO: 13710 - DNA, 260 bp, Unknown; identical to SEQ ID NO: 13662
  Description of Unknown: LeftRegion for integrase B711 sequence

SEQ ID NO: 13711 - DNA, 260 bp, Unknown
  Description of Unknown: LeftRegion for integrase B712 sequence
ctccgcaatctatcgactatgaagccaggacgggtgttttcaaggggtccggcaaaaagccgtatgaggtcaccgaaaccacctgcacctgccgagattattttgtccgcaagctgccgtgcaagcatatctaccggctgcgcatggagcttgccaaggctgacggcgaatagttttcaccagaaaaggagcatgacggcatgagaaaaaagtccaacctcaatgcggctactcgtgccgtcatctatgccaggtattcc

SEQ ID NO: 13712 - DNA, 260 bp, Unknown
  Description of Unknown: LeftRegion for integrase B713 sequence
gtcattatgcaagaatgtgaaaaagagacagctccagaaaaagaggagttgatcgaagaattgcaacgtcttctggcgtgctatcaaatcgcaagccgggacgacaagcaggtggtttgggcggcgttgaataaatatatgccgcagataaagcaagtatagccccgtgtaggggctatttctttttacggagggaaattatggcttataaggctaaagcgcccgattcaggcgcagaaaaggatatcagagtagcaatc

SEQ ID NO: 13713 - DNA, 260 bp, Unknown
  Description of Unknown: LeftRegion for integrase B714 sequence
atgaatttgtgggatttttatgtgcttccaaccaagaccatcgacagagaaaagcctaggcagaaaacaattactttgccatcattactaacattggatccgatcaaatgcacatacatagaattaaaagaaactgttgataaaattttagccgtctgagaaatcaggcggttttttaaagaacttaggaggacttgctaatgaataatactttatctgcacttaatataacgccctctccgccccggatgtgccgagta

SEQ ID NO: 13714 - DNA, 260 bp, Unknown
  Description of Unknown: LeftRegion for integrase B715 sequence
atgaatttatgggatttttatgtgcttccagctaaaaccattgacagagaaaaacaaaggcagaaaataattactttgccgtcgttgttaacattaaatccgatcaaatgtacttatttagaattaaaagaaactgttgataaaattttagccgtctgagaaatcaggcggctttttaaagaacttaggaggacttgctaatgaataatactttatctgcacttaatataacgccctctccgccccggatgtgtcgagtg

SEQ ID NO: 13715 - DNA, 260 bp, Unknown
  Description of Unknown: LeftRegion for integrase B716 sequence
ctatatgagccatcatctaagggcaatgatagtgaacgcgatgcttatgtgcaggaactccagcgattattggcttgctatcagcttgccagttcagatgataagaatgtcgtttgggctgtgctgaataaatacgcaccgcatatcgacacgatatagccccaggcatggggcttttcttgttatatgggaaaatcatcatgagaaataaatcattggcaggaagagccaataaccgggcagaacgccctcgtaaggtt

SEQ ID NO: 13716 - DNA, 260 bp, Unknown; identical to SEQ ID NO: 13714
  Description of Unknown: LeftRegion for integrase B717 sequence

SEQ ID NO: 13717 - DNA, 260 bp, Unknown
  Description of Unknown: LeftRegion for integrase B718 sequence
gttatgatattttccgtgacaaagagggcgtattcgttattccatacggagcgcagcaggtaaaacagccagatgggcaatatgtttatgattttccgaacgatgaagtaaccgatatgctgaataagcatcattgcaatagatgtgctggcggttatgttacaaaggcgcgcgagtaagcccgaaaggagcgtgacggcatgaaaaagcgaatcaacactaattccgcagcccgtgccgtcatctacgcacgttattcc

SEQ ID NO: 13718 - DNA, 260 bp, Unknown
  Description of Unknown: LeftRegion for integrase B719 sequence
atgaatttgtgggatttttatgtgcttccgaccaagaccatcgacagagaaaagccgaggcagaaaacaattactttgccatcattactaacattggatccgatcaaatgcacatacatagaattaaaagaaactgttgataaaattttagccgtctgagaaatcaggcggttttttaaagaacttaggagaacttgctaatgaataatactttatctgcacttaatataacaccctctcctccccggatgtgccgagta

SEQ ID NO: 13719 - DNA, 260 bp, Unknown
  Description of Unknown: LeftRegion for integrase B720 sequence
atgaatttatgggatttttatgtgcttccagctaaaaccattgacagagaaaaacaaaggcagaaaataattactttgccatcgttgttaacattaaatccgatcaaatgtacatacatagaattaaaagaaactgttgataaaattttagccgtctgagaaatcaggcggttttttaaagaacttaggagaacttgctaatgaataatactttatctgcacttaatataacgccctctcctccccggatgtgccgagta

SEQ ID NO: 13720 - DNA, 260 bp, Unknown; identical to SEQ ID NO: 13714
  Description of Unknown: LeftRegion for integrase B721 sequence

SEQ ID NO: 13721 - DNA, 260 bp, Unknown
  Description of Unknown: LeftRegion for integrase B722 sequence
caataaaaaagcagcccttaaccgggctgcatattttaaacacaagccacacgaacatacgtttcgtttttggctttttatatgcaaacacttgatttggactgaatcaaatattttatacttctgcttcaaagtttcaaaaatcttatactttttgaaaaattatcgataaaaccattaattaacgaaaggagttctttatgcctaacctaccctattccaacgaatttgcaaaattaattatagcgatttattgccgt

SEQ ID NO: 13722 - DNA, 260 bp, Unknown
  Description of Unknown: LeftRegion for integrase B723 sequence
gtcattatgcaagaatttgaaaaagagacagctccagaaaaagaggagttgatcgaagaattgcaacgtcttctggcgtgctatcaaatcgcaagccgggacgacaagcaggtggtttgggcggcgttgaataaatatatgccgcagataaagcaagtatagccccgtgtaggggctatttctttttacggagggaaattatggcttataaggctaaagcgccagattcaggcgcagaaaaggatatcagagtagcaatc

SEQ ID NO: 13723 - DNA, 260 bp, Unknown
  Description of Unknown: LeftRegion for integrase B724 sequence
aataaaaaaagcagcccttagctgggctgcatattttaaacacatgttgcacaaacatacgttttatttttagtattttatatgcaaacacttgatttagaacgaatcaaatattttatacttctgcttcaaagtttcaaaaatcttatactttttgaaaaattatcgataaaaccattaattaacgaaaggaattctttatgcctaacctaccctattccaacgaatttgcaaaattaattatagcaatttattgccgt

SEQ ID NO: 13724 - DNA, 260 bp, Unknown
  Description of Unknown: LeftRegion for integrase B725 sequence
gagatacagtatgcagctgtcaatgttgaaacaattacgctcgttaaaacttataagtgaagcagagtatcagctggtagagaaaaaattaaaaaaagattatggtgttatttctaatattaccgcttgactattatagtgttgcgttgtaaaattatatcaacactacggtaggaacacaaaaagaaaggagcggtcaaatggaagttgaaatcattaaggcgaagggtgctggtgaggatacttctacgggaagaaag

SEQ ID NO: 13725 - DNA, 260 bp, Unknown
  Description of Unknown: LeftRegion for integrase B726 sequence
acaataaaaagcagcccttagctgggctgcatattttaaacacaagttgtacaaacatacgttttatttttggtgttttatatacaaacacttgatttagaacgaatcaaatattttatacttctgcttcaaagtttcaaaaatcttatactttttgaaaaattatcgataaaaccattaattaacgaaaggagttctttatgcctaacctaccctattccaacgaatttgcaaaattaattatagcgatttattgccgt

SEQ ID NO: 13726 - DNA, 260 bp, Unknown; identical to SEQ ID NO: 13712
  Description of Unknown: LeftRegion for integrase B727 sequence

SEQ ID NO: 13727 - DNA, 260 bp, Unknown; identical to SEQ ID NO: 13714
  Description of Unknown: LeftRegion for integrase B728 sequence

SEQ ID NO: 13728 - DNA, 260 bp, Unknown
  Description of Unknown: LeftRegion for integrase B729 sequence
catatacgaaagagcaaagccagaagacaaatacgttgtctgggctttgctccaaagatacttaaagaatgatatagaagtagaggcgttcaggagcctcttagagacgcttgaaaaatagtatagtaattatattaagaggcacaaggaaacgcattagaacgtccttgtgcctcgtttaatctgtgtgaggtgatatgatgataaacattgatgaaaagctatcaaagaaaaaggctgctggctatatcagagtatca

SEQ ID NO: 13729 - DNA, 260 bp, Unknown
  Description of Unknown: LeftRegion for integrase B730 sequence
caccatgctacaaaagttggacccgtatttcgcagactatgatggcatccgtgatgccgttgtccgttcgctggatgtgtactcccctcgcaattcgcataattcttagtgttcttttttgtgcataacaaaaaagcagccccgcactacgcacggagctgctttttcttcagccatcattatcttctggaggtttcgcaatgggctatgtgacgaagaaagcggcacaacgctttgaggaaaagaaagccgccatatac

SEQ ID NO: 13730 - DNA, 260 bp, Unknown
  Description of Unknown: LeftRegion for integrase B731 sequence
tatgctgcaaaagctggacccataccttgtagactatggcagcatccgtgatgccgttgtcgattccttgaatgtgtaccccccccccgacattttgcatagtttctatcattcctttttgtgcataacagaaaagcagccccgcactacgcacggagctgctttttcttcagctatcattatcttctggaggttccgcaatgggctatgtggtgaagaaggcggcacaacgctttgaggaaaagaaagccgccatatac

SEQ ID NO: 13731 - DNA, 260 bp, Unknown
  Description of Unknown: LeftRegion for integrase B732 sequence
tatattatagcaaatatgctttgaatgtcaattgaaaaaccgcccctgcagcaacagagacggttcaggaatatatccgaagatgatactccaaacatgcaaaaatattgtatcatcttcggaacagcttcgcaagcggaacacccgttccccgctggctgttatttttatacccatttttagaagaaaggtgatacattatggcttatccaacgaaaaacactgctgccgacaatcgaatcatcgcaatctatgtgcgt

SEQ ID NO: 13732 - DNA, 260 bp, Unknown
  Description of Unknown: LeftRegion for integrase B733 sequence
actatgctgcaaaagctggacccataccttgtagactatggcagcatccgtgatgccgttgtcgattccttgaatgtgtaccccccccgacattttgcatagtttctatcattcctttttgtgcataacagaaaagcagccccgcactacgcacggagctgctttttcttcagctatcattatcttctggaggttccgcaatgggctatgtggtgaagaaggcggcacaacgctttgaggaaaagaaagccgccatatac

SEQ ID NO: 13733 - DNA, 260 bp, Unknown
  Description of Unknown: LeftRegion for integrase B734 sequence
atgctgcaaaagctggacccataccttgcagactatggcagcatccgtgatgccgttgttcattcgctggatgtgtacccccctccccgacattttgcataatttctttcattcctttttgtgcataacagaaaagcagccccgcactacgcacggagctgctttttcttcagctatcattatcttctggaggtttcgcaatgggctatgtgacgaagaaggcggcacaacgctttgaggaaaagaaagccgccatatac

SEQ ID NO: 13734 - DNA, 260 bp, Unknown
  Description of Unknown: LeftRegion for integrase B735 sequence
atcgtaatattcttttgtattaatgtcaatattaaaaccggctcctgttggtgcaggaaccggcaatagaatatatccgaagataataccctaaacacacaaaatattgtatcatcttcggaacagcttcgcaagcggaacacccgttccccgctggctgttatttttatactcattttttagaagaaaggtgatgcatgatggcttatccaatgaaaaacactgctgccgacaatcgaatcatcgcaatctatgtgcgt

SEQ ID NO: 13735 - DNA, 260 bp, Unknown
  Description of Unknown: LeftRegion for integrase B736 sequence
ctatgctgcaaaagctggacccataccttgtagactatggcagcatccgtgatgccgttgtcgattccttgaatgtgtaccccccccccacattttgcatagtttctatcattcctttttgtgcataacagaaaagcagccccgcactacgcacggagctgctttttcttcagctatcattatcttctggaggttccgcaatgggctatgtggtgaagaaggcggcacaacgctttgaggaaaagaaagccgccatatac

SEQ ID NO: 13736 - DNA, 260 bp, Unknown
  Description of Unknown: LeftRegion for integrase B737 sequence
gcaaaagctggacccataccttgtagactatggcagcatccgtgatgccgttgtcgattccttgaatgtgtaccccctccccccccccgacattttacatagtttctatcattcctttttgtgcataacagaaaagcagccccgcactacgcacggagctgctttttcttcagctatcattatcttctggaggttccgcaatgggctatgtggtgaagaaggcggcacaacgctttgaggaaaagaaagccgccatatac

SEQ ID NO: 13737 - DNA, 260 bp, Unknown
  Description of Unknown: LeftRegion for integrase B738 sequence
ctgctaccaacaggaaccggcaaacgccctgtccgtacaacagacaactacctaggacgattttactataacacctccggagatgctacagcttcagaccaaaaatattgtatcatcttcgggcagcctatgcaagcggaacacctgttccccgctggctgttatttttatactcattttttgaagaaaggtgatgcatgatggcttatccaacaaaaaacactgctgccgacaaccggattatcgcaatctatgtgcgt

SEQ ID NO: 13738 - DNA, 260 bp, Unknown
  Description of Unknown: LeftRegion for integrase B739 sequence
ccctctcgacatgaatttgtgggatttttatgtgctttcgaccaagaccatcgacagagaaaagccgaggcagaaaacaattactttgccatcattactaacattggatccgatcaaatgcacatacatagaattaaaagaaactattgataagattttagccgcctgattttcagacggttttttaggagggatagcctatgaatactttatctgcacttaatataacgccctctcctccccggatgtgccgagtagca

SEQ ID NO: 13739 - DNA, 260 bp, Unknown
  Description of Unknown: LeftRegion for integrase B740 sequence
ccctctcgacatgaatttgtgggatttttatgtgcttccgaccaagaccatcgacagagaaaagcctaggcagaaaacaattactttgtcatcattactaacattggatccgatcaaatgcacatacatagaattaaaagaaactattgataagattttagccgcctgattttcagacggttttttaggagggatagcctatgaatactttatcttcacttaatataacgccctctccgccccggatgtgccgagtagca

SEQ ID NO: 13740 - DNA, 260 bp, Unknown
  Description of Unknown: LeftRegion for integrase B741 sequence
tatgctgcaaaagctggacccataccttgcagactatggcagcatccgtgatgccgttgttcattcgctggatgtgtacccccctccccgacattttgcataatttctttcattccttttgtgcataacagaaaagcagccccgcactacgcacggagctgctttttcttcagctatcattatcttctggaggtttcgcaatgggctatgtgacgaagaaggcggcacaacgctttgaggaaaagaaagccgccatatac

SEQ ID NO: 13741 - DNA, 260 bp, Unknown
  Description of Unknown: LeftRegion for integrase B742 sequence
tatgctgcaaaagctggacccataccttgcagactatggcagcatccgtgatgccgttgtcgattccctgaatgtgtaccccccccccgacattttgcatagtttctatcattcctttttgtgcataacagaaaagcagccccgcactacgcacggagctgctttttcttcagctatcattatcttctggaggtttcgcaatgggctatgtgacgaagaaggcggcgcaacgctttgaggaaaagaaagccgccatatac

SEQ ID NO: 13742 - DNA, 260 bp, Unknown
  Description of Unknown: LeftRegion for integrase B743 sequence
atgctgcaaaagctggacccataccttgcagactatggcagcatccgtgatgccgttgtcgattccttgaatgtgtacccccccccccgacattttgcatagtttctatcattcctttttgtgcataacagaaaagcagccccgcactacgcacggagctgctttttcttcagctatcattatcttctggaggtttcgcaatgggctatgtgacgaagaaggcggcacaacgctttgaggaaaagaaagccgccatatac

SEQ ID NO: 13743 - DNA, 260 bp, Unknown
  Description of Unknown: LeftRegion for integrase B744 sequence
tgctgcaaaagctggacccataccttgcagactatggcggcatccgtgatgccgttatccattcgctggatgtgtatcccccccccccgacaatttgcataattcttagcgttcttttttgtgcataacagaaaggcagccccgcactacgcacggagctgctttttcttcagctatcattatcttctggaggtttcgcaatgggctatgtgacgaagaaggcggcacaacgctttgaggaaaagaaagccgccatatac

SEQ ID NO: 13744 - DNA, 260 bp, Unknown
  Description of Unknown: LeftRegion for integrase B745 sequence
atacttttgatccgtcgtccgacgcttatctgactgccgaaaaggacggcaccgttatcatggaaggctttggctcattccctgcttatgctcacaaaggcatggttcttatgcagaccgacaaccttccccaggaagtgattgacctgttcgatgccatgtaaagctccacattgtctttctgcaaaggtggtgtccctatgaagaaacaaccaaccggcggcaagcggcttgttgcctactaccgctacagcggcggc

SEQ ID NO: 13745 - DNA, 260 bp, Unknown
  Description of Unknown: LeftRegion for integrase B746 sequence
tatgctgcaaaagctggacccataccttgcagactatggcggcatccgtgatgccgttatccattcgctggatgtgtatcccccccccgacaatttgcataattcttagcgttcttttttgtgcataacagaaaggcagccccgcactacgcacggagctgctttttcttcagctatcattatcttctggaggtttcgcaatgggctatgtgacgaagaaggcggcacaacgctttgaggaaaagaaagccgccatatac

SEQ ID NO: 13746 - DNA, 260 bp, Unknown
  Description of Unknown: LeftRegion for integrase B747 sequence
atgctgcaaaagctggacccataccttgcagactatggcagcatccgtgatgccgttgtcgattccttgaatgtgtacccccccccccgacattttgcatagtttctatcattcctttttgtgcataacagaaaagcagccccgcactacgcacggagctgctttttcttcagctatcattatcttctggaggtttcgcaatgggctatgtgacgaggaaggcggcacaacgctttgaggaaaagaaagccgccatatac

SEQ ID NO: 13747 - DNA, 260 bp, Unknown
  Description of Unknown: LeftRegion for integrase B748 sequence
acaaaagttggagccataccgcgctgactatggcggcatccgagatgccgttatccattcgctggatgtgtacccccctcccactcccgacaatttgcataattcttagcgttcttttttgtgcataacagaaaagcagccccgcactacgcacggagctgctttttcttcagttatcattatcttctggaggtttcgcaatgggctatgtgacgaagaaggcggcacaacgctttgaggaaaagaaagccgccatatac

SEQ ID NO: 13748 - DNA, 260 bp, Unknown
  Description of Unknown: LeftRegion for integrase B749 sequence
aagctggacccataccttgcagactatggcagcatccgtgatgccgttgtcgattccctgaatgtgtacccccccccccccaccccccgacattttgcatagtttctatcattcctttttgtgcataacagaaaagcagccccgcactacgcacggagctgctttttcttcagctatcattatcttctggaggtttcgcaatgggctatgtgacgaagaaggcggcgcaacgctttgaggaaaagaaagccgccatatac

SEQ ID NO: 13749 - DNA, 260 bp, Unknown
  Description of Unknown: LeftRegion for integrase B750 sequence
tatgctgcaaaagctggacccataccttgcagactatggcagcatccgtgatgccgttgtcgattccttgaatgtgtaccccccccccgacattttgcatagtttctatcattcctttttgtgcataacagaaaagcagccccgcactacgcacggagctgctttttcttcagctatcattatcttctggaggttccgcaatgggctatgtggtgaagaaggcggcacaacgctttgaggaaaagaaagccgccatatac

SEQ ID NO: 13750 - DNA, 260 bp, Unknown; identical to SEQ ID NO: 13730
  Description of Unknown: LeftRegion for integrase B751 sequence

SEQ ID NO: 13751 - DNA, 260 bp, Unknown
  Description of Unknown: LeftRegion for integrase B752 sequence
ctatgctgcaaaagctggacccataccttgcagactatggcagcatccgtgatgccgttgtcgattccttgaatgtgtacccccccccgacattttgcatagtttctatcattcctttttgtgcataacagaaaagcagccccgcactacgcacggagctgctttttcttcagctatcattatcttctggaggtttcgcaatgggctatgtgacgaagaaggcggcacaacgctttgaggaaaagaaagccgccatatac

SEQ ID NO: 13752 - DNA, 260 bp, Unknown
  Description of Unknown: LeftRegion for integrase B753 sequence
accatgctgcaaaagctggacccataccttgcagactatggcagcatccgtgatgccgttgtcgattccttgaatgtgtaccccccccgacattttgcatagtttctatcattcctttttgtgcataacagaaaagcagccccacactacgcacggagctgctttttcttcagctatcattatcttctggaggtttcgcaatgggctatgtgacgaagaaggcggcacagcgctttgaggaaaagaaagccgccatatac

SEQ ID NO: 13753 - DNA, 260 bp, Unknown
  Description of Unknown: LeftRegion for integrase B754 sequence
ccctctcgacatgaatttgtgggatttttatgtgcttccgaccaagaccatcgacagagaaaagcctagtcagaaaacaattactttgccatcattactaacattggatccgatcaaatgcacatacatagaattaaaagaaactattgataagattttagccgtctgaaaatcaggcggttttttaggagggatagcctatgaatactttatctgcacttaatataacgccctctccaccaagaatgtgtcgagtagca

SEQ ID NO: 13754 - DNA, 260 bp, Unknown
  Description of Unknown: LeftRegion for integrase B755 sequence
caaaagttggagccataccgcgctgactatggcggcatccgagatgccgttatccattcgctggatgtgtacccccctcccccctcccgacaatttgaataattctcagtgttcttttttgtgcataacggaaaagcagccccgcactacgcacggagctgctttttcttcagctatcgttatcttctggaggtttcacaatgggctatgtgacgaagaaggcggcacaacgctttgaggagaagaaagccgccatatac

SEQ ID NO: 13755 - DNA, 260 bp, Unknown
  Description of Unknown: LeftRegion for integrase B756 sequence
actatgctgcaaaagctggacccataccttgcagactatggcagcatccgtgatgccgtcgtcgattccttgaatgtgtaccccccccgacattttgcatagtttctatcattcctttttgtgcataacagaaaagcagccccgcactacgcacggagctgctttttcttcagctatcattatcttccggaggttccgcaatgggctatgtggtgaagaaggcggcacaacgctttgaggaaaagaaagccgccatatac

SEQ ID NO: 13756 - DNA, 260 bp, Unknown; identical to SEQ ID NO: 13402
  Description of Unknown: LeftRegion for integrase B757 sequence

SEQ ID NO: 13757 - DNA, 260 bp, Unknown
  Description of Unknown: LeftRegion for integrase B758 sequence
atgctgcaaaagctggacccataccttgtagactatggcagcatccgtgatgccgttgtcgattccttgaatgtgtacccccccccccgacattttgcatagtttctatcattcctttttgtgcataacagaaaagcagccccgcactacgcacggagctgctttttcttcagctatcattatcttctggaggttccgcaatgggctatgtggtgaagaaggcggcacaacgctttgaggaaaagaaagccgccatatac

SEQ ID NO: 13758 - DNA, 260 bp, Unknown
  Description of Unknown: LeftRegion for integrase B759 sequence
tatgctgcaaaagctggacccgtacctcgcaaactatggcggcatccgggatgccgtcgttcattctctggatgtgtaccccccccccaacattttgcataatttctatcattcctttttgtgcataacagaaaagcagccccgcactacgcacggagctgctttttcttcagctatcattatcttctggaggtttcgcaatgggctatgtgacgaagaaggcggcacaacgctttgaggaaaagaaagccgccatatac

SEQ ID NO: 13759 - DNA, 260 bp, Unknown; identical to SEQ ID NO: 13745
  Description of Unknown: LeftRegion for integrase B760 sequence

SEQ ID NO: 13760 - DNA, 260 bp, Unknown
  Description of Unknown: LeftRegion for integrase B761 sequence
ctatgctgcaaaagctggacccataccttgcagactatggcagcatccgtgatgccgttgtcgattccttgaatgtgtacccccccccgacattttgcatagtttctatcattcctttttgtgcataacagaaaagcagccccgcactacgcacggagctgctttttcttcagctatcattatcttctggaggttccgcaatgggctatgtggtgaagaaggcggcacaacgctttgaggaaaagaaagccgccatatac

SEQ ID NO: 13761 - DNA, 260 bp, Unknown; identical to SEQ ID NO: 13757
  Description of Unknown: LeftRegion for integrase B762 sequence

SEQ ID NO: 13762 - DNA, 260 bp, Unknown
  Description of Unknown: LeftRegion for integrase B763 sequence
atgctgcaaaagctggacccataccttgcagactatggcagcatccgtgatgccgttgtcgattccctgaatgtgtacccccccccccgacattttgcatagtttctatcattcctttttgtgcataacagaaaagcagccccgcactacgcacggagctgctttttcttcagctatcattatcttctggaggttccgcaatgggctatgtggtgaagaaggcggcacaacgctttgaggaaaagaaagccgccatatac

SEQ ID NO: 13763 - DNA, 260 bp, Unknown
  Description of Unknown: LeftRegion for integrase B764 sequence
tatgctgcaaaagctggacccataccttgtagactatggcagcatccgtgatgccgttgtcgattctttgaatgtgtaccccccccccgacattttgcatagtttctatcattcctttttgtgcataacagaaaagcagccccgcactacgcacggagctgctttttcttcagctatcattatcttctggaggttccgcaatgggctatgtggtgaagaaggcggcacaacgctttgaggaaaagaaagccgccatatac

SEQ ID NO: 13764 - DNA, 260 bp, Unknown; identical to SEQ ID NO: 13757
  Description of Unknown: LeftRegion for integrase B765 sequence

SEQ ID NO: 13765 - DNA, 260 bp, Unknown
  Description of Unknown: LeftRegion for integrase B766 sequence
tatgctgcaaaagctggacccatatcttgcagactatggcagcatccgtgatgccgttgtcgattccttgaatgtgtaccccccccccgacattttgcatagtttctatcattcctttttgtgcataacagaaaagcagccccgcactacgcacggagctgctttttcttcagctatcattatcttctggaggtttcgcaatgggctatgtgacgaagaaggcggcacaacgctttgaggaaaagaaagccgccatatac

SEQ ID NO: 13766 - DNA, 260 bp, Unknown
  Description of Unknown: LeftRegion for integrase B767 sequence
acaaaagttggagccataccgcgctgactatggcggcatccgagatgccgttatccattcgctggatgtgtacccccctcccactcccgacaatttgcataattcttagcgttcttttttgtgcataacagaaaagcagccccgcactacgcacggagctgctttttcttcagctatcattatcttctggaggtttcgcaatgggctatgtgacgaagaaggcggcacaacgctttgaggaaaagaaagccgccatatac

SEQ ID NO: 13767 - DNA, 260 bp, Unknown
  Description of Unknown: LeftRegion for integrase B768 sequence
atgctgcaaaagctggatccataccttgcagactatggcagcatccgtgatgccgttgttcattcgctggatgtgtacccccctccccgacattttgcataatttctttcattcctttttgtgcataacaaaaaagcagccccgcactacgcacggagctgctttttcttcagctatcattatcttctggaggtttcgcaatgggctatgtaacgaagaaggcggcacaacgctttgaggaaaagaaagccgccatatac

SEQ ID NO: 13768 - DNA, 260 bp, Unknown
  Description of Unknown: LeftRegion for integrase B769 sequence
atgctgcaaaagctggacccatacattgcagactatggcagcattcgtgatgccgttgttcattcgctggatgtgtaccccccttcccgacattttgcataatttctttcattcctttttgtgcataacagaaaagcagccccgcactacgcacggagctgctttttcttcagctatcattatcttctggaggtttcgcaatgggctatgtgacgaagaaggcggcacaacgctttgaggaaaagaaagccgccatatac

SEQ ID NO: 13769 - DNA, 260 bp, Unknown
  Description of Unknown: LeftRegion for integrase B770 sequence
atgctgcaaaagctggacccatacattgcagactatggcagcattcgtgatgccgttgttcattcgctggatgtgtaccccccttcccgacattttgcatagtttctatcattcctttttgtgcataacagaaaagcagccccgcactacgcacggagctgctttttcttcagctatcattatcttctggaggttccgcaatgggctatgtggtgaagaaggcggcacaacgctttgaggaaaagaaagccgccatatac

SEQ ID NO: 13770 - DNA, 260 bp, Unknown
  Description of Unknown: LeftRegion for integrase B771 sequence
atgctgcaaaagctggacccgtacctcgcaaactatggcggcatccgggatgccgtcgttcattctctggatgtgtacccccccccccaatattttgcataatttctatcattcctttttgtgcataacaaaaaagcagccccgcactacgcacggagctgctttttcttcagctatcattatcttctggaggtttcgcaatgggctatgtgacgaagaaggcggcacaacgctttgaggaaaagaaagccgccatatac

SEQ ID NO: 13771 - DNA, 260 bp, Unknown
  Description of Unknown: LeftRegion for integrase B772 sequence
gctacaaaagctggagccataccgcgctgactatggcggcatccgagatgccgttatccattcgctggatgtgtaccctccccctcccgacaatttgcataattcttagcgttcttttttgtgcataacagaaaagcagccccgcactacgcacggagctgctttttcttcagctatcattatcttctggaggtttcgcaatgggctatgtgacaaagaaggcggcacaacgctttgaggaaaagaaagccgccatatac

SEQ ID NO: 13772 - DNA, 260 bp, Unknown
  Description of Unknown: LeftRegion for integrase B773 sequence
tcaaaaacctgctattcctcaacaagatgctctaatattggagttaaacagactcttagcttgctatcaacttgcatctcaggaggacagggaaatcgtctggtctgtattaaacaaatatgtagacaaaatcatttaaaaacaacaacgtgtagccccgtacaggggctttatttatttagttagttggaggaattattatgccaagaagaagaacgtctgcaaaggattgtgtgccccagcaaaaagaaattaaagtg

SEQ ID NO: 13773 - DNA, 260 bp, Unknown
  Description of Unknown: LeftRegion for integrase B774 sequence
atgctgcaaaagctggacccataccttgcagactatggcagcatccgtgatgccgttgttcattcgctggatgtgtacccccctccccgacattttgcataatttctttcattcctttttgtgcataacagaaaagcagccccgcactacgcacggagctgctttttcttcagctatcattatcttctggaggtttcgcaatgggctatgtgacgaagaaggtggcgcaacgctttgaggaaaagaaagccgccatatac

SEQ ID NO: 13774 - DNA, 260 bp, Unknown
  Description of Unknown: LeftRegion for integrase B775 sequence
cgaccatgacaatccagcccaccttcataacagatgccaatcgaacgagcgttatagccgcgcgcatgagctccgatacgttctatttcacgggtagacttgatgtcgccattttttcggatataaacgtatatatataaattaggtacattaaaactttatctttatatttgcatcataatcttaaaaatcaacgagttatggcaaaatgtatattattggtaagagtttcaacagaatctaaaaagcaggaaatatca

SEQ ID NO: 13775 - DNA, 260 bp, Unknown
  Description of Unknown: LeftRegion for integrase B776 sequence
gctgcaaaagctggacccataccttgtagactatggcagcatccgtgatgccgttgtcgattccttgaatgtgtacccccccccccccgacattttgcatagtttctatcatttctttttgtgcataacagaaaagcagccccgcactacgcacggagctgctttttcttcagctatcattatcttctggaggttccgcaatgggctatgtggtgaagaaggcggcacaacgctttgaggaaaagaaagccgccatatac

SEQ ID NO: 13776 - DNA, 260 bp, Unknown
  Description of Unknown: LeftRegion for integrase B777 sequence
tgctgcaaaagctggacccataccttgtagactatggcagcatccgtgatgccgttgtcgattccttgaatgtgtaccccccccccccgacattttgcatagtttctatcattcctttttgtgcataacagaaaagcagccccgcactacgcacggagctgctttttcttcagctatcattatcttctggaggttccgcaatgggctatgtggtgaagaaggcggcacaacgctttgaggaaaagaaagctgccatatac

SEQ ID NO: 13777 - DNA, 260 bp, Unknown
  Description of Unknown: LeftRegion for integrase B778 sequence
caccatgctacaaaagttggacccgtatttcgcagactatgatggcatccgtgatgccgttgtccgttcgctggatgtgtactcccctcgcaattcgcataattcttagtgttcttttttgtgcataacaaaaaagcagccctgcactacgcacggagctgctttttcttcagccatcattatcttctggaggtttctcaatgggctatgtgacgaagaaggcggcacaacgctttgaggaaaagaaagccgccatatac

SEQ ID NO: 13778 - DNA, 260 bp, Unknown
  Description of Unknown: LeftRegion for integrase B779 sequence
atgctgcaaaagctggacccataccttgtagactatggcagcatccgtgatgccgttgtcgattccttgaatgtgtacccccccccccgacattttgcatagtttctatcattcctttttgtgcataacagaaaagcagccccgcactacgcacggagctgctttttcttcagctatcattatcttctggaggttccgcaatgggctatgtggtgaagaaggcggcacaacgctttgagaaaaagaaagccgccatatac

SEQ ID NO: 13779 - DNA, 260 bp, Unknown
  Description of Unknown: LeftRegion for integrase B780 sequence
atctgaaatcgctcctttgacaactggtaaactaagtcgtttcatgccatcaactaagtcaaaacaccccaagaactaaatgataacatataacaaagtatctgttagtagttactacttattacctatacgtagtagataaaatatttgcagatatatttagtataattatctttgcctcaaagaaaaatgacaaagttatgaaaggtgcaatttatagtagagtatctacagaacaacaagattatagtaaacaaacg

SEQ ID NO: 13780 - DNA, 260 bp, Unknown
  Description of Unknown: LeftRegion for integrase B781 sequence
atgctgcaaaagctggacccataccttgcagactatggcagcatccgtgatgccgttgtcgattccctgaatgtgtacccccccccccgacattttgcatagtttctatcattcctttttgtgcataacagaaaagcagccccgcactacgcacggagctgctttttcttcagctatcattatcttctggaggtttcgcaatgggctatgtgacgaagaaggcggcgcaacgctttgaggaaaagaaagccgccatatac

SEQ ID NO: 13781 - DNA, 260 bp, Unknown
  Description of Unknown: LeftRegion for integrase B782 sequence
tatcgtaatattcttttgtattaatgtcaatattaaaaccggctcctgttggtgcaggaaccggcaatagaatatatccgaagataataccctaaacacacaaaatattgtatcatcttcggaacagcttcgcaagcggaacacccgttccccgctggctgttatttttatacccatttttagaagaaaggtgatgcatgatggcttatccaatgaaaaaccagactgccgacaaccggatcatcgcgatctatgtacgt

SEQ ID NO: 13782 - DNA, 260 bp, Unknown
  Description of Unknown: LeftRegion for integrase B783 sequence
atgctgaaaaaacttgacccgtacctcgtccagtatgacagcctccgtgatgccgttgtcgattccctgaatgtgtacccccccccccgacattttgcataatttctatcgttcctttttgtgcataacagaaaagcagccccgcactacgcacggagctgctttttcttcagctatcattatcttctggaggttccgcaatgggctatgtggtgaagaaggcggcacaacgctttgaggaaaagaaagccgccatatac

SEQ ID NO: 13783 - DNA, 260 bp, Unknown
  Description of Unknown: LeftRegion for integrase B784 sequence
ccctctcgacatgaatttgtgggatttttatgtgcttccgaccaagaccatcgacagagaaaagcccagtcagaaaacaattactttgccatcattactaacattggatccgatcaaatgcacatacatagaattaaaagaaactattgataagattttagccgtctgaaaatcaggcggttttttaggagggatagcctatgaatactttatctgcacttaatataacgccctctccaccaagaatgtgtcgagtagca

SEQ ID NO: 13784 - DNA, 260 bp, Unknown; identical to SEQ ID NO: 13767
  Description of Unknown: LeftRegion for integrase B785 sequence

SEQ ID NO: 13785 - DNA, 260 bp, Unknown; identical to SEQ ID NO: 13733
  Description of Unknown: LeftRegion for integrase B786 sequence

SEQ ID NO: 13786 - DNA, 260 bp, Unknown
  Description of Unknown: LeftRegion for integrase B787 sequence
atgctgcaaaagctggacccatatcttgcagactatggcagcatccgtgatgccgttgtcgattccttgaatgtgtacccccccccccgacattttgcatagtttctatcattcctttttgtgcataacagaaaagcagccccgcactacgcacggagctgctttttcttcagctatcattatcttctggaggtttcgcaatgggctatgtgacgaagaaggcggcacaacgctttgaggaaaagaaagccgccatatac

SEQ ID NO: 13787 - DNA, 260 bp, Unknown; identical to SEQ ID NO: 13732
  Description of Unknown: LeftRegion for integrase B788 sequence

SEQ ID NO: 13788 - DNA, 260 bp, Unknown
  Description of Unknown: LeftRegion for integrase B789 sequence
acaaaagttggagccataccgcgctgactatggcggcatccgagattccgttatccattcgctggatgtgtacccccctccccatcccgacaatttgcataattcttagcgttcttttttgtgcataacagaaaagcagccccgcactacgcacggagctgctttttcttcagctatcattatcttctggaggtttcgcaatgggctatgtgacgaagaaggcggcacaacgctttgaggaaaagaaagccgccatatac

SEQ ID NO: 13789 - DNA, 260 bp, Unknown
  Description of Unknown: LeftRegion for integrase B790 sequence
atattatagcaaatatgctttgaatgtcaattgaaaaaccgcccctgcagcaacagagacggttcaggaatatatccgaagatgatactccaaacatgcaaaaatattgtatcatcttcggaacagcttcgcaagcggaacacccgttccccgctggctgttatttttatactcattttttagaagaaaggtgatgcatgatggcttatccaatgaaaaacactgctgccgacaatcgaatcatcgcaatctatgtgcgt

SEQ ID NO: 13790 - DNA, 260 bp, Unknown
  Description of Unknown: LeftRegion for integrase B791 sequence
tatgctgcaaaagctggacccataccttgcagactatggcagcatccgtgatgccgttgtcgattccctgaatgtgtagccccccccgacattttgcattgtttgtttaattcagttttgtgcataacagaaaaagcagccccgcactacgcacggagctgctttttcttcagctatcattatcttctggaggtttcgcaatgggctatgtgacgaagaaggcggcacaacgctttgaggaaaagaaagccgccatatac

SEQ ID NO: 13791 - DNA, 260 bp, Unknown
  Description of Unknown: LeftRegion for integrase B792 sequence
tcaaaaacctgctattcctcaacaagatgctctaatattggagttaaacagactcttagcttgctatcaacttgcatctcaggaggacagggaaatcgtctggtctgtattaaacaaatatgtagacaaaatcatttaaaagcaacaacgtgtagccccgtacaggggctttatttatttagttagttggaggaattattatgccaagaagaagaacgtctgcaaaggattgtgtgccccagcaaaaagaaattaaagtg

SEQ ID NO: 13792 - DNA, 260 bp, Unknown
  Description of Unknown: LeftRegion for integrase B793 sequence
gcggcgataaggtcacccaggagaccaacctgctggtacttggcaataacgactattgcaaagctataaaaggcggcaaaagcaataaacaaaaaaaggcggaagaatacaagctgaagggattggatattgacataattcccgagagcgttttccgcgacatgataaatatctgaggataaccccgaaaggatcccgaaatgagccttgcgtcaaagaccgtcaccgtgccgcgtgaaaatcagctgaacgccgtgata

SEQ ID NO: 13793 - DNA, 260 bp, Unknown
  Description of Unknown: LeftRegion for integrase B794 sequence
atgctacaaaagctggagccataccgcgctgactatggcggcatccgagatgccgttatccattcgctggatgtgtacccccctccccgacaatttgaataattctcagtgttcttttttgtgcataacggaaaagcagccccgcactacgcacggagctgctttttcttcagctatcgttatcttctggaggtttcacaatgggctatgtgacgaagaaggcggcacaacgctttgaggagaagaaagccgccatatac

SEQ ID NO: 13794 - DNA, 260 bp, Unknown; identical to SEQ ID NO: 13757
  Description of Unknown: LeftRegion for integrase B795 sequence

SEQ ID NO: 13795 - DNA, 260 bp, Unknown; identical to SEQ ID NO: 13731
  Description of Unknown: LeftRegion for integrase B796 sequence

SEQ ID NO: 13796 - DNA, 260 bp, Unknown
  Description of Unknown: LeftRegion for integrase B797 sequence
ctatgttgcaaagtgcatcttctaagaggacaatttctttgtcatctcgcttcgctcgaatcttatagctaaagcattttctactccaccagcggagctggtggttgtcgttcgctcaagctacccaacagaaaagcagccccgcactacgcacggagctgctttttcttcagctatcattatcttctggaggtttcgcaatgggctatgtgacgaagaaggcggcacaacgctttgaggaaaagaaagccgccatatac

SEQ ID NO: 13797 - DNA, 260 bp, Unknown
  Description of Unknown: LeftRegion for integrase B798 sequence
atgcttgagaagctgaatccatacaagaccgactacgacggcatcaaaatggctattatacagagtctccaagtgtacccccccccccgacaatttgaataattctcagtgttcttttttgtgcataacagaaaagcagccccgcactatgcacggagctgctttttcttcagccatcattatcttctggaggttccgcaatgggctatgtggtgaagaaggcggcgcaacgctttgaggagaagaaagccgctatatac

SEQ ID NO: 13798 - DNA, 260 bp, Unknown
  Description of Unknown: LeftRegion for integrase B799 sequence
atgctgcaaaagctggacccgtacctcgcaaactatggcggcatccgggatgccgtcgttcattctctggatgtgtacccccccccccaacattttgcataatttctatcattcctttttgtgcataacagaaaagcagccccgcactacgcacggagctgctttttcttcagctatcattatcttctggaggtttcgcaatgggctatgtgacgaagaaggcggcacaacgctttgaggaaaagaaagccgccatatac

SEQ ID NO: 13799 - DNA, 260 bp, Unknown
  Description of Unknown: LeftRegion for integrase B800 sequence
gctgcaaaagctggacccataccttgcagactatggcggcatccgtgatgccgttgttcattcgctggatgtgtacccccccccctccgacattttgcataatttctttcattcctttttgtacataacagaaaagcagccccgcactacgcacggagctgctttttcttcagctatcattatcttctggaggtttcgcaatgggctatgtgacgaagaaggcggcacaacgctttgaggaaaagaaagccgccatatac

SEQ ID NO: 13800 - DNA, 260 bp, Unknown
  Description of Unknown: LeftRegion for integrase B801 sequence
tatattatagcaaatatgctttgaatgtcaattgaaaaaccgcccctgcggcaacagagacggttcaggaatatatccgaagatgatactccaaatatgcaaaaatattgtatcatcttcggaacagcttcgcaagcggaacacccgttccccgctggctgttatttttatacccatttttagaagaaaggtgatgcatgatggcttatccaatgaaaaacactgctgccgacaatcgaatcatcgcaatctatgtgcgt

SEQ ID NO: 13801 - DNA, 260 bp, Unknown
  Description of Unknown: LeftRegion for integrase B802 sequence
acaaaagttggagccataccgcgctgactatggcggcatccgagatgccgttatccattcgctggatgtgtacccccctccccatcccgacaatttgcataattcttagcgttcttttttgtgcataacagaaaagcagccccgcactacgcacggagctgctttttcttcagctatcattatcttctggaggtttcgcaatgggctatgtgacgaagaaggcggcacaacgctttgaggaaaagaaagccgccatatac

SEQ ID NO: 13802 - DNA, 260 bp, Unknown
  Description of Unknown: LeftRegion for integrase B803 sequence
ctgcaaaagctggacccataccttgtagactatggcagcatccgtgatgccgttgtcgagtccttgaatgtgtacccccccaccccccgacattttgcatagtttctatcattcctttttgtgcataacagaaaagcagccccgcactacgcacggagctgctttttcttcagctatcattatcttctggaggttccgcaatgggctatgtggtgaagaaggcggcacaacgctttgaggaaaagaaagccgccatatac

SEQ ID NO: 13803 - DNA, 260 bp, Unknown
  Description of Unknown: LeftRegion for integrase B804 sequence
caaaagctggacccataccttgcagactatggcagcatccgtgatgccgttgtcgattccctgaatgtgtaccccccccctcccccccgacattttgcatagtttctatcattcctttttgtgcataacagaaaagcagccccgcactacgcacggagttgctttttcttcagctatcattatcttctggaggtttcgcaatgggctatgtgacgaagaaggcggcgcaacgctttgaggaaaagaaagccgccatatac

SEQ ID NO: 13804 - DNA, 260 bp, Unknown
  Description of Unknown: LeftRegion for integrase B805 sequence
actatgctgaaaaaacttgacccgtacctcgtccagtatgacagcctccgtgatgccgttgtcgattccttgaatgtgtaccccccccgacattttgcatagtttctatcattcctttttgtgcataacagaaaagcagccccgcactacgcacggagctgctttttcttcagctatcattatcttctggaggttccgcaatgggctatgtggtgaagaaggcggcacaacgctttgaggaaaagaaagccgccatatac

SEQ ID NO: 13805 - DNA, 260 bp, Unknown
  Description of Unknown: LeftRegion for integrase B806 sequence
tgcaccgtatgtaacccgccgcaataataaaagccgtccctgctgtcacaggaacgaccttaccgaactatacatccgaagataatacaattctgatgcgtattatattgtatcatcttcgagcagctctcgcaagcggaacacccgttccttgctggctgtattttttatactcatttttagaagaaaggtgatacactatggcttatccaacgaaaaacactgctgccgacaaccggatcattgcgatctatgtacgt

SEQ ID NO: 13806 - DNA, 260 bp, Unknown
  Description of Unknown: LeftRegion for integrase B807 sequence
atgctgcaaaagctggacccataccttgcagactatggcagcatccgtgatgccgttgttcattcgctggatgtgtacccccctcccagacattttgcataatttctttcattcctttttgtgcgtaacagaaaagcagccccgcactacgcacggagctgctttttcttcagctatcattatcttctggaggtttcgcaatgggctatgtgacgaagaaggcggcacaacgctttgaggaaaagaaagccgccatatac

SEQ ID NO: 13807 - DNA, 260 bp, Unknown
  Description of Unknown: LeftRegion for integrase B808 sequence
tatgctgaaaaaacttgacccgtacctcgtccagtatgacagcctccgtgatgccgttgtcgattccctgaatgtgtaccccccccccgacattttgcataatttctatcattcctttttgtgcataacagaaaagcagccccgcactacgcacggagctgctttttcttcagctatcattatcttctggaggttccgcaatgggctatgtggtgaagaaggcggcacaacgctttgaggaaaagaaagccgccatatac

SEQ ID NO: 13808 - DNA, 260 bp, Unknown
  Description of Unknown: LeftRegion for integrase B809 sequence
attataacaaatatgctttaaatgtcaatttaaaaaccggctcctgttggcgcaggaaccggcaaggaataacatccgaaaatgatactccaacttagcaaaaaatattgtatcatcttcggaacagcttcgcaagcggaacacccgttccccgctggctgtattttttatacctatttttagaagaaaggtgatacattatggcttatccaacaaaaaacactgctgccgacaaccggatcatcgcaatctatgtgcgt

SEQ ID NO: 13809 - DNA, 260 bp, Unknown
  Description of Unknown: LeftRegion for integrase B810 sequence
caaaagttggagccataccgcgctgactatggcggcatccgagatgccgttatccattcgctggatgtgtacccccctcccccctcccgacaatttgaataattctcagtgttcttttttgtgcataacggaaaagcagccccgcactacgcacggagctgctttttcttcagctatcattatcttctggaggtttcgcaatgggctatgtgacgaagaaggcggcacaacgctttgaggaaaagaaagccgccatatac

SEQ ID NO: 13810 - DNA, 260 bp, Unknown
  Description of Unknown: LeftRegion for integrase B811 sequence
atgctgcaaaagctggacccataccttgtagactatggcagcatccgtgatgccgttgtcgattccttgaatgtgtacccccccccccgacattttgcatagtttctatcattcctttttgtgcataacagaaaagcagccccgcactacgcacggagctgctttttcttcagctatcattatcttctggaggtttcgcaatgggctatgtgacgaagaaggcggcacaacgctttgaggaaaagaaagccgccatatac

SEQ ID NO: 13811 - DNA, 260 bp, Unknown
  Description of Unknown: LeftRegion for integrase B812 sequence
acaaaagttggagccataccgcgctgactatggcggcatccgagatgccgttatccattcgctggatgtgtacccccctccccctcccgacaattcgcataattcttagcgttcttttttgtgcataacagaaaagcagccccgcactacgcacggagctgctttttcttcagctatcattatcttctggaggtttcgcaatgggctatgtgacgaagaaggcggcacaacgctttgaggaaaagaaagccgccatatac

SEQ ID NO: 13812 - DNA, 260 bp, Unknown
  Description of Unknown: LeftRegion for integrase B813 sequence
tatgctgcaaaagctggacccataccttgtagactatggcagcatccgtgatgccgttgtcgattccttgaatgtgtaccccccccccggcattttgcatagtttctatcattcctttttgtgcataacagaaaagcagccccgcactacgcacggagctgctttttcttcagctatcattatcttctggaggttccgcaatgggctatgtggtgaagaaggcggcacaacgctttgaggaaaagaaagccgccatatac

SEQ ID NO: 13813 - DNA, 260 bp, Unknown
  Description of Unknown: LeftRegion for integrase B814 sequence
ctatgctgaaaaaacttgacccgtacctcgtccagtatgacagcctccgtgatgccgttgtcgattccctgaatgtgtacccccccccgacattttgcataatttctatcattcctttttgtgcataacagaaaagcagccccgcactacgcacggagctgctttttcttcagctatcattatcttctggaggttccgcaatgggctatgtggtgaagaaggcggcacaacgctttgaggaaaagaaagccgccatatac

SEQ ID NO: 13814 - DNA, 260 bp, Unknown
  Description of Unknown: LeftRegion for integrase B815 sequence
atgctgaaaaaacttgacccgtacctcgtccagtatgacagcctccgtgatgccgttgtcgattccctgaatgtgtacccccccccccgacattttgcataatttctatcattcctttttgtgcataacagaaaagcagccccgcactacgcacggagctgctttttcttcagctatcattatcttccggaggttccgcaatgggctatgtggtgaagaaggcggcacaacgctttgaggaaaagaaagccgccatatac

SEQ ID NO: 13815 - DNA, 260 bp, Unknown; identical to SEQ ID NO: 13767
  Description of Unknown: LeftRegion for integrase B816 sequence

SEQ ID NO: 13816 - DNA, 260 bp, Unknown
  Description of Unknown: LeftRegion for integrase B817 sequence
atgctgcaaaagctggacccataccttgcagactatggcagcatccgtgatgccgttgttcattcgctgaatgtgtacccccccccccgacaatttgcataatttctttcattcctttttgtacataacagaaaagcagccccgcactacgcacggagctgctttttcttcagctatcattatcttctggaggtttcgcaatgggctatgtgacgaagaaggcggcacaacgctttgaggaaaagaaagccgccatatac

SEQ ID NO: 13817 - DNA, 260 bp, Unknown; identical to SEQ ID NO: 13741
  Description of Unknown: LeftRegion for integrase B818 sequence

SEQ ID NO: 13818 - DNA, 260 bp, Unknown; identical to SEQ ID NO: 13811
  Description of Unknown: LeftRegion for integrase B819 sequence

SEQ ID NO: 13819 - DNA, 260 bp, Unknown
  Description of Unknown: LeftRegion for integrase B820 sequence
ctatgctgcaaaagctggacccataccttgcagactatggcagcatccgcgatgccgttgtcgattccctgaatgtgtacccccccccgacattttgcataatttctatcattcctttttgtgcataacagaaaagcagccccgcactacgcacggagctgctttttcttcagctatcattatcttctggaggttccgcaatgggctatgtggtgaagaaggcggcacaacgctttgaggaaaagaaagccgccatatac

SEQ ID NO: 13820 - DNA, 260 bp, Unknown
  Description of Unknown: LeftRegion for integrase B821 sequence
atattatagcaaatatgctttgaatgtcaattgaaaaaccgcccctgcggcaacagagacggttcaggaatatatccgaagatgatactccaaatatgcaaaaatattgtatcatcttcggaacagcttcgcaagcggaacacccgttccccgctggctgttatttttatactcattttttagaagaaaggtgatgcatgatggcttatccaatgaaaaacactgccgcagacaaccggatcatcgcgatctatgtacgt

SEQ ID NO: 13821 - DNA, 260 bp, Unknown
  Description of Unknown: LeftRegion for integrase B822 sequence
acaggtcttttgattgtgtgcagcgactcaatgcaaaagaaaatcgacagagcggatgccctgaatattccaatcgtttcggagcagcaatggtttgaactcatgccggaacttgaggccgctggaatgtggaacggaaagccaatttcattcgcggatgacgatggtatctaccgttttgatgtgggtggtgatggataatggcaaaaaagaagaagcccgccgggggcattgccgtcatctatgcccgctactcgtcc

SEQ ID NO: 13822 - DNA, 260 bp, Unknown
  Description of Unknown: LeftRegion for integrase B823 sequence
gctgcaaaagctggacccataccttgcagactatggcagcatccgtgatgccgttgtcgattccctgaatgtgtacccccccccctccgacattttgcatagtttctatcattcctttttgtgcataacagaaaagcagccccgcactacgcacggagctgctttttcttcagctatcattatcttctggaggtttcgcaatgggctatgtgacgaagaaggcggcgcaacgctttgaggaaaagaaagccgccatatac

SEQ ID NO: 13823 - DNA, 260 bp, Unknown
  Description of Unknown: LeftRegion for integrase B824 sequence
aaacagcgtaattgcaggggtttagaagtggttagaccgtgataagtttctataatatttctatttttataaaattacaaaaacacaataacatgataacgcaaatctttcaagcgtagtttctcttttgtggttgttttctacttttcgatttgttacaataaagaacatgatacaacgaactggttcggaggcataccatggacattcacgacatccgccaacagctgcggacaaagagcatatacgacatctccctg

SEQ ID NO: 13824 - DNA, 260 bp, Unknown; identical to SEQ ID NO: 13742
  Description of Unknown: LeftRegion for integrase B825 sequence

SEQ ID NO: 13825 - DNA, 260 bp, Unknown
  Description of Unknown: LeftRegion for integrase B826 sequence
atgctgcaaaagctggacccgtacctcgcaaactatggcggtgtccgggatgccgttgttcattcgctggatgtgtacccccccccccgacaatttgaataattctcagtgtccttttttgtgcataacagaaaagcagccccgcactatgcacggagctgctttttcttcagccatcattatcttctggaggttccgcaatgggctatgtggtgaagaaggcggcgcaacgctttgaggagaagaaagccgctatatac

SEQ ID NO: 13826 - DNA, 260 bp, Unknown
  Description of Unknown: LeftRegion for integrase B827 sequence
acaaaagttggagccataccgcgctgactatggcggcatccgagatgccgttatccattcgctggatgtgtacccccctccctctcccgacaatttgcataattcttagcgttcttttttgtgcataacagaaaagcagccccgcactacgcacggagctgctttttcttcagctatcattatcttctggaggtttcgcaatgggctatgtgacgaagaaggcggcacaacgctttgaggaaaagaaagccgccatatac

SEQ ID NO: 13827 - DNA, 260 bp, Unknown
  Description of Unknown: LeftRegion for integrase B828 sequence
actatgctgcaaaagctggacccataccttgcagactatggcagcatccgtgatgccgttgttcattcgctggatgtgtaccccccccgacattttgcataatttctttcatttctttttgtgcataatagaaaagcagccccgcactacgcacggagctgctttttcttcagctatcattatcttctggaggtttcgcaatgggctatgtgacgaagaaggtggcacaacgctttgaggaaaagaaagccgccatatac

SEQ ID NO: 13828 - DNA, 260 bp, Unknown; identical to SEQ ID NO: 13556
  Description of Unknown: LeftRegion for integrase B829 sequence

SEQ ID NO: 13829 - DNA, 260 bp, Unknown; identical to SEQ ID NO: 13741
  Description of Unknown: LeftRegion for integrase B830 sequence

SEQ ID NO: 13830 - DNA, 260 bp, Unknown
  Description of Unknown: LeftRegion for integrase B831 sequence
ctatgctgcaaaagctggacccataccttgcagactatggcagcatccgtgatgccgttgtcgattccctgaatgtgtacccccccccgacattttgcatagtttctatcattcctttttgtgcataacagaaaagcagccccgcactacgcacggagctgctttttcttcagctatcattatcttctggaggtttcgcaatgggctatgtgacgaagaaggcggcgcaacgctttgaggaaaagaaagccgccatatac

SEQ ID NO: 13831 - DNA, 260 bp, Unknown
  Description of Unknown: LeftRegion for integrase B832 sequence
ctatgctgcaaaagctggacccataccttgtagactatggcagcatccgtgatgccgttgtcgattccttgaatgtgtacccccccccgacattttgcatagtttctatcattcctttttgtgcataacagaaaagcagccccgcactacgcacggagctgctttttcttcagctatcattatcttctggaggttccgcaatgggctatgtggtgaagaaggcggcacaacgctttgaggaaaagaaagccgccatatac

SEQ ID NO: 13832 - DNA, 260 bp, Unknown; identical to SEQ ID NO: 13811
  Description of Unknown: LeftRegion for integrase B833 sequence

SEQ ID NO: 13833 - DNA, 260 bp, Unknown; identical to SEQ ID NO: 13782
  Description of Unknown: LeftRegion for integrase B834 sequence

SEQ ID NO: 13834 - DNA, 260 bp, Unknown
  Description of Unknown: LeftRegion for integrase B835 sequence
tatgctgcaaaagctggacccataccttgcagactatggcagcatccgtgatgccgttgttcattcgctggatgtgtaccccccccctgacattttgcataatttctttcatttctttttgtgcataatagaaaagcagccccgcactacgcacggagctgctttttcttcagctatcattatcttctggaggtttcgcaatgggctatgtgacgaagaaggtggcacaacgctttgaggaaaagaaagccgccatatac

SEQ ID NO: 13835 - DNA, 260 bp, Unknown; identical to SEQ ID NO: 13801
  Description of Unknown: LeftRegion for integrase B836 sequence

SEQ ID NO: 13836 - DNA, 260 bp, Unknown; identical to SEQ ID NO: 13767
  Description of Unknown: LeftRegion for integrase B837 sequence

SEQ ID NO: 13837 - DNA, 260 bp, Unknown
  Description of Unknown: LeftRegion for integrase B838 sequence
gctacaaaagctggagccataccgcgctgactatggcggcatccgagatgccgttatccattcgctggatgtgtaccctctccctcccgacaatttgcataattcttagcgttcttttttgtgcataacagaaaagcagccccgcactacgcacggagctgctttttcttcagctatcattatcttctggaggtttcgcaatgggctatgtgacgaagaaggcggcacaacgctttgaggaaaagaaagccgccatatac

SEQ ID NO: 13838 - DNA, 260 bp, Unknown
  Description of Unknown: LeftRegion for integrase B839 sequence
caaaagttggagccataccgcgctgactatggcggcatccgagatgccgttatccattcgctggatgtgtactctcctcccccatcccgacaatttgcataattcttagcgttcttttttgtgcataacagaaaagcagccccgcactacgcacggagctgctttttcttcagctatcattatcttctggaggtttcgcaatgggctatgtgacgaagaaggcggcacaacgctttgaggaaaagaaagccgccatatac

SEQ ID NO: 13839 - DNA, 260 bp, Unknown
  Description of Unknown: LeftRegion for integrase B840 sequence
ttttattttacatttttgtaaacaaaatgttaacaaccggctcctgcgccaacaggaaccggcaaggaataacatccgaaaatgatactcccaaatagcaaaaatattgtatcatcttcggaacagcttcgcaagcggaacacccgttccccgctggctgttatttttatactcattttttagaagaaaggtgatgcatgatggcttatccaatgaaaaacactgctgccgacaatcgaatcatcgcaatctatgtgcgt

SEQ ID NO: 13840 - DNA, 260 bp, Unknown
  Description of Unknown: LeftRegion for integrase B841 sequence
ccggcatcgtattgtttttcgtcaatctgatttcatctctgctctgcatcggtatcgcggcttgtcttggctggtcagggtattccacccttgcggcctatgttcgtgacgtaaatattcgcctgcaggcagaacggtcggcgcgtgaggcgatggaaaccgaagaagacaattctgacgaaatcgaggaggactgatttatggacgttgtaggctattgtcgcttttcttccgaagcgcaaagggatggctattctatc

SEQ ID NO: 13841 - DNA, 260 bp, Unknown
  Description of Unknown: LeftRegion for integrase B842 sequence
acaaaagttggagccataccgcgctgactatggcggcatccgagataccgttatccattcgctggatgtgtacccccctccccctcccgacaattcgcataattcttagcgttcttttttgtgcataacagaaaagcagccccgcactacgcacggagctgctttttcttcagctatcattatcttctggaggtttcgcaatgggctatgtgacgaagaaggcggcacaacgctttgaggaaaagaaagccgccatatac

SEQ ID NO: 13842 - DNA, 260 bp, Unknown; identical to SEQ ID NO: 13783
  Description of Unknown: LeftRegion for integrase B843 sequence

SEQ ID NO: 13843 - DNA, 260 bp, Unknown
  Description of Unknown: LeftRegion for integrase B844 sequence
acaaaagttggagccataccgcgctgactatggcggcatccgagatgccgttatccattcgctggatgtgtacccccctccccctcccgacaatttgcataattcttagtgttcttttttgtgcataacagaaaagcagccccgcactacgcacggagctgctttttcttcagctatcattatcttctggaggtttcgcaatgggctatgtgacgaagaaggcggcacaacgctttgaggaaaagaaagccgccatatac

SEQ ID NO: 13844 - DNA, 260 bp, Unknown
  Description of Unknown: LeftRegion for integrase B845 sequence
ctatgtgttgcctacctatgtgctcaacgagcaaaagcccaaccagaaaaatatttctcttaattcgctgaaagctctaaaaccttacataacggattttgccggattaagggatgtaatattgaattgcccgactaaaagggcgtagaaatgaacatgcgccgttctgtaatgggacggcgtatttttggaggaaaaatatgatttcaaacagtgctgccactcacgcaaaagtggctatctacatacgagtctctaca

SEQ ID NO: 13845 - DNA, 260 bp, Unknown
  Description of Unknown: LeftRegion for integrase B846 sequence
ttatgggaactgaaaatatccgctgtgaaaacagcaatggaaaagaggacttcgtaaaggagctggagcgattgctcgcttgctatcagattgcttctttcgatgaccggaaagtagtttgggcggttctgaacaaatatgccgcctatataagctgaaattgccccataaaggggctttttcttttttgaggtggaataatgagcataaacagaaataatacaagtgagactcccaaaaaggctgctctttacgtgaga

SEQ ID NO: 13846 - DNA, 260 bp, Unknown
  Description of Unknown: LeftRegion for integrase B847 sequence
ctacgtgctgcctacctatgtgctcaatgagcaaaagcccaaccagaaaaatatttctcttaattcactgaaagctctaaaaccttacataacagattttgccggattaagggatgtgatattgaattgcccgactaaaagggcgtagaaatgaacatgcgccgttctgtaatgggacggcgtatttttggaggaaaaatatgatttcaaacagtgctgccactcacgcaaaagtggctatctacatacgagtctctaca

SEQ ID NO: 13847 - DNA, 260 bp, Unknown
  Description of Unknown: LeftRegion for integrase B848 sequence
ctatgtgttgcctacctatgtgctcaacgagcaaaagcccaaccagaaaaatatttctcttaattcactgaaagctctaaaaccttacataacggattttgccggattaagggatgtgatattgaattgcccgattaaaagggcgtagaaatgaacatgcgccgttctgtaatgggacggcgtatttttggaggaaaaatatgatttcaaacagtgctgccactcacgcaaaagtggctatctacatacgagtctctacc

SEQ ID NO: 13848 - DNA, 260 bp, Unknown; identical to SEQ ID NO: 13844
  Description of Unknown: LeftRegion for integrase B849 sequence

SEQ ID NO: 13849 - DNA, 260 bp, Unknown
  Description of Unknown: LeftRegion for integrase B850 sequence
ttatgggaactgaaaacatccgctgtgaaaacagcaatggaaaagaggacttcgtgaaggagctggagcgattgctcgcttgctatcagattgcttctttcgatgaccggaaagtagtttgggcggttctgaacaaatatgccgcctatataagctgaaattgccccataaaggggctttttcttttttgaggtggaataatgagcataaacagaaataatacaagtgagactcccaaaaaggctgctctttacgtgaga

SEQ ID NO: 13850 - DNA, 260 bp, Unknown
  Description of Unknown: LeftRegion for integrase B851 sequence
ctatgtgttgcctacctatgtgctcaacgagcaaaagcccaaccagaaaaatatttctcttaattcgctgaaagctctaaaaccttacataacggattttgccggattaagggatgtaatattgaattgcccgactaaaagggcgtagaaatgaacatgcgccgttctgtaatgggacggcgtatttttggaggaaaaatatgatttcaaacagtgctgccgctcacgcaaaagtggctatctacatacgagtctctaca

SEQ ID NO: 13851 - DNA, 260 bp, Unknown; identical to SEQ ID NO: 13844
  Description of Unknown: LeftRegion for integrase B852 sequence

SEQ ID NO: 13852 - DNA, 260 bp, Unknown
  Description of Unknown: LeftRegion for integrase B853 sequence
ccaaaaggcgaataagcgaccacggcattatgtggtgtaagtctttgggtaaatgtataacataaacgacttagacaatgatttgataaatgaattcaagactttaggaatcagtgatgaaaatgatatgataatcatactgaacggacttgatggcttggctgaaataggatacacaatttacaaaaagggaagaaacggtgattaagaaaacaaggaaacttagccacgatgaaaagatagtggagaaaaggaaacaa

SEQ ID NO: 13853 - DNA, 260 bp, Unknown
  Description of Unknown: LeftRegion for integrase B854 sequence
atgaagaaatcatggctcgatgcatcttaagagcaattaacaataggatgcttcgaagcggaattattgatgaggatactaagaaacggatagaaaatcgcattcagaggttgaaaattgtcagtaattgattgaaaaacaattatgcaggggatataatcaaattgattttgcccctgcattttttgcaggaggacattatggatatatataaggtaaggcagcttttaaaagggcaaagtatctttgacatcccgcta

SEQ ID NO: 13854 - DNA, 260 bp, Unknown
  Description of Unknown: LeftRegion for integrase B855 sequence
atgaagaaatcatggctcgatgcatcttaagagcaattaacaataggatgcttcgaagcggaattattgatgaggatactaagaaacggatagaaaatcgcattcagaggttgaaaattgtcagtaattgattgaaaaacaattatgcaggggatataatcaaattgattttgcccctgcattttttgcaggaggacattatggatatatataaggtaaggcagctcttaaaagggcaaagtatttttgacatcccgttg

SEQ ID NO: 13855 - DNA, 260 bp, Unknown
  Description of Unknown: LeftRegion for integrase B856 sequence
ttatgggaactgaaaacaatggttgcaggaattgcaacgaaaaagacgactttgtgaaggagctagagcgcttaattgcttgctatcaactagcttccttcgatgaccagaaagtagtttgggcagttcttaacaaatatgctgcccgtataaactgaaattgccccataaaggggctttttctattttgaggtgtaataatgaacattaacaaaaatattccgaataaacatcataaaaaggctgctctttatgtgcgt

SEQ ID NO: 13856 - DNA, 260 bp, Unknown; identical to SEQ ID NO: 13847
  Description of Unknown: LeftRegion for integrase B857 sequence

SEQ ID NO: 13857 - DNA, 260 bp, Unknown
  Description of Unknown: LeftRegion for integrase B858 sequence
atgaagaaatcatggctcgatgcatcttaagagcaattaacaataggatgcttcgaagcggaattattgatgaggatactaagaaacggatagaaaatcgcattcagaggttgaaaattgtcagtaattgattgaaaaacaattatgcaggggatataatcaaattgattttgcccctgcattttttgcaggaggacattatggatatatataaggtaaggcagcttttaaaagggcaaagtatctttgacatcccacta

SEQ ID NO: 13858 - DNA, 260 bp, Unknown
  Description of Unknown: LeftRegion for integrase B859 sequence
ctacgtgctacccacctacgtgctcaacgagcaaaagcccaaccagaaaaatatttctcttaattcgctgaaagctctaaaaccttacataactgattttgccggattaagggatgtaatattgaattgcccgactaaaagggcgtagaaatgaacatgcgccgttctgtaatgggacggcgtatttttggaggaaaaatatgatttcaaacagtgctgccactcacgcaaaagtggctatctacatacgagtctctaca

SEQ ID NO: 13859 - DNA, 260 bp, Unknown; identical to SEQ ID NO: 13847
  Description of Unknown: LeftRegion for integrase B860 sequence

SEQ ID NO: 13860 - DNA, 260 bp, Unknown
  Description of Unknown: LeftRegion for integrase B861 sequence
ctacgtgctacccacctacgtgctcaacgagcaaaagcccaaccagaaaaatatttctcttaattcgctgaaagctctaaaaccttacataacggattttgccggattaagggatgtaatattgaattgcccgactaaaagggcgtagaaatgaacatgcgccgttctgtaatgggacggcgtatttttggaggaaaaatatgatttcaaacagtgctgccactcacgcaaaagtggctatctacatacgagtctctaca

SEQ ID NO: 13861 - DNA, 260 bp, Unknown
  Description of Unknown: LeftRegion for integrase B862 sequence
tccagcttcagcctattaagacagactttgacggcataaaggacgctgtaacaaaatctattcccggccatttatacccccccccccccccgacaacttgcataatatttattccaccatttcgtgtaacatgacgaagcagccccgctgtgacggagctgctttttcttcagtcgtgattattttctggaggtctacgcatggcacttccgaagaagacgattccccaaattgagcaaaaacgtgccgccatctatgtc

SEQ ID NO: 13862 - DNA, 260 bp, Unknown
  Description of Unknown: LeftRegion for integrase B863 sequence
ttatgggaactgaaaacatccgctgtgaaaacagcaatgaaaaagaggacttcgtgaaggagctggagcgattgctcgcttgctatcagattgcttctttcgatgaccggaaagtagtttgggcggttctgaacaaatatgccgcctatataagctgaaattgccccataaaggggctttttcttttttgaggtggaataatgagcataaacagaaataatacaagtgagactcccaaaaaggctgctctttacgtgaga

SEQ ID NO: 13863 - DNA, 260 bp, Unknown
  Description of Unknown: LeftRegion for integrase B864 sequence
tgtataactaaccttgtaatttaattaaataacaaaaccgccccggtattggcgtaccgaagcggaattgctaagattgtaacctacgaaccttgaaggatcgtgtggcataatctccctagacaagagcattataccacacatccttccaatttgcatagggtgtattttttataccctttttcaggaaggtgttatttatggcatatcgtttttcacagcaaactgctgcccctgataccagaaccgttgccctgtac

SEQ ID NO: 13864 - DNA, 260 bp, Unknown
  Description of Unknown: LeftRegion for integrase B865 sequence
ccctgctccagcttcagcctattaagacagactttgacggcataaaggacgctgtaacaaaatctattcccggccatttatacccccccccgacaacttgcataatatttattccaccatttcgtgtaacatgacgaagcagccccgctgtgacggagctgctttttcttcagtcgtgattattttctggaggtctacgcatggcacttccgaagaagacgattccccaaattgagcaaaaacgtgccgccatctatgtc

SEQ ID NO: 13865 - DNA, 260 bp, Unknown
  Description of Unknown: LeftRegion for integrase B866 sequence
ctatgtgttgcctacctatgtgctcaacgagcaaaagcccaatcagaaaaatatttctcttaattcactgaaagctctaaaaccttacataacggattttgccggattaagggatgtgatattgaattgcccgattaaaagggcgtagaaatgaacatgcgccgttctgtaatgggacggcgtatttttggaggaaaaatatgatttcaaacagtgctgccactcacgcaaaagtggctatctacatacgagtctctaca

SEQ ID NO: 13866 - DNA, 260 bp, Unknown
  Description of Unknown: LeftRegion for integrase B867 sequence
ctatgtgttgcctacctatgtgctcaacgagcaaaagcccaatcagaaaaatatttctcttaattcactgaaagctctaaaaccttacataacggattttgccggattaagggatgtgatattgaattgcccgattaaaagggcgtagaaatgaacatgcgccgttctgtaatgggacggcgtatttttggaggaaaaatatgatttcaaacagtgctgccactcacgcaaaagtggctatctacatacgagtctctacc

SEQ ID NO: 13867 - DNA, 260 bp, Unknown
  Description of Unknown: LeftRegion for integrase B868 sequence
atgaagaaatcatggctcgatgcatcttaagagcaattaacaataggatgcttcgaagcggaattattgatgaggatactaagaaacggatagaaaatcgcattcagaggtcgaaatttgtcagtaattgattgaaaaacaattatgcaggggatataatcaaattgattttgcccctgcattttttgcaggaggacattatggatatatataaggtaaggcagcttttaaaagagcaaagtatttttgacatcccgcta

SEQ ID NO: 13868 - DNA, 260 bp, Unknown
  Description of Unknown: LeftRegion for integrase B869 sequence
ttatgggaactgaaaacatccgctgcgaaaacagcaatggaaaagaggacttcgtgaaggagctggagcgattgctcgcttgctatcagattgcttctttcgatgatcggaaagtagtttgggcggttctgaacaaatatgccgcctatataagctgaaattgccccataaaggggctttttcttttttgaggtggaataatgagcataaacagaaataatacaagtgagactcccaaaaaggctgctctttacgtgaga

SEQ ID NO: 13869 - DNA, 260 bp, Unknown; identical to SEQ ID NO: 13866
  Description of Unknown: LeftRegion for integrase B870 sequence

SEQ ID NO: 13870 - DNA, 260 bp, Unknown; identical to SEQ ID NO: 13865
  Description of Unknown: LeftRegion for integrase B871 sequence

SEQ ID NO: 13871 - DNA, 260 bp, Unknown
  Description of Unknown: LeftRegion for integrase B872 sequence
atgaagatatcatggcacgatgcatcttaagagcaatcaataaccggatgcttcggagcggaattattgatgaggagactaagaagcaaatagaaaatcgcattcagaggtcgaaatttgtcagtaattgattgaaaaacaattatgcaggggatataatcaaattgattttgcccctgcattttttgcaggaggacattatggatatatataaggtaaggcagcttttaaaagagcaaagtatttttgacatcccgctg

SEQ ID NO: 13872 - DNA, 260 bp, Unknown
  Description of Unknown: LeftRegion for integrase B873 sequence
ctacgtgctgccttcctatgtgctcaacgaacaaaagcccaaccagaaaaatatttctcttaattcactgaaagctctaaaaccttacataacggattttgccggattaagagatgtgatattgaattgcccgactaaaagggcgtagaaatgaacatgcgccgttctgtaatgggacggcgtatttttggagaaaaaaaatgatttcaaacagttccgccactcacgcaaaagtggctatatacatacgagtctctacg

SEQ ID NO: 13873 - DNA, 260 bp, Unknown
  Description of Unknown: LeftRegion for integrase B874 sequence
ctatgtgttgcctacctatgtgctcaacgagcaaaagcccaaccagaaaaatatttctcttaattcactgaaagctctaaaaccttacataacggatttttccggattaagggatgtgatattgaattgcccgattaaaagggcgtagaaatgaacatgcgccgttctgtaatgggacggcgtatttttggaggaaaaatatgatttcaaacagtgctgccactcacgcaaaagtggctatctacatacgagtctctacc

SEQ ID NO: 13874 - DNA, 260 bp, Unknown
  Description of Unknown: LeftRegion for integrase B875 sequence
ctacgttctgcctacctatgtgcttgatgagcaaaagcccaaccagaaaaatatttctcttaattctctgaaagctctaaaaccttacataacggattttgccggattaagggaagtaatattgaattgcccgactaaaagggcgtagaaatgaacatgcgccgttctgtaatgggacggcgtatttttggaggaaaaatatgatttcaaacagtgctgccactcatgcaaaagtggctatatacatacgagtctctacc

SEQ ID NO: 13875 - DNA, 260 bp, Unknown
  Description of Unknown: LeftRegion for integrase B876 sequence
ctatgtgttgcctacctatgtgctcaacgagcaaaagcccaatcagaaaaatatttctcttaattcactgaaagctctaaaaccttacataacggattttgccggattaagggatgtgatattgaattgcccgattaaaagggcgtagaaatgaacatgcgccgttctgtaatgggacggcgtatttttggaggaaaaatatgatttcaaatagtgctgccactcacgcaaaagtggctatctacatacgagtctctacc

SEQ ID NO: 13876 - DNA, 260 bp, Unknown; identical to SEQ ID NO: 13865
  Description of Unknown: LeftRegion for integrase B877 sequence

SEQ ID NO: 13877 - DNA, 260 bp, Unknown
  Description of Unknown: LeftRegion for integrase B878 sequence
tttgtattttggatgggcgtactagccgcacttttcgagggtgctggtagcgaaaaacttatttctttatgggtattgtttttgctggcctgtttcaacgtacctgacctgatccggctgaaactgggcaagtttcgggataacgtgggcggttatctgcggcaataaaaaagcccgcacactggcgggcgggtgatggtatgaaaaaagagaacgaaatccgggcagttgtctatgcccggtactcatcccattcgcaa

SEQ ID NO: 13878 - DNA, 260 bp, Unknown; identical to SEQ ID NO: 13866
  Description of Unknown: LeftRegion for integrase B879 sequence

SEQ ID NO: 13879 - DNA, 260 bp, Unknown; identical to SEQ ID NO: 13863
  Description of Unknown: LeftRegion for integrase B880 sequence

SEQ ID NO: 13880 - DNA, 260 bp, Unknown
  Description of Unknown: LeftRegion for integrase B881 sequence
ctatgtgttgcctacctatgtgctcaacgagcaaaagcccaatcagaaaaatatttctcttaattcactgaaagctctaaaaccttacataacggattttgccggattaagggatgtgatattgaattgcccgattaaaagggcgtagaaatgaacatgcgccgttctgtaatgggacggcgtatttttggagggaaaatatgatttcaaacagtgctgccactcacgcaaaagtggctatctacatacgagtctctacc

SEQ ID NO: 13881 - DNA, 260 bp, Unknown; identical to SEQ ID NO: 13880
  Description of Unknown: LeftRegion for integrase B882 sequence

SEQ ID NO: 13882 - DNA, 260 bp, Unknown
  Description of Unknown: LeftRegion for integrase B883 sequence
atgaagaaatcatggctcgatgcatcttaagagcaattaacaataggatgcttcgaagcggaattattgatgaggatactaagaaacggatagaaaatcgcattcagaggttgaaaattgtcagtaattgattgaaaaacaattatgcaggggatataatcaaattgattttgcccctgcattttttgcaggaggacattatggatatatataaggtaaggcagcttttaaaagggcaaagcatctttgacatcccgcta

SEQ ID NO: 13883 - DNA, 260 bp, Unknown; identical to SEQ ID NO: 13860
  Description of Unknown: LeftRegion for integrase B884 sequence

SEQ ID NO: 13884 - DNA, 260 bp, Unknown; identical to SEQ ID NO: 13844
  Description of Unknown: LeftRegion for integrase B885 sequence

SEQ ID NO: 13885 - DNA, 260 bp, Unknown
  Description of Unknown: LeftRegion for integrase B886 sequence
gtgaattaggagggatgtcatgtgaccgataagacagttatgctgattataaataagcgattatatgatgaaggtataataagtcgagaagtatatacaaaaatcatcacgcaaataaataaatgttaaaaagcattgagcgaaatcattgtatggagtataatataaatggtttcgctcctttttgaaggagaatcgaaatgaacatataccatacaagagaaagactaagaacccgttctatttatgatttgaattta

SEQ ID NO: 13886 - DNA, 260 bp, Unknown; identical to SEQ ID NO: 13866
  Description of Unknown: LeftRegion for integrase B887 sequence

SEQ ID NO: 13887 - DNA, 260 bp, Unknown
  Description of Unknown: LeftRegion for integrase B888 sequence
ttatgggaactgaaaacatccgctatgaaaacagcaatggaaaagaggacttcgtgaaggagctggagcgattgctcgcttgctatcagattgcttctttcgatgaccggaaagtagtttgggcggttctgaacaaatatgccgcctatataagctgaaattgccccataaaggggctttttcttttttgaggtggaataatgagcataaacagaaataatacaagcgagactcctaaaaaggctgctctttacgtgaga

SEQ ID NO: 13888 - DNA, 260 bp, Unknown
  Description of Unknown: LeftRegion for integrase B889 sequence
gtgaattaggagggatgtcatgtgaccgataagatagtcatgctgattataaataagcgattatatgatgaaggtataataagtcgagaagtatatacaaaaatcatcacgcaaataaataaatgttaaaaagcattgagcgaaatcattgtatggagtataatataaatggtttcgctcctttttgaaggagaatcgaaatgaacatataccatacaagagaaaggctaagaacccgttctatttatgatttgaattta

SEQ ID NO: 13889 - DNA, 260 bp, Unknown
  Description of Unknown: LeftRegion for integrase B890 sequence
gtgaattaggagggatgtcatgtgaccgataagatagtcatgctgattataaataagagattatatgatgaaggtataataagtcgagaagtatatacaaaaatcatcacgcaaataaataaatgttaaaaagcattgagcgaaatcattgtatggagtataatataaatggtttcgctcctttttgaaggagaatcgaaatgaacatataccatacaagagaaaggctaagaacccgttctatttatgatttgaattta

SEQ ID NO: 13890 - DNA, 260 bp, Unknown; identical to SEQ ID NO: 13873
  Description of Unknown: LeftRegion for integrase B891 sequence

SEQ ID NO: 13891 - DNA, 260 bp, Unknown
  Description of Unknown: LeftRegion for integrase B892 sequence
ctacgtgctacctacctacgtgctcaacgagcaaaagcccaaccagaaaaatatttctcttaattcgctgaaagctctaaaaccttacataacggattttgccggattaagggatgtaatattgaattgcccgactaaaagggcgtagaaatggacatacgccgttctgtaatgggacggcgtatttttggaggaaaaatatgatttcaaacagtactgccactcatgcaaaagtggctatctacatacgagtctctacc

SEQ ID NO: 13892 - DNA, 260 bp, Unknown
  Description of Unknown: LeftRegion for integrase B893 sequence
ctacgtgctacctacctacgtgctcaacgagcaaaagcccaaccagaaaaatatttctcttaattcgctgaaagctctaaaaccttacataacggattttgccggattaagggatgtaatattgaattgcccgactaaaagggcgtagaaatggacatacgccgttctgtaatgggacggcgtatttttggaggaaaaatatgatttcaaacagttccgccactcacgcaaaagtggctatatacatacgagtctctacg

SEQ ID NO: 13893 - DNA, 260 bp, Unknown; identical to SEQ ID NO: 13874
  Description of Unknown: LeftRegion for integrase B894 sequence

SEQ ID NO: 13894 - DNA, 260 bp, Unknown
  Description of Unknown: LeftRegion for integrase B895 sequence
cgcagaaatcgagagcggctgtattgccgtggtcgtggtagacggtgtagaaggatttttgaaacaggtcgagttcggtgagaactctacctcgcttcactctttcaacccttactatcctgatatggagttcgtaggtgccgaccagaaacgcttgcactttatcggtcgtgtccgggaaatgaagcggaggttctgatatgcgtcagaagtttaagatcgacctctctatgctgaccccggaagaacagcagcagttt

SEQ ID NO: 13895 - DNA, 260 bp, Unknown; identical to SEQ ID NO: 13005
  Description of Unknown: LeftRegion for integrase B896 sequence

SEQ ID NO: 13896 - DNA, 260 bp, Unknown; identical to SEQ ID NO: 13866
  Description of Unknown: LeftRegion for integrase B897 sequence

SEQ ID NO: 13897 - DNA, 260 bp, Unknown
  Description of Unknown: LeftRegion for integrase B898 sequence
ttctatggaagagcagacaaatacccaggaagaaaaagaaagacaggaatatatgcaggaactggaacggctgttagcctgttatcagattgcaagcagggatgataagaatgtcgtatggtcggcattgaacaagtacattccatttctgaactaagtatagccccgtgtaggggctacttttaatgtatggaggaattatgaaccaaaactatgaaatgcctgaatcaggcacagaaaagcgtgtcagggtggcaatc

SEQ ID NO: 13898 - DNA, 260 bp, Unknown; identical to SEQ ID NO: 13867
  Description of Unknown: LeftRegion for integrase B899 sequence

SEQ ID NO: 13899 - DNA, 260 bp, Unknown
  Description of Unknown: LeftRegion for integrase B900 sequence
ctatgtgttgcctacctatgtgctcaacgagcaaaagcccaatcagaaaaatatttctcttaattcactgaaagctctaaaaccttacataacggattttgccggattaagggatgtgatattgaattgcccgattaaaagggcgtagaaatgaacatgcgccgttctgtaatgggacggcgtatttttggaggaaaaatatgatttcaaacagtgctgccactcacacaaaagtggctatctacatacgagtctctaca

SEQ ID NO: 13900 - DNA, 260 bp, Unknown
  Description of Unknown: LeftRegion for integrase B901 sequence
atttctggcgtggactaatcatcttttctctaagggaatgataacagcggataaacaccgacagatgatatcagagattcagcagctcaagaagtaaataaaaaataccacgaagatgtcagtagttttacttgacatcttcgctttggtatggtatcattatcttgttagaaaacagcacaattccaaggaggcagaaaatggatatatataacgtagcgaaccaaatgaagttagagcgtaagactatctttgattta

SEQ ID NO: 13901 - DNA, 260 bp, Unknown; identical to SEQ ID NO: 13880
  Description of Unknown: LeftRegion for integrase B902 sequence

SEQ ID NO: 13902 - DNA, 260 bp, Unknown; identical to SEQ ID NO: 13847
  Description of Unknown: LeftRegion for integrase B903 sequence

SEQ ID NO: 13903 - DNA, 260 bp, Unknown
  Description of Unknown: LeftRegion for integrase B904 sequence
ttatgggaactgaaaacatccgttgcgagaacagcaacgaaaaagaggacttcgtgaaggagctggaacgattgctcgcttgctatcagattgcttctttcgatgaccggaaagtagtttgggcggttctgaacaaatatgccgcctatataagctgaaattgccccataaaggggctttttcttttttgaggtggaataatgagcataaacagaaataatacgaatgagactcccaaaaaagcagctctttacgtgaga

SEQ ID NO: 13904 - DNA, 260 bp, Unknown; identical to SEQ ID NO: 13857
  Description of Unknown: LeftRegion for integrase B905 sequence

SEQ ID NO: 13905 - DNA, 260 bp, Unknown; identical to SEQ ID NO: 13844
  Description of Unknown: LeftRegion for integrase B906 sequence

SEQ ID NO: 13906 - DNA, 260 bp, Unknown; identical to SEQ ID NO: 13860
  Description of Unknown: LeftRegion for integrase B907 sequence

SEQ ID NO: 13907 - DNA, 260 bp, Unknown
  Description of Unknown: LeftRegion for integrase B908 sequence
ttatgggaactgaaaacatccgctgtgaaaacagcaatgaaaaagaggacttcgtgaaggagctggagcgattgcttgcttgctatcagattgcttctttcgatgaccggaaagtagtttgggcggttctgaacaaatatgccgcctatataagctgaaattgccccataaaggggctttttcttttttgaggtggaataatgagcataaacagaaataatacaagtgagactcccaaaaaggctgctctttacgtgaga

SEQ ID NO: 13908 - DNA, 260 bp, Unknown
  Description of Unknown: LeftRegion for integrase B909 sequence
tccctgctccagcttcagcctattaagacagactttgacggcataaaggacgctgtaacaaaatctattcccggccatttataccccccccgacaacttgcataatatttattccaccatttcgtgtaacatgacgaagcagccccgctgtgacggagctgctttttcttcagtcgtgattattttctggaggtctacgcatggcacttccgaagaagacgattccccaaattgagcaaaaacgtgccgccatctatgtc

SEQ ID NO: 13909 - DNA, 260 bp, Unknown; identical to SEQ ID NO: 13847
  Description of Unknown: LeftRegion for integrase B910 sequence

SEQ ID NO: 13910 - DNA, 260 bp, Unknown; identical to SEQ ID NO: 13847
  Description of Unknown: LeftRegion for integrase B911 sequence

SEQ ID NO: 13911 - DNA, 260 bp, Unknown
  Description of Unknown: LeftRegion for integrase B912 sequence
ttatggaaactgaaaacatccgttgcgagaacagcaacgaaaaagaggacttcgtgaaggagctagagcgattgctcgcttgctatcagattgcttctttcgatgaccggaaagtagtttgggcggttctgaacaagtatgccgcttatataagctgaaattgccccataaaggggctttttcttttttgaggtggaataatgagcataaacagaaataatacgaatgagactcccaaaaaggcagctctttacgtgaga

SEQ ID NO: 13912 - DNA, 260 bp, Unknown; identical to SEQ ID NO: 13867
  Description of Unknown: LeftRegion for integrase B913 sequence

SEQ ID NO: 13913 - DNA, 260 bp, Unknown; identical to SEQ ID NO: 13866
  Description of Unknown: LeftRegion for integrase B914 sequence

SEQ ID NO: 13914 - DNA, 260 bp, Unknown
  Description of Unknown: LeftRegion for integrase B915 sequence
gggcactacaatgatcgacaagttttctcaggtcgcaggaaatcttcctgcgactgacagtgatgctaaccggcaatatctggtaatcaatggctatcctgttgttttcagtttttccaaagaacccaacccggaagcatttgaacgcattcggaacatcctgcttgccaccagctatacgaagaaggtaggttgacatcatggacgaatgcagaatcaaacgctatactgagtgcggtaacgggcgatattacaaaccg

SEQ ID NO: 13915 - DNA, 260 bp, Unknown
  Description of Unknown: LeftRegion for integrase B916 sequence
gtgaattaggagggatgtcatgtgaccgataagatagtcatgctgattataaataagagattatatgatgaaggtataataagtcgagaagtatatacaaaaatcatcacgcaaataaagaaatgttaaaaagcattgagcgaaatcattgtatggagtataatataaatggtttcgctcctttttgaaggagaatcgaaatgaacatataccatacaagagaaagactaagaacccgttctatttatgatttgaattta

SEQ ID NO: 13916 - DNA, 260 bp, Unknown; identical to SEQ ID NO: 13844
  Description of Unknown: LeftRegion for integrase B917 sequence

SEQ ID NO: 13917 - DNA, 260 bp, Unknown
  Description of Unknown: LeftRegion for integrase B918 sequence
ctatgtgttgcctacctatgtgctcaacgagcaaaagcccaatcagaaaaatatttctcttaattcgctgaaagctctaaaaccttacataacggattttgccggattaagggatgtaatattgaattgcccgactaaaagggcgtagaaatgaacatgcgccgttctgtaatgggacggcgtatttttggaggaaaaatatgatttcaaacagtgctgccgctcacgcaaaagtggctatctacatacgagtctctaca

SEQ ID NO: 13918 - DNA, 260 bp, Unknown; identical to SEQ ID NO: 13847
  Description of Unknown: LeftRegion for integrase B919 sequence

SEQ ID NO: 13919 - DNA, 260 bp, Unknown
  Description of Unknown: LeftRegion for integrase B920 sequence
ctacgtgctacctacctacgtgctcaacgagcaaaagcccaaccagaaaaatatttctcttaattcgctgaaagctctaaaaccttacataacggattttgccggattaagggatgtaatattgaattgcccgactaaaagggcgtagaaatggacatacgccgttctgtaatgggacggcgtatttttggaggaaaaatatgatttcaaacagcgctgccactcacgcaaaagtggctatctacatacgagtctctacc

SEQ ID NO: 13920 - DNA, 260 bp, Unknown
  Description of Unknown: LeftRegion for integrase B921 sequence
agatggtgacagtatggaggttcttcagaaactgattcatgataccctctgcgaagaagccaagaattatagttgaatcgacatccttgcaacaaggatagcccagcactaaaataatggtacagttgatgcagcaaccaattcaaccaaacgagtgtgcgcacagtatcgttgttttagtttatataggagtgacaacgatgaaaaaacgtgtatataccttataccgtgtttcgaccattggacaggtcgaaaaggat

SEQ ID NO: 13921 - DNA, 260 bp, Unknown; identical to SEQ ID NO: 13873
  Description of Unknown: LeftRegion for integrase B922 sequence

SEQ ID NO: 13922 - DNA, 260 bp, Unknown; identical to SEQ ID NO: 13874
  Description of Unknown: LeftRegion for integrase B923 sequence

SEQ ID NO: 13923 - DNA, 260 bp, Unknown
  Description of Unknown: LeftRegion for integrase B924 sequence
atgaagatatcatggcacgatgcatcttaagagcaatcaacaaccggatgcttcagagcggaattattgatgatgagactaagaagcgaatagaaaatcgcattcagaggtcgaaatttgtcagtaattgattgaaaaacaattatgcaggggatataatcaaattgattttgcccctgcattttttgcaggaggacattatggatatatataaggtaaggcagcttttaaaagagcaaagtatttttgacatcccgcta

SEQ ID NO: 13924 - DNA, 260 bp, Unknown; identical to SEQ ID NO: 13873
  Description of Unknown: LeftRegion for integrase B925 sequence

SEQ ID NO: 13925 - DNA, 260 bp, Unknown
  Description of Unknown: LeftRegion for integrase B926 sequence
gtgaattaggagggatgtcatgtgaccgataagatagtcatgctgattataaataagcgattatatgatgaaggtataataagtcgagaagtatatacaaaaatcatcacgcaaataaataaatgttaaaaagcattgagcgaaatcattgtatggagtataatataaatggtttcgctcctttttgaaggagaattgaaatgaatatataccatacaagagaaagactaagaacccgttctatttatgatttgaattta

SEQ ID NO: 13926 - DNA, 260 bp, Unknown; identical to SEQ ID NO: 13860
  Description of Unknown: LeftRegion for integrase B927 sequence

SEQ ID NO: 13927 - DNA, 260 bp, Unknown
  Description of Unknown: LeftRegion for integrase B928 sequence
ggtaacattatgggaactgaagacatctgtagcattcattgcaatgaaaaaaatgatttcgtaaaggaacttgagcggctgattgcttgctatcaaatagcttctttcgataagtgatttgggcggtcttaaacaaatatgccgcctatataaactgaaattgccccatataggggctttttcttttttgaggtgaaataatgagcgtaaacagaaatattgcaaaagaaaagcccaaaaaggctgctttgtatgtgcgt

SEQ ID NO: 13928 - DNA, 260 bp, Unknown
  Description of Unknown: LeftRegion for integrase B929 sequence
ctacgtgctgcctacctatgtgctcaatgagcaaaagcccaaccagaaaaatatttctcttaattcactgaaagctctaaaaccttacataacagattttgccggattaagggatgtgatattgaattgcccgactaaaagggcgtagaaatgaacatgcgccgttctgtaatgggacggcgtatttttggaggaaaaatatgatttcaaacagtgctgccactcacgcaaaagtggctatatacatacgagtctctacc

SEQ ID NO: 13929 - DNA, 260 bp, Unknown
  Description of Unknown: LeftRegion for integrase B930 sequence
ctggatcattgacatggttatgatctgttgcaacaaattcaccgacagcaccggcgcggtggttggtctgaaggttgctgagtataccagacagccggatcctgatcttgcagaggcttctctgggggaggagagggaggcagcggcctagactgccagagcttacggctataccgtaatagagtcaggcgctcaggataatgccgacaagtaaaaacacggctcgaaaatatgccgcaggaggtggctcggataattcc

SEQ ID NO: 13930 - DNA, 260 bp, Unknown
  Description of Unknown: LeftRegion for integrase B931 sequence
gtgaattaggagggatgtcatgtgaccgataagatagtcatgctgattataaataagagattatatgatgaaggtataataagtcgagaagtatatacaaaaattatcacgcaaataaataaatgttaaaaagcattgagcgaaatcattgtatggagtataatataaatggtttcgctcctttttgaaggagaatcgaaatgaacatataccatacaagagaaaggctaagaacccgttctatttatgatttgaattta

SEQ ID NO: 13931 - DNA, 260 bp, Unknown; identical to SEQ ID NO: 13900
  Description of Unknown: LeftRegion for integrase B932 sequence

SEQ ID NO: 13932 - DNA, 260 bp, Unknown; identical to SEQ ID NO: 13866
  Description of Unknown: LeftRegion for integrase B933 sequence

SEQ ID NO: 13933 - DNA, 260 bp, Unknown
  Description of Unknown: LeftRegion for integrase B934 sequence
ctgctccagcttcagcctattaagacagactttgacggcataaaggacgctgtaacaaaatctattcccggccatttatacccccccccccgacaacttgcataatatttattccaccatttcgtgtaacatgacgaagcagccccgctgtgacggagctgctttttcttcagtcgtgattattttctggaggtctacgcatggcacttccgaagaagacgattccccaaattgagcaaaaacgtgccgccatctatgtc

SEQ ID NO: 13934 - DNA, 260 bp, Unknown; identical to SEQ ID NO: 13854
  Description of Unknown: LeftRegion for integrase B935 sequence

SEQ ID NO: 13935 - DNA, 260 bp, Unknown
  Description of Unknown: LeftRegion for integrase B936 sequence
gtctgatggaagctctctttgcagcaggggtaatcaacctgcctacctatcagaacttccttcggatgaagcgtgagcaggaggaagaaccgcctgcaaaggcttcgtaaacaacagagaaaggctctggtggaggggattctgccagagcctttctttttgccgcagaaaagagtcagagacagtggaggttaaattttatgagagtagccgtgtacgctcgtgtttcaaccgaacatgaagcgcaaatcaatgccctg

SEQ ID NO: 13936 - DNA, 260 bp, Unknown; identical to SEQ ID NO: 13889
  Description of Unknown: LeftRegion for integrase B937 sequence

SEQ ID NO: 13937 - DNA, 260 bp, Unknown; identical to SEQ ID NO: 13866
  Description of Unknown: LeftRegion for integrase B938 sequence

SEQ ID NO: 13938 - DNA, 260 bp, Unknown; identical to SEQ ID NO: 13866
  Description of Unknown: LeftRegion for integrase B939 sequence

SEQ ID NO: 13939 - DNA, 260 bp, Unknown; identical to SEQ ID NO: 13892
  Description of Unknown: LeftRegion for integrase B940 sequence

SEQ ID NO: 13940 - DNA, 260 bp, Unknown
  Description of Unknown: LeftRegion for integrase B941 sequence
ccctgctccagcttcagcctattaagacagactttgacggcataaaggacgctgtaacaaaatctattcccggctatttatacccccccccgacaacttgcataatatttattccaccatttcgtgtaacatgacgaagcagccccgctgtgacggagctgctttttcttcaatcgtgattattttctggaggtctacgcatggcacttccgaagaagacgattccccaaattaagcaaaaacgtgccgccatctatgtc

SEQ ID NO: 13941 - DNA, 260 bp, Unknown; identical to SEQ ID NO: 13907
  Description of Unknown: LeftRegion for integrase B942 sequence

SEQ ID NO: 13942 - DNA, 260 bp, Unknown
  Description of Unknown: LeftRegion for integrase B943 sequence
gtgaattaggagggatgtcatgtgaccgataagatagtcatgctgattataaataagcgattatatgatgaaggtataataagtcgagaagtatatacaaaaatcatcacgcaaataaataaatgttaaaaagcattgagcgaaatcattgtatggagtataatataaatggtttcgctcctttttgaaggagaatcgaaatgaacatataccatacaagagaaagactaagaacccgttctatttatgatttgaattta

SEQ ID NO: 13943 - DNA, 260 bp, Unknown
  Description of Unknown: LeftRegion for integrase B944 sequence
aatagtatcctgtaatttaatcaaataacgcaaaaaccgccccggtattggcgtaccgaagcggagttgcaaagattgtaacctacaaatcccgaaggactgcgtgatataatcttccttaagcaagagcattataccacacatccttccaatttgcatagggtgtattttttataccctttttcaggaaggtgttatttatggcatatcgtttttcacagcaaactgctgcccctgataccagaaccgttgccctgtac

SEQ ID NO: 13944 - DNA, 260 bp, Unknown
  Description of Unknown: LeftRegion for integrase B945 sequence
ctacgtgctacctacctacgtgctcaacgagcaaaagcccaaccagaaaaatatttctcttaattcgttgaaagctctaaaaccttacataacggattttgccggattaagggatgtaatattgaattgcccgactaaaagggcgtagaaatgaacatacgccgttctgtaatgggacggcgtatgtttggaggaaaaatatgatttcaaacagttccgccactcactcaaaagtggctatatacatacgagtctctacg

SEQ ID NO: 13945 - DNA, 260 bp, Unknown
  Description of Unknown: LeftRegion for integrase B946 sequence
gtgaattaggagggatgtcatgtgaccgataagatagtcatgctgattataaataagagattatatgatgaaggtataataagtcgagaagtatatacaaaaatcatcacgcaaataaataaatgttaaaaagcattgagcgaaatcattgtatggagtataatataaatggtttcgctcctttttgaaggagaatcgaaatgaacatataccatacaagagaaagactaagaacccgttctatttatgatttgaattta

SEQ ID NO: 13946 - DNA, 260 bp, Unknown; identical to SEQ ID NO: 13423
  Description of Unknown: LeftRegion for integrase B947 sequence

SEQ ID NO: 13947 - DNA, 260 bp, Unknown; identical to SEQ ID NO: 13892
  Description of Unknown: LeftRegion for integrase B948 sequence

SEQ ID NO: 13948 - DNA, 260 bp, Unknown
  Description of Unknown: LeftRegion for integrase B949 sequence
tgctccagcttcagcctattaaaacagactttgacggcataaaggacgctgtaacaaaatctattcccggctatttataccccccccccccgacaacttgcataatatttattccaccatttcgtgtaacatgacgaagcagccccgctgtgacggagctgctttttcttcagtcgtgattattttctggaggtctacgcatggcacttccgaagaagacgattccccaaattgagcaaaaacgtgccgccatctatgtc

SEQ ID NO: 13949 - DNA, 260 bp, Unknown
  Description of Unknown: LeftRegion for integrase B950 sequence
ctatgtgttgcctacctatgtgctcaacgagcaaaagcccaatcagaaaaatatttctcttaattcactgaaagctctaaaaccttacataacggattttgccggattaatggatgtgatattgaattgcccgattaaaagggcgtagaaatgaacatgcgccgttctgtaatgggacggcgtatttttggaggaaaaatatgatttcaaacagtgctgccactcacgcaaaagtggctatctacatacgagtctctacc

SEQ ID NO: 13950 - DNA, 260 bp, Unknown; identical to SEQ ID NO: 13860
  Description of Unknown: LeftRegion for integrase B951 sequence

SEQ ID NO: 13951 - DNA, 260 bp, Unknown; identical to SEQ ID NO: 13847
  Description of Unknown: LeftRegion for integrase B952 sequence

SEQ ID NO: 13952 - DNA, 260 bp, Unknown
  Description of Unknown: LeftRegion for integrase B953 sequence
gtgaattaggaggggtgtcatgtgatcgataaaatagtcatgctgattataaataagcgattatatgatgaaggtataataagtcgagaagtatatacaaaaatcatcacgcaaataaataaatgttaaaaagcattgagcgaaatcattgtatggagtataatataaatggtttcgctcctttttgaaggagaatcgaaatgaacatataccatacaagagaaagactaagaacccgttctatttatgatttgaattta

SEQ ID NO: 13953 - DNA, 260 bp, Unknown
  Description of Unknown: LeftRegion for integrase B954 sequence
gtgaattaggagggatgtcatgtgaccgataagatagtcatgctgattataaataagcgattatatgatgaaggtataataagtcgagaagtatatacaaaaatcatcacgcaaataaataaatgttaaaaagcattgagcgaaatcattgtatggagtataatataaatggtttcgctcctttttgaaggagaatcgaaatgaatatataccatacaagagaaagactaagaacccgttctatttatgatttgaattta

SEQ ID NO: 13954 - DNA, 260 bp, Unknown
  Description of Unknown: LeftRegion for integrase B955 sequence
acctcacaccggaggaaaaaacattcgtatcgcaagggaagcaagaagaagagaactccaacgccggataaaacagaagggcaacctcctgttcattaactccgactactggaaacgacaaccgaatacagcaagagcctcctccgacgcttcacccgcgaaggagagaggcttgactcttatcaaggaggacaacgaagatgagtaaactcaccgacaagttgaactccataagggttgctatctatgtgcgagtatct

SEQ ID NO: 13955 - DNA, 260 bp, Unknown; identical to SEQ ID NO: 13844
  Description of Unknown: LeftRegion for integrase B956 sequence

SEQ ID NO: 13956 - DNA, 260 bp, Unknown; identical to SEQ ID NO: 13880
  Description of Unknown: LeftRegion for integrase B957 sequence

SEQ ID NO: 13957 - DNA, 260 bp, Unknown; identical to SEQ ID NO: 13476
  Description of Unknown: LeftRegion for integrase B958 sequence

SEQ ID NO: 13958 - DNA, 260 bp, Unknown
  Description of Unknown: LeftRegion for integrase B959 sequence
tgtacttatgagcagcactgaaactcaggaagaaaaagaacgccaggagcaagttcaggaattgcaacggctactggcttgttaccaggtcgcaagccgtgatgacaaaaatgtagtatgggcggcactgaataaatacatgccgtatgtgaactaagtatagccccgtggaggggctatttctttttgatggaggaattatgaagaataactttaagatgcccggatcgggctcagaaacgcatatccgggtggcgatt

SEQ ID NO: 13959 - DNA, 260 bp, Unknown
  Description of Unknown: LeftRegion for integrase B960 sequence
tgtacttatgagcagcactgaaactcaggaagaaaaagaacgccaggagcaagttcaggaattgcaacggctactggcttgttaccaggtcgcaagccgtgatgacaaaaatgtagtatgggcggcactgaataaatacatgccgtatgtgaactaagtatagccccgtggaggggctatttctttttgatggaggaattatgaagaaaaactttaagatgcccggatcgggctcagaaacgcctatccgggtggcgatt

SEQ ID NO: 13960 - DNA, 260 bp, Unknown
  Description of Unknown: LeftRegion for integrase B961 sequence
tgtacttatgagcagcactgaaactcaggaagaaaaagaacgccaggagcaagtccaggaattgcaacggctactggcttgttatcaggtcgcaagccgtgatgacaaaaatgtagtatgggcggcactgaataaatacatgccgtatgtgaactaagtatagccccgtggaggggctatttctttttgatggaggaattatgaagaaaaactttaagatgcccggatcgggctcagaaacgcctatccgggtggcgatt

SEQ ID NO: 13961 - DNA, 260 bp, Unknown
  Description of Unknown: LeftRegion for integrase B962 sequence
aagcaatgagtgtattgatccagaagatcaggcaagacgtgaaatggttgacgaactggagcgtctgattacatgctatcaggttgccagtcgtgacgataaaaacgtcgtatgggctgcacttaacaagtacatacctaccctgaacatgtaaaagccctatagagggcttttctttttttgtatggaggaattattagatgctacgaggaaatactgagaatggctcaaatcagcgcatcagagtggcaatatacgtt

SEQ ID NO: 13962 - DNA, 260 bp, Unknown; identical to SEQ ID NO: 13960
  Description of Unknown: LeftRegion for integrase B963 sequence

SEQ ID NO: 13963 - DNA, 260 bp, Unknown
  Description of Unknown: LeftRegion for integrase B964 sequence
tatgtcacgtttcatggcgtctctgttttagatggtacatcctgcaaattcctcgatttggttcaatcttgcggcaaggttctccatgtcttggttgagcttctctttggttatcttcgcgtatatctgcgttgtcttgataacacatttgcaggtacaactattattgttatctttgcaccaacttaataatcaagaatatgagaggtgcaatttattcacgtgtttctaccatagaccaagactacaacaggcagacc

SEQ ID NO: 13964 - DNA, 260 bp, Unknown
  Description of Unknown: LeftRegion for integrase B965 sequence
ccgcatgacgagcctgccgagtcttccgatgccgaaaaactccgcgccgagaacgcggcccttcgcgcgcagcttgcccagcagcagaaatccctgcgtatgcaccggcttgtgacgctcatcctcttgggcattctttcgctgtgtgcccttgcgcttgtggccgacgtgctcatcccatcaatcggctggattcgcacatgaaaattaccgccccggcccgatcagccagagcggtatctttggaggcttttgtggat

SEQ ID NO: 13965 - DNA, 260 bp, Unknown
  Description of Unknown: LeftRegion for integrase B966 sequence
gtcgtaaatatcggcggttccgtcggcaacggtgtcacaaagaaaaccgactttctcgttgtcggctctacagattattgcgcctctgtaaagggcggcaaaactggcaagctgaaaaaagccgaggatttgcagaaaaagggcgcaaaccttgccattatcgacgagggcgctttttacgacatgttgggcgagtgattatggcacaacaaaaaaaggccgtcggggccgtgttcgacggaacgccgcgggcggtaatt

SEQ ID NO: 13966 - DNA, 260 bp, Unknown
  Description of Unknown: LeftRegion for integrase B967 sequence
tgtacttatgagcagcactgaaactcaggaagaaaaagaacgccaggaacaagtccaggaattgcaacggctactggcttgttatcaggtcgcaagccgtgatgacaaaaatgtagtatgggcggcactgaataaatacatgccgtatgtgaactaagtatagccccgtggaggggctatttctttttgatggaggaattatgaagaaaaactttaagatgcccggatcgggctcagaaacgcctatccgggtggcgatt

SEQ ID NO: 13967 - DNA, 260 bp, Unknown
  Description of Unknown: LeftRegion for integrase B968 sequence
ccgatgaccgggaaactgtaacaatccctattcaggaatctattcagctttctgaggaagaacgtattttgatttccgcatttaggagtgcttctatagaaggacgcatgagaattatccaagtctgtatgaacgaaaaggattcaaaaggggaaactatcattgcaggataataagcattgaggaatggaggaagaaccatgtacgaagagattaagactgcttgtctatatctacgatattcaagtagcaaccaaact

SEQ ID NO: 13968 - DNA, 260 bp, Unknown
  Description of Unknown: LeftRegion for integrase B969 sequence
tatgtcaacggttttatggttggcaatattcccggcgacgataccgatttcataaaccgggcccgccgccgcggcgtcgaggtcgtcggttttaaggtcgattattttgagcccgaggacgagcctgagcgcggccgtgtgtactatgcccgaatcaaactcgcaatcgtgcctatccgcgcggcaaaggcggcgaaataatgccgcgggccgcgcaagccgccggggccgagtttgacggtacgccgcgggcggtaatt

SEQ ID NO: 13969 - DNA, 260 bp, Unknown; identical to SEQ ID NO: 13458
  Description of Unknown: LeftRegion for integrase B970 sequence

SEQ ID NO: 13970 - DNA, 260 bp, Unknown
  Description of Unknown: LeftRegion for integrase B971 sequence
tgtacttatgagcagcactgaaactcagggagaaaaagaacgccaggagcaagtccaggaattgcaacggctactggcttgttatcaggtcgcaagccgtgatgacaaaaatgtagtatgggcggcgctgaataaatacatgccgtatgtgaactaagtatagccccgtggaggggctatttctttttgatggaggaattatgaagaaaaactttaagatgctcgaatcaggctcagagacgtctatccgggtggcaatc

SEQ ID NO: 13971 - DNA, 260 bp, Unknown; identical to SEQ ID NO: 13960
  Description of Unknown: LeftRegion for integrase B972 sequence

SEQ ID NO: 13972 - DNA, 260 bp, Unknown
  Description of Unknown: LeftRegion for integrase B973 sequence
tgtacttatgagcagcactgaaactcaggaagaaaaagaacgccaggagcaagtccaggaattgcaacggctactggcttgttatcaggtcgcaagccgtgacgacaaaaatgtagtatgggcggcactgaataaatacatgccgtatgtgaactaagtatagccccgtggaggggctatttctttttgatggaggaattatgaagaaaaactttaagatgcccggatcgggctcagaaacgcctatccgggtggcgatt

SEQ ID NO: 13973 - DNA, 260 bp, Unknown
  Description of Unknown: LeftRegion for integrase B974 sequence
tgtacttatgagcagcactgaaactcaggaagaaaaagaacgccaggagcaagtccaggaattgcaacggctactggcttgttaccaggtcgcaagccgtgatgacaaaaatgtagtatgggcggcactgaataaatacatgccgtatgtgaactaagtatagccccgtggaggggctatttctttttgatggaggaattatgaagaaaaactttaagatgcccggatcgggctcagaaacgcctatccgggtggcgatt

SEQ ID NO: 13974 - DNA, 260 bp, Unknown; identical to SEQ ID NO: 13960
  Description of Unknown: LeftRegion for integrase B975 sequence

SEQ ID NO: 13975 - DNA, 260 bp, Unknown
  Description of Unknown: LeftRegion for integrase B976 sequence
cagagaagaatgctgtagatgccgaagatcaagcaaggcgcgagcaggtagatgagctccagcgccttataacatgttatcaggtggcaagcagggacgataaaaacgtcgtatgggctgcacttaacaagtacatacctaccctgaacatgtaaaagccctctatagggcttttcttttttgtatggaggaattattagatgatacgagaaaatactgagaatggctcaaatcggcgcatcagggtggcaatatacgtt

SEQ ID NO: 13976 - DNA, 260 bp, Unknown; identical to SEQ ID NO: 13959
  Description of Unknown: LeftRegion for integrase B977 sequence

SEQ ID NO: 13977 - DNA, 260 bp, Unknown
  Description of Unknown: LeftRegion for integrase B978 sequence
tgtacttatgagcagcactgaaactcaggaagaaaaagaacgccaggagcaagtccaggaattgcaacgactactggcttgttaccaggtcgcaagccgtgatgacaaaaatgtagtatgggcggcactgaataaatacatgccgtatgtgaactaagtatagccccgtggaggggctatttctttttgatggaggaattatgaagaaaaactttaagatgcccggatcgggctcagaaacgcctatccgggtggcaatc

SEQ ID NO: 13978 - DNA, 260 bp, Unknown
  Description of Unknown: LeftRegion for integrase B979 sequence
aaggaaatataaaagttatcattgaaattccaacagaaaataacattaattacgagaaacaaaaaaatgaaataaaaaaaataatgaacgatgaattattattgaaaataaaaagataaatagatataatcaaagtgtatacaaagatttttgtaatatttgtatacactattttttatgctttagaggagaatagttaaatgaaaaagagagtaagaatacttttgagagtaagttcaaatcaacagttagaagcagat

SEQ ID NO: 13979 - DNA, 260 bp, Unknown
  Description of Unknown: LeftRegion for integrase B980 sequence
cagagaagaatgctgtagatgccgaagatcaagcaaggcgcgagcaggtagatgagctccagcgccttataacatgttatcaggtggcaagcagggacgataaaaacgtcgtatgggctgcacttaacaagtacatacctaccttgaacatgtaaaagccctctatagggcttttcttttttgtatggaggaattattagatgatacgagaaaatactgagaatggctcaaatcagcgcatcagggtggcaatatacgtt

SEQ ID NO: 13980 - DNA, 260 bp, Unknown
  Description of Unknown: LeftRegion for integrase B981 sequence
tgataaatcaattaacctatctattttgtttgatttaaagaaattaaacttaattacagaaaaacaattttatgtattaaaagaaaaaatacaatgtttttactaaaatactatgtcagttatgacaaaattaagatataatgtttttagaacgaagcagtaagttcaaaatgaatttaaaaaaagaaagtgaggtataaatggcacaagttgagattatagctgctaatctcaaagataaaaataataatattactatt

SEQ ID NO: 13981 - DNA, 260 bp, Unknown
  Description of Unknown: LeftRegion for integrase B982 sequence
tgtacttatgagcagcactgaaactcaggaagaaaaagaacgccaggagcaagttcaggaattgcaacggctactggcttgttaccaggtcgcaagccgtgatgacaaaaatgtagtatgggcggcactgaataaatacatgccgtatgtgaactaagtatagccccgtggaggggctatttctttttgatggaggaattatggggaaaaactttaagatgcccggatcgggctcagaaacgcctatccgggtggcgatt

SEQ ID NO: 13982 - DNA, 260 bp, Unknown
  Description of Unknown: LeftRegion for integrase B983 sequence
ccgtatatgccgctttttcaaaaagaacttgatatatcctccgaatggttggaaaactcatacacatacacgccaaggccgtataagccttcaaagcgcgcactccaaatggaggcggacatcaaagaaaccgctcacaagtacataacaaacgaaaaagcccttctgctgggcgcagaagggcgtaacgggtaacagacatgtcagtagatattaaatggcaggtgccaaaggcacagccggaggccagcgaactggcc

SEQ ID NO: 13983 - DNA, 260 bp, Unknown
  Description of Unknown: LeftRegion for integrase B984 sequence
aaggaaatataaaagttatcattgaaattccaacagaaaataacattaattacgagaaacaaaaaaatgaaataaaaaaaataatgaacgatgaattattattgaaaataaaaagataaatagatataatcaaagtgtatacaaagatttttgtaatatttgtatacactattttttatgccttagaggagaatagttaaatgaaaaagagagtaagaatacttttgagagtaagttcaaatcaacagttagaagcagat

SEQ ID NO: 13984 - DNA, 260 bp, Unknown
  Description of Unknown: LeftRegion for integrase B985 sequence
tctccaactggacggcaaaggcacccgcgccggcagttgcaccgcagcctgcgccacaggttattgaacaaaaaccgtctgcagctgatgaaatccgcaagtacaagggcctgcttgacgatggaatcatttcgcaggaagaatttgaggcaaagaagaagcagttgcttggcctgtaaaaccgaaaggagcgtgacggcatgaaaaagcgaatcaacactaattccgcagcccgtgccgtcatctacgctcgttattcc

SEQ ID NO: 13985 - DNA, 260 bp, Unknown; identical to SEQ ID NO: 13979
  Description of Unknown: LeftRegion for integrase B986 sequence

SEQ ID NO: 13986 - DNA, 260 bp, Unknown; identical to SEQ ID NO: 13960
  Description of Unknown: LeftRegion for integrase B987 sequence

SEQ ID NO: 13987 - DNA, 260 bp, Unknown; identical to SEQ ID NO: 13960
  Description of Unknown: LeftRegion for integrase B988 sequence

SEQ ID NO: 13988 - DNA, 260 bp, Unknown; identical to SEQ ID NO: 13960
  Description of Unknown: LeftRegion for integrase B989 sequence

SEQ ID NO: 13989 - DNA, 260 bp, Unknown
  Description of Unknown: LeftRegion for integrase B990 sequence
tgtacttatgagcagcactgaaactcaggaagaaaaagaacgccaggagcaagtccaggaattgcaacggctactggcttgttatcaggtcgcaagccgtgatgacaaaaatgtagtatgggcggcactgaataaatacatgccgtatgtgaactaagtatagccccatggaggggctatttctttttgatggaggaattatgaagaaaaactttaagatgcccggatcaagctcagaaacgcctatccgggtggcaatc

SEQ ID NO: 13990 - DNA, 260 bp, Unknown; identical to SEQ ID NO: 13960
  Description of Unknown: LeftRegion for integrase B991 sequence

SEQ ID NO: 13991 - DNA, 260 bp, Unknown
  Description of Unknown: LeftRegion for integrase B992 sequence
cagagaagaacgttgtagatgccgaagatcaggcaagacgcgagcaggtagatgagctccagcgcctcataacatgttatcaggtggcaagcagggacgataaaaacgtcgtttgggctgcacttaacaagtacatacctaccctgaacatgtaaaagccctattgagggcttttcttttttgtatggaggaattattagatgctacgagaaaatactgagaatggctcaaatcagcgcatcagggtggcaatatacgtt

SEQ ID NO: 13992 - DNA, 260 bp, Unknown; identical to SEQ ID NO: 13960
  Description of Unknown: LeftRegion for integrase B993 sequence

SEQ ID NO: 13993 - DNA, 260 bp, Unknown
  Description of Unknown: LeftRegion for integrase B994 sequence
tgtacttatgagtagcactgaaactcaggaagaaaaagaacgccaggagcaagtccaggaattgcaacggctactggcttgttatcaggtcgcaagccgtgatgacaaaaatgtagtatgggcggcactgaataaatacatgccgtatgtgaactaagtatagccccgtggaggggctatttctttttgatggaggaattatgaagaaaaactttaagatgcccggatcaggctcagagacgtctatccgggtggcaatc

SEQ ID NO: 13994 - DNA, 260 bp, Unknown; identical to SEQ ID NO: 13344
  Description of Unknown: LeftRegion for integrase B995 sequence

SEQ ID NO: 13995 - DNA, 260 bp, Unknown; identical to SEQ ID NO: 13821
  Description of Unknown: LeftRegion for integrase B996 sequence

SEQ ID NO: 13996 - DNA, 260 bp, Unknown
  Description of Unknown: LeftRegion for integrase B997 sequence
cgaaagatttgaggggctttttgccgaccacatagtggacgccctcgatgtagccccagcgcttccaggcggccaacagcccgggaagcgtgttcgtcaggccgtgtttaatgggtcaaacacagatataactttattgctgaaatatttggatatgtgggatttaggtggtaactttgcagcggaaaatctaaaatcagatgaagaaagctgtaatatattcccgtgtttctactctagagcaggattatacttcgcag

SEQ ID NO: 13997 - DNA, 260 bp, Unknown; identical to SEQ ID NO: 13979
  Description of Unknown: LeftRegion for integrase B998 sequence

SEQ ID NO: 13998 - DNA, 260 bp, Unknown
  Description of Unknown: LeftRegion for integrase B999 sequence
tcgcaccctcggcattctgctgattgcgcttggcgttctcctgctggtgcttgggcttctatcatgggtgtgggcggtccttggtgtgctgagtgccgtcggcggggtgctcctgcttaaaaatgcaaaatcgatttcggaacgcgggaacgctgctgctttggctgcggctcgaaacgtggccgaggcaaggatggaagatgaagaagaagccgattgaacctgaaatgcaggatgccgtgatctacactcggtactcg

SEQ ID NO: 13999 - DNA, 148 bp, Unknown
  Description of Unknown: LeftRegion for integrase B1000 sequence
tcaggagattactttgacgccagtcgaaaaagcatatcttgaaagcattaaagaggtttccaaggaagtaaaaaggagataacatctgatgaaaaaacagcagaaatgttacatatatacaagagtttccacttccatgcaggtagat

SEQ ID NO: 14000 - DNA, 260 bp, Unknown
  Description of Unknown: LeftRegion for integrase B1001 sequence
ttatgaaagtgagaagattattatggatatgaataagatagtggaagtgcaaattcaaattattattaatacaaacctttataaaaaaaatattattgatgagaatactttttcgaaggcaaatgaaaagttacttaagatgcttaaagcattaagggcagcataatatatgtaaactaaagtagcaaaggaggaagattatgtcctatgatgaaatagtatctgcagtaattcgtggggaaaaccttcgtaatcttcct

SEQ ID NO: 14001 - DNA, 260 bp, Unknown
  Description of Unknown: LeftRegion for integrase B1002 sequence
tgtttttatggaaccagtaacgaaacaggaagaaaaagaacgtgaagagcaagtccaggaactacagagactgcttgcttgttatcaggttgcaagccatgatgacaagaacgtcgtatgggcggcactgaacaaatacatgccgtacgtgaactaggtatagccccgtggaggggctatttctatttgatggaggaattatgaaaagaaactataaaatgcctaattcaggctcagaaacgcatatcagagtggcaatc

SEQ ID NO: 14002 - DNA, 260 bp, Unknown; identical to SEQ ID NO: 13983
  Description of Unknown: LeftRegion for integrase B1003 sequence

SEQ ID NO: 14003 - DNA, 260 bp, Unknown; identical to SEQ ID NO: 13960
  Description of Unknown: LeftRegion for integrase B1004 sequence

SEQ ID NO: 14004 - DNA, 260 bp, Unknown; identical to SEQ ID NO: 13979
  Description of Unknown: LeftRegion for integrase B1005 sequence

SEQ ID NO: 14005 - DNA, 260 bp, Unknown
  Description of Unknown: LeftRegion for integrase B1006 sequence
ttatgggaactgaaaacatccgctgtgaaaacagcaatggaaaagaggacttcgtaaaggagctggagcgattgctcgcttgctatcagatcgcttctttcgatgaccggaaagtagtttgggcggttctgaacaaatatgccgcctatataagctgaaattgccccataaaggggctttttcttttttgaggtggaataatgagcataaacagaaataatacaagtgagactcccaaaaaggctgctctttacgtgaga

SEQ ID NO: 14006 - DNA, 260 bp, Unknown; identical to SEQ ID NO: 13960
  Description of Unknown: LeftRegion for integrase B1007 sequence

SEQ ID NO: 14007 - DNA, 260 bp, Unknown; identical to SEQ ID NO: 13960
  Description of Unknown: LeftRegion for integrase B1008 sequence

SEQ ID NO: 14008 - DNA, 260 bp, Unknown; identical to SEQ ID NO: 13983
  Description of Unknown: LeftRegion for integrase B1009 sequence

SEQ ID NO: 14009 - DNA, 260 bp, Unknown
  Description of Unknown: LeftRegion for integrase B1010 sequence
ttgtcggtgtaacaaatgtcgaaactcctaatccaaactttccggaagatatacttctccttgttcaagcatacactcgtgcttcagatgctgataaaacagttttatgggcgttatttgacaaatatttgtctccgcttgataaagatgtgcttaatgaggttttatcgaataatgatacaaattaagggttttacgatatgaataaaataattgatacactaaatacacaaaaagcagctatctatattagagtatct

SEQ ID NO: 14010 - DNA, 260 bp, Unknown
  Description of Unknown: LeftRegion for integrase B1011 sequence
tttttccgctttacggtaaactatccctaaattttcagcaaaataaaaacgcccacggtgttaccagcaccgcaggcgttccagatcagcttactcagagatggtgcaggataaaacctgcccagagcaataacagacctcgcagatgttattgtaccacctccgggcaggcttgtcaaagtgtacccggaggtatttttatgggcaaaaaacaaaagacaaacggcggcgatgcggtcatctacgcccgctattcttcc

SEQ ID NO: 14011 - DNA, 260 bp, Unknown
  Description of Unknown: LeftRegion for integrase B1012 sequence
cctttgaacatggactttagggatttctatatccttccaacgaaggtgctgaatgaaaaaatgcctattcgaaaaaccataacagttcaatcgctcatgcagctggagccgatgtggtgtgactactacggaataggcaatgcaatacaagaggttatgaccgcctgagaaatcaggcgtttttctattagaggtgaactatggcatacaacaaactttcactacctggacatatacgggtagcaatctacgtccgggtg

SEQ ID NO: 14012 - DNA, 260 bp, Unknown
  Description of Unknown: LeftRegion for integrase B1013 sequence
ttgtcggtgtaacaaatgtcgaaactcctaatcctaactttccggaagatatacttctccttgttcaagcatacactcgtgcttcagatgctgataaaacagttttatgggcgttatttgacaaatatttgtctccgcttgataaagatgtgcttaatgaggttttatcgaataatgatacaaattaagggttttacgatatgaataaaataattgatacactaaatacacaaaaagcagctatctatattagagtatct

SEQ ID NO: 14013 - DNA, 260 bp, Unknown
  Description of Unknown: LeftRegion for integrase B1014 sequence
cctttgaacatggacttttgggatttctatatccttccaacgaaggtgctgaatgaaaaaatgcctattcgaaaaaccataacagttcaatcgctcatgcagctggagccgatgtggtgtgactactacggaataggcaatgcaatacaagaggttatgaccgcctgagaaatcaggcgtttttctattagaggtgaactatggcatacaacaaactttcactacctggacatatacgggtagcaatctacgtccgggtg

SEQ ID NO: 14014 - DNA, 260 bp, Unknown
  Description of Unknown: LeftRegion for integrase B1015 sequence
ttgtcggtgtaacaaatgtcgaaactcctaatccaaactttccggaagatatacttctccttgttcaagcatacactcgtgcttcagatgctgataaagcagttttatgggcgttatttgacaaatatttgtctccgcttgataaagatgtgcttaatgaggttttatcgaataatgatacaaattaagggttttacgatatgaataaaataattgatacactaaacacacaaaaagcggctatctatattagagtatct

SEQ ID NO: 14015 - DNA, 177 bp, Unknown
  Description of Unknown: LeftRegion for integrase B1016 sequence
cgtctgttccgccgtgaagccgtgcttggcgttggcttctttctggagcgtggtaaataaacatttgcaggtacgtgtaataagttctatctttgcaaagaacttaatattagacacatgagaggagttatatattcaagagtttctaccatagaccaagattatagtaagcagacc

SEQ ID NO: 14016 - DNA, 260 bp, Unknown
  Description of Unknown: LeftRegion for integrase B1017 sequence
ttgtgtcacgtttcatggcttttctttttagatggtgcaacctgcaaattcctcgacgccgttcaatcttgcggcaaggttctccatgtcctgattgagcttctctttggttatctttgcgtaaatctgcgtcgtcttgataacacatttgcaggtacaactattattactatctttgcaccaacttaataatcaagaatatgagaggtgcaatttattcacgtgtttctaccttagaccaagattacaacaggcagacc

SEQ ID NO: 14017 - DNA, 260 bp, Unknown
  Description of Unknown: LeftRegion for integrase B1018 sequence
gatccgatttttgagccgcctattgattttctggaagaatgccgcaagcgttgggaagcggcacagtcctctttctgcaaaaccattgagtgcaagatcggaaacacatggtatgtgattgaaacggagtgtgatggaaatgagccacttaccgacaaggtaaaacggctcattttttctgacaagggggtgatttgttaatgactgcgacacaaaagcatgatataattccaatatgcacaacggtactgtcggctgac

SEQ ID NO: 14018 - DNA, 260 bp, Unknown
  Description of Unknown: LeftRegion for integrase B1019 sequence
gacccgatttttgagccgcccattgattttttggaagaatgccgcaagcattgggaaacagcgcagtcttctttccgcaaaaccattgagcgtaagatcgggaacacatggtatgtgattgaaacagaatgtgacgggaatgagccgcttgccgacaaggtaaaacggctcattttttctgacaagggggtgatttgttaatgactgcgacacaaaagcatgatataattccagtatgcacaacggtactgtcggctgac

SEQ ID NO: 14019 - DNA, 177 bp, Unknown
  Description of Unknown: LeftRegion for integrase B1020 sequence
ggtcttgtccaccggaaggtcgtaatgaatgttacagtccttctggagggctgtaaataaacatttgcaggtacgtgtaataagttctatctttgcaaagaacttaatattaggcacatgagaggagttatatattcaagagtttctaccatagaccaagattatagtaagcagacc

SEQ ID NO: 14020 - DNA, 260 bp, Unknown
  Description of Unknown: LeftRegion for integrase B1021 sequence
agtctgcacttttattgtagcatgatccccctcagaacacaatccgacaaaaaagaatccccggcagttctgtacgatagagccgccggggccagatggggaatctgtctgtcggagaataatcataggataagaaaacacgcctgctgagcaagttcattgtaccatgatcctgctcagcgcacaagctgaggaaccccatgaaaaagaaattttcttctgtacccgaaccggatattcaggacgcggtgatctatgca

SEQ ID NO: 14021 - DNA, 260 bp, Unknown
  Description of Unknown: LeftRegion for integrase B1022 sequence
cggtctgcacttttattgtagcatgatccccctcagaacacaatccgacaaaaaagaatccccggcagctctgtacgatagagccgccggggccagatggggaatctgtctgtcggagaataatcataggaaagaaaacacgcctgctgagcaatttcattgtaccatgatcctgctcagcgcacaagctgaggaaaaccatgaaaaagaaattttcttctgtacccgatccagatattcaggacgcggtgatctatgca

SEQ ID NO: 14022 - DNA, 260 bp, Unknown
  Description of Unknown: LeftRegion for integrase B1023 sequence
gatccgatttttgagccgcctattgattttctggaagaatgccgcaagcgttgggaagcggcacagtcctctttctgcaaaaccattgagtgcaagatcggaaacacatggtatgtgattgaaacggagtgtgacggaaatgagccacttaccgacaaggtaaaacggctcattttttctgacaagggggtgatttgttaatgactgcgacacaaaagcatgatataattccaatatgcacaacggtactgtcggctgac

SEQ ID NO: 14023 - DNA, 260 bp, Unknown
  Description of Unknown: LeftRegion for integrase B1024 sequence
aaattgataaaaaagaatataataaaatattcgccgcattgaaattaatagaagcattgtttattgatggaaaaataaaatatcatgtatttaggaatatcctagatgactataaagatgttgttgatttatctgagtttaaatgctatacttgatacatctattaacaaacatcgtattattatgaggaataaaaataaatgtatgatatttacaatcaaaaaccaaccagccgaaaagttgtaatttatgcgcgcgtt

SEQ ID NO: 14024 - DNA, 260 bp, Unknown
  Description of Unknown: LeftRegion for integrase B1025 sequence
ggctactggctgtaaaatgctggtagccctcattttttagttgtatctagtatataaggggtgtataatagataggaactgaaaacagcctcataaagccctctattttatctggggtaaagaagtatacacctaatatataaaagtggctgtatgaggcacacaggagctcacaggactattacaggagggtaaacaggatggcatacaggaaaataacggatataaaagatactattggtatgagagcggtattttat

SEQ ID NO: 14025 - DNA, 153 bp, Unknown
  Description of Unknown: LeftRegion for integrase B1026 sequence
tgccgatatgccggagattgactatctggtaaacaaacatttgcaggtacgggtaataagttctatctttgcaaagaacttaatattaggcacatgagaggagttatatattcaagggtttctaccatagaccaagattacagtaagcagacc

SEQ ID NO: 14026 - DNA, 260 bp, Unknown
  Description of Unknown: LeftRegion for integrase B1027 sequence
atattatagcatgcatcgctcattccatcaatcattttctcgatgcacatgagtgatgcgctccgaactggcacgatcagcgcgcgaaaacccctgcctcccgcagaaattttcagattcttcccttgggtaccttttcaaatggattccaatccgttataatatatctaccaacctaacgaataacgcgaggtgccgctatgaaaacgaaagacaagccgcaggcgaagcaatacgttatctactcccgcaagtccaaa

SEQ ID NO: 14027 - DNA, 260 bp, Unknown
  Description of Unknown: LeftRegion for integrase B1028 sequence
attttgaggggcttgtacccctttttttgtttttctgttgctatttttatatagctggtgtataatagatacagactgaaaataaagccacttagagagcctcaagagttaggggtaggcagttatacccctgagcgattaaaacggctctgagaggctctcaggggctcaggatatgattttataaaggagtgtacaggatggcttacaggagagcacaggatactaaaggattaagggcggttttctatgctagggta

SEQ ID NO: 14028 - DNA, 260 bp, Unknown; identical to SEQ ID NO: 13892
  Description of Unknown: LeftRegion for integrase B1029 sequence

SEQ ID NO: 14029 - DNA, 123 bp, Unknown
  Description of Unknown: LeftRegion for integrase B1030 sequence
cgataacacatttgcaggtacaactattattattatctttgcaccaacttaatagtcaagaatatgagaggtgcaatctattcacgtgtttctaccttagaccaagattacaacaggcagacc

SEQ ID NO: 14030 - DNA, 123 bp, Unknown
  Description of Unknown: LeftRegion for integrase B1031 sequence
taataacacatttgcaggtacaattattattgctatctttgcaccaacttaataatcaagaatatgagaggtgcaatttattcacgtgtttctaccttagaccaagattacaacaggcagacc

SEQ ID NO: 14031 - DNA, 260 bp, Unknown; identical to SEQ ID NO: 13552
  Description of Unknown: LeftRegion for integrase B1032 sequence

SEQ ID NO: 14032 - DNA, 260 bp, Unknown
  Description of Unknown: LeftRegion for integrase B1033 sequence
aaggagtgcgacatgaacaaagcgttattactggcgttgaacgaacacatataccttcagggactaatcagcaaagaaatgaaagaaaaaattgatattgagattctttctgggaattaattcaaaactattgagcggagatgagatagaagttataataatcttatctctgctcttccaaacagaagggagaacggggcatgaacgtttatcgaactagagaaatactgaaaacttgcagcatttttgatttaaaatta

SEQ ID NO: 14033 - DNA, 260 bp, Unknown
  Description of Unknown: LeftRegion for integrase B1034 sequence
ttgtcagcgtttcggtagatttttccgtttttcagcaaaataaaaacgcccacggtgttaccagcaacgcaggcgtttcagatcagcttactcagagagatggtacagggataaaacctgtccagagcaatagcagacctcgcagatgttattgtaccacctccgggcaggcttgtcaaagtgtacccggaggtatttttatgggcaaaaaacaaaaggcaaacggcggcgatgcggtcatctacgcccgctattcttcc

SEQ ID NO: 14034 - DNA, 260 bp, Unknown
  Description of Unknown: LeftRegion for integrase B1035 sequence
cctttggacctggacttgtgggacttctacattctccccacaaaggtactgaatgaaaaaatgcctattcagaaaaccatcacacttcctggcctcatgcggctggagccgatgtggtgcgactactatggaatgggcggtgcaatacagaaaattatgaccgcctgagaaatcgggcggttttctattggaggaaaactatggcatacaacaagctttcgctcccggggcatatccgggtagcaatctacgtccgggtg

SEQ ID NO: 14035 - DNA, 260 bp, Unknown
  Description of Unknown: LeftRegion for integrase B1036 sequence
ccacgttgcggtcgtcactgatcctgccgtggatgccgaaaagaaagagtaaaatataagaggtgtgctatggtttcgcaggaagaattcattcaggagcttcaaacgctgcttgctgcatatcaggcggccagcgtagaagatcgtgaaaaggtcatgcggattttggcaaaatacgttccgaaagataaggcccagcaatgagaaagaagaaaatcgacgcgccaaaagaaaagccgcagagggcggccatatacctg

SEQ ID NO: 14036 - DNA, 260 bp, Unknown
  Description of Unknown: LeftRegion for integrase B1037 sequence
aaggagtgcgacatgaacaaagcgttattactggcgttgaacgaacacatataccttcagggactaatcagcagagaaatgaaagaaaaaattgatattgagattctttctgggaattaattcaaaactattgagcggagatgagattgaaggtataataatcttatctctgctcttccaactagaagggagaacggggcatgaacgtttatcgtactagagaaatactgaaaacttgcagcatttttgacttgaaatta

SEQ ID NO: 14037 - DNA, 260 bp, Unknown
  Description of Unknown: LeftRegion for integrase B1038 sequence
aaaggagtgcgacatgaataaagcgttattactggcattgaacgaacacatataccttcagggactgatcagcagagaaatgaaagagaaaattgacattgaaattctctctgaaaattagcttaaactattgagcggagatgagatagaagttataataatcttatctctgctcttccaaacagaagggagaacggggcatgaacgtttatcgtactagagaaatactgaaaacttgcagtattttcgatctgaaatta

SEQ ID NO: 14038 - DNA, 260 bp, Unknown
  Description of Unknown: LeftRegion for integrase B1039 sequence
gaaggggtgtaacatgaacaaagcgttactgttggcattgaacgaacacatatacctccagggactaatcagcaaagaaatgaaagagaaaattgacatagaaattctctctgaaaattagcttaaactattgagcggagatgagattgacgttataataatcttatctctgctcttccaaacagaagggagaacggggcatgaacgtttatcgcactagagaaatactgaaaacttgcagtattttcgatctgaaatta

SEQ ID NO: 14039 - DNA, 260 bp, Unknown
  Description of Unknown: LeftRegion for integrase B1040 sequence
aaggagcgtagcatgaacaaagcgttattactggcattgaacgaacacatataccttcagggactaatcagcaaagaaatgaaagaaaaaattgatattgagattctttctgaaaattaattcaaaactattgagcggagatgagatagaagttataataatcttatctctgctcttccaaacagaagggagaacggggcatgaacgtttatcgtactagagaaatactgaagacttgcagtattttcgatctaaaatta

SEQ ID NO: 14040 - DNA, 260 bp, Unknown
  Description of Unknown: LeftRegion for integrase B1041 sequence
aaggagtgtgacatgaacaaagcgttattactggcgttgaacgaacacatataccttcagggactaatcagcaaagaaatgaaagaaaaaattgatattgagattctttctgggaattaattcaaaactattgagcggagatgagatagaagttataataatcttatctctgctcttccaaacagaagggagaacggggcatgaacgtttatcgaactagagaaatactgaaaacttgcagcatttttgatttaaaatta

SEQ ID NO: 14041 - DNA, 260 bp, Unknown
  Description of Unknown: LeftRegion for integrase B1042 sequence
gaaggagcgtagaatgaacaaagcgttactgttggcattgaacgaacacatatacctccagggactaatcagtaaagaaatgaaagagaaaattgacattgaaattctttctgaaaattagcttaaactattgagcggagataagattgaagttataataatcttatctctgctcttccaagcagaagggagaacggggcatgaacgtttatcacactagagaaatactgaaaacttgcagtattttcgatctgaaatta

SEQ ID NO: 14042 - DNA, 260 bp, Unknown
  Description of Unknown: LeftRegion for integrase B1043 sequence
aagacaggtcttttgattgtgtgtagtgacccggcgcaaaagaaaattgacagagccgatgccctgaatattccgattgtttcggagcagcaatggtttgagctcatgccagaacttgaagccgttggaatgtggaacggaaagcgaatcctgttttcagacgacggcatctaccgtgttgaagtgggcggtgaaagctgatggccagaaaaaagaatattgctgctggcctcgatgccgtcatctatgcccggtactca

SEQ ID NO: 14043 - DNA, 260 bp, Unknown; identical to SEQ ID NO: 13018
  Description of Unknown: LeftRegion for integrase B1044 sequence

SEQ ID NO: 14044 - DNA, 260 bp, Unknown; identical to SEQ ID NO: 14035
  Description of Unknown: LeftRegion for integrase B1045 sequence

SEQ ID NO: 14045 - DNA, 260 bp, Unknown
  Description of Unknown: LeftRegion for integrase B1046 sequence
atccgacagttttttgactttggcaaagatatccgaccattcgctcgtagtcatacggcatggctcctttctcaaatttactgtcggcagcaactgaattatatcaaatacgcacccgcttttcatggaatcgtggaattataccgaaaatcggaaaaatattgcgaattttgaagaagataatcgtgaggtgatggttgatggcccgaaaaaagaatatcgctgcgggtcagaatgccgtcatttatgcccgctactcc

SEQ ID NO: 14046 - DNA, 260 bp, Unknown
  Description of Unknown: LeftRegion for integrase B1047 sequence
ggctactggctgtaaaatgctggtagccctcattttttagttgtatctagtatataaggggtgtataatagataggaactgaaaacagcctcataaagccctctattttatagagggtaaagaagtctacacctaatatataaaagtggctgtatgaggcacacaggagctcacaggactattacaggagggtaaacaggatggcatacaggaaaataacggatataagagatactattggtatgagagcggtattttat

SEQ ID NO: 14047 - DNA, 260 bp, Unknown; identical to SEQ ID NO: 13018
  Description of Unknown: LeftRegion for integrase B1048 sequence

SEQ ID NO: 14048 - DNA, 260 bp, Unknown
  Description of Unknown: LeftRegion for integrase B1049 sequence
ccacgttgcggctgtcgctgatcctgccgtggatgccgaaaagaaagagtaaaatataagaggtgtgctatggtttcgcaggaagaattcattcaggaacttcaaacgctgcttgctgcatatcaggcggccagcgtagaagatcgtgaaaaggtcatgcagattttggcaaaatacgttccgaaagataaggcccagcaatgagaaagaagaaaatcgacgcgccaaaagaaaagccgcagcgggcggccatatacctg

SEQ ID NO: 14049 - DNA, 260 bp, Unknown
  Description of Unknown: LeftRegion for integrase B1050 sequence
aaaggagcgtaacatgaataaagcgttattactggcattgaacgaacacgtataccttcagggactaatcagtaaagaaatgaaagaaaaaattgatatcaaaattctctctgaaaattaaaccaaactattgagcggagatgagattaaaggtataataatcttatctctgctcttccaaccagaagggagaacggggcatgaacgtttatcgaactagagaagtgctgaaaacttgcagcatttttgacttaaaatta

SEQ ID NO: 14050 - DNA, 260 bp, Unknown; identical to SEQ ID NO: 14035
  Description of Unknown: LeftRegion for integrase B1051 sequence

SEQ ID NO: 14051 - DNA, 260 bp, Unknown
  Description of Unknown: LeftRegion for integrase B1052 sequence
attattttgatgaaacccttgtcaggcgcaagcctgaattgtatttggtttaacaagtcttgttttttgcgcgcggcacttccttcccgtgcgccatccgcacacctgattccagcgggcttccaccgctgtacctgcatccgccgcaagactttctccacaggctatccgtatatgatgctcctgaaaggagaatgcacatgaacgctgtcatttacgcgcgctattcaagccacaatcagacagagcagtccatcgag

SEQ ID NO: 14052 - DNA, 168 bp, Unknown
  Description of Unknown: LeftRegion for integrase B1053 sequence
tgatattgagattctttctgggaattaattcaaaactattgagcggagatgagatagaagttataataatcttatctctgctcttccaaacagaagggagaacggggcatgaacgtttatcgaactagagaaatactgaaaacttgcagcatttttgatttaaaatta

SEQ ID NO: 14053 - DNA, 260 bp, Unknown; identical to SEQ ID NO: 14048
  Description of Unknown: LeftRegion for integrase B1054 sequence

SEQ ID NO: 14054 - DNA, 260 bp, Unknown
  Description of Unknown: LeftRegion for integrase B1055 sequence
catctcgtgcccgacgtgcaggccgatgcacaggaagaaagcaaagaataaatatataagaggtgcgctatggtttcgcatgatgaatttataaaagagctgcaagacctgcttgccgcatatcaggcggccagcgcagatgaccgtgaaaaagttatgcagattttgaaaaaatatattccgaaagataagggccagcaatgaggaaagcaaaagagaatctgcaaaaagaaaagccgcagcgggcggccatatatttg

SEQ ID NO: 14055 - DNA, 260 bp, Unknown
  Description of Unknown: LeftRegion for integrase B1056 sequence
aaaggagtgcgacatgaacaaagcgttattactggcgttgaacgaacacatataccttcagggactgatcagcagagaaatgaaagaaaaaattgatattgagattctttccgaaaattaaaccaaactattgagcggagatgagattgaaggtataataatcttatctctgctcttccgactagaagggagaacggggcatgaacgtttatcgtactagagaaatactgaaaacttgcagcatttttgatttgaaatta

SEQ ID NO: 14056 - DNA, 260 bp, Unknown
  Description of Unknown: LeftRegion for integrase B1057 sequence
aaaggagtgcgacatgaacaaagcgttattactggcgttgaacgaacacatataccttcagggactaattagcagggaaatgaaagaaaaaattgatattgagattctttctgaaaattaagccaaactattgagcggagatgagattgaatgtataataatcttatctctgctcttccaaccagaagggagaacggggcatgaacgtttatcgtactagagaaatactgaaaacttgcagcatttttgacttgaaatta

SEQ ID NO: 14057 - DNA, 260 bp, Unknown
  Description of Unknown: LeftRegion for integrase B1058 sequence
aggagtttgggcatgaacaaagcgttattactggcattgaacgaacacatataccttcagggactaatcagcaaagaaatgaaagaaaaaattgatattgagattctgtctgaaaattaattcaaaactattgagcggagatgagatagaagttataataatcttatctctgctcttccaaccagaagggagaacggggcatgaacgtttatcgcactagagaaatactgaagacttgcagtattttcgatttgaaatta

SEQ ID NO: 14058 - DNA, 260 bp, Unknown
  Description of Unknown: LeftRegion for integrase B1059 sequence
ccacgttgcggctgtcgctgatcctgccgtggatgccgaaaagaaagagtaaaatataagaggtgtgctatggtttcgcaggaagaattcattcaggaacttcaaacgctgcttgctgcatatcaggcggccagcgtagaagatcgtgaaaaagtcatgcagattttggcaaaatacgttccgaaagataaggcccagcaatgagaaagaagaaaatcgacgcgccaaaagaaaagccgcagcgggcggccatatacctg

SEQ ID NO: 14059 - DNA, 260 bp, Unknown
  Description of Unknown: LeftRegion for integrase B1060 sequence
aaaggagtgcgacatgaacaaagcgttattactggcattgaacgaacacgtataccttcagggactaatcagtaaagaaatgaaagaaaaaattgatattgaaattctctctgaaaattaaaccaaactattgagcggagatgagattgaaggtataataatcttatctctgctcttccgactagaagggagaacgggacatgaacgtttatcgcactagagaaatactgaaaacttgcagtattttcgatctgaaatta

SEQ ID NO: 14060 - DNA, 260 bp, Unknown; identical to SEQ ID NO: 13341
  Description of Unknown: LeftRegion for integrase B1061 sequence

SEQ ID NO: 14061 - DNA, 260 bp, Unknown
  Description of Unknown: LeftRegion for integrase B1062 sequence
gaaggagcgtagcatgaacaaagcgttattgttggcattgaacgagcacatataccttcagggattaatcagtaaagaaacgaaagagaaaattgatatggagattctttctgaaaattagcttaaactattgagcagagatgagattgacgttataatgatcttatctctgctcttccaactagaagggagaacggggcatgaacgtttatcgaactagagaagtgctgagaacttgcagcatttttgacttgaaatta

SEQ ID NO: 14062 - DNA, 260 bp, Unknown
  Description of Unknown: LeftRegion for integrase B1063 sequence
aaaggagtgcgacatgaataaagcgttattactggcattgaacgaacacatataccttcagggactgatcaacagagaaatgaaagagaaaattgacattgaaattctctctgaaaattagcttaaactattgagcggagatgagatagaagttataataatcttatctctgctcttccaaacagaagggagaacggggcatgaacgtttatcgtactagagaaatactgaaaacttgcagtattttcgatctgaaatta

SEQ ID NO: 14063 - DNA, 260 bp, Unknown
  Description of Unknown: LeftRegion for integrase B1064 sequence
gaaggagcgtagcatgaacaaagcgttattgttggcattgaacgagcacatataccttcagggattaatcagtaaagaaacgaaagagaaaattgatatggagattctttctgaaaattaaaccaaactattgagtggagatgagattaaaggtataataatcttatctctgctcttccgactagaagggagaacggggcatgaacgtttatcgcactagagaaatactgaaaacttgcagtattttcgatctgaaatta

SEQ ID NO: 14064 - DNA, 260 bp, Unknown
  Description of Unknown: LeftRegion for integrase B1065 sequence
aaggagtttggcatgaacaaagcgttattactggcattaaacgaacacatataccttcagggactaatcagcaaagaaatgaaagaaaaaattgatattgagattctttctgggaattaattcaaaactattgagcggagatgagattgaaggtataataatcttatctctgctcttccgactagaagggagaacggggcatgaacgtttatcgtactagagaaatactgaaaacttgcagcatttttgatttaaaatta

SEQ ID NO: 14065 - DNA, 260 bp, Unknown
  Description of Unknown: LeftRegion for integrase B1066 sequence
ggagcgtagaatgtgaacaaagcattattactggcattgaacgaacacatataccttcagggattaatcagtaaagaaacgaaagagaaaattgatatggagattctttctgaaaattaaatcaaaactattgagcggagatgagatagaagttataataatcttatctctgctcttccaaacagaagggagaacggggcatgaacgtttatcgtactagagaaatactgaaaacttgcagtattttcgatctgaaatta

SEQ ID NO: 14066 - DNA, 260 bp, Unknown
  Description of Unknown: LeftRegion for integrase B1067 sequence
aggctggtaccctctttttttttgttgttgctatttttatatgggtggtatataatagatacatactgaaaatacgcctcacagagcctctattttttcttaccctaagaaatatacctctaagcggtttaagccgccctgtgaggcacacaggagctcacaggggcattataacaagaatggtaaaggagaaatgtaggatggcatacaggaaagtaatctcattattagatacgataggattaagggcggtattttat

SEQ ID NO: 14067 - DNA, 260 bp, Unknown
  Description of Unknown: LeftRegion for integrase B1068 sequence
cctttggacctggacttgtgggacttctacattcttcccacaaaggtactgaatgaaaaaatgcctattcagaaaaccatcacacttcctaacctcatgcggctggagccgatgtggtgcgactactatggaatgggcgatgcaatacagaaaattatgaccgcctgagaaatcgggcggttttctattggaggaaaactatggcatacaacaaactatctctcccggggcatatccgggtggcaatctatgtccgggta

SEQ ID NO: 14068 - DNA, 260 bp, Unknown
  Description of Unknown: LeftRegion for integrase B1069 sequence
aaaggagtgcgacatgaacaaagcgttattactggcattgaacgaacacgtataccttcagggactaatcagtaaagaaatgaaagaaaaaattgatattaaaattctctctgaaaattaaaccaaactattgagcggagatgagattgaaggtataataattttatctctgctcttccaaccagaagggagaacggggcatgaacgtttatcgtaccagagaaatactgaaaacttgcagcatttttgacttgaaatta

SEQ ID NO: 14069 - DNA, 260 bp, Unknown
  Description of Unknown: LeftRegion for integrase B1070 sequence
aagacaggtcttttgattgtgtgcagtgacccggcgcaaaagaaaattgacagagccgatgccctgaatattccgattgtttcggagcagcaatggtttgagctcatgccagaacttgaagccgttggaatgtggaacggaaagcgaatcctgttttcagacgacggcatctaccgtgttgaagtgggcggtgaaagctgatggccagaaaaaagaatattgctgctggcctcgatgccgtcatctatgcccggtactca

SEQ ID NO: 14070 - DNA, 260 bp, Unknown
  Description of Unknown: LeftRegion for integrase B1071 sequence
gtgcgtcgcttttacgttttagcggtgatggcggtgcaggcaaagatgctttgactggaacgatggttgatacgagatctggggaaactgtttcaacaaagatcgaaagcctagaagatctttgcaaactgtttcctgcggtgaagttatacgtggcaggataatattcgtatttgtgaacagaaagagggcgggcagcattgtcgaagcgcgaatcgaaaagcggccagaagtgtttggcagcggagcagatcggcgtg

SEQ ID NO: 14071 - DNA, 260 bp, Unknown
  Description of Unknown: LeftRegion for integrase B1072 sequence
aaaggagtgcgacatgaacaaagcattattactggcattgaacgagcacatataccttcagggattaatcagtaaagaaatgaaagagaaaattgacattgaaattctctctgaaaattagcttaaactattgagcggagatgagatagaagttataataatcttatctctgctcttccaaacagaagggagaacggggcatgaacgtttatcgtactagagaaatactgaaaacttgcagtattttcgatctgaaatta

SEQ ID NO: 14072 - DNA, 260 bp, Unknown
  Description of Unknown: LeftRegion for integrase B1073 sequence
aaggagtgcgacatgaacaaagcgttattactggcgttgaacgaacacatataccttcagggactaatcagcaaagaaatgaaagaaaaaattgatattgagattctttctgggaattaattcaaaactattgagcggagatgagattgaatgtataataatcttatctctgctcttccgactagaagggagaacggggcatgaacgtttatcgaactagagaagtgctgaaaacttgcagcatttttgacttaaaatta

SEQ ID NO: 14073 - DNA, 260 bp, Unknown
  Description of Unknown: LeftRegion for integrase B1074 sequence
aaggagtgcgacatgaataaagcgttattactggcattgaacgaacatgtataccttcagggactaatcagcagagaaatgaaagagaaaattgatattgagattctttctgaaaattaaatcaaaactattgagcggagatgagatagaagttataataatcttatctctgctcttccgactagaagggagaacggggcatgaacgtttatcgcactagagaaatactgaaaacttgcagcatttttgacttaaaatta

SEQ ID NO: 14074 - DNA, 260 bp, Unknown
  Description of Unknown: LeftRegion for integrase B1075 sequence
aagggggtgtaacatgaacaaagcgttactgttggcattgaacgaacacatatacctccagggactaatcagcaaagaaatgaaagagaaaattgacatagaaattctctctgaaaattagcttaaactattgagcggagatgagattaaagttataataatcttatctctgctcttccaaacagaagggagaacggggcatgaacgtttatcgtactagagaaatactgaaaacttgcagcatttttgacttgaaatta

SEQ ID NO: 14075 - DNA, 260 bp, Unknown
  Description of Unknown: LeftRegion for integrase B1076 sequence
aaggagtgcgacatgaataaagcgttattgctggcattgaacgagcacgtataccttcagggactaatcagtaaagaaatgaaagaaaaaattgatattcacattctttctgaaaattaaatcaaaactattgagcggagatgagattgaagatataataatcttatctctgctcttccaactagaagggagaacggggcatgaacgtttatcgaactagagaagtgctgaaaacttgcagcatttttgacttaaaatta

SEQ ID NO: 14076 - DNA, 260 bp, Unknown; identical to SEQ ID NO: 13350
  Description of Unknown: LeftRegion for integrase B1077 sequence

SEQ ID NO: 14077 - DNA, 260 bp, Unknown
  Description of Unknown: LeftRegion for integrase B1078 sequence
tgtacaacaagaagcaattatattagctgcttatcagtacataaaagatttatttgaagagggaaaaataacaaaacatgaacttaataaagtgaagaaaaagtacaatatagatattgaataaattgacatattaagttataataaataccatactaaggtacatctagtatggtatttattggtttaagaggtgtatcatgaaaaagaaaattgcaatatatgctagagtttctacggaacatgaagcacagatatct

SEQ ID NO: 14078 - DNA, 260 bp, Unknown; identical to SEQ ID NO: 14058
  Description of Unknown: LeftRegion for integrase B1079 sequence

SEQ ID NO: 14079 - DNA, 260 bp, Unknown
  Description of Unknown: LeftRegion for integrase B1080 sequence
gaaggagcgtagaatgaacaaagcgttactgttggcattgaacgaacacatatacctccagggactaatcagtaaagaaatgaaagagaaaattgacattgaaattctttctgaaaattagcttaaactattgagcggagatgagattgaagttataataatcttatctctgctcttctgactagaagggagaacggggcatgaacgtttatcgcactagagaaatactgaaaacttgcagcatttttgacttaaaatta

SEQ ID NO: 14080 - DNA, 260 bp, Unknown
  Description of Unknown: LeftRegion for integrase B1081 sequence
catctcgtgcccgacgtgcaggccgatgcacaggaagaaagcaaagaataaatatataagaggtgcgctatggtttcgcatgatgaatttataaaagagttgcaagacctgcttgccgcatatcaggcggccagcgcagatgaccgtgaaaaagttatgcagattttgaaaaaatatattccgaaagataagggtcagcaatgaggaaagcaaaagagaatccgcaaaaagaaaagccgcagcgggcggccatatatttg

SEQ ID NO: 14081 - DNA, 260 bp, Unknown
  Description of Unknown: LeftRegion for integrase B1082 sequence
ccacgttgcggctgtcgccgatcctgccgtggatgccgaaaagaaagagtaaaatataagaggtgtgctatggtttcgcaggaagaattcattcaggagcttcaaacgatgcttgctgcatatcaagcggccatcgttgaagatcgtgaaaaggtcatgcagattttggcaaaatacgttccgaaagataaggcccagcaatgagaaagaagaaaatcgatgcgccaaaagaaaagccgcagcgggcggccatatacctg

SEQ ID NO: 14082 - DNA, 260 bp, Unknown; identical to SEQ ID NO: 14035
  Description of Unknown: LeftRegion for integrase B1083 sequence

SEQ ID NO: 14083 - DNA, 260 bp, Unknown
  Description of Unknown: LeftRegion for integrase B1084 sequence
aaaggagtgcgacatgaacaaagcattattactggcattgaacgaacacgtataccttcagggactaatcagcagagaaatgaaagaaaaaattgatattgagattctttctgaaaattaaaccaaactattgagcggagatgagattgaaggtataataatcttatctctgctcttccgactagaagggagaacggggcatgaacgtttatcgtactagagaaatactgaaaacttgcagcatttttgacttgaaatta

SEQ ID NO: 14084 - DNA, 260 bp, Unknown; identical to SEQ ID NO: 14035
  Description of Unknown: LeftRegion for integrase B1085 sequence

SEQ ID NO: 14085 - DNA, 260 bp, Unknown
  Description of Unknown: LeftRegion for integrase B1086 sequence
aaaggagtgcgacatgaacaaagcgttattactggcgttgaacgaacacatataccttcagggactgatcagcagagaaatgaaagaaaaaattgatattgagattctttccgaaaattaaaccaaactattgagcggagatgagattgaaggtataataatcttatctctgctcttccgactagaagggagaacggggcatgaacgtttatcgtactagagaaatactgaaaacttgcagtattttcgatctgaaatta

SEQ ID NO: 14086 - DNA, 260 bp, Unknown
  Description of Unknown: LeftRegion for integrase B1087 sequence
aaaggagtgcgacatgaacaaagcgttattactggcattgaacgaacacgtataccttcagggactaatcagtaaagaaatgaaagaaaaaattgatattaaaattctctctgaaaattaaaccaaactattgagcggagatgagattaaaggtataataatcttatctctgctcttccaaccagaagggagaacggggcatgaacgtttatcgtaccagagaaatactgaaaacttgcagcatttttgacttgaaatta

SEQ ID NO: 14087 - DNA, 260 bp, Unknown; identical to SEQ ID NO: 13350
  Description of Unknown: LeftRegion for integrase B1088 sequence

SEQ ID NO: 14088 - DNA, 260 bp, Unknown
  Description of Unknown: LeftRegion for integrase B1089 sequence
catctcgtgcccgacgtgcaggccgatgcacaggaagaaagcaaagaataaatatataagaggtgcgctatggtttcgcatgatgaatttataaaagagttgcaagacctgcttgccgcatatcaggcggccagcgcagatgaccgtgaaaaagttatgcagattttgaaaaaatatattccgaaagataagggccagcaatgaggaaagcaaaagagaatctgcaaaaagaaaagccgcagcgggcggccatatatttg

SEQ ID NO: 14089 - DNA, 260 bp, Unknown
  Description of Unknown: LeftRegion for integrase B1090 sequence
catctcgtgcccgacgtgcaggccgatgcacaggaagaaagcaaagaataaatatataagaggtgcgctatggtttcgcatgatgaatttataaaagagttgcaaaacctgcttgccgcatatcaggcggccagcgcagatgaccgtgaaaaagttatgcagattttgaaaaaatatattccgaaagataagggccagcaatgaggaaagcaaaagagaatctgcaaaaagaaaagccgcagcgggcggccatatatttg

SEQ ID NO: 14090 - DNA, 260 bp, Unknown
  Description of Unknown: LeftRegion for integrase B1091 sequence
aaggagttcgacatgaacaaagcgttattgttggcattgaacgaacacatataccttcagggactgatcagcagagaaatgaaagaaaaaattgatattgagattctttctgggaattaattcaaaactattgagcggagatgagattgaaggtataataatcttatctctgctcttccaactagaagggagaacggggcatgaacgtttatcgtactagagaaatactgaaaacttgcagcatttttgacttgaaatta

SEQ ID NO: 14091 - DNA, 260 bp, Unknown
  Description of Unknown: LeftRegion for integrase B1092 sequence
aaaggagtgcaacatgaacaaagcgttattgttggcattgaacgagcacatataccttcagggactaatcagcaaagaaacgaaagaaaaaattgatattgagattctttctgaaaattaaaccaaactattgagcggagatgagattgaaggtataataatcttatctctgctcttccgactagaagggagaacggggcatgaacgtttatcgtactagagaaatactgaaaacttgcagtattttcgatctgaaatta

SEQ ID NO: 14092 - DNA, 260 bp, Unknown
  Description of Unknown: LeftRegion for integrase B1093 sequence
aaaggagtgcgacatgaacaaagcgttattactggcattgaacgaacacgtataccttcagggactaatcagtaaagaaatgaaagaaaaaattgatattgaaattctctctgaaaattaaaccaaactattgagcggagatgagattgaaggtataataatcttatctctgctcttccgaccagaagggagaacgggacatgaacgtttatcgaacaagagaagtgctgaaaacttgcagcatttttgacttgaaatta

SEQ ID NO: 14093 - DNA, 260 bp, Unknown
  Description of Unknown: LeftRegion for integrase B1094 sequence
ccatgttgcggctgttgctgatcctgccgtggatgccgaaaagaaagagtaaaatataagaggtgtgctatggtttcgcaggaagaattcattcaagagcttcaaacgctgcttgctgcatatcaggcggccagcgtagaagatcgtgaaaaggtcatgcagattttggcaaaatacgttccgaaagataaggcccagcaatgagaaagaagaaaatcgacgcgccaaaagaaaagccgcagcgggcggccatatacctg

SEQ ID NO: 14094 - DNA, 260 bp, Unknown
  Description of Unknown: LeftRegion for integrase B1095 sequence
gctttgtcagcgtttcggtagatttttccgtttttcagcaaaataaaaacgcccacggtgttaccagcaccgcaggcgttccagatcagcttgctcagagatggtacaggataaaacctgtccagagcaataacagacctcgcagatgttattgtaccacctccgggcaggcttgtcaaagtgtacccggaggtatttttatgggcaaaaaacaaaagacaaacggcggcgatgcggtcatctacgcccgctattcttcc

SEQ ID NO: 14095 - DNA, 260 bp, Unknown
  Description of Unknown: LeftRegion for integrase B1096 sequence
aaaggagtgcgacatgaacaaagcgttattgttggcattgaacgaacacatataccttcagggcctgatcagcagagaaatgaaagaaaaaattgatattgagattctttctgaaaattaaaccaaactattgagcggagatgagattgaaggtataataatcttatctctgctcttccgactagaagggagaacggggcatgaacgtttatcgtactagagaaatactgaaaacttgcagcatttttgatttgaaatta

SEQ ID NO: 14096 - DNA, 260 bp, Unknown
  Description of Unknown: LeftRegion for integrase B1097 sequence
ctttgtcagcgtttcggtagatttttccgtttttcagcaaaataaaaacgcccacggtgttaccagcaccgcaggcgttccagatcagcttactcagagatggtacagggataaaacctgtccagagcaataacagacctcgcagatgttattgtaccacctccggacaggcttgtcaaagtgtacccggaggtatttttatgggcaaaaagcaaaagacaaacggcggcgatgcggtgatctacgcccgctattcttcc

SEQ ID NO: 14097 - DNA, 260 bp, Unknown; identical to SEQ ID NO: 13294
  Description of Unknown: LeftRegion for integrase B1098 sequence

SEQ ID NO: 14098 - DNA, 260 bp, Unknown
  Description of Unknown: LeftRegion for integrase B1099 sequence
accagtatcacatttttacagtcaaagagtgtcaggaactcttatcacttgcaaagaacggacacattagggaaatcaactcacgaatacagctcgctacggctcgtttccttgcggataattcccctaacaataaaaatattgctgtttaagaaaaagcccctgcatggggcttttcgctttatatggaggtatatatcatggcgtataacgcacaaaacaaaaccggtgcaaaggtggctatctatgtcagggtgtct

SEQ ID NO: 14099 - DNA, 260 bp, Unknown
  Description of Unknown: LeftRegion for integrase B1100 sequence
ctgtatacgaaaatggccgcctgacaaaatcagacggtcatttttgtatggagaatttgaattttccagtgggtcagtcatatccgcgcgagagagctgcattgagggcgttttggctcaagatgtgggaaagtttgttgaatcggttgaagacggccttagagggccttattttagctttagatggagagtgacatagcatggcaaaggtaaagctgccagataagccccgcgtggcaatatacacccgcgtatcgacc

SEQ ID NO: 14100 - DNA, 260 bp, Unknown
  Description of Unknown: LeftRegion for integrase B1101 sequence
cacttgacctcgatctgtgggatttttacgttcttcctacgaaaattcttaatgcagaaaaacccacgcagaaaactatcactttgccatccttgttagctcttaatcctacaaagtgtgattacttagagttaaaagatacagttaataatattgttgccgtctgaatcatcagacagctttttaggagactttaaaatatggtacttaataatattaaaccagctatgaaaattcgagtagcgatctatatacgagtt

SEQ ID NO: 14101 - DNA, 260 bp, Unknown
  Description of Unknown: LeftRegion for integrase B1102 sequence
ggtgcccgttttgtgaaaagccgctggcctttgtgtacggacattcgcgtgtatatcatacgacaacatggtgttccgattctggagccgagccgctgcagatgtttgaggaagatgcaaaggcaaggggcttgcggaagtgtaagagctgccaaaaacgtgacggggatttaccggcagatagttaaggaggaatcaggatggccaagcgttcagcgaagaaaaatgaataccaatcggctgaacagatcggcgtgatc

SEQ ID NO: 14102 - DNA, 260 bp, Unknown
  Description of Unknown: LeftRegion for integrase B1103 sequence
gcatactgcgaggattgcggatacagctttgactttaccacacaggatgacctcaatgcccaatataataaactgaacacaaacgagggatgcgccattttggtggcgatcattctcggcgttattcttataacaatttggttttacagccattaaatgcaaatttgaggccgttttcgttaaataaggggggtgacagtttgagttcagttgacaaaatcgccgttgtttacgcacggtattcttcccacgggcagacc

SEQ ID NO: 14103 - DNA, 260 bp, Unknown
  Description of Unknown: LeftRegion for integrase B1104 sequence
gttccatcaaaaattattgaaatagaaacaagtattaaattacttgaatatttaaaaagaaataatactattgatgatggaatgtataatttttgtattaataaattgttacataaaatagaatttgaaaagcaaaaacaagatgataaatatataaatgatttaaacaattataaactattaacttaggaggtgtgattatggacttatatacagttaggaataatattatgaaaggtgttccactacaagaattaaat

SEQ ID NO: 14104 - DNA, 260 bp, Unknown
  Description of Unknown: LeftRegion for integrase B1105 sequence
accagtatcacatcttcacaatcaaagagtgtcaggaactcttgttactcgcaaagaacggacaaataggagaaatcaacaaccgcatacaacacgctacggctcgtttccttgcggataattcccctgacaataaaaatattgctgtttgagataaagcccctgcatggggcttttcgctttatatggaggtatatattatggcgtacaacgcacaaaacaagaccggtgcaagggtggctatctatgtcagggtatcg

SEQ ID NO: 14105 - DNA, 260 bp, Unknown; identical to SEQ ID NO: 13309
  Description of Unknown: LeftRegion for integrase B1106 sequence

SEQ ID NO: 14106 - DNA, 260 bp, Unknown
  Description of Unknown: LeftRegion for integrase B1107 sequence
cctgtatgcgaaaatggccgcctgacaaaatcagacggtcatttttgtgtggggaatttgaattttccagcgggtcagtcatatccgcgcgagagagctgcattgagagcgttttagctccagatgtgggaaagttgttgaatcggttgaagacggccttagagggccttattttagttttagatggagagtgacatagcatggcaaaggtaaagctgccagataagccccgcgtggcaatatacacccgcgtatcgacc

SEQ ID NO: 14107 - DNA, 260 bp, Unknown
  Description of Unknown: LeftRegion for integrase B1108 sequence
accagtatcacatcttcacaatcaaagagtgtcaggaactcttgttactcgcaaagaacggacaaataggagaaatcaacaaccgcatacaacacgctacggctcgtttccttgcggataattcccctgacaataaaaatattgctgtttgagataaagcccctgcatggggcttttcgctttatatggaggtatatattatggcgtacaacacacaaaacaagaccggtgcaagggtggctatctatgtcagggtatcg

SEQ ID NO: 14108 - DNA, 260 bp, Unknown
  Description of Unknown: LeftRegion for integrase B1109 sequence
accagtatcacatctttacaatcaaagagtgtcaggaactcttgctacttgcaaagaacggacatataggagaaatcaacaaccgcatacagcacgctacggctcgtttccttgcggataattcccctgacaataaaaatattgctgtttgagataaagcccctgcatggggcttttcgctttatatggaggtatatattatggcgtacaacgcacaaaacaagaccggtgcaagggtggctatctatgtcagggtatcg

SEQ ID NO: 14109 - DNA, 260 bp, Unknown
  Description of Unknown: LeftRegion for integrase B1110 sequence
tttgacgcgctgtatgccaagtacccccgcgcagccgcatacctcaaagccgacggcatggctcttgctgagcatgatgtcaaagctgccgctgggcgtaaggcgcgcgagcgcattatcaacggtgaggacggcaccgaggcgttggccgatgccgaggctgagtgggcagcgtattgcgccgagcatatatgggactaatgccgcatccggctgtagcccttgacaaaaaacctgtttgcggttactatagccgcaaa

SEQ ID NO: 14110 - DNA, 260 bp, Unknown
  Description of Unknown: LeftRegion for integrase B1111 sequence
accagtatcacatcttcacaatcaaagagtgtcaggaactcttgctacttgcaaagaacggacatataggagaaatcaacaaccgcatacagcacgctacggctcgtttccttgcggataattcccctgacaataaaaatattgctgtttgagataaagcccctgcatggggcttttcgttttatatggaggtatatattatggcgtacaacgcacaaaacaagaccggtgcaagggtggctatctatgtcagggtatcg

SEQ ID NO: 14111 - DNA, 260 bp, Unknown
  Description of Unknown: LeftRegion for integrase B1112 sequence
accagtatcacatcttcacaatcaaagagtgtcaggaactcttgctacttgcaaagaacggacatataggagaaatcaacaaccgcatacagcacgctacggctcgtttccttgcggataattcccctgacaataaaaatattgctgtttgagataaagcccctgcatggggcttttcgctttatatggaggtatatattatggcgtacaacgcacaaaacaagaccggtgcaagggtggctatctatgtcagggtatcg

SEQ ID NO: 14112 - DNA, 260 bp, Unknown
  Description of Unknown: LeftRegion for integrase B1113 sequence
accagtatcacatcttcacaatcaaagagtgtcaggaactcttgttactcgcaaagaacggacaaataggagaaatcaacaaccgcatacaacacgctacggctcgtttccttgcggataattcccctgacaataaaaatattgctgtttgagataaagcccctgcatggggcttttcgctttatatggaggtatatattatggcgtacaacgcacaaagcaagaccggtgcaagggtggctatctatgtcagggtatcg

SEQ ID NO: 14113 - DNA, 260 bp, Unknown
  Description of Unknown: LeftRegion for integrase B1114 sequence
tctgtatacgaaaatggccgcctgacaaaatcagacggtcatttttgtatggagaatttgaattttcaagcgggttagtcgtatccgcgcgagagagccgcattgagggcgttttggctccagatgtgggaaagttgttgaatcggttgaagacggccttagaggtccttattttagctttagatggagagtgacatagcatggcaaaggtaaagctgccagataagccccgcgtggcaatatacacccgcgtatcgacc

SEQ ID NO: 14114 - DNA, 260 bp, Unknown
  Description of Unknown: LeftRegion for integrase B1115 sequence
tctgtatacgaaaatggccgcctgacaaaatcagacggtcatttttgtatggagaatttgaattttccagcgggtcagtcatatccgcgcgagagagccgcattgagggcgttttgggtcctgatgtgggaaagttgttgaatcggttgaagacggccttagagagccttattttagctttagatggagagtgacatagcatggcaaaggtaaagctgccagataagccccgcgtggcaatatacacccgcgtatcgacc

SEQ ID NO: 14115 - DNA, 260 bp, Unknown
  Description of Unknown: LeftRegion for integrase B1116 sequence
ggtgcccgttttgtgaaaagccgctggcctttgtgtacggacattcgcgtgtatatcatacgacaacatggtgttccgattctggagccgagccgctgcagatgtttgaggaagatgcaaaggcaaggggcttgcggaagtgtaagagttgccaaaaacgtgacggggatttaccggcagatagttaaggaggaatcaggatggccaagcgttcagcgaagaaaaatgaataccaatcggctgaacaggtcggcgtgatc

SEQ ID NO: 14116 - DNA, 260 bp, Unknown
  Description of Unknown: LeftRegion for integrase B1117 sequence
aatagtgattttattaaagcacttaatgattgtatatataatatttataatatgagtgaatactttgatattacagaagaattaataaaatataaagttaaatcaataactcttgatgaaaacttgtatatggatataaaaagcaagtttaaattaaatgaagtaccttatatgtgttgtaatatttaaggaggggtaggatgaaggcagttatttatagtagaaaaagtaaatttaaagaagagggtgaatctattgaa

SEQ ID NO: 14117 - DNA, 260 bp, Unknown
  Description of Unknown: LeftRegion for integrase B1118 sequence
aaattgataaaaatgaatataataaaatattcgccgcattgaaactaatagaagcattgtttattgatgggaaaataaaatatcatgtatttaggaatatcctagatgactataaagatgttgttgatttatctgagtttaaatgctatacttgatacatctattaacaaacatcgtattattatgaggaataaaaataaatgtatgatatttacaatcaaaaaccaaccagccgaaaagttgtaatttatgcgcgcgtt

SEQ ID NO: 14118 - DNA, 260 bp, Unknown
  Description of Unknown: LeftRegion for integrase B1119 sequence
catgtatacgaaaatggccgcctgacaaaatcagacggtcatttttgtatggggaatttgaattttccagcgggtcagtcatatccgcgcgagagagctgcattgagggcgttttggctccagatgtgggaaagttgttgaatcggttgaagacggccttagagggccttattttagctttagatggagagtgacatagcatggcaaaggtaaagctgccagataagcctcgcgtggcaatatacacccgcgtatcgacc

SEQ ID NO: 14119 - DNA, 260 bp, Unknown
  Description of Unknown: LeftRegion for integrase B1120 sequence
gagaatgtgcaatcactgttgaacatgtggaaaataatacttctgttagagatatgcttggacaaagaggaattaaaccagaagatttaccagcatcggaagacattaagaaactggaacgtagagtgaagagagaagagaaaaagcttgcagagcaatctggaaagttgacaaatgaataatacaggagtgtgagattattgaagaagaaaacaagatgttacatatatactcgtgtatctacggctattcaggttgat

SEQ ID NO: 14120 - DNA, 260 bp, Unknown; identical to SEQ ID NO: 14111
  Description of Unknown: LeftRegion for integrase B1121 sequence

SEQ ID NO: 14121 - DNA, 260 bp, Unknown; identical to SEQ ID NO: 13300
  Description of Unknown: LeftRegion for integrase B1122 sequence

SEQ ID NO: 14122 - DNA, 260 bp, Unknown
  Description of Unknown: LeftRegion for integrase B1123 sequence
aaatccggcgaccccgaggaaatcattctgctgaacgcattctccaaggtgagcgacgatgaccgtgccgtcctgtgggcgctgctgcggaaatatatgactccgcacgaccgcgccctgctggaagcccttaaccaagacaacgaatccggcgccgtataatttacctgccgtattcggactaaggggagggcttcatcatgcaaaagaaccagacgaaaaaagccgctctctatatccgagtttctacccactaccaa

SEQ ID NO: 14123 - DNA, 260 bp, Unknown
  Description of Unknown: LeftRegion for integrase B1124 sequence
caaatgcaacaacaagaaattaatatccaataattaaaaagccccgatgctaccaacaccggagccaattggcactatctggaagataataccaaatcccgcaaatttagtttatcatcttccgggcagtcacgcaagcggaacgaatgttctttgctggctgttatttttatactcatttttaaggaggaatgatgtttatggcagaacaaaatgagaaaatcgtagcactctacgtccgtgtatcaactggataccaa

SEQ ID NO: 14124 - DNA, 260 bp, Unknown
  Description of Unknown: LeftRegion for integrase B1125 sequence
cgtacaattcgccgggtccttatgacctgatccagctcacacgatacgggcatcgcgcaggcggtgcccgtatgttttatgttacggtttggttaggtaaggttacggttacggtaacggttacggttagtgtcggatagtccgcggaatttcgtgcggacgttccgtgtgatattccgattttataggaggtttcgcccatgccaatcagcatttccgagaagttggccgcaaagaaggcggcgatctatattcgtgtt

SEQ ID NO: 14125 - DNA, 260 bp, Unknown
  Description of Unknown: LeftRegion for integrase B1126 sequence
tctgtatacgaaaatggccgcctgacaaaatcagacggtcatttttgtatggagaatttgaattttccagcgggtcagccatatccgcgcgagagagctgcattgagagcgttttggctccagatgtgggaaagttgttgaatcggttgaagacggccttagagagccttattttagctttagatggagagtgacatagcatggcaaaggtaaaactgccagataagccccgcgtggcaatatacacccgcgtatcgacc

SEQ ID NO: 14126 - DNA, 260 bp, Unknown
  Description of Unknown: LeftRegion for integrase B1127 sequence
taggggctgttgactttctccgtggaaatctccaaggaaatctccgtggaaaaagtctatttttatcaatattcaaaacataaaacgggaattttctaaaaagcaatcaaaaaggggtttctccgcggagatttccacggagatctccgtggagatttccgtggagaattttcttacgctatgagagaatggagggtacaatgtcagaacggctaaagagggcagctttgtatgtccgagtgtctaccgcctatcaaatc

SEQ ID NO: 14127 - DNA, 260 bp, Unknown; identical to SEQ ID NO: 14100
  Description of Unknown: LeftRegion for integrase B1128 sequence

SEQ ID NO: 14128 - DNA, 260 bp, Unknown; identical to SEQ ID NO: 13521
  Description of Unknown: LeftRegion for integrase B1129 sequence

SEQ ID NO: 14129 - DNA, 260 bp, Unknown; identical to SEQ ID NO: 14122
  Description of Unknown: LeftRegion for integrase B1130 sequence

SEQ ID NO: 14130 - DNA, 260 bp, Unknown
  Description of Unknown: LeftRegion for integrase B1131 sequence
tctgtatacgaaaatggccgcctgacaaaatcagacggtcatttttgtatggggaatttgaattttccagctggtcagccatatccgcgcgagagagttgcattgaaggcgttttggctcaagatgtgggaaagttgttgaatcggttgaagacggccttagagggccttattttagctttagatggagagtgacatagcatggcaaaggtaaagctgccagataagccccgcgtggcaatatacacccgcgtatcgacc

SEQ ID NO: 14131 - DNA, 260 bp, Unknown
  Description of Unknown: LeftRegion for integrase B1132 sequence
ggctactggctgtaaaatgctggtagccctcattttttagttgtatctagtatataaggggtgtataatagataggaactgaaaacagcctcataaagccctctattttatcgagggtaaagaagtctacacctaatatataaaagtggctgtatgaggcacacaggagctcacaggactattacaggagggtaaacaggatggcatacaggagaataacggatataagagatactattggtatgagagcggtattttat

SEQ ID NO: 14132 - DNA, 260 bp, Unknown
  Description of Unknown: LeftRegion for integrase B1133 sequence
caaatgcaacaacaagaaattaatatccaataataaaaaagccccgatgctaccaacaccggagccaattggcactatctggaagataataccaaatcccgcaaatttagtttatcatcttccaggcggtcacgcaagcggaacgaatgttctttgctggctgttatttttatacccatttttaaggaggaatgatatttatggcagaacaaaatgagaaaatcgtagcactttacgtccgtgtatcaactggataccaa

SEQ ID NO: 14133 - DNA, 260 bp, Unknown; identical to SEQ ID NO: 14122
  Description of Unknown: LeftRegion for integrase B1134 sequence

SEQ ID NO: 14134 - DNA, 260 bp, Unknown
  Description of Unknown: LeftRegion for integrase B1135 sequence
cctgtatacgaaaatggccgcctgacaaaatcagacggtcatttttgtatggggaatttgaattttccagcgggtcagtcatatccgcgcgagagagctgcactgagagcgttttagctccagatgtgggaaagttgttgaatcggttgaagacggccttagagggccttattttagctttagatggagagtgacatagcatggcaaaggtaaagctgccagataagccccgcgtggcaatatacacccgcgtatcgacc

SEQ ID NO: 14135 - DNA, 260 bp, Unknown
  Description of Unknown: LeftRegion for integrase B1136 sequence
ggaagaagaaatgggagaagaatacattgaaaacgagtgtaattggtacctcaacgatgacccttttactggagggtcttgggaggaaggcgcagaagacttcatttgtggagaaatcgaagccgagctgaagaagtagtaacaaacaacaacaacaacacaacaacaaggagaacaagaacaaggagagcaactaattaatgccaacaatgaacaccaaaacattctgcgtcatctacgcccgccagtcattcggactg

SEQ ID NO: 14136 - DNA, 260 bp, Unknown
  Description of Unknown: LeftRegion for integrase B1137 sequence
aaattgataaaaaagaatacaataaaatattcgccgcattgaaactaatagaagcattgtttattgatggaaaaataaaatatcatgtatttaggaatatcctagatgactataaagatgttgttgatttatctgagtttaaatgctatacttgatatatctattaacaaacatcgtattattatgaggaataaaaataaatgtatgatatttacaatcaaaaaccaaccagccgaaaagttgtaatttatgcacgcgtt

SEQ ID NO: 14137 - DNA, 260 bp, Unknown
  Description of Unknown: LeftRegion for integrase B1138 sequence
ttactgggtcttagtgaagtcagaaaaccagaagtcttagttttgtcagaaaaagagaaaattctcattgacgcataccgtactgctgatgacatgggacagttgaacataatctatgtctgcctggatgaaatgaaaaaaaagcaaaagtggacagcgaaagtgccgtgtgattgattttgtagagtggaggaagaaccatgtatgaggatataaaaacagcctgcctatatgttagattctcaagccataaccagact

SEQ ID NO: 14138 - DNA, 260 bp, Unknown; identical to SEQ ID NO: 14104
  Description of Unknown: LeftRegion for integrase B1139 sequence

SEQ ID NO: 14139 - DNA, 260 bp, Unknown
  Description of Unknown: LeftRegion for integrase B1140 sequence
actcaattttcaaggtccttgtgacctgctccgactcacacggtacgggcatcgcgcaggcggtgcccgtacgtgtgtatatacgttacggttatgtaaggttacggttacggtaacggttacggttagtgtcggattgtccgcggatttttgtgcggacgttctgcgtgaccgtccgattttataggaggttttcccacatgcccatcaatatttccgagaagctcgcggccaaaaaggccgcaatatatatccgcgtg

SEQ ID NO: 14140 - DNA, 260 bp, Unknown; identical to SEQ ID NO: 14114
  Description of Unknown: LeftRegion for integrase B1141 sequence

SEQ ID NO: 14141 - DNA, 260 bp, Unknown
  Description of Unknown: LeftRegion for integrase B1142 sequence
accagtatcacatcttcacaatcaaagagtgtcaggaactcttgttactcgcaaagaacggacaaataggagaaatcaataaccgcatacaacacgctacggctcgtttccttgtggataattcccctgacaataaaaatattgctgtttgagataaagcccctgcatggggcttttcgctttatatggaggtatatattatggcgtacaacgcacaaaacaagaccggtgcaagggtggctatctatgtcagggtatcg

SEQ ID NO: 14142 - DNA, 260 bp, Unknown
  Description of Unknown: LeftRegion for integrase B1143 sequence
cagaggctatattgacgattcgcggtgtaaacttccaccctatgagtatgtcgggaactactatgctcgtgtccctgatttgctgcaacacgctcaggaattgatatatgctatcaagcaattccttgaagttcttgcttaggtgcaaaaaatgggcatcgcataagcggtgcccaaattgtgttataaagaggtaaaccatggcaattatagagcaaatccgaaagcaaaaggctgctatctacgtgcgcgtttcaacc

SEQ ID NO: 14143 - DNA, 260 bp, Unknown; identical to SEQ ID NO: 14104
  Description of Unknown: LeftRegion for integrase B1144 sequence

SEQ ID NO: 14144 - DNA, 260 bp, Unknown
  Description of Unknown: LeftRegion for integrase B1145 sequence
cctgtatacgaaaatggccgcctgacaaaatcagacggtcatttttgtatggggaatttgaattttcaagcgggtcagtcatatccgtgcgagagagctgcattgagagcgttttagctccagatgtgggaaagttgttgaatcggttgaagacggccttagagggccttattttagctttagatggagagtgacatagcatggcaaaggtaaagctgccagataagcccagcgtggcaatatacacccgcgtatcgacc

SEQ ID NO: 14145 - DNA, 260 bp, Unknown
  Description of Unknown: LeftRegion for integrase B1146 sequence
tgtatacgaaaatggccgcctgacaaaatcagacggtcatttttgtatggggaatttgaattttccagcgggtcagtcatatccgcgcgagagagctgcattgagagcgttttagctccagatgtgggaaagtgttgttgaatcggttgaagacggccttagagggccttattttagctttagatggagagtgacatagcatggcaaaggtaaagctgccagataagccccgcgtggcaatatacacccgcgtatcgacc

SEQ ID NO: 14146 - DNA, 260 bp, Unknown; identical to SEQ ID NO: 14100
  Description of Unknown: LeftRegion for integrase B1147 sequence

SEQ ID NO: 14147 - DNA, 260 bp, Unknown
  Description of Unknown: LeftRegion for integrase B1148 sequence
accagtatcacatcttcacaatcaaagagtgtcaggaactcttgctactcgcaaagaacggacaaataggagaaatcaacaaccgcatacaacacgctacggctcgtttccttgcggataattcccctgacaataaaaatattgctgtttgagataaagcccctgcatggggctttttgctttatatggaggtatatattatggcgtacaacgcacaaaacaagaccggtgcaagggtggctatctatgtcagggtatcg

SEQ ID NO: 14148 - DNA, 260 bp, Unknown
  Description of Unknown: LeftRegion for integrase B1149 sequence
accagtatcacatttttacagtcaaagagtgtcaggaactcttattgcttgcaaagaacggacatattggggaaatcaactcacgaatacagctcgctacggctcgtttccttgcggataattcccataacaataaaaatattgctgtttaagaaaaagcccctgcatggggcttttcgctttatatggaggtatatatcatggcgtacaacgcacaaaacaaaaccggtgcaagggtagctatctatgtcagggtatct

SEQ ID NO: 14149 - DNA, 260 bp, Unknown
  Description of Unknown: LeftRegion for integrase B1150 sequence
accagtatcacatcttcacaatcaaagagtgtcaggaactcttgctgcttgcaaagaacggacatataggagaaatcaacaaccgcatacagcacgctacggctcgttttcttgcggataattcccctgacaataaaaatattgctgtttgagataaagcccctgcatggggcttttcgctttatatggaggtatatattatggcgtacaacgcacaaaacaagactggtgcaagagtggctatctatgtcagggtatcg

SEQ ID NO: 14150 - DNA, 260 bp, Unknown
  Description of Unknown: LeftRegion for integrase B1151 sequence
accagtatcatatcttcacaatcaaagagtgtcaggaactcttgttactcgcaaagaacggacaaataggagaaatcaacaaccgcatacagcacgctacggctcgtttccttgcggataattcccctgacaataaaaatattgctgtttgagataaagcccctgcatggggcttttcgctttatatggaggtatatattatggcgtacaacgcacaaaacaagaccggtgcaagggtggctatctatgtcagggtatcg

SEQ ID NO: 14151 - DNA, 260 bp, Unknown
  Description of Unknown: LeftRegion for integrase B1152 sequence
tctgtatacgaaaatggccgcctgacaaaatcagacggtcatttttgtatggagaatttgaattttccagcgattcagtcatatccgcgcgagagagctgcatcgagggcgttttggctccagatgtgggaaagttgttgaatcggttgaagacggccttagagggccttattttagctttagatggagagtgacatagcatggcaaaggtaaagctgccagataagccccgcgtggcaatatacacccgcgtatcgacc

SEQ ID NO: 14152 - DNA, 260 bp, Unknown
  Description of Unknown: LeftRegion for integrase B1153 sequence
tctgtatacgaaaatggccgcctgacaaaatcagacggtcatttttgtatgaagaatttgaattttccagcgggtcagtcatatccgcgtgagagagccgcattgagggcgttttgggtcctgatgtgggaaagttgttgaatcggttgaagacggccttagagagccttattttagctttagatggagagtgacatagcatggcaaagataaagctgccagataagccccgcgtggcaatatacacccgcgtatcgacc

SEQ ID NO: 14153 - DNA, 260 bp, Unknown
  Description of Unknown: LeftRegion for integrase B1154 sequence
taaaaagacaaaaataattattcaatagtaaaatagaaaagccccggcgctaccaacaccggagctaattggcactatctggaagataataccaaatcccgcaaatttagtttatcatcttccaggcagtcacgcaagcggaatgaatgttctttgctggctgttatttttatactcatttttaaggaggaatgatatttatgacagaacaaaatgagaaaatcgtagcactctacgtccgtgtatcaacaggataccaa

SEQ ID NO: 14154 - DNA, 260 bp, Unknown
  Description of Unknown: LeftRegion for integrase B1155 sequence
gctatgagattgtaaccgaaaacaaaagaaaggaagaatttaagctcgaactgcaaagacttcttgcctgctatcagctcgcatcacatgatgatcgtcgcgtagtatgggctgtgcttaataagtatgcagtcgatgtagactgaaattgcccctatttggggctttttctgtttgagtgataaattgtaggcatatctatgaataaaaaccaagaaagaccaaagaaagcagctttatatgttcgagtgtccaccaac

SEQ ID NO: 14155 - DNA, 260 bp, Unknown
  Description of Unknown: LeftRegion for integrase B1156 sequence
ggtgcccgttttgtgaaaagccgctggcctttgtgtacggacattcgcgtgtatatcatacgacaacatggtgttccgattctggagccgagccgctgcagatgtttgaggaagatgcaaaggcaaggggcttgcggaagtgtaagagttgccaaaaacgtgacggggatttaccggcagatagttaaggaggaatcaggatggccaagcgttcagcgaagaaaaatgaatactcatctgctgaacagatcggcgtgatc

SEQ ID NO: 14156 - DNA, 260 bp, Unknown
  Description of Unknown: LeftRegion for integrase B1157 sequence
tctgtatacgaaaatggccgcctgacaaaatcagacggtcatttttgtatggagaatttgaattttccagcgggtcagtcatatccgcgcgagagagctgcattgagggcgttttggctcaagatgtgggaaagttgttgaatcggttgaagatggccttagagggccttattttagctttagatggagagtgacatagcatggcaaaggtaaagctgccagataagccccgcgtggcaatatacacccgcgtatcgacc

SEQ ID NO: 14157 - DNA, 260 bp, Unknown; identical to SEQ ID NO: 14100
  Description of Unknown: LeftRegion for integrase B1158 sequence

SEQ ID NO: 14158 - DNA, 260 bp, Unknown
  Description of Unknown: LeftRegion for integrase B1159 sequence
tttagctggtagccttattttttttttgcgtttcctattgtattttttatataggtggtgtataatagataggaactgaaaatatagcctttttaagctctttgtttttgaggtagggtaaatctacctttgagagctaaaagaggctgtatgaggctcacaggagcccacagaggcaaaatataaaggagagttacaggatggcttacaggaaagtaaaggatctgtttgaaacaataggattaagggcggtattttat

SEQ ID NO: 14159 - DNA, 260 bp, Unknown; identical to SEQ ID NO: 14111
  Description of Unknown: LeftRegion for integrase B1160 sequence

SEQ ID NO: 14160 - DNA, 260 bp, Unknown; identical to SEQ ID NO: 14117
  Description of Unknown: LeftRegion for integrase B1161 sequence

SEQ ID NO: 14161 - DNA, 260 bp, Unknown
  Description of Unknown: LeftRegion for integrase B1162 sequence
accagtatcacatcttcacaatcaaagagtgtcaggaactcttgttactcgcaaagaacgggcaaataggagaaatcaataaccgcatacaacacgctacggctcgtttccttgcggataattcccctgacaataaaaatattgctgtttgagataaagcccctgcatggggcttttcgctttatatggaggtatatattatggcgtacaacgcacaaaacaagaccggtgcaagggtggctatctatgtcagggtatcg

SEQ ID NO: 14162 - DNA, 260 bp, Unknown
  Description of Unknown: LeftRegion for integrase B1163 sequence
tttgactcgctgtatgccaagtacccccgcgcagccgcatacctcaaagccgacggcatggctcttgctgagcatgatgtcaaagctgccgctgggcgtaaggcgcgcgagcgcattatcaacggtgaggacggcgccgaggcgttggccgatgccgaggctgagtgggcagcgtattgcgccgagcatatatgggactaatgccgcatccggctgtagcccttgacaaaaaacccgtttgcggttactatagccgcaaa

SEQ ID NO: 14163 - DNA, 260 bp, Unknown; identical to SEQ ID NO: 14154
  Description of Unknown: LeftRegion for integrase B1164 sequence

SEQ ID NO: 14164 - DNA, 260 bp, Unknown
  Description of Unknown: LeftRegion for integrase B1165 sequence
accagtatcatatcttcacaatcaaagagtgtcaggaactcttgttactcgcaaagaacggacaaataggagaaatcaacaaccgcatacagcacgctacggctcgtttccttgcggataattcccctgacaataaaaatattgctgtttgagataaagcccctgcatggggcttttcgctttatatggaggtatatattatggcgtacaatgcacaaaacaagaccggtgcaagggtggctatctatgtcagggtatcg

SEQ ID NO: 14165 - DNA, 260 bp, Unknown
  Description of Unknown: LeftRegion for integrase B1166 sequence
cttcatggaggccattgaagacctaattacgtccgtttccgactcggatgaataaagtagtttccttcggcacgttccacgaaatacgaggctgtaggaagttgagacacagcatattcttccaaggactattataaacgcaagaagcgggcagaatctcctctgtccgcttctattctaaaaaggaaggaatgaacaccatggctgttactccatcaatatccaaaaaaataacagctccgaaggctgcaatctacatc

SEQ ID NO: 14166 - DNA, 260 bp, Unknown
  Description of Unknown: LeftRegion for integrase B1167 sequence
tctgtatacgaaaatggccgcctgacaaaatcagacggtcatttttgtatggagaatttgaattttccagcgggttagtcgtatccgcgcgagagagctgcattgagggcgttttggctcaagatgtgggaaagttgttgaatcggttgaagacggccttagagggccttattttagctttagatggagagtgacatagcatggcaaaggtaaagctgccagataagccccgcgtggcaatatacacccgcgtatcgacc

SEQ ID NO: 14167 - DNA, 260 bp, Unknown
  Description of Unknown: LeftRegion for integrase B1168 sequence
aaatccggcgaccccgaggaaatcattctgctgaacgcattctccaaggtgagcgaagatgaccgtgccgtcctgtgggcgctgctgcggaaatatatgactccgcacgaccgcgccctgctggaagcccttaaccaagacaacgaatccggcgccgtataatttacctgccgtattcggactaaggggagggcttcatcatgcaaaagaaccagacgaaaaaagccgctctctatatccgagtttctacccactaccaa

SEQ ID NO: 14168 - DNA, 260 bp, Unknown
  Description of Unknown: LeftRegion for integrase B1169 sequence
aaatccggcgaccccgaggaaatcattctgctgaacgcattctccaaggtgagcgacgatgaccgtgccgtcctgtgggcgctgttgcggaaatatatgactccgcacgaccgtgccctgctggaagcccttaaccaagacaacgaatccggcgccgtataatttacctgccgtattcggactaaggggagggcttcatcatgcaaaagaaccagacgaaaaaagccgctctctatatccgagtttctacccactaccaa

SEQ ID NO: 14169 - DNA, 260 bp, Unknown
  Description of Unknown: LeftRegion for integrase B1170 sequence
ataactatttaatgttcaaggcaaaaaataaataataaaagccccgatgctaccaacaccggagccaattggcactatctggaagataataccaaatcccgcaaatttagtttatcatcttccaggcagtcacgcaagcggaacgaatgttctttgctggctgttatttttatactcatttttaaggaggaatgatatttatgacagaacaaaatgagaaaatcgtagcactctacgtccgtgtatcaactggatatcaa

SEQ ID NO: 14170 - DNA, 260 bp, Unknown
  Description of Unknown: LeftRegion for integrase B1171 sequence
aaattgataaaaaagaatacaataaaatattcgccgcattgaaactaatagaagcattgtttattgatggaaaaataaaatatcatgtatttaggaatatcctagatgactataaagatgttgttgatttatctgagtttaaatgctatacttgatacatctattaacaaacatcgtattattatgaggaataaaaataaatgtatgatatttacaatcaaaaaccaaccagccgaaaagttgtaatttatgcgcgtgtt

SEQ ID NO: 14171 - DNA, 260 bp, Unknown
  Description of Unknown: LeftRegion for integrase B1172 sequence
ctcttttaaattgctctgtcatccctcacttagttcagaatggcagagccaaacattatttttcagacaacagtccatttcatcggtttctcttcagaaaaatacggtctgtaatagtgcccggcaactcatcacaataaacaattgtaatactaaaatataattactatctttgcaacattagaactagaatatttattatgacaaaaaaagctgctatatatctacgtgtctctagtatcgaccagaattatgaacga

SEQ ID NO: 14172 - DNA, 260 bp, Unknown
  Description of Unknown: LeftRegion for integrase B1173 sequence
tgaagccttttggcggtttgcgtcctacaacatagtggatgccgttgatgtagccccagcgtttccatgcggcaaacagtccgggcaacgtgtttgtcaaaccgtgtttaatgggtcaaacacagatataactttattgctgaaatatttggatatgtgggatttaggtggtaactttgcagcggaaaatctaaaatcagatgaagaaagctgtaatatattcccgtgtttctactctagagcaggattatacttcgcag

SEQ ID NO: 14173 - DNA, 260 bp, Unknown; identical to SEQ ID NO: 14154
  Description of Unknown: LeftRegion for integrase B1174 sequence

SEQ ID NO: 14174 - DNA, 260 bp, Unknown
  Description of Unknown: LeftRegion for integrase B1175 sequence
accgggcttttaatcgtgtgcagtgacccgatgcaaaagaaaatcgacagagctgccgccctaaacattccaatcatttcagaacagcaatggtttgaacttatgccggaactagaagccctcggaatgtggaatggaaagccaattccgtttgcggatgacaatggcatctaccgttttgatgtgggtggtgttggataatggcaaaaaagaagaagcccgccgggggcaacgccatcatctatgcccgctactcgtcc

SEQ ID NO: 14175 - DNA, 260 bp, Unknown
  Description of Unknown: LeftRegion for integrase B1176 sequence
ggtgcccgttttgtgaaaagccgctggcctttgtgtacggacattcgcgtgtatatcacacgacaacacggtgttccgattctggagccgagccgctgcagatgtttgaggaagatgcaaaggcaatgggcttgcggaagtgtaagagttgccaaaaacgtgacggggatttaccggcagatagttaaggaggaatcaggatggccaagcgttcagcgaagaaaaatgaataccaatcggctgaacagatcggcgtgatc

SEQ ID NO: 14176 - DNA, 260 bp, Unknown
  Description of Unknown: LeftRegion for integrase B1177 sequence
aaatccggcgaccccgaggaaatcattctgctgaacgcattctctaaggtgagcgacgatgaccgtgccgtcctgtgggcgctgctgcggaaatatatgactccgcacgaccgcgccctgctggaagcccttaaccaagacaacgaatccggcgccgtataatttacctgccgtattcggactaaggggagggcttcatcatgcaaaagaaccagacgaaaaaagccgctctctatatccgagtttctacccactaccaa

SEQ ID NO: 14177 - DNA, 260 bp, Unknown; identical to SEQ ID NO: 14122
  Description of Unknown: LeftRegion for integrase B1178 sequence

SEQ ID NO: 14178 - DNA, 260 bp, Unknown
  Description of Unknown: LeftRegion for integrase B1179 sequence
tcctaattacaaattttattgtacctgccgtacttccagaaaagttttcggaaaagatctgcccaatcatcaattgcatacggtagcagaacggtgcggatataatttagagaatcaccaccacgcacttgctgacgcaaagtttccaaatgtgctctgatttcattatcttcgcacccactaaccagcgaagaagcattatgagaaaaagaattgtaggttatgcgagagtatctacagagaaacaagacctagaaaga

SEQ ID NO: 14179 - DNA, 260 bp, Unknown
  Description of Unknown: LeftRegion for integrase B1180 sequence
ggctactggctgtaaaatgctggtagccctcattttttagttgtatctagtatataaggggtgtataatagatagaaactgaaaacagcctcataaagccctctattttatcgagagtaaagaagtctacacctaatatataaaagtggctgtatgaggcacacaggagctcacaggactattgcaggagggtaaacaggatggcatacaggaaaataacggatataagagatactattggtatgagagcggtattttat

SEQ ID NO: 14180 - DNA, 260 bp, Unknown
  Description of Unknown: LeftRegion for integrase B1181 sequence
ccagaggcttcgcaaaagcagtctcgcaataaaaacacatacggggcatcgcagcagcggtgccccaaaactatatctaacggttacgttacgtttacggtataggttacggttacggtatggttacggttatactcggaacgtccgtggatttttggtcggacgttcctatggaatatcccgaaaaaggaggacttcgtatggcttctcgcatcgccgagaaactggccgcgaagaaggcggccatctatattcgcgtc

SEQ ID NO: 14181 - DNA, 260 bp, Unknown
  Description of Unknown: LeftRegion for integrase B1182 sequence
ccagaggcttcgcaaaagcagtctcgcaataaaaacacatacggggcatcgcagcagcggtgccccaaaactatatctaacggttatgttacgtttacggtataggttacggttacggtatggttacggttatacacggaacgtccgtggatttttggtcggacgttcctatggaatatcccgaaaaaggaggacttcgtatggcttctcgcatcgccgagaaactggccgcgaagaaggcggccatctatattcgcgtc

SEQ ID NO: 14182 - DNA, 260 bp, Unknown
  Description of Unknown: LeftRegion for integrase B1183 sequence
ccagaggcttcgcaaaagcagtctcgcaataaaaacacatacggggcatcgcagcagcggtgccccaaaactatatctaacggttacgttacgtttacggtataggttacggttacggtatggttacggttatacacggaacgtccgtggatttttggtcggacgttcctatggaatatcccgaaaaaggaggacttcgtatggcttctcgcatcgccgagaaactggccgcgaagaaggcggccatctatattcgcgtc

SEQ ID NO: 14183 - DNA, 260 bp, Unknown; identical to SEQ ID NO: 14182
  Description of Unknown: LeftRegion for integrase B1184 sequence

SEQ ID NO: 14184 - DNA, 260 bp, Unknown; identical to SEQ ID NO: 13552
  Description of Unknown: LeftRegion for integrase B1185 sequence

SEQ ID NO: 14185 - DNA, 260 bp, Unknown; identical to SEQ ID NO: 13291
  Description of Unknown: LeftRegion for integrase B1186 sequence

SEQ ID NO: 14186 - DNA, 260 bp, Unknown
  Description of Unknown: LeftRegion for integrase B1187 sequence
gctactggctataaaatgctggtagccctcattttttagttgtatctagtatataaggggtgtataatagatagaaactgaaaaacagcctcataaagccctctattttatcgagagtaaagaagtctacacctaatatataaaagtggctgtatgaggcacacaggagctcacaggactattacaggagggtaaacaggatggcatacaggaaaataacggatataaaagatactattggtatgagagcggtattttat

SEQ ID NO: 14187 - DNA, 260 bp, Unknown; identical to SEQ ID NO: 13521
  Description of Unknown: LeftRegion for integrase B1188 sequence

SEQ ID NO: 14188 - DNA, 260 bp, Unknown
  Description of Unknown: LeftRegion for integrase B1189 sequence
tgaaaagaaaaagggcggcgcggcttcgatcgccttgattgtgatcggcgtcctgttcctgatcggcggcgtgaatggcttttctattgccgtttcaaacggaattatcggacttctgatcggcggcgtctgcctgtatttcggaatcaggaaacggcgcaacccgaaacaataatatttttttgaaaaggaatcaaaccatgaatgaacagaaaatagttgcattatatacccgcgtttcgaccgggtatcagatcgac

SEQ ID NO: 14189 - DNA, 260 bp, Unknown
  Description of Unknown: LeftRegion for integrase B1190 sequence
gccagaggcttcgcaaaaacagtctcgcaataaaaacacatacggggcatcgcggtagcggtgccccaaaactatatctaacggttacgttacgtttacggtataggttacggttacggtatggttacggttatactcggaacgtccgtggatttttggtcggacgttcctatggaatatcccaaaaaggaggacttcgtatggcttctcgcatcgccgagaaactggccgcgaagaaggcggccatctatattcgcgtc

SEQ ID NO: 14190 - DNA, 260 bp, Unknown
  Description of Unknown: LeftRegion for integrase B1191 sequence
tcctaattacaagttttattgtacctgccgtacttcaaggaaagtgttcggaaaggatctgcccaatcatcagttgcatacagtagcagaacgatgcggatataacttggagaatcaccaccacgcacttgctgacgcaaagtttccaaatgtgctctgatttcattatcttcgcacccactaaccagcgaagaagcattatgagaaaaagaattgtaggttatgcgagagtatctacagagaagcaagacctagaaaga

SEQ ID NO: 14191 - DNA, 260 bp, Unknown; identical to SEQ ID NO: 13521
  Description of Unknown: LeftRegion for integrase B1192 sequence

SEQ ID NO: 14192 - DNA, 260 bp, Unknown
  Description of Unknown: LeftRegion for integrase B1193 sequence
agggctactggctgtaaaatgctggtagccctcattttttagttgtatctagtatataaggggtgtataatagataggaactgaaaacaacctcataaagccctctattttatcgagggtaaaagtctacacctaatatataaaagtggctgtatgaggcacacaggagctcacaggactattgcaggagggtaaacaggatggcatacaggaaaataacggatataaaagatactattggtatgagagcggtattttat

SEQ ID NO: 14193 - DNA, 260 bp, Unknown
  Description of Unknown: LeftRegion for integrase B1194 sequence
ccagaggcttcgcaaaagcagtctcgcaataaaaacacatacggggcatcgcagcagcggtgccccaaaactatatctaacggttacgttacgtttacggtataggttacggttacggtatggttacggttatacacggaacgtccgtggatttttagtcggacgttcctatggaatatcccgaaaaaggaggacttcgtatggcttctcgcatcgccgagaaactggccgcgaagaaggcggccatctatattcgcgtc

SEQ ID NO: 14194 - DNA, 260 bp, Unknown; identical to SEQ ID NO: 14046
  Description of Unknown: LeftRegion for integrase B1195 sequence

SEQ ID NO: 14195 - DNA, 260 bp, Unknown
  Description of Unknown: LeftRegion for integrase B1196 sequence
gctactggctgtaaaatgctggtagccctcattttttagttgtatctagtatataaggggtgtataatagatagaaactgaaaaacagcctcataaagccctctattttatcaagggtaaagaagtctacacctaatatataaaagtggctgtatgaggcacacaggagctcacaggactattacaggagggtaaacaggatggcatacaggaaaataacggatataagagatactattggtatgagagcggtattttat

SEQ ID NO: 14196 - DNA, 260 bp, Unknown
  Description of Unknown: LeftRegion for integrase B1197 sequence
ccagaggcttcgcaaaagcagtctcgcaataaaaacacatacggggcatcgcagcagcggtgccccaaaactatatctaacggttacgctacgtttacggtataggttacggttacggtatggttacggttatacacggaacgtccgtggatttttggtcggacgttcctatggaatatcccgaaaaaggaggacttcgtatggcttctcgcatcgccgagaaactggccgcaaagaaggcggccatctatattcgcgtc

SEQ ID NO: 14197 - DNA, 260 bp, Unknown
  Description of Unknown: LeftRegion for integrase B1198 sequence
ccagaggcttcgcaaaagcagtctcgcaataaaaacacatacggggcatcgcagcagcggtgccccaaaactatatctaacggttacgttacgtttacggtataggttacggttacggtatggttacggttatacacggaacgtccgtggatttttggtcggacgttcctatggaatatcccgaaaaaggaggacttcgtatggcttctcgcatcgccgagaaactggccgcgaagaaggcggccatctatattcgcgtt

SEQ ID NO: 14198 - DNA, 260 bp, Unknown
  Description of Unknown: LeftRegion for integrase B1199 sequence
caagagacttcgccaaatcagtctcaaaataaaaacgcatacggggcatcgcgtcagcggtgccccaaaactatatctaacggttacgttacgtttacggtataggttacggttacggtatggttacggttatactcggaacgtccgtggatttttggtcggacgttcctatggaatatcccgaaaaaggaggacttcgtatggcttctcgcatcgccgagaaactggccgcgaagaaggcggccatctatattcgcgtc

SEQ ID NO: 14199 - DNA, 260 bp, Unknown
  Description of Unknown: LeftRegion for integrase B1200 sequence
ggctactggctgtaaaatgctggtagccctcattttttagttgtatctagtatataaggggtgtataatagataggaactgaaaacagcctcataaagccctctgttttatcgagggtaaagaagtctacacctaatatataaaagtggctgtatgaggcacacaggagctcacaggactattacaggagggtaaacaggatggcatacaggaaaataacggatataaaagctactataggtatgagagcggtattttat

SEQ ID NO: 14200 - DNA, 260 bp, Unknown
  Description of Unknown: LeftRegion for integrase B1201 sequence
acttgacgttttctgacggcccagtgttatccgccggcattgaagaatgtatgtcgggcggcgagctcatcctgctttgcatctcatattctccgacgccaaaatcttgatagacatactgtgcggggtggcgttctatgtcacctcgcttttctattcagtagtacgaatatttctacgattgcttggaggtagctgttatgacatcaatttctgagcgtctaaaaaagttcagggtcgcaatatacatccgcgtatcg

SEQ ID NO: 14201 - DNA, 260 bp, Unknown
  Description of Unknown: LeftRegion for integrase B1202 sequence
ggctactggctgtaaaatgctggtagccctcattttttagttgtatctagtatataaggggtgtataatagataggaactgaaaacagcctcataaagccctctattttatcgagggtaaagaagtctacacctaatatataaaagtgactgtacgaggcacacaggagctcacaggactattacaggagggtaaacaagatggcatacaggaaaataacggatataagagatactattggtatgagagcggtattttat

SEQ ID NO: 14202 - DNA, 260 bp, Unknown
  Description of Unknown: LeftRegion for integrase B1203 sequence
ccagaggcttcgcaaaatcagtctcgcaataaaaacacatacggggcatcgcagcagcggtgccccaaaactatatctaacggttacgttacgtttacggtataggttacggttacggtatggttacggttatacacggaacgtccgtggatttttggtcggacgttcctatggaatatcccgaaaaaggaggacttcgtatggcttctcgcatcgccgagaaactggccgcgaagaaggcggccatctatattcgcgtc

SEQ ID NO: 14203 - DNA, 260 bp, Unknown
  Description of Unknown: LeftRegion for integrase B1204 sequence
cagaggctttgcaaaaacagtctcgcgataaaaacacatacggggcatcgcgtcagcggtgccccaaaactatatctaacggttacgttacgtttacggtataggttacggttacggtatggttacggttatactcggaacgtccgtggatttttggtcggacgttcctatggaatatcccgaaaaaaggaggacttcgtatggcttctcgcatcgctgagaaactggccgccaagaaagcggccatttacattcgcgtc

SEQ ID NO: 14204 - DNA, 260 bp, Unknown; identical to SEQ ID NO: 14182
  Description of Unknown: LeftRegion for integrase B1205 sequence

SEQ ID NO: 14205 - DNA, 260 bp, Unknown
  Description of Unknown: LeftRegion for integrase B1206 sequence
ccagaggcttcgcaaaatcagtctcgcaataaaaacacatacggggcatcgcagcagcggtgccccaaaactatatctaacggttacgttacgtttacggtataggttacggttacggtatggttacggttatacacggaacgtccgtggatttttggtcggacgttcctatggaatatcccgaaaaaggaggacttcgtatggcttctcgcattgccgagaaactggccgcgaagaaggcggccatctatattcgcgtc

SEQ ID NO: 14206 - DNA, 260 bp, Unknown
  Description of Unknown: LeftRegion for integrase B1207 sequence
tatagtcgtcgcttcgaacaatggggcctacgcaataaagaggtttattaatgatctcgaaaataagcgaatcattcttcgccccgattcttctgatatcgccttttctgacattgtcatcccctatgaatcggccgataatttacaaattttcggtaaagtcgttatatattccgtagtactttaaaggcggtgcgatcatggcaaatagaaaatggcgcccggcctgttattgccgggtctcgacgatacaccaaatc

SEQ ID NO: 14207 - DNA, 260 bp, Unknown
  Description of Unknown: LeftRegion for integrase B1208 sequence
tgaaaagaaaaagggcggcgcggcttcgatcgccttgattgtaatcggcgtcctgttcctgatcggcggcgtgaatggcttttctattgccgtttcaaacggaattatcggacttctgatcggcggcgtctgcctgtatttcggaatcaggaaacggcgcaacccgaaacaataatatttttttgaaaaggaatcaaaccatgaatgaacagaaaatagttgcattatatacccgcgtttcgaccgggtatcagatcgac

SEQ ID NO: 14208 - DNA, 260 bp, Unknown; identical to SEQ ID NO: 13530
  Description of Unknown: LeftRegion for integrase B1209 sequence

SEQ ID NO: 14209 - DNA, 260 bp, Unknown; identical to SEQ ID NO: 14182
  Description of Unknown: LeftRegion for integrase B1210 sequence

SEQ ID NO: 14210 - DNA, 260 bp, Unknown; identical to SEQ ID NO: 14189
  Description of Unknown: LeftRegion for integrase B1211 sequence

SEQ ID NO: 14211 - DNA, 260 bp, Unknown
  Description of Unknown: LeftRegion for integrase B1212 sequence
ccagaggcttcgcaaaagcagtctcgcaataaaaacacatacggggcatcgcagcagcggtgccctaaaactatatctaacggttacgttacgtttacggtataggttacggttacggtatggttacggttatacacggaacgtccgtggatttttagtcggacgttcctatggaatatcccgaaaaaggaggacttcgtatggcttctcgcatcgccgagaaactggccgcgaagaaggcggccatctatattcgcgtc

SEQ ID NO: 14212 - DNA, 260 bp, Unknown
  Description of Unknown: LeftRegion for integrase B1213 sequence
attttgaggggcttgtacccctttttttgtttttctgttgctatttttatatagctggtgtataatagatacagactgaaaataaagccacttagagagcctcaagagttaggggtaggcagttatacccctgagcgattaaaacggctctgagaggctctcaggggctcaggataggattttataaaggagtgtacaggatggcttacaggagagcacaggatactaaaggattaagggcggttttctatgctagggta

SEQ ID NO: 14213 - DNA, 260 bp, Unknown
  Description of Unknown: LeftRegion for integrase B1214 sequence
ggctactggctgtaaaatgctggtagccctcattttttagttgtatctagtatataaggggtgtataatagataggaactgaaaacagcctcataaagccctctattttatagagggtaaagaagtctacacctaatatataaaagtggatgtatgaggcacacaggagctcacaggactattacaggagggtaaacaggatggcatacaggaaaataacggatataagagatactattggtatgagagcggtattttat

SEQ ID NO: 14214 - DNA, 260 bp, Unknown
  Description of Unknown: LeftRegion for integrase B1215 sequence
gccagaggcttcgcaaaaacagtctcgcaataaaaacacatacggggcatcgcggtagcggtgccccaaaactatatctaacggttacgttacgtttacggtataggttacggttacggtatggttacggttatactcggaacgtccgtgggtttttggtcggacgttcctatggaatatcccaaaaaggaggacttcgtatggcttctcgcatcgccgagaaactggccgcgaagaaggcggccatctatattcgcgtc

SEQ ID NO: 14215 - DNA, 260 bp, Unknown
  Description of Unknown: LeftRegion for integrase B1216 sequence
gctactggctgtaaaatgctggtagccctcattttttagttgtatctagtatataaggggtgtataatagatagaaactgaaaaacagcctcataaagccatctattttatcgagggtaaagaagtctacacctaatatataaaagtggctgtatgaggcacacaggagctcacaggactattacaggaggataaacaggatggcatacaggagaataacggatataagagatactattggtatgagagcggtattttat

SEQ ID NO: 14216 - DNA, 260 bp, Unknown
  Description of Unknown: LeftRegion for integrase B1217 sequence
gctactggctgtaaaatgctggtagccctcattttttagttgtatctagtatataaggggtgtataatagatagaaactgaaaaacagcctcataaagccctctattttatagagggtaagaaagtctacacctaatatataaaagtggctgtatgaggcacacaggagctcacaggactattacaggagggtaaacaggatggcatacaggaaaataacggatataagagatactattggtatgagagcggtattttat

SEQ ID NO: 14217 - DNA, 260 bp, Unknown; identical to SEQ ID NO: 14182
  Description of Unknown: LeftRegion for integrase B1218 sequence

SEQ ID NO: 14218 - DNA, 260 bp, Unknown
  Description of Unknown: LeftRegion for integrase B1219 sequence
ggctactggctgtaaaatgctggtagccctcattttttagttgtatctagtatataaggggtgtataatagatagaaactgaaaaacagcctcataaagccctctattttatagagggtaagaagtctacacctaatatataaaagtggctgtatgaggcatacaggagctcacaggactattacaggagggtaaacaggatggcatacaggaaaataacggatataagagatactattggtatgagagcggtattttat

SEQ ID NO: 14219 - DNA, 260 bp, Unknown; identical to SEQ ID NO: 13552
  Description of Unknown: LeftRegion for integrase B1220 sequence

SEQ ID NO: 14220 - DNA, 260 bp, Unknown; identical to SEQ ID NO: 14182
  Description of Unknown: LeftRegion for integrase B1221 sequence

SEQ ID NO: 14221 - DNA, 260 bp, Unknown; identical to SEQ ID NO: 14182
  Description of Unknown: LeftRegion for integrase B1222 sequence

SEQ ID NO: 14222 - DNA, 260 bp, Unknown; identical to SEQ ID NO: 14197
  Description of Unknown: LeftRegion for integrase B1223 sequence

SEQ ID NO: 14223 - DNA, 260 bp, Unknown
  Description of Unknown: LeftRegion for integrase B1224 sequence
ccagaggcttcgcaaaatcagtcttgcaataaaaacacatacggggcatcgcagcagcggtgccccaaaactatatctaacggttacgttacgtttacggtataggttacggttacggtatggttacggttatacacggaacgtccgtggatttttggtcggacgttcctatggaatatcccgaaaaaggaggacttcgtatggcttctcgcatcgccgagaaactggccgcgaagaaggcggccatctatattcgcgtt

SEQ ID NO: 14224 - DNA, 260 bp, Unknown
  Description of Unknown: LeftRegion for integrase B1225 sequence
gctactggctgtaaaatgctggtagccctcattttttagttgtatctagtatataaggggtgtataatagatagaaactgaaaaacagcctcataaagccctctattttatcgagggtaaagaagtctacacctaatatataaaagtggctgtatgaggcacacaggagctcacaggactattacaggagggtaaacaggatggcatacaggaaaataacggatataaaagatactattggtatgagagcggtattttat

SEQ ID NO: 14225 - DNA, 260 bp, Unknown
  Description of Unknown: LeftRegion for integrase B1226 sequence
ccagaggcttcgtgaaaacagtctcgtagtaaagacacatacggggcatcgcttcagcggtgccccaaaactatatctaacggttacgttacgtttacggtataggttacggttacggtatggttacggttatacacggaacgtccgtggatttttggtcggacgttcctatggaatatcccgaaaaaggaggacttcgtatggcttctcgcatcgccgagaaactggccgcgaagaaggcggccatctatattcgcgtt

SEQ ID NO: 14226 - DNA, 260 bp, Unknown; identical to SEQ ID NO: 14189
  Description of Unknown: LeftRegion for integrase B1227 sequence

SEQ ID NO: 14227 - DNA, 260 bp, Unknown; identical to SEQ ID NO: 14189
  Description of Unknown: LeftRegion for integrase B1228 sequence

SEQ ID NO: 14228 - DNA, 260 bp, Unknown; identical to SEQ ID NO: 14182
  Description of Unknown: LeftRegion for integrase B1229 sequence

SEQ ID NO: 14229 - DNA, 260 bp, Unknown
  Description of Unknown: LeftRegion for integrase B1230 sequence
ggctactggctgtaaaatgctggtagccctcattttttagttgtatctagtatataaggtgtgtataatagataggaactgaaaacagcctcataaagccctctattttatcgagggtaaagaagtctacacctaatatataaaagtggctgtatgaggcacacaggagctcacaggactattacaggagggtaaacaggatggcatacaggaaaataacggatataaaagatactattggtatgagagcggtattttat

SEQ ID NO: 14230 - DNA, 260 bp, Unknown; identical to SEQ ID NO: 14197
  Description of Unknown: LeftRegion for integrase B1231 sequence

SEQ ID NO: 14231 - DNA, 260 bp, Unknown; identical to SEQ ID NO: 14193
  Description of Unknown: LeftRegion for integrase B1232 sequence

SEQ ID NO: 14232 - DNA, 260 bp, Unknown
  Description of Unknown: LeftRegion for integrase B1233 sequence
aaactgtacttcgatgaaaacggcgatgtttgcaagccatatacaggctacttgtttgcggaactggaagttagggacggggatcttctggatatgaaagatggtcaatatcttgagtattccattcaaacactcgattcgcttactgctagtttcagccgctaagaaatgttatatcgcctaaaggagctgcaaaacacatggcacgttcagcgaagaaaattgaatatgcacccgctgaacagatcggcgtgatctat

SEQ ID NO: 14233 - DNA, 260 bp, Unknown
  Description of Unknown: LeftRegion for integrase B1234 sequence
cagaggcttcgcaaaaacagtctcgcaataaaaacacatacggggcatcgcggtagcggtgccccaaaactatatctaacggttacgttacgtttacggtataggttacggttacggtatggttacggttatactcggaacgtccgtggatttttggtcggacgttcctatggaatatcccgaaaaaaggaggacttcgtatggcttctcgcatcgccgagaaactggccgccaagaaagcggccatttacattcgcgtc

SEQ ID NO: 14234 - DNA, 260 bp, Unknown
  Description of Unknown: LeftRegion for integrase B1235 sequence
gggctactggctgtaaaatgctggtagccctcattttttagttgtatctagtatataaggggtgtataatagataggaactgaaaacagcctcataaagccctctattttatcgagggtaaaaagtctacacctaatatataaaagtggctgtatgaggcacacaggagctcacaggactattacaggagggtaaacaggatggcatacaggaaaataacggatataaaagatactattggtatgagagcggtattttat

SEQ ID NO: 14235 - DNA, 260 bp, Unknown
  Description of Unknown: LeftRegion for integrase B1236 sequence
ggctactggctgtaaaatgctggtagccctcattttttagttgtatctagtatataaggggtgtataatagatagaaactgaaaatagcctcataaagccttctgttttatcgagggtaaagaagtctacacctaatatataaaagtggctgtatgaggcacacaggagctcacaggactattacaggagggtaaacaggatggcatacaggaaaataacggatataaaagatactataggtatgagagcggtattttat

SEQ ID NO: 14236 - DNA, 260 bp, Unknown; identical to SEQ ID NO: 13548
  Description of Unknown: LeftRegion for integrase B1237 sequence

SEQ ID NO: 14237 - DNA, 260 bp, Unknown
  Description of Unknown: LeftRegion for integrase B1238 sequence
agggctactggctgtaaaatgctggtagccctcattttttagttgtatctagtatataaggggtgtataatagataggaactgaaaacagcctcataaagccctctattttatcgagggtaaaagtctacacctaatatataaaagtggctttatgaggcacacaggagctcacaggactattacaggagggtaaacaggatggcatacaggaaaataacggatataaaagatactattggtatgagagcggtattttat

SEQ ID NO: 14238 - DNA, 260 bp, Unknown; identical to SEQ ID NO: 14182
  Description of Unknown: LeftRegion for integrase B1239 sequence

SEQ ID NO: 14239 - DNA, 260 bp, Unknown; identical to SEQ ID NO: 14182
  Description of Unknown: LeftRegion for integrase B1240 sequence

SEQ ID NO: 14240 - DNA, 260 bp, Unknown
  Description of Unknown: LeftRegion for integrase B1241 sequence
cagaggcttcgcaaaaacagtctcgcaataaaaacacatacggggcatcgcggtagcggtgccccaaaactatatctgacggttacgttacgtttacggtataggttacggttacggtatggttacggttatactcggaacgtccgtggatttttggtcggacgttcctatggaatatcccgaaaaaaggaggacttcgtatggcttctcgcatcgccgagaaactggccgccaagaaagcggccatctacattcgcgtc

SEQ ID NO: 14241 - DNA, 260 bp, Unknown
  Description of Unknown: LeftRegion for integrase B1242 sequence
tcagaggcttcgcaaaagcagtctcgcaataaaaacacatacggggcatcgcagcagcggtgccccaaaactatatctaacggttatgttacgtttacggtataggttacggttacggtatggttacggttatacacggaacgtccgtggatttttggtcggacgttcctatggaatatcccgaaaaaggaggacttcgtatggcttctcgcatcgccgagaaactggccgcgaagaaggcggccatctatattcgcgtc

SEQ ID NO: 14242 - DNA, 260 bp, Unknown
  Description of Unknown: LeftRegion for integrase B1243 sequence
gctactggctgtaaaatgctggtagccctcattttttagttgtatctagtatataaggggtgtataatagatagaaactgaaaaacagcctcataaagccctctattttatcgagggtaaagaagtctacacctaatatataaaggtggctgtatgaggcacacaggagctcacaggactattacaggaggataaacaggatggcatacaggaaaataacggatataagagatactattggtatgagagcggtattttat

SEQ ID NO: 14243 - DNA, 260 bp, Unknown
  Description of Unknown: LeftRegion for integrase B1244 sequence
aagatacttatgaatacaagagggaagacggaaccgtcggaaaccttcacaaagagaataccgggatgtacgattttgagttgccagatgaacttccatcggctgaaactattccagagccgttatacggttatgtcgtagaatggcttgcagaaaaagcaaagtcatacagttgaatttgatctttgaggtaaggaactatggcacgttcagcgaagaaaattgaatacgcgcccgctgaacagatcggcgtgatttac

SEQ ID NO: 14244 - DNA, 260 bp, Unknown
  Description of Unknown: LeftRegion for integrase B1245 sequence
aagagacttcgccaaatcagtctcaaaataaaaacgcatacggggcatcgcgtcagcggtgccccaaaactatatctaacggttacgttacgtttacggtataggttacggttacggtatggttacggttatactcggaacgtccgtggatttttggtcggacgttcctatggaatatcccgaaaaaaggaggacttcgtatggcttctcgcatcgccgagaaactggccgccaagaaagcggccatctacattcgcgtc

SEQ ID NO: 14245 - DNA, 260 bp, Unknown; identical to SEQ ID NO: 14182
  Description of Unknown: LeftRegion for integrase B1246 sequence

SEQ ID NO: 14246 - DNA, 260 bp, Unknown
  Description of Unknown: LeftRegion for integrase B1247 sequence
gccagaggcttcgcaaaaacagtctcgcaataaaaacacatacggggcatcgcggtagcggtgccccaaaactatatctaacggttacgttacgtttacggtataggttacggttacggtatggttacggttatactcggaacgtccgtggatttttggccggacgttcctgtggaatatcccaaaaaggaggacttcgtatggcttctcgcatcgccgagaaactggccgcgaagaaggcggccatctatattcgcgtc

SEQ ID NO: 14247 - DNA, 260 bp, Unknown; identical to SEQ ID NO: 13525
  Description of Unknown: LeftRegion for integrase B1248 sequence

SEQ ID NO: 14248 - DNA, 260 bp, Unknown; identical to SEQ ID NO: 14202
  Description of Unknown: LeftRegion for integrase B1249 sequence

SEQ ID NO: 14249 - DNA, 260 bp, Unknown; identical to SEQ ID NO: 13548
  Description of Unknown: LeftRegion for integrase B1250 sequence

SEQ ID NO: 14250 - DNA, 260 bp, Unknown
  Description of Unknown: LeftRegion for integrase B1251 sequence
ttgacggcatattgtttgcatttctccgttaaattttaaacttgtttttatcaacaaaaataataaaatgaaaaccgcacttgaaataacattacaaaacctctcaataagtcctttatccaaagaagaactcgaaaaaggggtacgttacctttccggtgcggttacatgccttttaaacatgcggatggagatattgcgtgaaagcggtcatattaacaagagtatcgaccaaggagcaggaggagggacacagtctg

SEQ ID NO: 14251 - DNA, 260 bp, Unknown
  Description of Unknown: LeftRegion for integrase B1252 sequence
ggctactggctgtaaaatgctggtagccctcattttttagttgtatctagtatataaggggtgtataatagataggaactgaaaacagcctcataaagccctctagtttatcgagggtaaagaagtctacacctaatatataaaagtggctgtatgaggcacacaggagctcacaggactattacaggagggtaaacaggatggcatacaggaaaataacggatataagagatactattggtatgagagcggtattttat

SEQ ID NO: 14252 - DNA, 260 bp, Unknown; identical to SEQ ID NO: 14246
  Description of Unknown: LeftRegion for integrase B1253 sequence

SEQ ID NO: 14253 - DNA, 260 bp, Unknown; identical to SEQ ID NO: 14182
  Description of Unknown: LeftRegion for integrase B1254 sequence

SEQ ID NO: 14254 - DNA, 260 bp, Unknown; identical to SEQ ID NO: 14200
  Description of Unknown: LeftRegion for integrase B1255 sequence

SEQ ID NO: 14255 - DNA, 260 bp, Unknown; identical to SEQ ID NO: 14180
  Description of Unknown: LeftRegion for integrase B1256 sequence

SEQ ID NO: 14256 - DNA, 260 bp, Unknown
  Description of Unknown: LeftRegion for integrase B1257 sequence
ggctactggctgtaaaatgctggtagccctcattttttagttgtatctagtatataaggggtgtataatagatagaaactgaaaacagcctcataaagccctctattttatcgagggtaaagaagtctacacctaatatataaaaggggctgtatgaggcacacaggagctcacaggactattacaggagggtaaacaggatggcatacaggaaaataacggatataaaagatactattggtatgagagcggtattttat

SEQ ID NO: 14257 - DNA, 260 bp, Unknown
  Description of Unknown: LeftRegion for integrase B1258 sequence
agcaaaggaaagatcgctatgaacaaagacaacaacgtgtccgagtgcaagatcggacgaacaacttacatcgtgaagttagtattcaaccctgcttcaaaggaacgccttacggatattctgcaaagactgatagaccgtgaatgtgaagaaatgctcggtgaatccggacaagaacctgagaagtaggctgtgtaatattggcatttcggcgcattgccattgacggtatattgcgctataatgataacatagcttgc

SEQ ID NO: 14258 - DNA, 260 bp, Unknown
  Description of Unknown: LeftRegion for integrase B1259 sequence
gccagaggcttcgcaaaaacagtctcgcaataaaaacacatacggggcatcgcggtagcggtgccccaaaactatatctaacggttacgttacgtttacggtataggttacggttacggtatggttacggttatactcggaacgtccgtggatttttggttggacgttcctatggaatatcccaaaaaggaggacttcgtatggcttctcgcatcgccgagaaactggccgcgaagaaggcggccatctatattcgcgtc

SEQ ID NO: 14259 - DNA, 260 bp, Unknown
  Description of Unknown: LeftRegion for integrase B1260 sequence
ccagaggcttcgcaaaagcagtctcgcaataaaaacacatacggggcatcgcagcagcggtgccccaaaactatatctaacggttacgttacgtttacggtataggttacggttacggtatggttacggttatacacggaacgtccgtggatttttggtcggacgttcctatggaatatcccgaaaaaggaggacttcatatggcttctcgcatcgccgagaaactggccgcgaagaaggcggccatctatattcgcgtc

SEQ ID NO: 14260 - DNA, 260 bp, Unknown
  Description of Unknown: LeftRegion for integrase B1261 sequence
cgcccgttggttatctattgatataatcggacttggcgtttctcctgatgatccgcgttttattgttcaaaaaaataaaaatcaaagattttggaaggcaaaaattgataatatttccaatctttccgcgttcgatgatctcgtgatcgcgtcctgctgccggaatttaaaacaatagcattttgaaaaggaatcgaaccatgaatgaacagaaaatagttgcattatatacccgcgtttcgaccgggtatcagatcgaa

SEQ ID NO: 14261 - DNA, 260 bp, Unknown
  Description of Unknown: LeftRegion for integrase B1262 sequence
cagaggcttcgcaaaagcagtctcgcaataaaaacacatacggggcatcgcagcagcggtgccccaaaactatatctaacggttacgttacgtttacggtataggttacggttacggtatggttacggttatacacggaacgtccgtggatttttggtcggacgttcctatggaatatcccgaaaaaaggaggacttcgtatggcttctcgcatcgccgagaaactggccgcgaagaaggcggccatctatattcgcgtc

SEQ ID NO: 14262 - DNA, 260 bp, Unknown
  Description of Unknown: LeftRegion for integrase B1263 sequence
gccagaggcttcgtaaaagcagtctcgcaataaaaacacatacggggcatcgcagcagcggtgccccaaaactatatctaacggttacgttacgttttcggtataggttacggttacggtatggttacggttatacacggaacgtccgtggatttttggtcggacgttcctatggaatatcccgaaaaggaggacttcgtatggcttctcgcatcgccgagaaactggccgcgaagaaggcggccatctatattcgcgtc

SEQ ID NO: 14263 - DNA, 260 bp, Unknown
  Description of Unknown: LeftRegion for integrase B1264 sequence
cgaccttatcaatgtaatggacgacacgcccgttcgttttgatagcgacgaagaatcgtgttccttccggctttctccacttgaaaaagatatcattcttcgttttcgcttattatctgacggcgaacgaaatatgtttcttcgctctcttggaattgatgatacatattaagtgaatgtttcaagaaaggaatcaaaccatgaacgaacagaaaacagttgcactatatacccgcgtttcgaccgggtatcagatcgac

SEQ ID NO: 14264 - DNA, 260 bp, Unknown; identical to SEQ ID NO: 14202
  Description of Unknown: LeftRegion for integrase B1265 sequence

SEQ ID NO: 14265 - DNA, 260 bp, Unknown; identical to SEQ ID NO: 14182
  Description of Unknown: LeftRegion for integrase B1266 sequence

SEQ ID NO: 14266 - DNA, 260 bp, Unknown
  Description of Unknown: LeftRegion for integrase B1267 sequence
gctactggctgtaaaatgctggtagccctcattttttagttgtatctagtatataaggggtgtataatagatagaaactgaaaaacagccttataaagccctctattttatcgagggtaaagaagtctacacctaatatataaaagtggctgtataaggcacacaggaactcacaggactattacaggagggtaaacaggatggcatacaggaaaataacggatataaaagatactattggtatgagagcggtattttat

SEQ ID NO: 14267 - DNA, 260 bp, Unknown
  Description of Unknown: LeftRegion for integrase B1268 sequence
ccagaggcttcgcaaaagcagtctcgcaataaaaacacatacggggcatcgcagcagcggtgccccaaaactatatctaacggttacgttacgtttacggtataggttacggttacggtatggttacggttatacacggaacgtccgtggatttttggtcggacgttcctatggaatatcccgaaaaaggaggacttggtatggcttctcgcatcgccgagaaactggccgcgaagaaggcggccatctatattcgcgtc

SEQ ID NO: 14268 - DNA, 260 bp, Unknown; identical to SEQ ID NO: 14202
  Description of Unknown: LeftRegion for integrase B1269 sequence

SEQ ID NO: 14269 - DNA, 260 bp, Unknown; identical to SEQ ID NO: 14182
  Description of Unknown: LeftRegion for integrase B1270 sequence

SEQ ID NO: 14270 - DNA, 260 bp, Unknown; identical to SEQ ID NO: 14182
  Description of Unknown: LeftRegion for integrase B1271 sequence

SEQ ID NO: 14271 - DNA, 260 bp, Unknown
  Description of Unknown: LeftRegion for integrase B1272 sequence
ccagaggcttcgtaaaagcagtctcgcaataaaaacacatacggggcatcgcaacagcggtgccccaaaactatatctaacggttacgttacgtttacggtataggttacggttacggtatggttacggttatacacggaacgtccgtggatttttggtcggacgttcctatggaatatcccgaaaaaggaggacttcgtatggcttctcgcatcgccgagaaactggccgcgaagaaggcggccatctatattcgcgtc

SEQ ID NO: 14272 - DNA, 260 bp, Unknown; identical to SEQ ID NO: 14189
  Description of Unknown: LeftRegion for integrase B1273 sequence

SEQ ID NO: 14273 - DNA, 260 bp, Unknown
  Description of Unknown: LeftRegion for integrase B1274 sequence
gctactggctgtaaaatgctggtagccctcattttttagttgtatctagtatataaggggtgtataatagatagaaactgaaaaacagcctcataaagccctctattttatcgagggtaaagaagcctacacctaatatataaaagtggctatatgaggcacacaggagctcacaggactattacaggagggtaaacaggatggcatacaggaaaataacggatataagagatactattggtatgagagcggtattttat

SEQ ID NO: 14274 - DNA, 260 bp, Unknown; identical to SEQ ID NO: 14182
  Description of Unknown: LeftRegion for integrase B1275 sequence

SEQ ID NO: 14275 - DNA, 260 bp, Unknown; identical to SEQ ID NO: 14189
  Description of Unknown: LeftRegion for integrase B1276 sequence

SEQ ID NO: 14276 - DNA, 260 bp, Unknown
  Description of Unknown: LeftRegion for integrase B1277 sequence
gggctactggctgtaaaatgctggtagccctcattttttagttgtatctagtatataaggggtgtataatagatagaaactgaaaaacagcctcataaagccctctattttatagagggtaaaagtctacacctaatatataaaagtggctgtatgaggcacacaggagctcacaggactattacaggagggtaaacaggatggcatacaggaaaataacggatataagagatactattggtatgagagcggtattttat

SEQ ID NO: 14277 - DNA, 260 bp, Unknown
  Description of Unknown: LeftRegion for integrase B1278 sequence
ccagaggcttcgcaaaatcagtctcgcaataaaaacacatacggggcatcgcagcagcggtgccccaaaactatatctaacggttacgttacgtttacggtataggttacggttacggtatggttacggttatacacggaacgtccgtggatttttggccggacgttcctatggaatatcccgaaaaaggaggacttcgtatgacttctcgcatcgccgagaaactggccgcgaagaaggcggccatctatattcgcgtc

SEQ ID NO: 14278 - DNA, 260 bp, Unknown; identical to SEQ ID NO: 14246
  Description of Unknown: LeftRegion for integrase B1279 sequence

SEQ ID NO: 14279 - DNA, 260 bp, Unknown
  Description of Unknown: LeftRegion for integrase B1280 sequence
ggctactggctgtaaaatgctggtagccctcattttttagttgtatctagtatataaggggtgtataatagataggaactgaaagcagcctcataaagccctctattttatctggggtaaagaagtatacacctaatatataaaagtggctgtatgaggcacacaggagctcacaggactattacaggagggtaaacaggatggcatacaggaaaataacggatataaaagatactattggtatgagagcggtattttat

SEQ ID NO: 14280 - DNA, 260 bp, Unknown; identical to SEQ ID NO: 13395
  Description of Unknown: LeftRegion for integrase B1281 sequence

SEQ ID NO: 14281 - DNA, 260 bp, Unknown; identical to SEQ ID NO: 14182
  Description of Unknown: LeftRegion for integrase B1282 sequence

SEQ ID NO: 14282 - DNA, 260 bp, Unknown
  Description of Unknown: LeftRegion for integrase B1283 sequence
cgaggtcctttactgagtcaaatcactttcgggcggggctcgcgcagcgacgcctcgcccttatattatcttccggtatagatacggtgacggtgtaggtgacggtgtaggtgacggtgacggttaccacggaaaatcctcggactttccgcaggactgtccgtggactgtctaataatttctcaaacggaggtcttcttatgtctattcgagacaaactatccgccctcaaggtggcgatatacattcgcgtttcgacc

SEQ ID NO: 14283 - DNA, 260 bp, Unknown; identical to SEQ ID NO: 14195
  Description of Unknown: LeftRegion for integrase B1284 sequence

SEQ ID NO: 14284 - DNA, 260 bp, Unknown
  Description of Unknown: LeftRegion for integrase B1285 sequence
gtgaggtgattaaatggaaagagctattttgacagcgataaacgaaagactttacaaacttggtttgattgatgaagatacaaaaaacaaagtagctgctgaaattaatactacaaaatagcaaaaaactattgaacggagccggaaaatgtgattataataattctgactccgttccttagttggaagggagaaagtatatgaacatatatcatgcaagagaaacactcagaacgtgctctatttacgatttaaagtta

SEQ ID NO: 14285 - DNA, 260 bp, Unknown
  Description of Unknown: LeftRegion for integrase B1286 sequence
aatcttgacctgtgggattttttcgtaatctcccgcaagactctgattgaggataactcatcaagaaaaactatcacgctgccaagattgcaggaactcggcgtttggcagagtgattacttcggcatatccgaagcaatattaaaagcattggatgtctgatacctcggacatcctttttagattggagatgatattacatgatgcagaatagaactgctcctgcctctaccaacagggttgccatctatatcagagtc

SEQ ID NO: 14286 - DNA, 260 bp, Unknown
  Description of Unknown: LeftRegion for integrase B1287 sequence
aaatgcatttgaacatggatgcattaacagatatgaaatggctgaatatttaaatgtaactcttgattatttaaacgaagctattgactattatgcaagtaaatatggtgtaatgcatagagtcgataattatattatttacttctcccctaacttttatataggaaaaacttttaattaaatataatggaggtgatcttttgcttaaagttgctgtttattcaagaaaatcaaaatttactggtaaaggtgattctata

SEQ ID NO: 14287 - DNA, 260 bp, Unknown
  Description of Unknown: LeftRegion for integrase B1288 sequence
cttcgatcaagggcttatgacggtcttgcctgatcttacaattcaggtctcggactacgtgaaggacagctacgacgaccaaaatacgagagactggctactcggcgtagagggtacaaaaatcatcaggccgaagaggttcgcaccaaatcgcgatatgctggcctaccacaatgagtttgtattcctgaggtgattccatgcagcgagcagtgatatacgccagatacagccctggaccaaatcagacagagcagtca

SEQ ID NO: 14288 - DNA, 260 bp, Unknown
  Description of Unknown: LeftRegion for integrase B1289 sequence
aatcttgacctgtgggattttttcgtaatctcccgcaaggctctaaccaaggataactcatcaagaaaaactatcacgctgccaagattgcaggaactcggcgtttggcagagcgattacttcggcatatccgaagcaatattaaaagcattggatgtctgatacctcggacatcctttttagattggagatgatattacatgatgcaggatagaactgctcctgcctctaccaacagggttgccatctatatcagagtc

SEQ ID NO: 14289 - DNA, 260 bp, Unknown
  Description of Unknown: LeftRegion for integrase B1290 sequence
aatcttgacctgtgggattttttcgtaatctcccgcaaagctctaaccaaggataactcatcgagaaaaactatcacgctgccaagattgcaggaactcggcgtttggcagagcgattacttcggcatatccgaagcaatattaaaagcattggatgtctgatacctcggacatcctttttagattggagatgatattacatgatgcaggatagaactgctcctgcctctaccaacagggttgccatctatatcagagtc

SEQ ID NO: 14290 - DNA, 260 bp, Unknown
  Description of Unknown: LeftRegion for integrase B1291 sequence
gaggtgattatttggaaaaagctatcctacttgcaataaatgagaggctttataggcttgggctgattgatgaaaatacgaaaaataaagtagtttccgaaattaatactgcaaataattaaaaaaattgttgaatggagttggaaaatgtgcttataatattctgactccattccttcggttagaagggaagaaaacatatgaatatatatcacgcaagggaaatgctcagaacgcattctatttatgatctaaaatta

SEQ ID NO: 14291 - DNA, 260 bp, Unknown
  Description of Unknown: LeftRegion for integrase B1292 sequence
aatcttgacctgtgggattttttcgtaatctcccgcaagactctgattgaggataactcatcaagaaaaactatcacgctgccaagattgcaggaactcggcgtttggcagagtgattacttcggcatatccgaagcaatattaaaagcattggatgtctgatacctcggacatcctttttagattggagatgatattacatgatgcaggatagaactgctcctgcctctaccaacagggttgccatctatatcagagtc

SEQ ID NO: 14292 - DNA, 260 bp, Unknown
  Description of Unknown: LeftRegion for integrase B1293 sequence
acaaatagaaactgaaattgatggctacaaaatcatattagattttccacagcagaatgattgtaagatggaagaaacatcgctgaaagaagtaaagcaaatcatgttaacgcttttaaaagaacaaacaattcaagatatgtgaaaatttacagaggggacagactcttctgccctctcccaattaggaggataattaaatgagagatgtgaaagaagataccaaaaagatagtaagaattttacttcgtgtaagttct

SEQ ID NO: 14293 - DNA, 260 bp, Unknown
  Description of Unknown: LeftRegion for integrase B1294 sequence
tgacaaattaacacctcccatattgtaaaatatcacgattgacagttacggaaaaatgtaatataatatagttgcaagatattatttttacgttctgccgtaactgtgattttattatattacgtttaggcgtaaatgtcaatagtaaaattacggattggcataactttgtcagtgtgtataaaagcaggtgcatatttatgtctaaattgtatgaaactatcgaacaactttgcaaaaacaaaggcgttaatataacg

SEQ ID NO: 14294 - DNA, 260 bp, Unknown; identical to SEQ ID NO: 14290
  Description of Unknown: LeftRegion for integrase B1295 sequence

SEQ ID NO: 14295 - DNA, 260 bp, Unknown
  Description of Unknown: LeftRegion for integrase B1296 sequence
cgaggtcctttactgagtcgaatcactttcgggcggggctcgcgcagcgacgcctcgcccttatattatcttccggtatagatacggtgacggtgtaggtgtaggtgacggtgacggtgacggttgccgtggaaaatcctcggactttccgcgggactgtccgcggactgtccaataatttctcaaacggaggtcttcttatgtctattcgagacaaactatccgccctcaaggtggcgatatacattcgcgtttcgacc

SEQ ID NO: 14296 - DNA, 260 bp, Unknown
  Description of Unknown: LeftRegion for integrase B1297 sequence
taaaacagcttggagtagatgtttataccgttaaagatggactgctgactcttgaccttggagatatcacgggaatgctgatgttatccatgcgatatgcaatggcagaaaaaagcagttctgatacggagatgcatattaatacaatttagaaaatgtaatacagatggtcttatttttagatcgaggaggagaatcaaatgaaagatgtgaaagaagataccaaaaagatagtacgaattttactccgtgtaagttct

SEQ ID NO: 14297 - DNA, 260 bp, Unknown
  Description of Unknown: LeftRegion for integrase B1298 sequence
tgccatgaaagtcaattcttatgcccttattttatcaaattgttttcgtggtaccttttatttttctaattgtggataacaaaaaaagaacccaccaattgctgtcggtgagttctcataagaggttgtgataaccttaacgcaatcgtattatatcacaacctcttgttttggcataccccaaaaggaggttattttttatgtcactaacatacgttgtcgcctatgcgcgattttcttccgataaccaacgtgaagaa

SEQ ID NO: 14298 - DNA, 260 bp, Unknown
  Description of Unknown: LeftRegion for integrase B1299 sequence
atgaggtgattgaatggaaaaagctattttgatggcaataaatgaaagactttacaaactcggattgattgatgaagatacaaaaaacaaagtagctgctgaaattaatactacaaaataacaaaaaactattgaacggagccggaaaatgtgattataataattctgactccgttccttagttggaagggagaaagtatatgaacatatatcatgcaagagaaacactcagaatgtgctctatttacgatttaaagtta

SEQ ID NO: 14299 - DNA, 260 bp, Unknown; identical to SEQ ID NO: 13335
  Description of Unknown: LeftRegion for integrase B1300 sequence

SEQ ID NO: 14300 - DNA, 260 bp, Unknown
  Description of Unknown: LeftRegion for integrase B1301 sequence
aatcttgacctgtgggattttttcgtaatctcccgcaagactctgattgaggataactcatcaagaaaaactatcacgctgccaagattgcaggaactcggcgtttggcagagcgattacttcggcatatccgaagcaatattaaaagcattggatgtctgatacctcggacatcctttttagattggagatgatattacatgatgcaggatagaaccgctcctgcctctgccaacagggttgccatctatatcagagtc

SEQ ID NO: 14301 - DNA, 260 bp, Unknown
  Description of Unknown: LeftRegion for integrase B1302 sequence
ttccgattaaagaactgatcatgtccgcatacgatttgcgcaagcagcgggaagaacaggataataggtagaattgcggcccacttaggcagcggttcttctccgttttggtgaatagctttccttattataatagagtattgtttgtgttgcgaaaatgcaccaaccatttccgcaacatgaacagcgaggtgaaacttatgatatgcgtagaccagaatggacaagctgttgaaatctcggtggctgaccagatgtgg

SEQ ID NO: 14302 - DNA, 260 bp, Unknown; identical to SEQ ID NO: 14288
  Description of Unknown: LeftRegion for integrase B1303 sequence

SEQ ID NO: 14303 - DNA, 260 bp, Unknown; identical to SEQ ID NO: 14290
  Description of Unknown: LeftRegion for integrase B1304 sequence

SEQ ID NO: 14304 - DNA, 260 bp, Unknown
  Description of Unknown: LeftRegion for integrase B1305 sequence
atgaggtgattgaatggaaaaagctattttgatggcaataaatgaaagactttacaaactcggattgattgatgaagatacaaaaaacaaagtaactgctgaaattaatactacaaaataacaaaaaactattgaacggagccggaaaatgtgattataataattctgactccgttccttagttggaagggagaaagtatatgaacatatatcatgcaagagaaacactcagaacgtgctctatttacgatttaaagtta

SEQ ID NO: 14305 - DNA, 260 bp, Unknown
  Description of Unknown: LeftRegion for integrase B1306 sequence
tttaatcgaggtcctttactgagtcgaatcactttcgggcggggctcgcgcagcgacgcctcgcccttatattatcttccggtatagatacggtgacggtgacggtgtaggtgacggtgacggttgccgtggaaaatcctcggactttccgcgggactgtccgtggactgtccaataatttctcaaacggaggtcttcttatgtctattcgagacaaactatccgccctcaaggtggcgatatacattcgcgtttcgacc

SEQ ID NO: 14306 - DNA, 260 bp, Unknown
  Description of Unknown: LeftRegion for integrase B1307 sequence
tgttgaaccggtattcaaggaggagacgcagaacacattgggctgcgttcttctgcgcctgatgaaatcggaatctgcgggggcgtagtcccaggcggtggggcgtatccccgccgcatacatgacaacagggcgagacagcgatatacttgttgtggaatacaagtgttgctgttcggctgcccggaaaggaggactgcatgaaacagtcgaataacaacaaaaaatcccgtgacgtgaccgcctttctgtatgagagg

SEQ ID NO: 14307 - DNA, 260 bp, Unknown; identical to SEQ ID NO: 14288
  Description of Unknown: LeftRegion for integrase B1308 sequence

SEQ ID NO: 14308 - DNA, 260 bp, Unknown
  Description of Unknown: LeftRegion for integrase B1309 sequence
atggtcagaatctaaggttcaaagagaatcaattaatatgtggaatatgacagcagataatatatataaccgattgctggtagcatctaagcaagataacaagcccatactagcctacatacaagcttatgacatactagacaatataaatgattcactagcagaactagactttacagaggataattaagaggtgcattatggataacaacagtaatataagagtagcgatatatattagggttagtaccctataccag

SEQ ID NO: 14309 - DNA, 260 bp, Unknown
  Description of Unknown: LeftRegion for integrase B1310 sequence
attctcactgttctacttcgatgataaaaaacagtaagcaaaagcaggatgtcacatggcatcctgctttataaatatatagcttacggtatatggttacggttaaggttacggttacggtatatgtctggatttgacttggaaaaccaccgtgacaatccgttggacagtcctaagcactttatgcgcaggaggcaaaaatgacagcaatatcagaaaaactaaattcaaaaaaagtggcaatctacattcgtgtttct

SEQ ID NO: 14310 - DNA, 260 bp, Unknown; identical to SEQ ID NO: 14292
  Description of Unknown: LeftRegion for integrase B1311 sequence

SEQ ID NO: 14311 - DNA, 260 bp, Unknown; identical to SEQ ID NO: 14288
  Description of Unknown: LeftRegion for integrase B1312 sequence

SEQ ID NO: 14312 - DNA, 260 bp, Unknown
  Description of Unknown: LeftRegion for integrase B1313 sequence
agatgtgtataccgtcaaagatggactattgactcctgaccttggagatgttatggggatgctaaagttagccatgcaatatggaatggcagaaaaaacagtttagatacggagatgcatgttaatacaacacagaaaatgtaagagagttgtgaagataatacaaatggtcgtatttcaagatcgaggaggaaaatcatatgacagacgtaaaagaagataccaaaaagatagtaagaattttacttcgtgtaagttct

SEQ ID NO: 14313 - DNA, 260 bp, Unknown; identical to SEQ ID NO: 14288
  Description of Unknown: LeftRegion for integrase B1314 sequence

SEQ ID NO: 14314 - DNA, 260 bp, Unknown; identical to SEQ ID NO: 14301
  Description of Unknown: LeftRegion for integrase B1315 sequence

SEQ ID NO: 14315 - DNA, 260 bp, Unknown; identical to SEQ ID NO: 14288
  Description of Unknown: LeftRegion for integrase B1316 sequence

SEQ ID NO: 14316 - DNA, 260 bp, Unknown
  Description of Unknown: LeftRegion for integrase B1317 sequence
ctgtatctcaaaagtgaagtcctgaaacgaaactggcagtgagaatacgttatacccctttatacccttttgaaaggggtataaaggggtataacgttctttggagaacttttcaaaaaatctcatttgcaccttttcaaatgggttccaatccgttacaatatatctaacaacctaacaatgtaatgcgaggtgttgctatgaaaacaacagaccagccgcaggtgaagcaatacgtcatctattcccgcaaatccaaa

SEQ ID NO: 14317 - DNA, 260 bp, Unknown; identical to SEQ ID NO: 14304
  Description of Unknown: LeftRegion for integrase B1318 sequence

SEQ ID NO: 14318 - DNA, 260 bp, Unknown
  Description of Unknown: LeftRegion for integrase B1319 sequence
tgatttaataaataattgtccttttataagtcagcttcctttttcttattttacacttgatacatttaaaagtataattaatgatttactaactaataatgatataaatttaaatgattataaaaaatatattcaaaaacctgataaaaatattattgaaacaatataaataaaaatgtttatataaaggagatgtttttttgcttaaaattgctatttattctagaaaatctaaatttacaggcaaaggtgattctata

SEQ ID NO: 14319 - DNA, 260 bp, Unknown
  Description of Unknown: LeftRegion for integrase B1320 sequence
aatcttgacctgtgggattttttcgtaatctcccgcaaggctctaaccaaggataactcatcaagaaaaactatcacgctgccaagattacaggaactcggcgtttggcagagcgattacttcggcatatccgaagcaatattaaaagcattggatgtctgatacctcggacatcctttttagattggagatgatattacatgatgcaggatagaactgctcctgcctctaccaacagggttgccatctatatcagagtc

SEQ ID NO: 14320 - DNA, 260 bp, Unknown
  Description of Unknown: LeftRegion for integrase B1321 sequence
cgaggtcctttactgagtcaaatcactttcgggcggggctcgcgcagcgacgcctcgcccttatattatcttccggtatagatacggtgacggtgacggtgtaggtgacggtgtaggtgacggttaccatggaaaatcctcggactttccgcaggactgtccgtggactgtccaataatttctcaaacggaggtcttcttatgtctattcgagacaaactatccgccctcaaggtggcgatatacattcgcgtttcgacc

SEQ ID NO: 14321 - DNA, 260 bp, Unknown; identical to SEQ ID NO: 13390
  Description of Unknown: LeftRegion for integrase B1322 sequence

SEQ ID NO: 14322 - DNA, 260 bp, Unknown
  Description of Unknown: LeftRegion for integrase B1323 sequence
agggacatttaatggaaaaagctatattgtatgccataaacgaaagaatgttctcgcttggtctgatagacgagaaaacaagagataaaattaaagctgaaatcagcactagaaagtaacgaaaatgtattgagtggatttatatgaggtgttatactttatatgattccactccctgtttattaagggagaaatgcactatgaatatttattatgtcagagaaaaattaagaagttgctctatttacgacattgaatta

SEQ ID NO: 14323 - DNA, 260 bp, Unknown
  Description of Unknown: LeftRegion for integrase B1324 sequence
agggacgattaatggaaaaagctatattgtatgccataaatgaaagaatgttctcgctcggtctgatagacgagaaaacaagagataaaattaaagccgaaatcagcattagaaagtaacgaaaatgtattgagtggagttatgtgaagtgttatactttatatgattccactccctgtatattgagggagaaaagcattatgaatatttattatgtcagagaaaaattaaggagttgttctatttatgacatcgaactg

SEQ ID NO: 14324 - DNA, 260 bp, Unknown
  Description of Unknown: LeftRegion for integrase B1325 sequence
gagggacaattaatggaaaaagctatattgtatgccataaacgaaagaatgttctcacttggtctgatagatgagaaaacaagagataaaattaaagctgaaatcagcattagaaagtagaaaaatgtattgagtggaattatgtgaggtgttatactttatatgattccactccctgtttattgagggagaaatgcactatgaatatttattatgtcagagaaaaattaagaagttgctctatttacgacattgaatta

SEQ ID NO: 14325 - DNA, 260 bp, Unknown; identical to SEQ ID NO: 14322
  Description of Unknown: LeftRegion for integrase B1326 sequence

SEQ ID NO: 14326 - DNA, 260 bp, Unknown; identical to SEQ ID NO: 13390
  Description of Unknown: LeftRegion for integrase B1327 sequence

SEQ ID NO: 14327 - DNA, 260 bp, Unknown
  Description of Unknown: LeftRegion for integrase B1328 sequence
gagggacatttaatggaaaaagctatattgtatgccataaatgaaagaatgttctcacttggtctgatagatgagaaaacaagggacaaaataaaagctgaaattagcattagaaagtaacaaaatgtattgagtggagttatgtgaagtgttatactttatatgattccactccctgtatattgagggagaaatgcactatgaatatttattatgtcagagaaaaattaaggagttgttctatttacgacattgaacta

SEQ ID NO: 14328 - DNA, 260 bp, Unknown; identical to SEQ ID NO: 13390
  Description of Unknown: LeftRegion for integrase B1329 sequence

SEQ ID NO: 14329 - DNA, 260 bp, Unknown
  Description of Unknown: LeftRegion for integrase B1330 sequence
agggacaattaatggaaaaagctatattgtatgccataaacgaaagaatgttctcacttggtctgatagatgagaaaacaagagataaaattaaagctgaaatcagcattagaaagtaacgaaaatgtattgagtggagttatgtgaagtgttatactttatatgattccactccctgtatattgagggagaaaagcattatgaatatttattatgtcagagaaaaattaaggagttgttctatttatgacatcgaactg

SEQ ID NO: 14330 - DNA, 260 bp, Unknown
  Description of Unknown: LeftRegion for integrase B1331 sequence
gagggacaattaatggaaaaagctatattgtatgccataaacgaaagaatgttctcacttggtctgatagatgagaaaacaagagataaaattaaagctgaaatcagcattagaaagtagcaaaatgtattgagtggagttatgtgaggtgttatactttatatgattccactccctgtttattgagggagaaatgcactatgaatatttattatgtcagagaaaaattaagaagttgctctatttacgacattgaacta

SEQ ID NO: 14331 - DNA, 260 bp, Unknown; identical to SEQ ID NO: 13390
  Description of Unknown: LeftRegion for integrase B1332 sequence

SEQ ID NO: 14332 - DNA, 260 bp, Unknown; identical to SEQ ID NO: 13390
  Description of Unknown: LeftRegion for integrase B1333 sequence

SEQ ID NO: 14333 - DNA, 260 bp, Unknown
  Description of Unknown: LeftRegion for integrase B1334 sequence
agggacaattaatggaaaaagctatattgtatgccataaacgaaagaatgttctcacttggtctgatagatgagaaaacaagagataaaattaaagctgaaatcagcattagaaagtaacgacaatgtattgagtggatttatatgaggtgttatactttatatgattccactccctgtttattaagggagaaatgcactatgaatatttattatgtaagagaaaaattaagaaattgctctatttacgacattgaacta

SEQ ID NO: 14334 - DNA, 260 bp, Unknown
  Description of Unknown: LeftRegion for integrase B1335 sequence
ttcctattaaagagctgattatgtctgcatacgatctgcgcaagcaacgggaagaacaggataattggtagaaatgtggccggttttggcgacggttcttctccgttttggtgaatagctttccttattataatagagtattgtttgtgttgcgaaaatgcaccaaccatttccgcaacatgaacagcgaggtgaaacttatgatatgcgtagaccagaatgggcaagccgttgaaatctcggtggctgaccagatgtgg

SEQ ID NO: 14335 - DNA, 260 bp, Unknown
  Description of Unknown: LeftRegion for integrase B1336 sequence
cctacatagaagaaatgaaaaaaaggccttctgaaccaaaaagcgattcagaaaccgaatgatctacataagtgaattttatactccatgaactctcaaaagcgagtttaagcccttatagccccacatatgataaaatagttgcatcatcaaaataagccccatacaggggcttttctcttgttttggaggtattttttatgacaaataatgcagcatccgcacgggtagcaatctacgtccgtgtttccaccttatat

SEQ ID NO: 14336 - DNA, 260 bp, Unknown
  Description of Unknown: LeftRegion for integrase B1337 sequence
gagggacgattaatggaaaaagctatattgtatgccataaacgaaagaatgttctcatttggtctgatagatgaaaaaacaagagataaaattaaagctgaaatcagcattagaaagtagcaaaatgtattgagtggagttatgtgaggtgttatactttatatgattccactccctgtttattgagggagaaatgcactatgaatatttattatgtcagagaaaaattaagaagttgctctatttacgacattgaatta

SEQ ID NO: 14337 - DNA, 260 bp, Unknown
  Description of Unknown: LeftRegion for integrase B1338 sequence
agggacaattaatggaaaaagctatattgtatgccataaacgaaagaatgttttcacttggtctgatagatgagaaaacaagagataaaattaaagctgaaatcagcattagaaagtaacgacaatgtattgagtggatttatatgaggtgttatactttatatgattccactccctgtttattaagggagaaatgaactatgaatatttattatgtcagagaaaaattaagaaattgctctatttacgacattgaacta

SEQ ID NO: 14338 - DNA, 260 bp, Unknown; identical to SEQ ID NO: 14329
  Description of Unknown: LeftRegion for integrase B1339 sequence

SEQ ID NO: 14339 - DNA, 260 bp, Unknown
  Description of Unknown: LeftRegion for integrase B1340 sequence
gagggacaattaatggaaaaaactatattgtatgccataaatgaaagaatgttctcacttggtctgatagatgagaaaacaagggacaaaataaaagctgaaattagcattagaaagtaacaaaatgtattgagtggagttatgtgaagtgttatactttatatgattccactccctgtatattgagggagaaatgcactatgaatatttattatgtcagagaaaaattaaggagttgttctatttacgacattgaactg

SEQ ID NO: 14340 - DNA, 260 bp, Unknown
  Description of Unknown: LeftRegion for integrase B1341 sequence
gagggacatttaatggaaaaagctatattgtatgccataaatgaaagaatgttctcacttggtctgatagatgagaaaacaagggacaaaataaaagctgaaattagcattagaaagtaacaaaatgtattgagtggagttatgtgaagtgttatactttatatgattccactccctgtatattgagggagaaatgcactatgaatatttattatgtcagagaaaaattaaggagttgttctatttacgacattgaactg

SEQ ID NO: 14341 - DNA, 260 bp, Unknown; identical to SEQ ID NO: 13390
  Description of Unknown: LeftRegion for integrase B1342 sequence

SEQ ID NO: 14342 - DNA, 260 bp, Unknown; identical to SEQ ID NO: 13390
  Description of Unknown: LeftRegion for integrase B1343 sequence

SEQ ID NO: 14343 - DNA, 260 bp, Unknown; identical to SEQ ID NO: 13476
  Description of Unknown: LeftRegion for integrase B1344 sequence

SEQ ID NO: 14344 - DNA, 260 bp, Unknown
  Description of Unknown: LeftRegion for integrase B1345 sequence
agggctactggctgtaaaatgctggtagccctcattttttagttgtatctagtatataaggggtgtataatagataggaactgaaaacagcctcataaagccctctattttatcgagggtaaaagtctacacctaatatataaaagtggctgtatgaggcacacaggagctcacaggactattacaggagggtaaacaggatggcatacaggaaaataacggatataaaagatactattggtatgagagcggtattttat

SEQ ID NO: 14345 - DNA, 260 bp, Unknown
  Description of Unknown: LeftRegion for integrase B1346 sequence
aacagaaacaacttaccgccaaccggtacaaggattgtccgcgagtatcttggtgtagaacacattgtcacagttctacgcgatggttttgaatacaatggaatgaagtataccacgctatcagcagtagcaaaaaaaattaccggaagaaagatatccggacggtattttttcgcattagataaataaaaggatcaaccatggaagaacaaaaacaaataagatgcgcaatttacacacgtaaatcgactgatgaaggt

SEQ ID NO: 14346 - DNA, 260 bp, Unknown
  Description of Unknown: LeftRegion for integrase B1347 sequence
gggctactggctgtaaaatgctggtagccctcattttttagttgtatctagtatataaggggtgtataatagatagaaactgaaaaacagcctcataaagccctctattttatcgagggtaaaagtctacacttaatatataaaagtggctgtatgaggcacacaggagctcacaggactattacaggagggtaaacaggatggcatacaggaaaataacggatataagagatactattggtatgagagcggtattttat

SEQ ID NO: 14347 - DNA, 260 bp, Unknown
  Description of Unknown: LeftRegion for integrase B1348 sequence
tgataaatcaattaacctatcaatcatatttgatttactaaatttaaacttaataactgaaaaacagttttatatactaaaagaaaaaattaaatgtttttactaaaatatcatgtaaataaattttaaaataagatataatgtttgtagaacgaagcagtagttcaaaaagaaattgaaataaagaaagtgaggtataaatggcacaagttgagattatagctgctaatctcaaagataaaaataataatattactatt

SEQ ID NO: 14348 - DNA, 260 bp, Unknown
  Description of Unknown: LeftRegion for integrase B1349 sequence
gagggacaattaatggaaaaagctatattgtatgccataaatgaaagaatgttctcacttggtctgatagatgagaaaacaagggacaaaataaaagctgaaattagcattagaaagtaacaaaatgtattgagtggagttatgtgaagtgttatactttatatgattccactccctgtatattgagggagaaatgcactatgaatatttattatgtcagagaaaaattaaggagttgttctatttacgacattgaactg

SEQ ID NO: 14349 - DNA, 260 bp, Unknown
  Description of Unknown: LeftRegion for integrase B1350 sequence
aggaacaattaatggaaaaagctatattgtatgccataaacgaaagaatgttctcacttggtctgatagatgagaaaacaagagataaaattaaagctgaaatcagcattagaaagtaacgacaatgtattgagtggatttatatgaggtgttatactttatatgattccactccctgtttattaagggagaaatgcactatgaatatttattatgtcagagaaaaattgagaagttgctctatttacgatatcgaactg

SEQ ID NO: 14350 - DNA, 260 bp, Unknown; identical to SEQ ID NO: 14337
  Description of Unknown: LeftRegion for integrase B1351 sequence

SEQ ID NO: 14351 - DNA, 260 bp, Unknown; identical to SEQ ID NO: 14340
  Description of Unknown: LeftRegion for integrase B1352 sequence

SEQ ID NO: 14352 - DNA, 260 bp, Unknown
  Description of Unknown: LeftRegion for integrase B1353 sequence
gacacacctcctgaaacagatactcttatggttgtcattgttgatgacgaagaaggatttgttaagaaaatcagtattgatgaagatactgtgacccttcgctcttttaatccacactatcctccccgtgtttttggcggtgttgaaattggacgattgcgctttgtcggtagagtcatggagttaaaaaggagatttgcatgaaaaaatttccaatcgacctctcctgtctgacagaggaagaaatctctcaatttcaa

SEQ ID NO: 14353 - DNA, 260 bp, Unknown; identical to SEQ ID NO: 14348
  Description of Unknown: LeftRegion for integrase B1354 sequence

SEQ ID NO: 14354 - DNA, 260 bp, Unknown
  Description of Unknown: LeftRegion for integrase B1355 sequence
agggacaattaatggaaaaagctatattgtatgccataaacgaaagaatgttctcacttggtctgatagatgagaaaacaagagataaaattaaagctgaaatcagcattagaaagtaacgaaaatgtattgagtggagttatgtgaagtgttatactttatatgattccactccctgtatattgagggagaaaagcattatgaatatttattatgtcagagaaaaattaaggagttgttctatttacgatattgaactg

SEQ ID NO: 14355 - DNA, 260 bp, Unknown; identical to SEQ ID NO: 13463
  Description of Unknown: LeftRegion for integrase B1356 sequence

SEQ ID NO: 14356 - DNA, 260 bp, Unknown; identical to SEQ ID NO: 14323
  Description of Unknown: LeftRegion for integrase B1357 sequence

SEQ ID NO: 14357 - DNA, 260 bp, Unknown; identical to SEQ ID NO: 13390
  Description of Unknown: LeftRegion for integrase B1358 sequence

SEQ ID NO: 14358 - DNA, 260 bp, Unknown; identical to SEQ ID NO: 14322
  Description of Unknown: LeftRegion for integrase B1359 sequence

SEQ ID NO: 14359 - DNA, 260 bp, Unknown; identical to SEQ ID NO: 13390
  Description of Unknown: LeftRegion for integrase B1360 sequence

SEQ ID NO: 14360 - DNA, 260 bp, Unknown
  Description of Unknown: LeftRegion for integrase B1361 sequence
cttgggatgctggaggactggccgaaggtcagtcgtagtggaagcaaggctgcgctggaagacgcacaggctgaaattgagcggtggaggcaagagttccttgctgggaatatctcggcgaagaaatacgttaaaattgcggatgctctcatgtccaaataaaaaagccgccctcggtgggcggcgggaggttgctctgaatgtgcgcaaaaaagaaaccggccatgcttgagccggatatgcaggatgccgtgatctac

SEQ ID NO: 14361 - DNA, 260 bp, Unknown
  Description of Unknown: LeftRegion for integrase B1362 sequence
gatgattctcttttgaatttggacttatgggatttttatgttacgccatcagacatcttaaatgggcgcaaagtcatcactcttccaaaacttatttctttcagtccaatcatgtgtaattacagcagcattgaaaatgctgttttaagcgtagtataggtccaggatcacttgggcctttattttatggaggattttatatgcaatacaaagaatcgaatataaggcgaaataaccgcgttgccatttatgttagagtc

SEQ ID NO: 14362 - DNA, 260 bp, Unknown
  Description of Unknown: LeftRegion for integrase B1363 sequence
gagggacaattaatggaaaaagctatattgtatgccataaatgaaagaatgttctcacttggtctgatagatgagaaaacaagggacaaaataaaagctgaaattagcattaaaaagtaacaaaatgtattgagtgtagttatgtgaagtgttatactttatatgattccactccctgtatattgagggagaaatgcactatgaatatttattatgtcagagaaaaattaaggagttgttctatttacgacattgaactg

SEQ ID NO: 14363 - DNA, 260 bp, Unknown
  Description of Unknown: LeftRegion for integrase B1364 sequence
agggacaattaatggaaaaagctatattgtatgccataaatgaaagaatgttctcgctcggtctgatagacgagaaaacaagagatagaattaaagctgaaatcagcattagaaagtaacgaaaatgtattgagtggagttatatgaggtgttatactttatatgattccactccctgtttattaagggagaaatgcactatgaatatttattatgtcagagaaaaattaagaaattgctctatttacgacattgaacta

SEQ ID NO: 14364 - DNA, 260 bp, Unknown
  Description of Unknown: LeftRegion for integrase B1365 sequence
gagggacaattaatggaaaaagctatattgtatgccataaacgaaagaatgttctcacttggtctgatagatgagaaaacaagagataaaattaaagctgaaatcagcattagaaagtaacaaaatgtattgagtggagttatgtgaagtgttatactttatatgattccactccctgtatattgagggagaaatgcactatgaatatttattatgtcagagaaaaattaaggagttgttctatttacgacattgaactg

SEQ ID NO: 14365 - DNA, 260 bp, Unknown; identical to SEQ ID NO: 14337
  Description of Unknown: LeftRegion for integrase B1366 sequence

SEQ ID NO: 14366 - DNA, 260 bp, Unknown
  Description of Unknown: LeftRegion for integrase B1367 sequence
atggacggcggattaaagcattctttcgaggtaaaaaacaaggtaacttccataattggaaaatggactgtctatcaagcgcaaaagcgccttccgcttttagaattatgccaagacctgtccgaagaagaattagccgaagtaatcaactatattaaatttgttcaatcgaaacgacaaggcgggaagggggaagaataatgcagcaagcattaaacgcggtcatatacgcccgctattcttcccatagccagcaggaa

SEQ ID NO: 14367 - DNA, 260 bp, Unknown
  Description of Unknown: LeftRegion for integrase B1368 sequence
gagggacaattaatggaaaaagctatattgtatgccataaatgaaagaatgttctcacttggtctgatagatgagaaaacaagggacaaaataaaagctgaaattagcattagaaagtaacaaaatgtattgagtggagttatgtgaagtgttatactttatatgattccactccctgtatattgagggagaaatgcactatgaatatttattatgtcagagaaaaattaaggagttgttctatttatgacatcgaactg

SEQ ID NO: 14368 - DNA, 260 bp, Unknown; identical to SEQ ID NO: 14329
  Description of Unknown: LeftRegion for integrase B1369 sequence

SEQ ID NO: 14369 - DNA, 260 bp, Unknown
  Description of Unknown: LeftRegion for integrase B1370 sequence
gagggacgattaatggaaaaagctatattgtatgccataaacgaaagaatgttctcacttggtctgatagatgagaaaacaagagataaaattaaagctgaaatcagcattagaaagtagcaaaatatattgagtggagttatgtgaggtgttatactttatatgattccactccctgtttattgagggagaaatgcactatgaatatttattatgtcagagaaaaattaagaagttgctctatttacgacattgaatta

SEQ ID NO: 14370 - DNA, 260 bp, Unknown; identical to SEQ ID NO: 14333
  Description of Unknown: LeftRegion for integrase B1371 sequence

SEQ ID NO: 14371 - DNA, 260 bp, Unknown; identical to SEQ ID NO: 14324
  Description of Unknown: LeftRegion for integrase B1372 sequence

SEQ ID NO: 14372 - DNA, 260 bp, Unknown; identical to SEQ ID NO: 14333
  Description of Unknown: LeftRegion for integrase B1373 sequence

SEQ ID NO: 14373 - DNA, 260 bp, Unknown; identical to SEQ ID NO: 14330
  Description of Unknown: LeftRegion for integrase B1374 sequence

SEQ ID NO: 14374 - DNA, 260 bp, Unknown; identical to SEQ ID NO: 13390
  Description of Unknown: LeftRegion for integrase B1375 sequence

SEQ ID NO: 14375 - DNA, 260 bp, Unknown
  Description of Unknown: LeftRegion for integrase B1376 sequence
gagggacaattaatggaaaaagctatattgtatgccataaacgaaagaatgttctcacttggcctgatagacgagaaaacaagagataaaattaaaactgaaatcagcattagaaagtagcaaaatgtattgagtggagttatgtgaggtgttatactttatatgattccactccctgtttattgagggagaaatgcactatgaatatttattatgtcagagaaaaattaagaagttgctctatttacgacattgaacta

SEQ ID NO: 14376 - DNA, 260 bp, Unknown
  Description of Unknown: LeftRegion for integrase B1377 sequence
ggtcgtgtcgttgaagtttaccagaatccggtctatcacctcaaggttcaggtgccatgcggtgatactcggatagcagtacacatagacgtgtaccaccaaaagaaaaatactcacggcccttccgaattccatgcaaaaacacataaagatggtagtaattattcttacctttgcatcaaacaaataaaagtaagaatatgaaagcagcaatttacagtagagtatctacagaagggcaagattacagtaaacaaacg

SEQ ID NO: 14377 - DNA, 260 bp, Unknown
  Description of Unknown: LeftRegion for integrase B1378 sequence
gggctactggctgtaaaatgctggtagccctcattttttagttgtatctagtatataaggggtgtataatagatagaaactgaaaaacagcctcataaagccctctattttatagagggtaaaagtctacacttaatatataaaagtggctgtatgaggcacacaggagctcacaggactattacaggagggtaaacaggatggcatacaggaaaataacggatataagagatactattggtatgagagcggtattttat

SEQ ID NO: 14378 - DNA, 260 bp, Unknown
  Description of Unknown: LeftRegion for integrase B1379 sequence
agggacaattaatggaaaaagctatattgtatgccataaatgaaagaatgttctcgctcggtctgatagacgagaaaacaagagataaaattaaagctgaaatcagcattagaaagtaacgacaatgtattgagtggagttacatgaagtgttatactttatatgattccactccctgtatattgagggagaaatgcactatgaatatttattatgtcagagaaaaattaaggagttgttctatttacgacattgaactg

SEQ ID NO: 14379 - DNA, 260 bp, Unknown; identical to SEQ ID NO: 14323
  Description of Unknown: LeftRegion for integrase B1380 sequence

SEQ ID NO: 14380 - DNA, 260 bp, Unknown
  Description of Unknown: LeftRegion for integrase B1381 sequence
gatacacctcccgaaacagatactcttatggttgtcattgttgatgacgaagaaggatttgttaagaaaatcagcattgatgaagatactgtgacccttcgctcttttaacccacactatcctccccgtgtttttggcggtgttgaaattggacgattgcgctttgtcggtagagtcatggagctaaaaaggagatttgcatgaaaaaatttccaatcgacctttcctgtctgacagaggaagaaatctctcaatttcag

SEQ ID NO: 14381 - DNA, 260 bp, Unknown; identical to SEQ ID NO: 13390
  Description of Unknown: LeftRegion for integrase B1382 sequence

SEQ ID NO: 14382 - DNA, 260 bp, Unknown; identical to SEQ ID NO: 14361
  Description of Unknown: LeftRegion for integrase B1383 sequence

SEQ ID NO: 14383 - DNA, 260 bp, Unknown
  Description of Unknown: LeftRegion for integrase B1384 sequence
agggacatttaatggaaaaagctatattgtatgccataaacgaaagaatgttctcacttggtctgatagatgagaaaacaagagataaaattaaagctgaaatcagcattagaaaatagcaaaaatgtattgagtggatttatatgaggtgttatactttatatgattccactccctgtttattaagggagaaatgcactatgaatatttattatgtcagagaaaaattaaggagttgttctatttatgacatcgaactg

SEQ ID NO: 14384 - DNA, 260 bp, Unknown; identical to SEQ ID NO: 13144
  Description of Unknown: LeftRegion for integrase B1385 sequence

SEQ ID NO: 14385 - DNA, 260 bp, Unknown
  Description of Unknown: LeftRegion for integrase B1386 sequence
ggctactggctgtaaaatgctggtagccctcattttttagttgtatctagtatataaggggtgtataatagataggaactgaaaacagcctcataaagccatctattttatcgagggtaaagaagtctacacctaatatataaaagtggctgtatgaggcacacaggagctcacaggactattacaggagggcaaacaggatggcatacaggaaaataacggatataagagatactattggtatgagagcggtattttat

SEQ ID NO: 14386 - DNA, 260 bp, Unknown; identical to SEQ ID NO: 13390
  Description of Unknown: LeftRegion for integrase B1387 sequence

SEQ ID NO: 14387 - DNA, 260 bp, Unknown
  Description of Unknown: LeftRegion for integrase B1388 sequence
agggacaattaatggaaaaagctatattgtatgccataaacgaaagaatgttctcgctcggtctgatagacgagaaaacaagagatagaattaaagctgaaatcagcattagaaagtaacgacaatgtattgagtggagttatatgaggtgttatactttatatgattccactccctgtttattaagggagaaatgcactatgaatatttattatgtcagagaaaaattaagaaattgctctatttacgacattgaacta

SEQ ID NO: 14388 - DNA, 260 bp, Unknown
  Description of Unknown: LeftRegion for integrase B1389 sequence
agggacaattaatggaaaaagctatattgtatgccataaacgaaagaatgttctcacttggcctgatagatgagaaaacaagagataaaattaaagctgaaatcagcattagaaaataacaaaaatgtattgagtggatttatatgaggtgttatactttatgtgattccactccctgtttattgagggagaaatgcactatgaatatttattatgtcagagaaaaattaagaagttgctctatttacgacattgaacta

SEQ ID NO: 14389 - DNA, 260 bp, Unknown
  Description of Unknown: LeftRegion for integrase B1390 sequence
cctacatagaagaaatgaaaaaaaggccttctgaaccaaaaagcgattcagaaaccgaatgatctacataagtaaattttatactccatgaactcttaaaagcgagtttaagcccttatagccccacatatgataaaatagttgcatcatcaaaataagcccctgtatggggcttttctcttgttttggaggtattttttatgacaaataatgcagcatccgcacgggtagcaatctacgtccgtgtttccaccttatat

SEQ ID NO: 14390 - DNA, 260 bp, Unknown; identical to SEQ ID NO: 14348
  Description of Unknown: LeftRegion for integrase B1391 sequence

SEQ ID NO: 14391 - DNA, 260 bp, Unknown; identical to SEQ ID NO: 14327
  Description of Unknown: LeftRegion for integrase B1392 sequence

SEQ ID NO: 14392 - DNA, 260 bp, Unknown
  Description of Unknown: LeftRegion for integrase B1393 sequence
agggacaattaatggaaaaagctatattgtatgccataaacgaaagaatgttctcgctcggtctgatagacgagaaaacaagagatagaattaaagctgaaatcagcattagaaagtaacgaaaatgtattgagtggagttatatgaggtgttatactttgtatgattccactccctgtttattaagggagaaatgcactatgaatatttattatgtcagagaaaaattaagaaattgctctatttacgacattgaacta

SEQ ID NO: 14393 - DNA, 260 bp, Unknown; identical to SEQ ID NO: 13390
  Description of Unknown: LeftRegion for integrase B1394 sequence

SEQ ID NO: 14394 - DNA, 260 bp, Unknown; identical to SEQ ID NO: 14388
  Description of Unknown: LeftRegion for integrase B1395 sequence

SEQ ID NO: 14395 - DNA, 260 bp, Unknown
  Description of Unknown: LeftRegion for integrase B1396 sequence
agggacaattaatggaaaaagctatattgtatgccataaacgaaagaatgttctcgattggtctgatagatgagaaaacaagagataaaattaaagctgaaatcagcattagaaagtaacgacaatgtattgagtggatttatatgaggtgttatactttatatgattccactccctgtttattaagggagaaatgcactatgaatatttattatgtaagagaaaaattaagaaattgctctatttacgacattgaacta

SEQ ID NO: 14396 - DNA, 260 bp, Unknown; identical to SEQ ID NO: 14363
  Description of Unknown: LeftRegion for integrase B1397 sequence

SEQ ID NO: 14397 - DNA, 260 bp, Unknown; identical to SEQ ID NO: 14388
  Description of Unknown: LeftRegion for integrase B1398 sequence

SEQ ID NO: 14398 - DNA, 260 bp, Unknown; identical to SEQ ID NO: 14322
  Description of Unknown: LeftRegion for integrase B1399 sequence

SEQ ID NO: 14399 - DNA, 260 bp, Unknown; identical to SEQ ID NO: 13390
  Description of Unknown: LeftRegion for integrase B1400 sequence

SEQ ID NO: 14400 - DNA, 260 bp, Unknown; identical to SEQ ID NO: 13144
  Description of Unknown: LeftRegion for integrase B1401 sequence

SEQ ID NO: 14401 - DNA, 260 bp, Unknown
  Description of Unknown: LeftRegion for integrase B1402 sequence
ggtcgtgtcgttgaagtttaccagaatccggtctatcacctcaaggctcaggtgccatgcggtgatactcggatagcagtacacatagacgtgtaccaccaaaagaaaaatactcacagcccttccgaattccatgcaaaaacacataaagatggtagtaattattcttacctttgcatcaaacaaataaaagtaagaatatgaaagcagcaatttatagtagagtatctacagatcaacaagattacagcaagcaaact

SEQ ID NO: 14402 - DNA, 260 bp, Unknown
  Description of Unknown: LeftRegion for integrase B1403 sequence
agggacaattaatggaaaaagctatattgtatgccataaacgaaagaatgttctcacttggtctgatagatgagaaaacaagagataaaattaaagctgaaatcagcattagaaagtaacgacaatgtattgagtggatttatatgaggtgttatactttatatgattccactccctgtttattaagggagaaatgcactatgaatatttattatgtcagagaaaaattaagaagttgctctatttacgacattgaatta

SEQ ID NO: 14403 - DNA, 260 bp, Unknown; identical to SEQ ID NO: 14333
  Description of Unknown: LeftRegion for integrase B1404 sequence

SEQ ID NO: 14404 - DNA, 260 bp, Unknown; identical to SEQ ID NO: 14337
  Description of Unknown: LeftRegion for integrase B1405 sequence

SEQ ID NO: 14405 - DNA, 260 bp, Unknown
  Description of Unknown: LeftRegion for integrase B1406 sequence
tcgatggattggcttatgggccgatctgatgacggtagcgaactgatgcgcttgtactctttggcgagcgatgatgacaaacttgtcattgacacgattctgaagaagtacaagagagactaggacggcaaacaacactggggggcgctgacaaggcagtgctcccctgtctttgttcaagggtaacaggagcatcaagcatgagaaagaagattacaaaaaaacaggcggaagataaagtagcaatctatgtccgtgtc

SEQ ID NO: 14406 - DNA, 260 bp, Unknown; identical to SEQ ID NO: 13552
  Description of Unknown: LeftRegion for integrase B1407 sequence

SEQ ID NO: 14407 - DNA, 260 bp, Unknown
  Description of Unknown: LeftRegion for integrase B1408 sequence
agggacaattaatggaaaaagctatattgtatgccataaacgaaagaatgttctcacttggtctgatagatgagaaaacaagagataaaattaaagctgaaatcagcattggaaagtaacaaaaacgtattgagtggatttatatgaggtgttatactttatatgattccactccctgtttattaagggagaaatgcactatgaatatttattatgtcagagaaaaattaagaaattgctctatttacgacattgaacta

SEQ ID NO: 14408 - DNA, 260 bp, Unknown
  Description of Unknown: LeftRegion for integrase B1409 sequence
atggatacaatatacgcaacaatacttccggaaaaacaacgacgttcttcttccttgccgttagaaacacataaggaggcaagtaatataccaactaccccaaatggaaacacctggagcggataagccgaaaatgcaaaaacacataaagatggtaataattattcttacctttgcatcaaacaaataaaagtaagaatatgaaagcagcaatttatagtagagtatctacagatcaacaagattacagcaagcaaact

SEQ ID NO: 14409 - DNA, 260 bp, Unknown
  Description of Unknown: LeftRegion for integrase B1410 sequence
gagggacaattaatggaaaaagctatattgtatgccataaacgaaagaatgttctcacttggtctgatagatgagaaaacaagagataaaattaaagctgaaatcagcattagaaagtagcaaaatgtattgagtggagttatgtgaggtgttatactttatatgattccactccctgtttattgagggagaaatgcactatgaatatttattatgtcagagaaaaattaagaagttgctctatttacgacattgaatta

SEQ ID NO: 14410 - DNA, 260 bp, Unknown
  Description of Unknown: LeftRegion for integrase B1411 sequence
gatacacctcccgaaactgatactcttatggttgtcattgttgatgacgaagaaggatttgttaagaaaatcagcattgatgaagatactgtgacccttcgctcttttaacccacactatcctccccgtgtttttggcggtgttgaaattggacgattgcgctttgtcggtagagtcatggagttaaaaaggagatttgcatgaaaaaatttccaatcgacctctcctgtctgacagaggaagaaatctctcaatttcaa

SEQ ID NO: 14411 - DNA, 260 bp, Unknown
  Description of Unknown: LeftRegion for integrase B1412 sequence
tatgtcaacggttttatggttggcaatattcccggcgacgataccgatttcataaaccgggcccgccgccgcggtgtcgaggttgtcggttttaaggtcgattatttcgagcccgaggacgagcccgagcgcggtcgtgtgtactatgcccgaatcaagctcgagatcgtgcccgttcgtgcggcaaaggcggcgaaataatgccgcgggccgcgcaagccgccggggccgagtttgacggtacgccgcgggcggttatc

SEQ ID NO: 14412 - DNA, 260 bp, Unknown
  Description of Unknown: LeftRegion for integrase B1413 sequence
ctcaacagcaagaaataaatttacaataaataaaaaatcccggtgtgtatcacggcaccgggattctgacatcaccttatgggggataatgtcaagatgtttcaataaaagtatatcatccctcatacagttacgcaagcggaacgtttgttccttgctggctgttatttttatacttaattttaaggaggatgaataaaatgacaaatcaaaaagaaaaaatagtagcattatacgtccgtgtatctaccggttatcaa

SEQ ID NO: 14413 - DNA, 260 bp, Unknown
  Description of Unknown: LeftRegion for integrase B1414 sequence
aaaggagaatcgcatggagaaagttgtgttatatgccattaacgaaagattgtaccggcttggtcttatcaacgaggaaaccagagataaaatcaaagcggaaataagtgtaaaaaagtagaataataatgttgagtggaattgtgttgaggtggtatacttaatatgattccactcccttatcaatagggggaaataaaatgaatatctattacgctagggaacaattaaggagttgttctatttatgatctaaaaatt

SEQ ID NO: 14414 - DNA, 195 bp, Unknown
  Description of Unknown: LeftRegion for integrase B1415 sequence
tcaccgatatggtgagctgtgtgaaggagctcgtgctccagaacaaggcagtgaacattaattttccgcactttgtagctttagtttcagatattttttgtatctttgctgcgcaaaacataaagaattaataatatggatgttataggttatattagagtttcgacgaacaatcaagacctgcaaagacaaagg

SEQ ID NO: 14415 - DNA, 260 bp, Unknown
  Description of Unknown: LeftRegion for integrase B1416 sequence
tattacgtagatatcatacaagaagcacaataaaataaaagccccggcgctaccaacaccggagccaattggcactatctggaagataataccaaatcccgcaaatttagtttatcatcttccaggcagtcacgcaagcggaacgaatgttctttgctggctgttatttttatactcatttttaaggaggaatgatatttatgacagaacaaaatgagaaaatcgtagcactctacgtccgtgtatcaactggatatcaa

SEQ ID NO: 14416 - DNA, 260 bp, Unknown
  Description of Unknown: LeftRegion for integrase B1417 sequence
aaaggagaatcgtatggagaaagttgtgttatatgccattaacgaaagattgtaccggcttggtcttatcgacgaggaaaccagagataaaatcaaagcggaaataagtgtaaaaaagtagaataataatgttgagtggaattgtgttgaggtggtatacttaatatgattccactcccttatcaatagggggaaataaaatgaatatttattacgctagggaacaattaaggagttgttcaatttatgatctaaaaatt

SEQ ID NO: 14417 - DNA, 260 bp, Unknown
  Description of Unknown: LeftRegion for integrase B1418 sequence
ttcacttttgatttcaccacgcaaaaagacctcgacaacgagtataaaaaactcaataacggggagattggttctgtagtagcgacagttatattcggtgccttatttattgcagttttaggtttcctaaaatagtaatcgtttttcagccattaaacgcaaatttgaggctgttttcgttaaataaggggggtgacagtttgagttcggttgacaaaatcgccgttgtttacgcacggtattcttcccacgggcagacc

SEQ ID NO: 14418 - DNA, 260 bp, Unknown
  Description of Unknown: LeftRegion for integrase B1419 sequence
ctcaacagcaagaaataaatttacaataaataaaaaatcccggtgtgtatcacggcaccgggattctgacatcaccttatgggggataatgtcaagatgtttcaatgaaagtatatcatccctcatacagttacgcaagcggaacgtttgttccttgctagctgttatttttatacttaattttaaggaggatgaataaaatgataaatcaaaaagaaaaaatagtagcattatacgtccgtgtatctaccggttatcaa

SEQ ID NO: 14419 - DNA, 260 bp, Unknown
  Description of Unknown: LeftRegion for integrase B1420 sequence
catatcggaaaaatccgtttcatcgtcacgcctgtttacaaggaaacaggagagctgatgcgtgacatccttttgaagctgatgctggctgacttggagccggtataaccccatcgacatccttaacatgggcggtcaggcgaggtataatatagtcaggatgaatgacctcttgcttgactgccagagaggaggtttatatgaaacagtcaagcaaaaaacacgaactcggcacagccgctctctattgccgactgagc

SEQ ID NO: 14420 - DNA, 260 bp, Unknown
  Description of Unknown: LeftRegion for integrase B1421 sequence
ctcaacagcaagaaataaatttacaataaataaaaaatcccggtgtgtatcacggcaccgggattctgacattaccttatgggggataatgtcaagatgtttcaatgaaagtatatcatccctcatacagttacgcaagcggaacgtttgttccttgctggctgttatttttatacttaattttaaggaggatgaataaaatgacaaatcaaaaagaaaaaatagtagcattatacgtccgtgtatctaccggttatcaa

SEQ ID NO: 14421 - DNA, 260 bp, Unknown
  Description of Unknown: LeftRegion for integrase B1422 sequence
actgtggcagatcttcttgttcggcatgaaaaaattacatttgctcaaacagaagggctaaacgagaagatagatgaatgtctttcaagtggaagatgctctctgttctatttgacgaaaaggacttaaaaaagaaaagcaggatgccattaaaggtatcctgctttctaaataaatgaatctttgtgggagggtcgaaaatgcctgacaatccagcgacaatcaaaaaagttgccatctatattcgcgtatcgacaaaa

SEQ ID NO: 14422 - DNA, 260 bp, Unknown
  Description of Unknown: LeftRegion for integrase B1423 sequence
gttaagccggtattcaaggatgatagcacaaatacctttggaacaattcttctgcgtctcatgcgggcggattgtgaacgaaagacgtgaatcctttgcaaaaccggctgacaagtggctgtcgggcgcggtataattgaagcgtgaagttatagcacgcaagaaaatttgttgtccgactgtccaagaaaggaggacttatgaaacagtcgaacaataaaaagttccgtgatgtgacagccttcctctatgagcggctt

SEQ ID NO: 14423 - DNA, 260 bp, Unknown
  Description of Unknown: LeftRegion for integrase B1424 sequence
caagtcggcaaaatccaattcattgtcacgcccatctacaaggacaaaggcgagtccatgcgtgacatcctgttgaagctgatgctggctgatttggagccagtttaactgttccatcgacatccttaacacgggcagtcggcagaggtataatatacatagataagaacctcttgcttgattgcaggaaggaggatattttgaaacagtcaagcaagaaaatctctaccggcacggccgctctctactgccgactgagc

SEQ ID NO: 14424 - DNA, 260 bp, Unknown
  Description of Unknown: LeftRegion for integrase B1425 sequence
tttattcaaaagaacaaggctggaaagtaaaattacccttggggtctagccggctgcctgggacatacaatgactttgttccggggtagagtgatttttcccttgatcttctattcatatcacagctgtgatacaaagataaaacgtttgcagatggtagttataatagtacctttgtcttaaacaaaagcaaagataatatgaaaggtgcaatttatagtagagtatctacagaaggacaggattacagtaagcaaacc

SEQ ID NO: 14425 - DNA, 260 bp, Unknown
  Description of Unknown: LeftRegion for integrase B1426 sequence
aatcggtcgttcgttgttgagccggttttcaaagaagaaagcccggataccctgggtagcgttctccttcgcctgatgaagtccgagagtgaaaagctgtaaatagctttcaaacccggctgacagaggcagcaaatggcggtataatgtgttcgtacaagtatatttgctattcgactgccttgacggaaggaggacttatgaaacagtcgaataacaaaaaatcccgtgacgtgaccgcctttctctatgaaaggctt

SEQ ID NO: 14426 - DNA, 260 bp, Unknown
  Description of Unknown: LeftRegion for integrase B1427 sequence
ctcaacagcaagaaataaatttacaataaataaaaaatcccggtgtgtatcacggcaccgggattctgacatcaccttatgggggataatgtcaagatgtttcaatgacagtatatcatccataaggcagtcacgcaagcggaacgtttgttctttgctggctgttatttttatacttaattttaaggaggatgaataaaatgacgaatcagaaagaaaaaatagtggcactgtatgtccgtgtatcaacaggatatcag

SEQ ID NO: 14427 - DNA, 260 bp, Unknown; identical to SEQ ID NO: 13307
  Description of Unknown: LeftRegion for integrase B1428 sequence

SEQ ID NO: 14428 - DNA, 260 bp, Unknown
  Description of Unknown: LeftRegion for integrase B1429 sequence
tgaactcgccgaacacatgacgagccacaataccccgttctcgaagggtgccatcaaaggccttctcaccgatatggtgagctgtgtgaaggagctcgtgctccaaaataaggcagtgaacattaattttccgcactttgtagctttagtttcagatattttttgtatctttgctgcgcaaaacataaagaattaataatatggatgttataggttatattagagtttcgacgaacaatcaagacctgcaaagacaaagg

SEQ ID NO: 14429 - DNA, 260 bp, Unknown
  Description of Unknown: LeftRegion for integrase B1430 sequence
caaatgcaacaacaagaaattaatatccaataattaaaaagccccgatgctaccaacaccggagccaattggcactatctggaagataataccaaatcccgcaaatttagtttatcatcttccaggcagtcacgcaagcggaacgaatgttctttgctggctgttatttttatactcatttctaaggaggaatgatatttatgacagaacaaaatgagaaaatcgtagcactctacgttcgtgtatcaaccggataccaa

SEQ ID NO: 14430 - DNA, 260 bp, Unknown
  Description of Unknown: LeftRegion for integrase B1431 sequence
tgtaaagccggtattcaaggatgacagcgcaaatacctttggagcaattctgctgcggctcatgcaggcggattgtgaacgaaaaccatgaatcctttgcgaacccggctgacaaatggctgtcgggcgcagtataattgaagcgtgaagttatagtacgcaagaaaaatgttgtccgactgtccaaggaaggaggacttatgaaacagtcgaacaataaaaaatcccgtgatgtgacagccttcctctatgagcggctt

SEQ ID NO: 14431 - DNA, 260 bp, Unknown
  Description of Unknown: LeftRegion for integrase B1432 sequence
gtcgtttgtcgttcagccggtattcaagcctggaaataacaacacccttggtgaagttctgctgcgcctcatgcaggcggactgcgaaaaaagtttgtgattttcagaatatcagctgacaataacagttaagcgcagtataattgttgtgtgaaaaagaaaacacaattcgttgctcgactgttatagaaggaggacttatgaaaaagtcgaacaacaagaaaacacgcgacgttaccgcgttcatctacccccgcctg

SEQ ID NO: 14432 - DNA, 260 bp, Unknown
  Description of Unknown: LeftRegion for integrase B1433 sequence
ataactatttaatgttcaaggcaaaaaataaataataaaagccccgatgctaccaacaccggagccaattggcactatctggaagataataccaaatcccgcaaatttagtttatcatcttccaggcagtcacgcaagcggaacgaatgttctttgctggctgttatttttatactcatttttaaggaggaatgatgtttatggcagaacaaaatgagaaaatcgtagcgctctacgtccgtgtatcaactggatatcaa

SEQ ID NO: 14433 - DNA, 260 bp, Unknown; identical to SEQ ID NO: 13291
  Description of Unknown: LeftRegion for integrase B1434 sequence

SEQ ID NO: 14434 - DNA, 260 bp, Unknown
  Description of Unknown: LeftRegion for integrase B1435 sequence
ctcaacagcaagaaataaatttacaataaataaaaaatcccggtgtgtatcacggcaccgggattctgacatcaccttatgggggataatgtcaagatgtttcaatgaaagtatatcatccctcgtacagttacgcaagcggaacgtttgttccttgctggctgttatttttatacttaattttaaggaggatgaataaaatgacaaatcaaaaagaaaaaatagtagcattatacgtccgtgtatctaccggttatcaa

SEQ ID NO: 14435 - DNA, 260 bp, Unknown
  Description of Unknown: LeftRegion for integrase B1436 sequence
gtgaagccggtattcaaggatgacagcgcaaatacctttggagcaattctgctgcggctcatgcaggcagattgtgaacgaaaaccgtgaatcctttgcgaacccggctgacaaatggctgtcgggcgcggtataattgaagcgtgaagttatagcacgcaagaaaaattgttgtccgactgtccaaggaaggaggacttatgaaacagtcgaacaataaaaaatcccgtgatgtgacagctttcctctatgagcggctt

SEQ ID NO: 14436 - DNA, 260 bp, Unknown
  Description of Unknown: LeftRegion for integrase B1437 sequence
caaatgcaacaacaagaaattaatatccaataattaaaaagccccgatgctaccaacaccggagccaattggcactatctggaagataataccaaatcccgcaaatttagtttatcatcttccaggcagtcacgcaagcggaacgaatgttctttgctggctgttatttttatactcgtttttaaggaggaatgatatttatggcagaacaaaatgagaaaatcgtagcgctctacgtccgtgtatcaactggataccaa

SEQ ID NO: 14437 - DNA, 260 bp, Unknown
  Description of Unknown: LeftRegion for integrase B1438 sequence
tatgtcaacggttttatggttggcaatattcccggcgacgataccgatttcataaaccgggcccgccgccgcggcgtcgaggtcgtcggttttaaggtcgattattttgagcccgaggacgagcccgagcgtggtcgtgtgtactatgcccgaatcaagctcgagatcgtgcctatacgcgcggcaaaggcggcgaaataatgccgcgggccgcacaagccgccggggccgagtttgacggtacgccgcgggcggtaatt

SEQ ID NO: 14438 - DNA, 260 bp, Unknown
  Description of Unknown: LeftRegion for integrase B1439 sequence
acccatttttgaattgtgttcgtgcatgaagtttttgtgcatcattttcggttgccccaacggggcgagaaaatggcacattacggattgctatgccagcatagcaatccccatcgacatccttaacatgggcggtcaggcgaggtataatatagtcaggatgaatgacctcttgcttgactgccagagaggaggtttatatgaaacagtcaagcaaaaaacacgaactcggcacagccgctctctactgccgactgagc

SEQ ID NO: 14439 - DNA, 260 bp, Unknown
  Description of Unknown: LeftRegion for integrase B1440 sequence
ctgtgataataaaaacatgatttagcacaataaaataaaagccccgatgctaccaacaccggagccaattggcactatctggaagataataccaaatcccgcaaatttagtttatcatcttccaggcagtcacgcaagcggaacgaatgttctttgctggctgttatttttatactcatttttaaggaggaatgatgtttatggcagaacaaaatgagaaaatcgtagcactctacgtccgtgtatcaacaggataccaa

SEQ ID NO: 14440 - DNA, 260 bp, Unknown
  Description of Unknown: LeftRegion for integrase B1441 sequence
ctacatcggaaagatccgctttatcgtcacgcctgtttacaaggaaacgggagagctgatgcgtgacatccttttgaagctgatgctggctgacttggagccggtatagccccatcgacatccttaacatgggcggtcaggcgaggtataatatagtcaggatgaatgacctcttgcttgactgccagagaggaggttatatgaaacagtcaagtaagaaacacgaactcggcacagccgcgctctactgccgactgagc

SEQ ID NO: 14441 - DNA, 260 bp, Unknown
  Description of Unknown: LeftRegion for integrase B1442 sequence
ctcaacagcaagaaataaatttacaataaataaaaaatcccggtgtgtatcacggcaccgggattctgacatcaccttatgggggataatgtcaagatgtttcaatgaaagtatatcatccctcatacagttacgcaagcggaacatttgttccttgctggctgttatttttatacttaattttaaggaggatgaataaaatgacaaatcaaaaagaaaaaatagtagcattatacgtccgtgtatctaccggttatcaa

SEQ ID NO: 14442 - DNA, 260 bp, Unknown
  Description of Unknown: LeftRegion for integrase B1443 sequence
aaaggagaatcgcatggagaaagttgtgttatatgccattaacgaaagattgtaccggcttggtcttatcaacgaggaaaccagagataaaatcaaagcggaaataagtgtaaaaaagtagaataataatgttgagtggaattgtgttgaggtggtatacttaatgtgattccactcccttatcaatagggggaaataaaatgaatatctattacgccagggaacaattaaggagttgttcaatttatgatctaaaaatt

SEQ ID NO: 14443 - DNA, 260 bp, Unknown
  Description of Unknown: LeftRegion for integrase B1444 sequence
ctgtgataataagaacatgacttagcacaataaaataaaagccccgatgctaccaacaccggagccaattggcactatctggaagataataccaaatctcgcaaatttagtttatcatcttccaggcagtcacgcaagcggaacgaatgttctttgctggctgttatttttatactcatttttaaggaggaatgatatttatggcagaacaaaatgagaaaatcgtagcactctacgttcgtgtatcaactggctatcaa

SEQ ID NO: 14444 - DNA, 260 bp, Unknown; identical to SEQ ID NO: 14441
  Description of Unknown: LeftRegion for integrase B1445 sequence

SEQ ID NO: 14445 - DNA, 260 bp, Unknown
  Description of Unknown: LeftRegion for integrase B1446 sequence
tacgcagacatagtaaaagaagctgaataaatgaaaatcccggtgtgtatcacggcaccgggattctgacatcaccttatgggggataatgtcaagatgtttcaatgaaagtatatcatccctcgtacagttacgcaagcggaacgtttgttccttgctggctgttatttttatacttaattttaaggaggatgaataaaatgacaaatcaaaaagaaaaaatagtagcattatacgtccgtgtatctaccggttatcaa

SEQ ID NO: 14446 - DNA, 260 bp, Unknown
  Description of Unknown: LeftRegion for integrase B1447 sequence
tattatagcacgcatcgctcatttcatcaatcattttctcgatgcacatgagtgatgccctccgaactggcacgatcagcgcgcgaaaacctctgcctatccgcagaaattttcagattcttcccttgggtaccttttcaaatggattccaatccgttataatatatctaccaacctaacgaataacgcgaggtgccgccatgaaaacgaaagatacgccgaagcaatacgtcatctactcccgcaagtccaaattcacc

SEQ ID NO: 14447 - DNA, 260 bp, Unknown
  Description of Unknown: LeftRegion for integrase B1448 sequence
aaaggagaatcgcatggagaaagttgtgttatatgccattaacgaaagattgtaccggcttggtcttatcgacgaggaaaccagagataaaatcaaagcagaaataagtgtaaaaaagtagaataataatgttgagtggagttgtgttgaggtggtatacttaatgtgattccactcccttatcaatagggggaaataaaatgaatatttattacgctagggaacaattaaggagttgttcaatttatgatctaaaaatt

SEQ ID NO: 14448 - DNA, 260 bp, Unknown
  Description of Unknown: LeftRegion for integrase B1449 sequence
ttctccccatttacttttgatttagcacaataaaataaaagccccgatgctaccaacaccggagccaattggcactatctggaagataataccaaatcccgcaaatttagtttatcatcttccaggcagtcacgcaagcggaacaaatgttctttgctggctgtattttttatactcatttttaaggaggaatgatatttatggcagaacaaaatgagaaaatcgtagcactctacgtccgtgtatcaactggataccaa

SEQ ID NO: 14449 - DNA, 260 bp, Unknown
  Description of Unknown: LeftRegion for integrase B1450 sequence
tacgtcaatggttatatggtcggcaatattcccggcgacgataccgatttcataaaccgggcccgccgtcgcggtgtcaacgtcgtcggctttaaggtcgattatttcgagcccgaggacgagcccgagcgcgggcgcgtgtactacgcccgtatcaagctcgagatcgtgcctatacgcgcggcaaaggcggcgaaataatgccgcgggccgcacaagctgccggggccgcgttcgacggaacgccgcgggcggttatc

SEQ ID NO: 14450 - DNA, 260 bp, Unknown
  Description of Unknown: LeftRegion for integrase B1451 sequence
tacgcagacatagtgaaagaagctgaataaaggaaaatcccggtgtgtatcacggcaccgggattctgacattaccttatgggggataatgccaagatgtttcaatgacagtatatcatccataaggcagtcacgcaagcggaacgtttgttctttgctggctgttatttttatacttaattttaaggaggatgaataaaatgacgaatcagaaagaaaaaatagtggcactgtatgtccgtgtatcaacaggatatcag

SEQ ID NO: 14451 - DNA, 260 bp, Unknown
  Description of Unknown: LeftRegion for integrase B1452 sequence
caaatgcaacaacaagaaattaatatccaataattaaaaagccccgatgctaccaacaccggagccaattggcactatctggaagataataccaaatcccgcaaatttagtttatcatcttccaggcagtcacgcaagcggaacgaatgttctttgctggctgttatttttatactcatttttaaggaggaatgatatttatgacagaacaaaatgagaaaatcgtagcactctacgtccgtgtatcaactggatatcaa

SEQ ID NO: 14452 - DNA, 260 bp, Unknown
  Description of Unknown: LeftRegion for integrase B1453 sequence
aaaggagaatcgcatggagaaagttgtgttatatgccattaacgaaagattgtaccggcttggtcttatcgacgaggaaaccagagataaaatcaaagcggaaataagtgtaaaaaagtagaataataatgttgagtggaattgtgttgaggtggtatacttaatatgattccactcccttatcaatagggggaaataaaatgaatatttattacgctagggaacaattaaggagttgttcaatttatgatctaaaaatt

SEQ ID NO: 14453 - DNA, 260 bp, Unknown
  Description of Unknown: LeftRegion for integrase B1454 sequence
caaatgcaacaacaagaaattaatatccaataattaaaaagccccgatgctaccaacaccggagccaattggcactatctggaagataataccaaatcccgcaaatttagtttatcatcttccaggcagtcacgcaagcggaacgaatgttctttgctggctgttatttttatactcatttttaaggaggaatgatatttatgacagaacaaaatgagaaaattgtagcgctctatgttcgtgtatcaactggataccaa

SEQ ID NO: 14454 - DNA, 260 bp, Unknown
  Description of Unknown: LeftRegion for integrase B1455 sequence
ctcaacagcaagaaataaatttacaataaataaaaaatcccggtgtgtatcacggcaccgggattctgacattaccttatggggggtaatgtcaagatgtttcaatgaaagtatatcatccctcatacagttacgcaagcggaacgtttgttccttgctggctgttatttttatacttaattttaaggaggatgaataaaatgacaaatcaaaaagaaaaaatagtagcattatacgtccgtgtatctaccggttatcaa

SEQ ID NO: 14455 - DNA, 260 bp, Unknown
  Description of Unknown: LeftRegion for integrase B1456 sequence
ggctactggctgtaaaatgctggtagccctcattttttagttgtatctagtatataaggggtgtataatagataggaactgaaaacagcctcataaagccctctgttttatagagggtaaagaagtctacacctaatatataaaagtggctgtatgaggcacacaggagctcacaggactattacaggagggtaaacaggatggcatacaggaaaataacggatataaaagatactataggtatgagagcggtattctat

SEQ ID NO: 14456 - DNA, 260 bp, Unknown
  Description of Unknown: LeftRegion for integrase B1457 sequence
gcaagaatacaaagtcaacggcgttacctacattgtgtcggcggcgttcaagcatacagggcggaaagaggacaacacctcttttccgacctgtgtaaaaaaaatcctcacaagtgatttcgcacatttgataatcaccgagggaaatgatactatggcagcagaaaatgtgtgttcggctgccggaaaggaggacaacattgcagtcgaaaaagaaacaggataaggctggcattaccgccttgtactgccgcctttcc

SEQ ID NO: 14457 - DNA, 260 bp, Unknown
  Description of Unknown: LeftRegion for integrase B1458 sequence
gacgggaactcaaagagaacgctgcctgactgcgcttgaacaacagtacagccgaagtcaaaaaagcaaacgccgagcttgactgcttggcgtttttacatatataagtgtaaatcaaagatttgcacattcgacatctctcagagattttcctataatgcaaatacagtaagcacggtttactgggaaaggagttttcaatgaacagatatgaacgcttaaacgaagaacgcaagataattgaaaaaagaaagcgtgta

SEQ ID NO: 14458 - DNA, 260 bp, Unknown
  Description of Unknown: LeftRegion for integrase B1459 sequence
gacagaaacaacctaccacctgccggtacaagaattgtcagagaatatttgggggttgaaaacgttgttactgttatgaaagatggctttgaatataatggcatgaaatattcaagcctgtctgcggtggcaaaaaaaattactggccgaaaaatctctggacgttacttttttggattagataaataaaggaataaaccatggaagatcaaaaacaaatacgatgcgcaatttacacccgtaaatcaacagatgaaggt

SEQ ID NO: 14459 - DNA, 260 bp, Unknown
  Description of Unknown: LeftRegion for integrase B1460 sequence
aatttgccgccgacaggaacacgaattgtccgtgagtatttaggtgttgatcatgttgttgtggttctgcccgatgggtttgaattcaatggtctgaagtatcaaaccttatctgcggtggcaaagaaaataaccggccgcaaaatatccggacgatatttttttggtttagataagcaagaaaaataaaggagaaaccaatggaaagttttagccctatcagatgtgcaatatatacacgtaaatcaacagatgaaggt

SEQ ID NO: 14460 - DNA, 260 bp, Unknown
  Description of Unknown: LeftRegion for integrase B1461 sequence
cgtgaagtagacattgaagatggagatattgtcgtggccgttgtagatcggcaagacggctttatcaaacaagtccactttgaagagaatgtccttaccctgcattctttcaacccctactatcctgatatggtctttagagggaatgagatcaagcaagttcggtttgtaggtaaagcccgagaggtgaagagaattctatgaagaagttcaaattccccattgatctgtctatgctgacagaagaagagatcaaccaa

SEQ ID NO: 14461 - DNA, 260 bp, Unknown
  Description of Unknown: LeftRegion for integrase B1462 sequence
aatctgccaccgacagggacacgaattgtccgtgagtatttaggtgttgatcatgtagtcgtggttctgcccgatgggtttgaattcaatggcatgaagtatcaaaccttatctgcggtggccaagaaaataaccggccgcaaaatatccggacgatatttttttggtttagataagcaagaaaaataaaggagaaaccaatggaaagttttagcccaatcagatgtgcaatatatacgcgtaaatcaacagatgaagga

SEQ ID NO: 14462 - DNA, 260 bp, Unknown
  Description of Unknown: LeftRegion for integrase B1463 sequence
acaggtcttttgattgtgtgtagtgacccggcgcaaaagaaaattgacagagccgatgccttgaatattccaatcatttcagagcagcaatggtatgaactcatgccagaacttgaagccgttggaatgtggaacggaaagcaaattctgtttgcggacaatgatggcatctaccgtgttgaagtgggcggtgaaagctgatggccagaaaaaagaatattgctgccggcctcgatgccgtcatctatgcccggtactca

SEQ ID NO: 14463 - DNA, 260 bp, Unknown; identical to SEQ ID NO: 14115
  Description of Unknown: LeftRegion for integrase B1464 sequence

SEQ ID NO: 14464 - DNA, 260 bp, Unknown
  Description of Unknown: LeftRegion for integrase B1465 sequence
aatttgccgccgacagggacacgaattgtccgtgagtatttaggtgttgatcatgttgttgtggttctgcccgatgggtttgaattcaatggtctgaagtatcaaaccttatctgcggtggcaaagaaaataaccggccgcaaaatatccggacgatatttttttggtttagataagcaagaaaaataaaggagaaaccaatggaaagttttagccctatcagatgtgcaatatatacacgtaaatcaacagatgaaggt

SEQ ID NO: 14465 - DNA, 260 bp, Unknown
  Description of Unknown: LeftRegion for integrase B1466 sequence
taactctcaaagatcgcttgttttctcaaccttccttaaatgaacaagaagtagaattggttaatttattccgctcttgtaaaccgtctgtgcaattccaagttgttcatattatgatgacggaaaaagaaaaaacagactctacggaagagtctgctatcggctaaggtcatcgacctaaatgaatggagaaagaccctatgaagaagttcaagttccctatcgacttgtctatgttgacggaggaagagatcgaccaa

SEQ ID NO: 14466 - DNA, 260 bp, Unknown; identical to SEQ ID NO: 14459
  Description of Unknown: LeftRegion for integrase B1467 sequence

SEQ ID NO: 14467 - DNA, 260 bp, Unknown
  Description of Unknown: LeftRegion for integrase B1468 sequence
agaaaggtataatgtttttcatgtcttcctgatagttagacatgatgccaacggtaagaaatatttgtacgatgttataaaaacaaaaaaagaaacgagcaacccgcttagctactgacaagtcagcacgtacggtataaaaacccatttcttaatacaaagggtactatttattagtgaaaatgtcaaggagaaaaattgtgaataataaaaaaacaaaggtttatatttatactcgtgtttctacagttatgcagata

SEQ ID NO: 14468 - DNA, 260 bp, Unknown
  Description of Unknown: LeftRegion for integrase B1469 sequence
gtcaaaaaggtcgcaatcgcaccgataggaaccaaaatcatcaaacagtacaaaggccgcgattatgtcatccgcgttcttgaaaacggctatgaacttgacggacaaagatttaagagcttgtccggcatggccaagaaaattaccggtatgaaaatctccggtagtgcattctttggatttaatttgcgaggcaaataatggaagagcagaaaaaagtcagatgtgcaatttatacccgaaaatcaaccgacgaaggc

SEQ ID NO: 14469 - DNA, 260 bp, Unknown
  Description of Unknown: LeftRegion for integrase B1470 sequence
aagtatatatcgcattgcacaaatacacgtaaaataaaaaccgcccctgcgccaacaggaacggtctttaaggtacatccgaagatatacactatactttggtcggtaatattgtatcatcttcggacagctatcgcaagcggaacacttgttctctgctagctgttatttttatacccatttttaaggaaggtggtacaatgaaagaagataatagaattgtagcattatacgttcgtgtatctactggataccaagtt

SEQ ID NO: 14470 - DNA, 260 bp, Unknown
  Description of Unknown: LeftRegion for integrase B1471 sequence
gctactggctgtaaaatgctggtagccctcattttttagttgtatctagtatataaggggtgtataatagatagaaactgaaaaacagcctcataaagccttctattttatcgagggtaaagaagtctacacctaatatataaaagtggctgtatgaggcacacaggagctcacaggactattacaggagggtaaacaggatggcatacaggaaaataacggatataagagatactattggtatgagagcggtattttat

SEQ ID NO: 14471 - DNA, 260 bp, Unknown
  Description of Unknown: LeftRegion for integrase B1472 sequence
caataaaacaaaaaccgccccttcgccaaaaggagcggaatgttgaagaaacacacgcaaatatgtttcttccagtactccgaagagatacaattaattgccaatgaatattgtatcatcttcggacagccaatgcaatcagaacaactgttctgtgttggttgtatttttatacccatttttaaggaggatgattttttatgacagaaaaccaagaaaaaatagtagcactatacgtccgtgtatcgactggctatcag

SEQ ID NO: 14472 - DNA, 260 bp, Unknown
  Description of Unknown: LeftRegion for integrase B1473 sequence
gtatgtcattaacggtgtgagatatgtagttgagtcgagatttcaaaagcccgattacaaaaagccgaataagaacattttgctgaataaccgtatagggagttatctcacaagcgatttcgcagatttgccgtatgttggtacaagtaatataataagcaccgaatatgattgtacggctgccgggaaggaggataataatgcagccgaaaaagaataacaaaatcgggataacggcgctttactgccgtttgtcccgt

SEQ ID NO: 14473 - DNA, 260 bp, Unknown
  Description of Unknown: LeftRegion for integrase B1474 sequence
aatatatgataaacggagtaagatatattgtttgcggtaaatttgaggattttaacattaaaaaatatagcgacagcaatcatttgaataacagattgaaaaaatatctcacgggcgatttcgcagaattgtctgttgacagcatcaatgataaaatgacagatgaatatgattgttcgactgtcggaaaggaggattaaatgcagtcgaaaaacaaaaaccaaatagggataacggctctatattgtcgtttgtcccgt

SEQ ID NO: 14474 - DNA, 260 bp, Unknown
  Description of Unknown: LeftRegion for integrase B1475 sequence
gctactggctgtaaaatgctggtagccctcattttttagttgtatctagtatataaggggtgtataatagataggaactgaaaacagcctcataaagccctctattttatcgaggataaagaaagtctacacctaatatataaaagtggctgtatgaggcacacaggagctcacaggactattacaggagggtaaacaggatggcatacaggaaaataacggatataagagatactattggtatgagagcggtattttat

SEQ ID NO: 14475 - DNA, 260 bp, Unknown
  Description of Unknown: LeftRegion for integrase B1476 sequence
atgattcgcctttgaatcttgatctatgggacttctatgtggtaaattttctctctgcaattacttgtaggacaaaaactatcacgctgcaaactcttcttgatagcagaccgttgttaagtaactatcacaatctcaacaaaatcatacataatattattggtttctagtacttttgcattatggaaggaggtatcttaatgtctgcaacagcaactaaaaacagagtggcaatttacgttcgagtatcaacactttat

SEQ ID NO: 14476 - DNA, 260 bp, Unknown
  Description of Unknown: LeftRegion for integrase B1477 sequence
aatatatgataaatggagtaagatatatcgtttgcggtaaatttgaggattttaacattaaaaaatatagcgacagcaatcatttgaataacagattgaaaaaatatctcacgggcgatttcgcagaattgtctgttgatagcatcaatgataaaatgacagatgaatatgattgttcgactgtcggaaaggaggattaaatgcagtcgaaaaacaaaaatcaaatagggataacagctctttattgtcgtttgtcccgt

SEQ ID NO: 14477 - DNA, 260 bp, Unknown
  Description of Unknown: LeftRegion for integrase B1478 sequence
aataaaacaaaaaccgccccttcgccaaaaggagcggaatgttgaagaaacacacgcaaatatgtttcttccagtactccgaagagataccattaattgccaatgaatattgtatcatcttcggacagccaatgcaatcagaacagccgttctgtgttggttgtattttttatacccatttttaaggaggatgattttttatgacagaaaaccaagaaaaaatagtagcactatacgtccgtgtatcgactggctatcag

SEQ ID NO: 14478 - DNA, 260 bp, Unknown
  Description of Unknown: LeftRegion for integrase B1479 sequence
cttcaatgacaatatcggttccagaacaataaaataaaaaaccgcccctgcgccaacaggaacggtctttaaggtacatccgaagatatacactttactttggtcggtaatattgtatcatcttcggacagctatcgcaagcagaacgtccgttctctgctagctgttatttttatactcatttttaggaaggtggtactatgtcagaagacaaaagaatcgtagcattgtatgttcgtgtgtctactggatatcaggtg

SEQ ID NO: 14479 - DNA, 260 bp, Unknown
  Description of Unknown: LeftRegion for integrase B1480 sequence
ctctccatacatttttgacttagcgcaataaaataaaaaaccgcccctgcgccaacaggaacggtctttaagggcacatccgaagatatacactatactttgatcggtaatattgtatcatcttcggacagctatcgcaagcagaacatccgttctctgctagctgttatttttatactcatttttaggaaggtggtactatgtcagaagataaaagaatcgtagcattgtacgttcgtgtgtctactggatatcaggta

SEQ ID NO: 14480 - DNA, 260 bp, Unknown
  Description of Unknown: LeftRegion for integrase B1481 sequence
atatgttattaacagtgtaagatatgtggttgagtcgaaatttcaaaaacctaactacaaagaacccaaagagaatactttgctgaataaccgtatcggaaattatctcacaagcgatttcgcagatttgccgtctgtcgatacagataatataatagatactgaatatgattgtacggctgccgggaaggaggataatagtgcagccgaaaaagaataacaaaatcgggataacggcgctttactgccgtttgtcccgt

SEQ ID NO: 14481 - DNA, 260 bp, Unknown
  Description of Unknown: LeftRegion for integrase B1482 sequence
ttcaatgacaatatcggttccagaacaataaaataaaaaaaccgcccctgcgccaacaggaacggtctttaaggtacatccgaagatatacactatactttggtcggtaatattgtatcatcttcggacagctatcgcaagcagaacgtccgttctctgctagctgttatttttatactcatttttaggaaggtggtactatgtcagaagacaaaagaatcgtagcattgtacgttcgtgtgtctactggatatcaggta

SEQ ID NO: 14482 - DNA, 260 bp, Unknown
  Description of Unknown: LeftRegion for integrase B1483 sequence
ctcggcggaatcaacgccgacagcgttacaaagaaaaccaatttccttgttttgggaaataatgacctgtgttcctcaatcaaagacggcaaaagttccaaacataaaaaagccgaaaagtatattttgggcggcgcagacttgtctattatcccggaaaatgttttttatgatatgttagacgaataaagggtgattgtatgcgggcttttatttactgccgattttccagccataagcagcaagagcttagcatagag

SEQ ID NO: 14483 - DNA, 260 bp, Unknown
  Description of Unknown: LeftRegion for integrase B1484 sequence
aatatatgataaacggagtaagatatatcgtttgcggtaaatttgaggattttaacattaaaaaatatagcgacagcaatcatttgaataacagattaaaaaaatatctcacgggcgatttcgcagaattgtctgttgacagcatcaatgataaaatgacagatgaatatgattgttcgactgtcggaaaggaggattaaatgcagtcgaaaaacaaaaatcaaatagggataacagctctttattgtcgtttgtcccgt

SEQ ID NO: 14484 - DNA, 260 bp, Unknown; identical to SEQ ID NO: 14243
  Description of Unknown: LeftRegion for integrase B1485 sequence

SEQ ID NO: 14485 - DNA, 260 bp, Unknown
  Description of Unknown: LeftRegion for integrase B1486 sequence
atcaatgacaatatcggtcccagaacaataaaataaaaaaccgctcctgcgccaacaggaacggtctttaaggtacatccgaagatatacactatactttggtcggtaatattgtatcatcttcggacagctatcgcaagcagaacgtccgttctctgctagctgttatttttatactcatttttaaggaaggtggtacaatgaaagaagataatagaattgtagcattatacgttcgtgtatctactggataccaagtt

SEQ ID NO: 14486 - DNA, 260 bp, Unknown
  Description of Unknown: LeftRegion for integrase B1487 sequence
gtgatgctaaaacaaaaataataatccaataaaataaaaaaccgcccctgcgccaacaggaacggtctttaaggtacatccgaagatatacactatactttggtcagtaatattgtatcatcttcggacagctatcgcaagcgaaacatccgttctctgctagctgttatttttatactcatttttaggaaggtggtactatgtcagaagataaaagaatcgtagcattatatgttcgtgtgtctactggatatcaggta

SEQ ID NO: 14487 - DNA, 260 bp, Unknown
  Description of Unknown: LeftRegion for integrase B1488 sequence
aattgcaacaacaagaaatatcattacaataaaataaaaaaccgcccctgcgccaacaggaacggtctttaaggtacatccgaagatatacactatactttggtcggtaatattgtatcatcttcggacagctatcgcaagcagaacgtccgttctctgctagctgttatttttatactcatttttaggaaggtggtactatgtcagaagacaaaagaatcgtagcattgtacgttcgtgtgtctactggatatcaggta

SEQ ID NO: 14488 - DNA, 260 bp, Unknown
  Description of Unknown: LeftRegion for integrase B1489 sequence
aacctgtaaaataaaaaccgcccctacgccaataggaacggtttagttgaaacatacgccaatatgtttcaaaataacactccgaagaatgccatttattaccaataaatattgtatcatcttcggagcagccacgcaagcgaaacaaacgttctccgctggctgttatttttatactcatttttaggaaggttggtactatgtcagaagataaaagaatcgtagcattgtacgttcgtgtgtctactggatatcaggtg

SEQ ID NO: 14489 - DNA, 260 bp, Unknown
  Description of Unknown: LeftRegion for integrase B1490 sequence
gtcaataaagcaaaaaccgcccctcgccaaaggagcggaatgttgaagaatcatacgccaatatgtttcttccagtacctcgaagagataccattaattgccaatgaatattgtatcatcttcggacagccaatgcaatcagaacaactgttctgtgttggttgtatttttatacccatttttaaggaggatgattttttatgacagaaaacccagaaaaaatagtagcactatacgtccgtgtatcgactggctatcag

SEQ ID NO: 14490 - DNA, 260 bp, Unknown
  Description of Unknown: LeftRegion for integrase B1491 sequence
gtgatgctaaaacaaaaataataatccaataaaataaaaaaccgcccctgcgccaacaggaacggtctttaaggtacatccgaagatatacactttactttggtcggtaatattgtatcatcttcggacagctatcgcaagcagaacgtccgttctctgctagctgttatttttatactcatttttaggaaggtggtactatgtcagaagataaaagaatcgtagcattgtacgttcgtgtgtctactggatatcaggta

SEQ ID NO: 14491 - DNA, 260 bp, Unknown
  Description of Unknown: LeftRegion for integrase B1492 sequence
tctctccatacatttttgacttagcgcaataaaataaaaaaccgcccctgcgccaacaggaacggtctttaaggtacatccgaagatatacactatactttggtcggtaatattgtatcatcttcggacagctatcgcaagcggaacacttgttctctgctagctgttatttttatacccattttaaggaaggtggtacgatgaaagaagataatagaattgtagcattgtatgtccgtgtatctactggatatcaggta

SEQ ID NO: 14492 - DNA, 107 bp, Unknown
  Description of Unknown: LeftRegion for integrase B1493 sequence
gtgtttgagtatatttcaacacattttgagtggcaggatgattttttatgacagaaaaccaagaaaaaatagtagcactatacgtccgtgtatcgactggctatcag

SEQ ID NO: 14493 - DNA, 260 bp, Unknown
  Description of Unknown: LeftRegion for integrase B1494 sequence
attggtgatgctaaaacaaaaataataatccaataattaaaaagctccgacactacaaatgccggagccaatagacactatctggaagataatgccaattctcgcaaaattagtataccatcttccaggcagtcacgcaagcggaacaaatgttcttctgtggctgttatttttatactcatttttaggaaggtgatattatgtcagaagataaaagaatcgtagcattgtacgttcgtgtgtctactggatatcaggta

SEQ ID NO: 14494 - DNA, 260 bp, Unknown
  Description of Unknown: LeftRegion for integrase B1495 sequence
catcaatgacaatatcggttccaaaacaataaaataaaaaaccgcccctgcgccaacaggaacggtctttaaggtacatccgaagatatacactatactttggtcggtaatattgtatcatcttcggacagctatcgcaagcagaacgtccgttctctgctagctgttatttttatactcatttttaggaaggtggtactatgtcagaagataaaagaatcgtagcattatatgttcgtgtgtctactggatatcaggta

SEQ ID NO: 14495 - DNA, 260 bp, Unknown; identical to SEQ ID NO: 14488
  Description of Unknown: LeftRegion for integrase B1496 sequence

SEQ ID NO: 14496 - DNA, 260 bp, Unknown
  Description of Unknown: LeftRegion for integrase B1497 sequence
tatgtttaataaaagaacttggcaggaacaaaaacataccggaagaattagttagagcagtggaaataaaatatgataacgaatagttcaaaaagccaagatgttttgcaccttggctttgtaaatattgaattaaccaggttatgatgctatactatgctaaaatctatatttgataacctggtggataggagtaaattatgaagagaaaagttgcaatatacgccagagtatcaacggagcatgaagcacagattaat

SEQ ID NO: 14497 - DNA, 260 bp, Unknown
  Description of Unknown: LeftRegion for integrase B1498 sequence
cttcaatgacaatatcggttccagaacaataaaataaaaaaccgcccctgcgccaacaggaacggtctttaaggtacatccgaagatatacactttactttggtcggtaatattgtatcatcttcggacagctatcgcaagcagaacgtccgttctctgctagctgttatttttatactcatttttaggaaggtggtactatgtcagaagataaaagaatcgtagcattgtacgttcgtgtgtctactggatatcaggta

SEQ ID NO: 14498 - DNA, 260 bp, Unknown; identical to SEQ ID NO: 14497
  Description of Unknown: LeftRegion for integrase B1499 sequence

SEQ ID NO: 14499 - DNA, 260 bp, Unknown
  Description of Unknown: LeftRegion for integrase B1500 sequence
tctctccatacatttttgacttagcgcaataaaataaaaaaccgcccctgcgccaacaggaacggtctttaaggtacatccgaagatatacactatactttggtcggtaatattgtatcatcttcggacagctatcgcaagcggaacacttgttctctgctagctgttatttttatacccattttaaggaaggtggtacgatgaaagaagataatagaattgtagcattatacgttcgtgtatctactggataccaagtt

SEQ ID NO: 14500 - DNA, 199 bp, Unknown
  Description of Unknown: LeftRegion for integrase B1501 sequence
cgggtgttgatgttatcgcgctgcgacagcatctcatccagctccatgccgccgagcacggtgcggatgttggtcaatagcaatttatttcgtaatcccataaaatactctcatagcggagcgattgaggtgtaggtgattgaaaattataaaagatgctgttggttatgttcgtttcagctcagcaatacaggagcag

SEQ ID NO: 14501 - DNA, 260 bp, Unknown
  Description of Unknown: LeftRegion for integrase B1502 sequence
caacatattgtataataagagtaagcaaagccacgataagccggaaagcggcgtatctcgaatatcatcttcggacgtgttgagacgttcttcggaacgtcttttccgtgattcgtggttcctgtacgcgcttcggaaacgaagcgttttttattgctcatcttctctttcagcaaagccacttctataagggaagtgtgatgagaatgaaactccatcgagaagaagaacatcggaaagctgctctgtacatccgtgtc

SEQ ID NO: 14502 - DNA, 260 bp, Unknown
  Description of Unknown: LeftRegion for integrase B1503 sequence
atgattcgcctttgaatcttgatctatgggacttctatgtggtaaattttctctctgcaattacttgtaggacaaaaactatcacgctgcaaactcttcttgatagcagaccgttgttaagtaactatcgcaatctcaacaaaatcatacataatattattggtttctagtacttttgcattatggaaggaggtatcttaatgtctgcaacagcaactaaaaacagagtggcaatttacgttcgagtatcaacactttat

SEQ ID NO: 14503 - DNA, 260 bp, Unknown
  Description of Unknown: LeftRegion for integrase B1504 sequence
ctctccatacatttttgacttagcgcaataaaataaaaaaccgcccctgcgccaacaggaacggtctttaagggcacatccgaagatatacactatactttgatcggtaatattgtatcatcttcggacagctatcgcaagcagaacgtccgttctctgctagctgttatttttatactcatttttaggaaggtggtactatgtcagaagataaaagaatcgtagcattgtacgttcgtgtgtctactggatatcaggta

SEQ ID NO: 14504 - DNA, 260 bp, Unknown
  Description of Unknown: LeftRegion for integrase B1505 sequence
aatatatgataaatggagtaagatatatcgtttgcggtaaatttgaggattttaacattaaaaaatatagcgacagcaatcatttgaataacagattgaaaaaatatctcacgggcgatttcgcagaattgtctgttgacggcatcaatgataaaatgacagatgaatatgattgttcgactgtcggaaaggaggattaaatgcagtcgaaaaacaaaaatcaaatagggataacggctctttattgtcgtttgtcccgt

SEQ ID NO: 14505 - DNA, 260 bp, Unknown; identical to SEQ ID NO: 14486
  Description of Unknown: LeftRegion for integrase B1506 sequence

SEQ ID NO: 14506 - DNA, 260 bp, Unknown
  Description of Unknown: LeftRegion for integrase B1507 sequence
ccgtacccccgattgcagcggaatggacgatgccaccgccgtaacgctagagcaggcagaagccgctgggtatacaccttgtaagagatgctactaaaatagtaaagctccgcaggctacattttgaccagaacaaaataaaaaacgcccccggtgttggcgcaccgagagcgtttccatagatcagcttgcccacaaaagtggatacaatcgacccgacaattgtattgtaccaccttgcgggcaggattgcaaaccca

SEQ ID NO: 14507 - DNA, 260 bp, Unknown
  Description of Unknown: LeftRegion for integrase B1508 sequence
ctctccatacatttttgacttagcgcaataaaataaaaaaccgcccctgcgccaacaggaacggtctttaagggcacatccgaagatatacactatactttgatcggtaatattgtatcatcttcggacagctatcgcaagcagaacgtccgttctctgctagctgttatttttatactcatttttaggaaggtggtactatgtcagaagataaaagaatcgtagcattgtacgttcgtgtgtctactggatatcaggtg

SEQ ID NO: 14508 - DNA, 260 bp, Unknown
  Description of Unknown: LeftRegion for integrase B1509 sequence
atcaattacctggcagttggcccccttgatcccggcgtggtcgttgacaaagcttcgcataaatcaaccaaaattgtggaggccgaaaagctgcgggacaaaggcagcggagtaaaaattgtccgcctaaccgacttggtgaaaattctttttgacgaatcctgattgcacttgactgcaaaatggaaacgggagtaactatgcagaactatactgcgcccgcaccgcttcaagccccgcgggcttttggctattgccgc

SEQ ID NO: 14509 - DNA, 260 bp, Unknown
  Description of Unknown: LeftRegion for integrase B1510 sequence
cggtgcggtacagcagacagaaaaacccgtctgctgtcaaggtgattaaagaaactcttttagtcagcggaactactcgaaaaatctgattttttgcatattttgcttaaatatgagataataatggtgtaaatggcaccttgaaaacaaaatattccggccgccatatatacaccattctcagaaagcgagaggtatatatggctgaaaaaatcatgcaaggcataaagcagatttctgagttgatcggacaggctgtc

SEQ ID NO: 14510 - DNA, 260 bp, Unknown
  Description of Unknown: LeftRegion for integrase B1511 sequence
atctcagtgatagtaaaagattgatttaaaataacaaaaaactccggtgctaccaacaccggagccaatagacactatctggaagataatgccaattctcgcaaaattagtatatcatcttccagacagccacgcaagcggaacaaacgttcttagctggctgttatttttatactcaattttaaggaaggatgataattatgacagaaaagaaagaaaaaattgcagcattatacgtccgtgtatcaaccggctatcag

SEQ ID NO: 14511 - DNA, 260 bp, Unknown
  Description of Unknown: LeftRegion for integrase B1512 sequence
ggctactggctgtaaaatgctggtagccctcattttttagttgtatctagtatataaggggtgtataatagatagaaactgaaaaacagcctcataaagccctctattttatagagggtaagaagtctacacctaatatataaaagtggctgtatgaggcacacaggagctcacaggactattacaggagggtaaacaggatggcatacaggaaaataacggatataagagatactattggtatgagagcggtattttat

SEQ ID NO: 14512 - DNA, 260 bp, Unknown
  Description of Unknown: LeftRegion for integrase B1513 sequence
ctggatcattgacatggttatgatctgttgcaacaaattcaccgacagcaccggcgcggtggttggtctgaaggttgctgagtataccagacagccggatcctgatcttgcagaggcttctctggaggagcagcgggaggcagcggccgagactgccagagcttacggctataccgtaatagagtcaggcactcaggataatgccgacaagtaaaaacacggctcgaaaatatgccgcaggaggtagctcggataattcc

SEQ ID NO: 14513 - DNA, 260 bp, Unknown; identical to SEQ ID NO: 14510
  Description of Unknown: LeftRegion for integrase B1514 sequence

SEQ ID NO: 14514 - DNA, 260 bp, Unknown
  Description of Unknown: LeftRegion for integrase B1515 sequence
ccaaaggcaaacatacaggcaggccggtaatgtccaaagacgacttaccggctttgtttttaaaatatgccccgctataccatcagggacagcttaccaagaaggctctggcaaagttgtgcggggtgagttatccaaccatttttaaatatataactattgcaggaatagcttataggatataataaaggtgggaatatatgaaatatagtaaacggggtagtctgggtatgaaacgggttgtggcttattgcagagta

SEQ ID NO: 14515 - DNA, 260 bp, Unknown
  Description of Unknown: LeftRegion for integrase B1516 sequence
gtcggaaatacaaaaacttccaccattgaaaggtgaagtttcattccgacaggctctgtttacacgtaaacgattaaaagaaacaaaaggacaatccttagtgatttctaagttccattggatgttggatgggatgacagttacagatgagtgtttaaaacaatttgttcattttttaatacgactaaggagtgagagttatgaaaaagagtaatgaattacctaaatcaattatatatagtagatattcgtcaactaat

SEQ ID NO: 14516 - DNA, 260 bp, Unknown
  Description of Unknown: LeftRegion for integrase B1517 sequence
gcctgcgggcgggagattcgagtcatctccgtgtttccccggcatggcagcgaaaccgcggaggacaagctgaaagctctggcggaactggactttcggcagggaaagctgtgcgcgtaaagtgctggacatttcagaccgttcggggtattgtggtgtcgcaatgctctgaacggtttgacaaagaaaaggagggctgtatgaatcagtcaaaccaaatcaggaaaaccgccctgtactgccgtctcagccaggatgat

SEQ ID NO: 14517 - DNA, 260 bp, Unknown
  Description of Unknown: LeftRegion for integrase B1518 sequence
ggctactggctgtaaaatgctggtagccctcattttttagttgtatctagtatataaggggtgtataatagatagaaactgaaaacagcctcataaagccctctattttatcgagagtaaagaagtctacacataatatataaaagtggctgtatgaggcacacaggagctcacaggactattgcaggagggtaaacaggatggcatacaggaaaataacggatataagagatactattggtatgagagcggtattttat

SEQ ID NO: 14518 - DNA, 260 bp, Unknown
  Description of Unknown: LeftRegion for integrase B1519 sequence
ctgctttgattcagcatgcgctggatgaggtgcctttgtttccggatcgaggtctgccgcggccaatacttcaatttttaattgaccacaaattgcttttgtcttcctggttatctgtttcagatctggaggatgaattcgtggagactctccccggattgcgtgcgttaattaagaaatgtaaataaaaaaatcgcccagtgctgcgaacaccaggcgacctgttcttccttgcggaagctgtaaactctacgaataaa

SEQ ID NO: 14519 - DNA, 260 bp, Unknown
  Description of Unknown: LeftRegion for integrase B1520 sequence
cgcctgcatactatctccaccacaagcagcggcagtaaaggcttaatgggcggcgaccgtattcaggcaaccatggtatttgaaaagctgggctgataagctagtatttgcaaatgccagccatatttttatggctggcatttgcttttcacaaggggaaagagccctgccgggaagtccggcaggcagggagtaatatcatgtctgctacaattccatctcttatgcaagccccgcgggctttcggctactgccgtaaa

SEQ ID NO: 14520 - DNA, 260 bp, Unknown
  Description of Unknown: LeftRegion for integrase B1521 sequence
gcaaggtcagtgtttccgaagcgtctgaattggaagaacgcttactccgttatttttcattttgtgatgcagaaggaaagctgcgtattatccaatgcgctatgaatgaatttgacagaacagcaaaagaaaaaacagactctacggaaaagtctgctatcggctaaagttattgatctgagtgagtggagaaaaacgctatgaaaaaattccccattgacctgtccatgctgaccgaagaggaaatagaccaattccgg

SEQ ID NO: 14521 - DNA, 260 bp, Unknown
  Description of Unknown: LeftRegion for integrase B1522 sequence
agatgaaaaaacgaaaataataattcagtaaataaaaagccccggcgttaccaacaccggagccaatagacactatctggaagataatgccaattctcgcaaaattagtatatcatcttccaggcagccacgcaagcggaacgaatgttcttcgctggctgttatttttatactcatttttacaaggaggacgatattttatgccagaaaaagaaaaagttgtagcattgtatgtccgggtatcaaccgggtatcaggtg

SEQ ID NO: 14522 - DNA, 260 bp, Unknown
  Description of Unknown: LeftRegion for integrase B1523 sequence
ctccgcaatctatcgactatgaagccaggacgggtgttttcaagggatccggcaaaaagccgtatgaggtcaccgaaaccacctgcacctgccgagattattttgtccgcaagctgccgtgcaagcatatctaccggctgcgcatggagcttgccaaggctgacggcgaatagttttcaccagaaaaggagcatgacggcatgagaaaaaagtccaacctcaatgcggctactcgtgccgtcatctatgccaggtattcc

SEQ ID NO: 14523 - DNA, 189 bp, Unknown
  Description of Unknown: LeftRegion for integrase B1524 sequence
acaaggttacttcggcaagtgtgcaggatatccatcttctggtgaaaaataccaatattaacattacttacttcgtagttccaaatattttttgtatctttgcacccagaatttttaaatgtattaattatgaaggtaataggttatactcgtgtttcaacgaacaatcaagacttgaaacgacaaaaa

SEQ ID NO: 14524 - DNA, 260 bp, Unknown
  Description of Unknown: LeftRegion for integrase B1525 sequence
ggatagcaaatggtttataaattggacgaaagaatatcagggtattaatttaaattaagttatatatgtaaattgcaaataggaaaatattatcactagtatataaggataatattttccagataaaaatagtcaaattaaatatataacacaagtatatattataaatttgattgattaaaagtattggaggaatattaatgggatttaatgatttaattagtgctactgaggatagaaataatattaaaaatatagct

SEQ ID NO: 14525 - DNA, 260 bp, Unknown; identical to SEQ ID NO: 14186
  Description of Unknown: LeftRegion for integrase B1526 sequence

SEQ ID NO: 14526 - DNA, 260 bp, Unknown
  Description of Unknown: LeftRegion for integrase B1527 sequence
gttgtgccgcctccgtcgttgtccttgccgtcgcccggcacagagccctcgtcggtagttttgccgtaggtgtcatactcctctatgcggcatttcttgcgcagttcagcgttgctccaagtcttaattaacagaatatacttcatagttccaaatattttttgtatctttgcacccagaaattttaaaatgtattgattatgaaggtaataggttatactcgtgtttcgacgaacaatcaagacttgaaacgacaaaaa

SEQ ID NO: 14527 - DNA, 260 bp, Unknown
  Description of Unknown: LeftRegion for integrase B1528 sequence
tgcaacaacaagaaatattattacaataaaataaaaaaccgcccctgcgccaacaggaacggtctttaaggcacatccgaagatatacactatactttggtcggtaatattgtatcatctttggacagctatcacaagcggaacgaatgttcttcgctggctgttatttttatactcatttttaaggaggatgatattttatgccagaaaaagagaaaatcgtagcattgtatgtccgggtatcaaccgggtatcaggtg

SEQ ID NO: 14528 - DNA, 260 bp, Unknown
  Description of Unknown: LeftRegion for integrase B1529 sequence
gtggtgctagagccgccgctaggagtgctgccgccgttgtcaccgccgtcaccttcctcggtcacttcactgccaagggcagtaatcttacacatcttgcgaagctcggtgttgctccggttcttaattaatagaatatacttcatagttccaaatattttttgtatctttgcacccagaaattttaaaatgtattgattatgaaggtaataggttatactcgtgtttcgacgaacaatcaagacttgaaacgacaaaaa

SEQ ID NO: 14529 - DNA, 260 bp, Unknown
  Description of Unknown: LeftRegion for integrase B1530 sequence
aggaaaaatgccgtccttcgtccatagactacgatgcgggtattgccatttttgagggttcaggtaaaaagccttacgaaaccacggtaaattcctgcacctgcagagatttctttgtccgccgtttgccgtgcaagcatatctaccggcttcggatggagcttgaaaacagagaagctcgttaaaaatgggggcgttatatggctcgatcaaagaaaactgaatgcttgccacttgagcggatcggtgtgatctatgcc

SEQ ID NO: 14530 - DNA, 260 bp, Unknown
  Description of Unknown: LeftRegion for integrase B1531 sequence
gggctactagctgtaaaatgctggtagccctcattttttagttgtatctagtatataaggggtgtataatagataggaactgaaaacagcctcataaagccctctattttatcgagagtaaagaagtctacacctaattataaaagtggctgtatgaggcacacaggagctcacaggactattacaggagggtaaacaggatggcatacaggaaaataacagatataaaagatactattggtatgagagcggtattttat

SEQ ID NO: 14531 - DNA, 260 bp, Unknown
  Description of Unknown: LeftRegion for integrase B1532 sequence
cgcctgcacacgatctccaccacaagcagcggtagcaaaggcataatgggcggcgaccgtattcaggcaaccatggtatttgaaaagctgggctgataaactagtatttgcaaatgccagccatatttttatggctggcatttgcttttcacaaggggaaagagccctgccgggaaatccggcaggcagggagtaatatcatgtctgctacaattccatctcttatgcaagccccgcgggctttcggctactgccgtaaa

SEQ ID NO: 14532 - DNA, 260 bp, Unknown
  Description of Unknown: LeftRegion for integrase B1533 sequence
ggaatgttttaatttatacatttcaaaatattccagttgataataaaaagccccggtgctaccaacaccgagaccttttgataaatactatgcagtgctgagcacgtacaataattcatcggcaatgatattgtaccataaattttcagcaccgtataggtgtattttttatactcatttttacggaaaggataatatttatggacgaaaacaaaaaaatagtagcattgtatgttcgtgtaagcaccggctatcaggtc

SEQ ID NO: 14533 - DNA, 260 bp, Unknown
  Description of Unknown: LeftRegion for integrase B1534 sequence
aaataaaaaccgctcctgcgccaacaggaacggccgagcgatggaaacatacgccaatatgtttcaaaataacactccgaagaatgccatttattaccaataaatattgtatcatcttcggagcagccacgcaagcggaacaagcgttcttagttggctgtattttttatacccatttttagagaaaggatgatattattatgccagaaaaagaaaaagttgtagcattgtatgtccgggtatcaaccgggtatcaggtg

SEQ ID NO: 14534 - DNA, 260 bp, Unknown
  Description of Unknown: LeftRegion for integrase B1535 sequence
acaggtcttttgattgtgtgcagcgactcaatgcaaaagaaaatcgacagagcggatgccctgaatattccaatcgtttcggaacagcaatggtttgaactcatgccggaacttgaggccgctggaatgtggaacggaaagccaatttcattcgcggatgacgatggtatctaccgttttgatgtgggtggtgatggataatggcaaaaaagaagaagcccgccgggggcattgccgtcatctatgcccgctactcgtcc

SEQ ID NO: 14535 - DNA, 260 bp, Unknown
  Description of Unknown: LeftRegion for integrase B1536 sequence
ataattaataaaaaaagtcccctgcttccaacagaggacctaggggaaatctaatgcttccaacaaaagatttccaaagtattataaccttttcgataaaaaagtgtaatataatacccaccgcaatggttattatatcacactttttaacaccgttcaaggtgttatttttgtaccaaaaattaaggagtgagataataatgacaaaattaaaaaaagcagccttgtatatcagagtttctacaaggtaccaaattgat

SEQ ID NO: 14536 - DNA, 260 bp, Unknown
  Description of Unknown: LeftRegion for integrase B1537 sequence
actacgcagatatcatagaagaagcacaataaaataaaaagccccggtgctatcaacaccggagccaatagacactatctggaagataatgccaattctcgcaaaattagtataccatcttccaggcagtcacgcaagcggaacgaatgttcttcggtggctgttatttttatactcatttttaaggaggacgatattttatgtcagaaaaagagaaaatcgtagcattgtatgtccgtgtatcaaccgggtatcaggtg

SEQ ID NO: 14537 - DNA, 260 bp, Unknown
  Description of Unknown: LeftRegion for integrase B1538 sequence
gtaccgccgccttgttcagtgccgcctgaggtaccaccagaggtgccaccctcgtcggtgccggtatagccgccgtactcctgaatcttgcacttcttgcgcagctcagagttgctccagcttttaattaacagaatatacttcatagttccaaatattttttgtatctttgcacccagaaattttaaaatgtattgattatgaaggtaataggttatactcgtgtttcgacgaacaatcaagacttgaaacgacaaaaa

SEQ ID NO: 14538 - DNA, 260 bp, Unknown; identical to SEQ ID NO: 14535
  Description of Unknown: LeftRegion for integrase B1539 sequence

SEQ ID NO: 14539 - DNA, 260 bp, Unknown; identical to SEQ ID NO: 13548
  Description of Unknown: LeftRegion for integrase B1540 sequence

SEQ ID NO: 14540 - DNA, 260 bp, Unknown
  Description of Unknown: LeftRegion for integrase B1541 sequence
ggctactggctgtaaaatgctggtagccctcattttttagttgtatctagtatataaggggtgtataatagatagaaactgaaaacagcctcataaagccctctgttttatcgagggtaaagaagtctacacctaatatataaaagtggctatatgaggcacacaggagctcacaggactattacaggagggtaaacaggatggcatacaggaaaataacggatataaaagatactataggtatgagagcggtattttat

SEQ ID NO: 14541 - DNA, 260 bp, Unknown
  Description of Unknown: LeftRegion for integrase B1542 sequence
ggaatgttttaatttatacatttcaaaatattccagttgataataaaaagccccggtgctaccaacaccgagaccttttgataaatactatgcagtgctgagcacgtacaataattcatcggcaatgatattgtaccataaattttcagcactgtgtaggtgtattttttatactcatttttacagaaagagtgatatttatggatgaagataggaagattgtagcattatacgtccgtgtaagcactggatatcaggtc

SEQ ID NO: 14542 - DNA, 260 bp, Unknown
  Description of Unknown: LeftRegion for integrase B1543 sequence
cgatattgcgtttaaccgccgtcatctgtacgaaagcgataaggttaaaatcggcaaaaagacatttttagtcacatcggtatttcctatcggaaccgagaacggtgacaacccaagtgccgatgaaaaaattaaaaatttacttgaacgaaaaacgggataaatattttactggacattcaaaccgagtaggagtattgttgacttgcaatcctattcggtttgattcaacagagcctgaacggctcggaaaggatgaa

SEQ ID NO: 14543 - DNA, 260 bp, Unknown
  Description of Unknown: LeftRegion for integrase B1544 sequence
gtatatatcgcattgcacaaatacacgtaaaataaaaaccgcccctgcgccaacaggaacggtctttaaggcatatccgaagatatacactatactttggtcggtaatattgtatcatcttcggacagctatcgcaagcagaacgaatgttcttcgctggctgttatttttatactcatttttaaggaggatgatattttatgccagaaaaagagaaaatcgtagcattgtatgtccgggtatcaaccgggtatcaggtg

SEQ ID NO: 14544 - DNA, 260 bp, Unknown
  Description of Unknown: LeftRegion for integrase B1545 sequence
cctgtaaaataaaaaccgcccctacgccaataggaacggtttagttgaaacatacgccaatatgtttcaaaataacactccgaagaatgccatttattaccaataaatattgtatcatcttcggagcagccacgcaagcggaacaagcgttcttagttggctgttatttttatactcatttttaaggaggatgatattttatgccagaaaaaaagaaaatcgtagcattgtatgtccgggtatcaaccgggtatcaggtg

SEQ ID NO: 14545 - DNA, 260 bp, Unknown
  Description of Unknown: LeftRegion for integrase B1546 sequence
acaggtcttttgattgtgtgcagcgactcaatgcaaaagaaaatcgacagagcggatgccctgaatattccaatcgtttcggagcagcaatggtttgaactcatgccggaacttgaggccgctggaatgtggaacggaaagccaatttcattcgcagatgacgatggtatctaccgttttgatgtgggtggtgatggataatggcaaaaaagaagaagcccgccgggggcattgccgtcatctatgcccgctactcgtcc

SEQ ID NO: 14546 - DNA, 260 bp, Unknown; identical to SEQ ID NO: 13548
  Description of Unknown: LeftRegion for integrase B1547 sequence

SEQ ID NO: 14547 - DNA, 260 bp, Unknown
  Description of Unknown: LeftRegion for integrase B1548 sequence
ggctactggctgtaaaatgctggtagccctcattttttagttgtatctagtatataaggggtgtataatagatatgaactgaaaacagcctcataaagccctctattttatcgagggtaaagaagtctacacctaatatataaaagtggctgtatgaggcacacaggagctcacaggactattacaggagggtaaacaggatggcatacaggaaaataacggatataaaagatactattggtatgagagcggtattttat

SEQ ID NO: 14548 - DNA, 260 bp, Unknown
  Description of Unknown: LeftRegion for integrase B1549 sequence
ggctactggctgtaaaatgctggtagccctcattttttagttgtatctagtatataaggggtgtataatagataggaactgaaaatagcctcataaagccctatattttatcgagggtaaagaagtctacacctaatatataaaagtggttgtatgaggcacacaggagctcacaggactattacaggagggtaaacaggatggcatataggaaaataacggatataagagatactattggtatgagagcggtattttat

SEQ ID NO: 14549 - DNA, 260 bp, Unknown
  Description of Unknown: LeftRegion for integrase B1550 sequence
atctattaaatcattcgcaatacgaacgctgtattgatgagcttgaaaaacaatatcgtagaaaaagatgcagccaagcctaaacagcttggctctttacatatctaaatgtacaatcttctaatttgcacattcgacacaaaaacccctttttactatacttaaaatacggttgtaacaccgagaaaggagaaactacaatgaacaaatatgaacgcctaaatcaagaaagaaagttgattgacacgaaaaagcgagta

SEQ ID NO: 14550 - DNA, 260 bp, Unknown; identical to SEQ ID NO: 14533
  Description of Unknown: LeftRegion for integrase B1551 sequence

SEQ ID NO: 14551 - DNA, 260 bp, Unknown
  Description of Unknown: LeftRegion for integrase B1552 sequence
catcacggcaatcctaactaccagaaggaggaatttccatgaccaacaactttcagtgtgcacagatctaccagattcttgcgctcaacgacgaaatgctgaagagcggctgcatcacccgcgacgagcacgactttgtccgccatgtgcagacggacaagctgacccggctgcacagcacaccgtaaggaggccgcctgatggacgtccgcagactggacgaaatgcaggcgcagggccgcagcatcttcgataccgag

SEQ ID NO: 14552 - DNA, 260 bp, Unknown
  Description of Unknown: LeftRegion for integrase B1553 sequence
ggctactggctgtaaaatgctggtagccctcattttttagttgtatctagtatataaggggtgtataatagatagaaactgaaaacagcctcataaagccctctattttatcgagagtaaagaagtctacacctaatatataaaagtggctgtatgaggcacacaggagctcacaggactattacaggagggtaaacaggatggcatacaggaaaataacggatataagagatactattggtatgagagcggtattttat

SEQ ID NO: 14553 - DNA, 260 bp, Unknown
  Description of Unknown: LeftRegion for integrase B1554 sequence
gtaaaaggctggtaccctattttttttgttgctatttttatataggagctgtataatagatacatactgaaattaacctcatagagccgcttatttctcataccctaaaaatatacctctgtgcggttaaaatcgctctgtgaggctcacaggagctcacaggggcattataagcaagaacagtaaaggagaaatgcaggatggcatacaggaaagtaagatcattgttagatacaatcggattgagggcggtattttat

SEQ ID NO: 14554 - DNA, 260 bp, Unknown
  Description of Unknown: LeftRegion for integrase B1555 sequence
gctactggctgtaaaatgctggtagccctcattttttagttgtatctagtatataaggggtgtataatagatagaaactgaaaaacagcctcataaagccctatattttatcgagggcaaagaagtctacacctaatatataaaagtggctgtatgaggcacacaggagctcacaggactattacaggagggtaaacaggatggcatacaggaaaataacggatataaaagatactattggtatgagagcggtattttat

SEQ ID NO: 14555 - DNA, 260 bp, Unknown; identical to SEQ ID NO: 13291
  Description of Unknown: LeftRegion for integrase B1556 sequence

SEQ ID NO: 14556 - DNA, 260 bp, Unknown
  Description of Unknown: LeftRegion for integrase B1557 sequence
gcgcccgcgtcccccggctctattgatattgaggcagaggtcgcctattaccgttcccagctggaggaacagaaaaaagcggcggacggatcatctgcttccgctgggcacagctccagcggcacaaaaatggcatgacaaataaaaagagccgcccgtaaaaaggcggctcttgaaataatcacaaatggagggattttatggcagtgtttgctcaggctgtgcggccggactttaacaacgatgtggccgacgtcgtg

SEQ ID NO: 14557 - DNA, 260 bp, Unknown; identical to SEQ ID NO: 13308
  Description of Unknown: LeftRegion for integrase B1558 sequence

SEQ ID NO: 14558 - DNA, 260 bp, Unknown
  Description of Unknown: LeftRegion for integrase B1559 sequence
gcataatgggcggcgaccgtattcaggcaaccatggtatttgaaaagctgggctgataaactagtatttgcaaatgccagccatatttttatggctggcatttgcttttcacaaggggaaagagcttgaccgccgcaaagaacggctgcatatggcgtaaaaagccctgccgggaaatccggcaggcagggagtaatatcatgtctgctacaattccatctcttatgcaagccccgcgggctttcggctactgccgtaaa

SEQ ID NO: 14559 - DNA, 260 bp, Unknown
  Description of Unknown: LeftRegion for integrase B1560 sequence
tgcagcaacaagaaatatcattacaataaaataaaaaaccgcccctgcgccaacaggaacggtctttaaggtacatccgaagatatacactatactttggtcggtaatattgtatcatcttcggacagctatcgcaagcagaacactcgttctttgctggctgttatttttatactcatttttaaggaggatgatattttatgtcaggaaaagataaaatcgtagcattatacgtccgtgtatcaaccgggtatcaggtg

SEQ ID NO: 14560 - DNA, 260 bp, Unknown; identical to SEQ ID NO: 13821
  Description of Unknown: LeftRegion for integrase B1561 sequence

SEQ ID NO: 14561 - DNA, 260 bp, Unknown
  Description of Unknown: LeftRegion for integrase B1562 sequence
gcaccagattctggcagctgtggactaccatggccgcgccagtgaccagtgaataacttgatgccatattatactacggattatcagaatccgcaatcggtttcgttttgacgcacgcatcggcgtgcgcatggccgcccgctctcctgctacaatgagcatagatacatctgccggtctccgagaggaggcagagctctatgccaagagcacagaaagcggcaatatactgccgcgtgtccacgctgcaccaagtggac

SEQ ID NO: 14562 - DNA, 260 bp, Unknown
  Description of Unknown: LeftRegion for integrase B1563 sequence
aagacggatggattgtaaaaacagaattataaagttgcgtgaaagcacaggactgaatcggaaagatttttgcaagctcgtccatattccttaccggactatgactgaatgggaattggacaaccgccatgcaccggattatgtgctgtggcttttggagtattatatccgcaacgagggacttatggtaaaaggaaggaatgagggaggtggagattctgaaaaagaaacaacttaaatgctatctttatacaagagtg

SEQ ID NO: 14563 - DNA, 260 bp, Unknown
  Description of Unknown: LeftRegion for integrase B1564 sequence
gtgaattaggagggatgtcatgtgatcgataagatagtcatgctgattataaacaagagattgtatgatgaaggtataataagtcgagaagtatatacaaaaatcatcacgcaaataaataaatgttaaaaagcattgagcgaaatcattgtatggagtataatataaatggtttcgctcctttttgaaggagaatcgaaatgaacatataccatacaagagaaaggctaagaacccgttctatttatgatttgaattta

SEQ ID NO: 14564 - DNA, 260 bp, Unknown
  Description of Unknown: LeftRegion for integrase B1565 sequence
atcccgaggctatcggcgtatttaccaccaaaggaaagcagctcggaaacgtaaatgcagagttagcaagcgatttgatacataaatatcctaacaacaaaatgaaagttacaatttcagatataacaggcggcggagacaagaattacggttgtaatcttcacgtcgttatctacacggcataattaaggaggcggacaatggcaagagccgcaaagcaagacaataattcggaaataattgacggcgtgatatatgcc

SEQ ID NO: 14565 - DNA, 260 bp, Unknown
  Description of Unknown: LeftRegion for integrase B1566 sequence
gctgacacattctcagcgggaacgctgtttggtcgagcttgaaaagcaatatagtagggagcaaaaaagcagacgccgagcataacgcttggcgtttttacatagccgagtaaaaaaacaaatttgcacattcgacaccgcactctcttttttctataattaaatacagtaacaatgtttactgagaaaggagcttcgctatgataaatagatatgaacgcctaaaccaagagctgaagatggttgaaacgaaaagaaag

SEQ ID NO: 14566 - DNA, 260 bp, Unknown
  Description of Unknown: LeftRegion for integrase B1567 sequence
tcaaaatgaaaattggtggaacggtatatgagatttcgactcattttgatcccgaaggtagccagtgtgtattgcaacaattccgtgacctgatactttcagaggacttgcttgaaaatcgcataattgcagaaaatgcaaaggcacggtaagataattatgcctttgcaatgcccggttgtcggaaaggagatatgacaatggcaacagcaaactatatcaaagggcagaacgaaaccaaaattacggctctctactgc

SEQ ID NO: 14567 - DNA, 260 bp, Unknown
  Description of Unknown: LeftRegion for integrase B1568 sequence
aagacggatggattgtaaaaacagaattattaagttgcgtgaaagcacaggactgaaccggaaagatttttgcaagctcgtccatattccttaccggactatgaccgagtgggaattggacaaccgccatgcaccggattatgtgctgtggcttttggagtattatatccgcaacgagggacttatggtaaaaggaaggaatgagggaggtggagattctgaaaaagaaacaacttaaatgctatctttatacaagagtg

SEQ ID NO: 14568 - DNA, 260 bp, Unknown
  Description of Unknown: LeftRegion for integrase B1569 sequence
gctgacacattctcagcgggaacgctgtttggtcgagcttgaaaagcaatatagtagggagcaaaaaagcagacgccgagcataacgcttggcgtttttacatagccgagtaaaaaaacaaatttgcacattcgacaccgcactctcttttttctataattaaatacagtaacaaagtttactgagaaaggagcttcgctatgataaatagatatgaacgcctaaaccaagagctgaagatggttgaaacgaaaagaaag

SEQ ID NO: 14569 - DNA, 260 bp, Unknown
  Description of Unknown: LeftRegion for integrase B1570 sequence
gaattcaaaataactaaaactaaagaaattaataatattaacttataaaaaaaggataatgcgtattgttttgcggacaccacacattatccagagcgtaaacactattgaaagtgattacttaattattatatattaaagtaccttcattttcaatagtaaattaaaaatttattaaagaaaatggaggtttttttactatggaaaaaaagcaaaaatcagctttatatgttagggtgtctactacccaccaaattgat

SEQ ID NO: 14570 - DNA, 260 bp, Unknown
  Description of Unknown: LeftRegion for integrase B1571 sequence
gcaaggtcagtgtttccgaagcgtctgaattggaagaacgcttactccgttatttttcattttgtgatgcagaaggaaagctgcgtattatccaatgcgctatgaatgaatttgacagaacagcaaaagaaaaaacagactctacggaaaagtctgctatcggataaagttattgacctgagtgagtggagaaagacattatgaaaagcatgaaatttccgattgacctctctatgctgactgaagaagaaatagaccaa

SEQ ID NO: 14571 - DNA, 260 bp, Unknown; identical to SEQ ID NO: 13129
  Description of Unknown: LeftRegion for integrase B1572 sequence

SEQ ID NO: 14572 - DNA, 260 bp, Unknown
  Description of Unknown: LeftRegion for integrase B1573 sequence
ttcaaacatactagccctcctcacgcgctttactttttataattttatgctatctcactttacttattttgtcaagtgcgaatgcattttttctataaaaagtaaagtgatggtgcacgcatcggcgtgcgcatggccgcccgcggctctgctacaatgagcatagatacatctgccggtctccgagaggaggcagctctatgccaagagcacagaaggcggcaatctactgccgcgtgtccacgcttcaccaggtggac

SEQ ID NO: 14573 - DNA, 260 bp, Unknown; identical to SEQ ID NO: 14569
  Description of Unknown: LeftRegion for integrase B1574 sequence

SEQ ID NO: 14574 - DNA, 260 bp, Unknown
  Description of Unknown: LeftRegion for integrase B1575 sequence
gcgccggattctggcagctgtggactaccatggccgcgccagtgaccaggagtaacttgatgctatattatactacggattctcagaatccgcaatcggtttcgcttttgacgcacgcatcggcgtgcgcatggccgcccgcgctcctgctacaatgagcatagatacatctgccaatctccgagaggaggcagagctctatgccaagagcacagaaagcggcaatctactgccgcgtgtccacgcttcaccaggtggac

SEQ ID NO: 14575 - DNA, 260 bp, Unknown; identical to SEQ ID NO: 14569
  Description of Unknown: LeftRegion for integrase B1576 sequence

SEQ ID NO: 14576 - DNA, 260 bp, Unknown
  Description of Unknown: LeftRegion for integrase B1577 sequence
atccctacaagcgacgaaacggttttggtggagagtttatccgcccaactgcttatcggcttgctacgcgcggaaaatgggcatttcctgctgtttcagagcgtgtccgctccgccgctcgacatttcggacgacaaaaagtataaaattgtggctgaattagtctacacaatcagaaaatacggaaggagataaccaaaatggaagttataaagtatgttgttgcttatatgagatattcttcggaaggtcaaagagac

SEQ ID NO: 14577 - DNA, 260 bp, Unknown
  Description of Unknown: LeftRegion for integrase B1578 sequence
gacacacctcctgaaacagatactcttatggttgtcattgttgatgacgaagaaggatttgttaagaaaatcagcattgatgaagatactgtgacccttcgctcttttaacccacactatcctccccgtgtttttggcggtgttgaaattggacgattgcgctttgtcggtagagtcatggagttaaaaaggagatttgcatgaaaaaatttccaatcgacctctcctgtctgacagaggaagaaatctctcaatttcag

SEQ ID NO: 14578 - DNA, 260 bp, Unknown
  Description of Unknown: LeftRegion for integrase B1579 sequence
tcaaaatgaaaattggtggaacggtatatgagatttcgactcattttgatcccgaaggtagccggtgtgtattgcagcaattctgtgacctgatactttcagaggacttgcttgaaaatcgcataattgcagaaagcgcagaggcacggtaagataatcgtgcctttgcaatgcccggttgtcggaaaggagatatgacaatggcaacagcaaactatattaaagggcaaaacgaagccaaaattacggctctttactgc

SEQ ID NO: 14579 - DNA, 260 bp, Unknown; identical to SEQ ID NO: 13002
  Description of Unknown: LeftRegion for integrase B1580 sequence

SEQ ID NO: 14580 - DNA, 260 bp, Unknown; identical to SEQ ID NO: 13476
  Description of Unknown: LeftRegion for integrase B1581 sequence

SEQ ID NO: 14581 - DNA, 260 bp, Unknown
  Description of Unknown: LeftRegion for integrase B1582 sequence
agaacgattcgtatgaatttaatatcctcacgcccttccgatgttctattttcattataccatctatccaggcgatcatccatagatgaaaccattttcaaaaagcagaaacgcacgcatcggcgtgcgcatggccgcccgcgctcctgctacaatgagcatagatacatctgccagtctccgagaggaggcagagctctatgccaagagcacagaaagcggcaatctactgccgcgtgtccacgctgcatcaggtggac

SEQ ID NO: 14582 - DNA, 260 bp, Unknown; identical to SEQ ID NO: 13889
  Description of Unknown: LeftRegion for integrase B1583 sequence

SEQ ID NO: 14583 - DNA, 260 bp, Unknown
  Description of Unknown: LeftRegion for integrase B1584 sequence
cccgaggctatcggcgtatttaccaccaaaggaaagcagctcggaaacgtaaatgcagagttagcaagcgatttgatacataaatatcctaacaacaaaatgaaagttacaatttcagatataacaggcggcggagacaagaattacggttgtaatcttcacgtcgttatctacaaggcataattaaggaggcgggcaaaatggcaagagccgcaaagcaagacagcaattcggaaataattgacggcgtgatatatgcc

SEQ ID NO: 14584 - DNA, 260 bp, Unknown
  Description of Unknown: LeftRegion for integrase B1585 sequence
ggaatgttttaatttatacatttcaaaatattccagttgataataaaaagccccggtgctaccaacaccgagaccttttgataaatactatgcagtgctgagcacgtacaataattcatcggcaatgatattgtaccataaattttcagcaccgtataggtgtattttttatactcatttttacgggaaggacgatatttatggatgagaaaatagtagcactatatgtccgtgtaagtactggatatcaggtcgataag

SEQ ID NO: 14585 - DNA, 260 bp, Unknown
  Description of Unknown: LeftRegion for integrase B1586 sequence
aatgtctggatgatctaatgcctacgcaaacaagttaataatataaaaagccccggtgctaccaacaccgagaccttttgataaatactatacagtgctgagcacgtacaataattcatcggcaatgatattgtaccataaattttcagcaccgtataggtgtattttttatactcatttttacggaaaggatgatatttatggacgagaaaatagtagcattgtatgtccgcgtaagtactggttatcaggtcgacaag

SEQ ID NO: 14586 - DNA, 260 bp, Unknown
  Description of Unknown: LeftRegion for integrase B1587 sequence
atatggattgtgcgggatgtgctctctgctgaccattcttctgatgacgtacatcattctggactatcagcatccgaaaatcggcttgattcgtgccgacggtgttgcaccgattgtttatatctcggcgtgtggagttgcattcgttatcctgtttatcggtcgcaccatggtaaatcggcggttacaaaggaaagaaaatggaaggaaagccggacatgaacataattcccattgacctttcagcactgaccgacgca

SEQ ID NO: 14587 - DNA, 260 bp, Unknown
  Description of Unknown: LeftRegion for integrase B1588 sequence
gcctgcgggcgggagattcgagtcatctccgtgtttccccggcatggcagcgaaaccgcggaggacaagctgaaagctctggcggaactggactttcagcatcggaagctgtgtgcgtaaagtgctggacatttcaggccgttcggggtagtgtggtgtcgcaatgctctgaacggtttggcaaagaaaaggagggctgtatgaatcagtcaaaccaaatcaggaaaaccgctctttactgccgtctcagccaggacgat

SEQ ID NO: 14588 - DNA, 260 bp, Unknown
  Description of Unknown: LeftRegion for integrase B1589 sequence
cgcagaaattgagagcggctgtattgccgtggtcgtgatagacggtacagaagggtttttaaaacaggtcgagttcggtgaaaattccacctcgcttcactccttcaacccttactatcctgatatggagttcgtaggtgccgaccagaaacgcttgcactttatcggtcgtgtccgggaaatgaagcggaggttctgatatgcgtaaaaagtttaatatcgacctctctatgctaaccccggaagaacagcagcagttt

SEQ ID NO: 14589 - DNA, 260 bp, Unknown
  Description of Unknown: LeftRegion for integrase B1590 sequence
aaggagaaaagaacgctgtccgtcggactgtcagaaggatgtccgtcggaaattggtatattgtaatatttagttttatagttatttttgcatttccgtttgtttgattatactttaatatatttgtccgtcggactgtcagaaggacatccgcaggacagtcagaaggatgtcccacggacagcatcggagggaatagcatggagtcgagtaaggcaaagaaagcagtcctttacgtcagagtatcaacgcagcaccaa

SEQ ID NO: 14590 - DNA, 260 bp, Unknown
  Description of Unknown: LeftRegion for integrase B1591 sequence
cgcagaaattgagagcggctgtattgccgtggtcgtggtagacggtacagaagggtttttaaaacaggtcgagttcggtgagaactccacctcgcttcactcgttcaatccgtattaccccgacatggagtttgtagatgccgaccagaaacgtttgcactttatcggccgcgtccgggaaatgaagcggaggttttgatatgcgcaaaaagtttaatatcgacctctctatgctaaccccggaagaacagcagcagttt

SEQ ID NO: 14591 - DNA, 260 bp, Unknown
  Description of Unknown: LeftRegion for integrase B1592 sequence
aaatgaaaagttaattcataatacagaactgaaaaacgaacagttgaaagatgaaaccgaaatattcaattcttttatcaatgttatggtgcagatagttgaaaaatacggaaagactgttttgcaggaattagattgtgctgcgtaggttacgcagccttacatatcacatttccctataaatttatggaggtggtacgatgaacagagaaggaaagaaatgtgtcttatatccgagagtaagtactgaaatgcaggtg

SEQ ID NO: 14592 - DNA, 260 bp, Unknown
  Description of Unknown: LeftRegion for integrase B1593 sequence
aaggagaaaagaacgctgtccgtcggactgtcagaaggatgtccgtcggaaattggtatattgtaatatttagttttatagttatttttgcatttccgtttgtttgattatactttaatatatttgtccgtcggattgtcagaaggacatccgcaggacagtcagaaggatgtcccacggacagcatcggagggaatagcatggagtcgagtaaggcaaagaaagcagtcctttacgtcagagtatcaacgcagcaccaa

SEQ ID NO: 14593 - DNA, 260 bp, Unknown; identical to SEQ ID NO: 13138
  Description of Unknown: LeftRegion for integrase B1594 sequence

SEQ ID NO: 14594 - DNA, 260 bp, Unknown; identical to SEQ ID NO: 14585
  Description of Unknown: LeftRegion for integrase B1595 sequence

SEQ ID NO: 14595 - DNA, 260 bp, Unknown
  Description of Unknown: LeftRegion for integrase B1596 sequence
ataatgatatgctaaattgtagcatggaattatcactattaaataatttgtttagagaaaacttaataacagaagcagaatatcaagaaataaaaagaaaaatcttaaaagactacaaacttttgtaatatcaatttactttttgttgaaaaaatgatataaaatatttaagttttatctctaggcggaatggaggaaagatggaaattcaagtcatagagaaaacaaacggaagaataaatagagtaacaggcactaca

SEQ ID NO: 14596 - DNA, 260 bp, Unknown
  Description of Unknown: LeftRegion for integrase B1597 sequence
gatacacctcccgaaacagatactcttatggttgtcattgttgatgacgaagaaggatttgttaagaaaatcagtattgatgaagatactgtgacccttcgttcttttaacccacactatcctccccgtgtttttggcggtgttgaaattggacgattgcgctttgttggtagagtcatggagctaaaaaggagatttgcatgaaaaaatttccaatcgacctctcctgtctgacagaggaagaaatctctcaatttcaa

SEQ ID NO: 14597 - DNA, 260 bp, Unknown
  Description of Unknown: LeftRegion for integrase B1598 sequence
ggaaagcaccggcatgaaccgcaaggaattttgtaaatattttcggattccctatcggactgtgacagagtgggaactggataaccgccatgcgccggaatatgtactccgtttgttggagtattacattcagaatgaaggtctggcgaagaagaaagtaacggatgaatgttcagagctggaagaaaggagcggcctgcatgaagaaaactaaaacaaaatgttatctctacacacgggtatctacatccatgcaggtg

SEQ ID NO: 14598 - DNA, 260 bp, Unknown
  Description of Unknown: LeftRegion for integrase B1599 sequence
cgtgaaaaaagttcatcttaccgagtctcaagaaaaacaatttgaacacatgcttatggtctctattttgaaaacattaaaatcagaagggcttcttactgatgtacaattgatgaacgccatagcaaaaatagaaagcgaaaattcttgcccgccagataagaacgcagtataatacagaaaaaagggaggaattttaaatgaaaagcgcttgtccttctcatccagaaagttatgtagaaaacccaagcttatccaaa

SEQ ID NO: 14599 - DNA, 260 bp, Unknown
  Description of Unknown: LeftRegion for integrase B1600 sequence
catcttctccgcagaaaagacagggcgttttggaacgagttgaacctaaacgtgcaactctacttatataaatggctcccagataggatatttcggaaatgaatttaactttttgaccgttgaaagtgtggaaagatttattttccccagaacttgcaacggcttgcaacaaacttaaaactacttgaaaggtggtatttatgcctcgcaaaaagaaactgcaagaggtgggcggcctgcggctggtggcgtactatcgc

SEQ ID NO: 14600 - DNA, 260 bp, Unknown; identical to SEQ ID NO: 13530
  Description of Unknown: LeftRegion for integrase B1601 sequence

SEQ ID NO: 14601 - DNA, 260 bp, Unknown
  Description of Unknown: LeftRegion for integrase B1602 sequence
aaggaacaaagaacgctgtccgtcggactgtcagaaggatgtccgtcggaaattagtatattgtaatatttagttttataggtatttttgtatttccgtttgtttgattatattttaatatatttgtccgtcggactgtcagaaggacatccgcaggacagtcagaaggatgtcccacggacagcatcggagggaatagcatggagccgagtaaggcaaagaaagaagttctttacgtcagagtgtcaacgcagcaccaa

SEQ ID NO: 14602 - DNA, 260 bp, Unknown; identical to SEQ ID NO: 14046
  Description of Unknown: LeftRegion for integrase B1603 sequence

SEQ ID NO: 14603 - DNA, 260 bp, Unknown; identical to SEQ ID NO: 14589
  Description of Unknown: LeftRegion for integrase B1604 sequence

SEQ ID NO: 14604 - DNA, 260 bp, Unknown; identical to SEQ ID NO: 13535
  Description of Unknown: LeftRegion for integrase B1605 sequence

SEQ ID NO: 14605 - DNA, 260 bp, Unknown
  Description of Unknown: LeftRegion for integrase B1606 sequence
cggaaaatgaatatattcgggcaaagaataggattatgagttcatatcacattctggagtcggaatatttcaagaccggtacaggaaaaagggttgcttagacaaccgcttgtatacgttcgttcatattttcatttttaagtaagcttggtgctaagaggaacacgaagcaaagatttcaatttaaggaggattttattatggcagaagtagaagtaattaaggcagtggatgggccaattcttcgtaagagggattat

SEQ ID NO: 14606 - DNA, 260 bp, Unknown
  Description of Unknown: LeftRegion for integrase B1607 sequence
aaggagaaaagaacgctgtccgtcggactgtcagaaggatgtccgtcggaaattggtatattgtaatatttagttttatagttatttttgcatttccgtttgtttgattatactttaatatatttgtccgtcggactgtcagaaggacatccgcaggacagtcagaaggatgtccaacggacagcatcggagggaatagcatggagtcgagtaaggcaaagaaagcagtcctttacgtcagagtatcaacgcagcaccaa

SEQ ID NO: 14607 - DNA, 260 bp, Unknown
  Description of Unknown: LeftRegion for integrase B1608 sequence
atgacctcagaacagaacattaaattcagagcattaaaattgattgaacaattatatattgataagcagatagacgaaaaaatatatcgtaaagccatagaagaaaataaaaaggatattgacacaacacaatttactttatataatattactaacccattatacaaaaatgggaaatttaagtgggagtgtattaattaatgagagtagtgtattatggtagagtttcatcagaaaaagatgagcaaattaatgcctta

SEQ ID NO: 14608 - DNA, 260 bp, Unknown
  Description of Unknown: LeftRegion for integrase B1609 sequence
gtctatcataccttaccgtaactcatcgttactcttatacgttccccttatatttaatatatataatatataagacagttagagagaataagaggggtctggggagagaaggagaaaagaacgctgtccgtcggactgtcagaaggacatccgcaggacagtcagaaggatgccccacggacagcatcggagggaatagtatggagccaagtaaggcaaagaaagcagttctttacgtcagagtgtcaacgcagcaccaa

SEQ ID NO: 14609 - DNA, 260 bp, Unknown; identical to SEQ ID NO: 14587
  Description of Unknown: LeftRegion for integrase B1610 sequence

SEQ ID NO: 14610 - DNA, 260 bp, Unknown
  Description of Unknown: LeftRegion for integrase B1611 sequence
tctggagtcggaatatttcaaatccaatgcaggaaataaggttgcttagcaaccataatcagtattggggagatggcggagtctgtatatgcatgaaaatgtatatgcaggctccttttgtatgttcgttcatattttcattttttagtatgcttggtatgaaggataaaccaagcacgggtttaagaaggaggatttttatggcagaagtagaagttatcaaggcggtggagggtcctatactccgcaagagagattat

SEQ ID NO: 14611 - DNA, 260 bp, Unknown
  Description of Unknown: LeftRegion for integrase B1612 sequence
tgagcgaagtgacgatccggtgaaagcaatcgcttgattatgatatagaaagacgaggtaaaaaataatggaagataaagtaattcaacagtcgttcacatttaaaaattcagatagaatgacagcacaggcaaagaaaacagccacaaatattcagaaaagaaagtggcaggtaaaagaaatggaggaagattatgagcatgagagaagtacaggtcttacaggcaacaaaaacggcaccaaacagccgtggaagaaat

SEQ ID NO: 14612 - DNA, 260 bp, Unknown
  Description of Unknown: LeftRegion for integrase B1613 sequence
accgggcttttaatcgtgtgcagtgacccgatgcaaaagaaaatcgacagagctgccgccctaaatattccaatcatttcagagcagcaatggtttgaacttatgccggaactagaagccctcggaatgtggaatggaaagccacttccgtttgcggatgacaatggcatctaccgttttgatgtgggtggtgatggataatggcaaaaaagaagaagcccgccgggggcaatgccatcatctatgcccgctactcatcc

SEQ ID NO: 14613 - DNA, 260 bp, Unknown
  Description of Unknown: LeftRegion for integrase B1614 sequence
ggctactagctgtaaaatgctggtagccctcattttttagttgtatctagtatataaggggtgtataatagataggaactgaaaacagcctcataaagccctctattttatcgagagtaaagaagtctacacctaatatataaaagtggctgtatgaggcacacaggagctcacaggactattacaggagggtaaacaggatggcatacaggaaaataacagatataaaagatactattggtatgagagcggtattttat

SEQ ID NO: 14614 - DNA, 260 bp, Unknown
  Description of Unknown: LeftRegion for integrase B1615 sequence
ttgattaaagtaacaaaaaagtcccctgctaccaacagaggaccaatgctgacaaaccaatgctaccaacaaaggattgtcaaagtaccatacaaggcagatgccctgatataatacaccaacaaagatattatatcacttaagcacctgttttgtaaaggtgttatttttatacccaaaatacaggagagtgatataatatgaaaaataaaatagcagtatatataagagtatcgacaacacatcagattgataaagaa

SEQ ID NO: 14615 - DNA, 260 bp, Unknown
  Description of Unknown: LeftRegion for integrase B1616 sequence
taatatttccatggaggtggtatatatgaatttcaaaatactacaatggaaaatattactattaaaaataaaaatatgcggaaaatttcttaatacactcaagcaaatactattaaagcatgacatacgatttataagacttctctactctgctgcttgtaaaaagctactagatatatatgacgaggtacttgagaaagatgaaagcagctctctatattagagttagtactacttatcagattgataaggactcatta

SEQ ID NO: 14616 - DNA, 260 bp, Unknown
  Description of Unknown: LeftRegion for integrase B1617 sequence
caggtgcggaatcaaaaaactttgccattccatttgctacaaaactggataaaatgttaatcagtaaatttcacaagctccccgaagaaattcagcaggaagttttaagttatattgactttaaaatagctcaaactattgatgccaccagtcgcaaggtatcattataaatgttgattttaagaagggagtgagaatttatgactaatccgcgtgttgccatttatatccgtgtttcgacaacacatcaggttgataaa

SEQ ID NO: 14617 - DNA, 260 bp, Unknown
  Description of Unknown: LeftRegion for integrase B1618 sequence
taattaaagcaacaaaaaagtcccctgctactaacagaggacctacactgacaatccaatgctaccaacaaaggattgtcaaagtaccatacaaggcagatgccctgatataataccaaccacaaagatattatatcacttaagcacctgttttgtaaaggtgttatttttatacccaaaatacaggagagtgatataatatgaaaaataaaatagcagtatatataagagtatcgacaacacatcagattgataaagaa

SEQ ID NO: 14618 - DNA, 260 bp, Unknown
  Description of Unknown: LeftRegion for integrase B1619 sequence
cgcagaaattgagagcggctgtattgccgtggtcgtggtagacggcacagaagggtttttaaaacaagtcgagttcggtgagaactccacctcgcttcactccttcaacccttactatcctgatatggagttcgtaggtgccgaccagaaacgtttgcactttatcggtcgcgtccgggaaatgaagcggaggttctgatatgcgtaaaaagtttaatatcgacctctccatgttaaccccggaggaacagcagcagttt

SEQ ID NO: 14619 - DNA, 260 bp, Unknown
  Description of Unknown: LeftRegion for integrase B1620 sequence
caggtgcggaatccaaaaactttgccattccatttgctacaaaactggataaaatgttaatcagtaaatttcacaagctccccgaagaaattcagcaggaagttttaagttatatcgactttaaaatagctcaaactattgatgccaccagtcgcaaggtatcattataaatgttgatctcaaaagaggtgtaagaatccatgactgatccaagggtagctatctatatccgtgtttcgacaacacatcaaattgataaa

SEQ ID NO: 14620 - DNA, 260 bp, Unknown
  Description of Unknown: LeftRegion for integrase B1621 sequence
cgcagaaattgagagcggctgtattgccgtggtcgtggtagacggcacagaaggatttttaaaacaggtcgagttcggtgaaaactccacctcgcttcactccttcaacccttactatcctgatatggagttcgtaggtgccgaccagaaacgcttgcactttatcggccgcgtccgggaaatgaagcggaggttctgatatgcgtaaaaagtttaatatcgacctctccatgctaaccccggaggaacagcagcaattt

SEQ ID NO: 14621 - DNA, 260 bp, Unknown; identical to SEQ ID NO: 13018
  Description of Unknown: LeftRegion for integrase B1622 sequence

SEQ ID NO: 14622 - DNA, 260 bp, Unknown
  Description of Unknown: LeftRegion for integrase B1623 sequence
gtcggtgggaagtgctttcttgtgacctccgtattccccggcagcgcatcggcaacgcccacagacaagctcctgcaactcatcgacacgaagttagagcgggagcatcatgagcagtaaaattccggtagacttgcgagagccggtgcggtatacttcgtgttaccgtaccggcctgccccaacgaaaaggaggtaactatggcaggtcaagaaaatcagcaatacaccgtactctacgggcggctcagtcaggaggac

SEQ ID NO: 14623 - DNA, 260 bp, Unknown
  Description of Unknown: LeftRegion for integrase B1624 sequence
gtcaggcagtaatctcagaagggtcactttacgaagataagctattgcgatacttctctttgtgtgacgcggagggtaaacttcgtgttattcagtgcgccatgaatgaattcgatagaacccagaaagaaaaaacagaagttgaataaccgattgctgtcggctaaagttatcaaccttattgaatggagaaatatactatgaaactacctatcgacctctcctgtctgacggaagaagaaatctctcaatttcaggaa

SEQ ID NO: 14624 - DNA, 260 bp, Unknown
  Description of Unknown: LeftRegion for integrase B1625 sequence
cacggtcagatacagcggggataaaaatcccccggcgctccaggccatcaaggacgtgcttatcaatagcgtttccactcaaaaagactgattttttgcatattttggtgaaatatgagataataatggtgtagatggcaccttgaaaaataaatagaactggccgccatatagcaccgccagaacaggaggtaatctatatggcggaacaaatcatccaacttgcgaaaaatgtcttaaaacgagtggtatgtctttac

SEQ ID NO: 14625 - DNA, 260 bp, Unknown
  Description of Unknown: LeftRegion for integrase B1626 sequence
cgtaaagagcttttgtctgataaagaatatgaaaaaataagacgtaaggtgatggataattatctggttgcaggagaacgaagtgatgatttaacgaaagtaattgtgtgattagaaatatgccaaataaaaggatttgacattcgttaacatttagtaattcagatagaatgacagaaaacaaagaaaggattatgggtatgaacgaagtacaagttttacatgcaactaaaactgctccaaatagccggggtagaagt

SEQ ID NO: 14626 - DNA, 260 bp, Unknown
  Description of Unknown: LeftRegion for integrase B1627 sequence
caaattaattaaataaaaaagtcccctgctaccaacagaggacccacactgacaatccaatgctaccaacaaaggattgtcaaagtaccatacaaggcagatgccctgatataatacaccaacaaagatattatatcacttaagcacctgttttgtaaaggtgttatttttatacccaaaatacaggagagtgatataatatgaaaaacaaaatagcagtatatataagagtatcaacaacacatcagattgataaagaa

SEQ ID NO: 14627 - DNA, 260 bp, Unknown
  Description of Unknown: LeftRegion for integrase B1628 sequence
cgcagaaattgagagcggctgtattgccgtggtcgtagtagacggtacagaagggtttttaaaacaagtcgagttcggtgagaactctacttcgcttcactccttcaacccttactatcctgatatggagttcgtaggtgccgaccagaaacgtttgcactttatcggtcgcgtccgggaaatgaagcggaggttttgatatgcgtcagaagtttaaaatcgacctctctatgctgaccccggaagagcagcaacagttt

SEQ ID NO: 14628 - DNA, 260 bp, Unknown
  Description of Unknown: LeftRegion for integrase B1629 sequence
cattcacaaagatgacgaggctgccgtcgatggcagcctagctgagtgcgcaataaagcacggtcttttactgtcacgatatacggggacaaaaatgattttggagttggttgactatctatctccgcaagagcagaagcgattccgcgcagatttgaaaaccatccgaaaagccaagaaagaacaagggggtgcgaatattggcacgaaccgcgaccaaacacccggcaaagccgaagcgcggtaagaaactcgaagcg

SEQ ID NO: 14629 - DNA, 260 bp, Unknown
  Description of Unknown: LeftRegion for integrase B1630 sequence
ctcgcgaccctcttccagtttgttcccgccctctgctccatcgcctgggttgtcgtccttttctttgtcattaaggcccctcagacgtccctgtccgttgtctattacattctcttcgccgtcctcttcctgccgaatctggtcagcgctttccgcaaatagtaatttccattccctgtagctgtaaggatgattgacctatgaccacactccccattgacctctccgccctcaccgccgaggagcggaaacagtttgac

SEQ ID NO: 14630 - DNA, 260 bp, Unknown
  Description of Unknown: LeftRegion for integrase B1631 sequence
aaggcaacagaggtaagctcccatatgctgacaactacgataggtacatatcatgtcacattagaatttagtcctgataataacagcaaagcagttgaagaaatcagaagcacactgaaagaaaaatatataaaaggggctatacaggaggataaagaggcgttacaatctgactccctagtgggaaaggagagagaagcatgaaaagagtaaattgtttatacagagtttcatctaaacagcagttgcatggggatgac

SEQ ID NO: 14631 - DNA, 260 bp, Unknown
  Description of Unknown: LeftRegion for integrase B1632 sequence
acggataaaaacaagataagggcaagaaaaaacgaaacgctgtatatcgtaagcactgaatcgacgcaatgggcgcgagaatcagcatacgagatattagagcgtttggtaatgaaaaaatttacaagcctgacggaagaacggcttggatatggtaagttacgaacttgctgtttggaatctgacggaggtaaacagatatgttagaattacaaacggcaaataaaaataaaagaacaaaaaacggaggtgacggaata

SEQ ID NO: 14632 - DNA, 260 bp, Unknown
  Description of Unknown: LeftRegion for integrase B1633 sequence
gtcggtgggaagtgctttcttgtgacctccgtattccccggcggcgcatcggcaacacccacggacaagctcctgcagcttatcgacacgaagttagagcgggagcatcatgagcagtaaaattccggtagacttgcgagagccggtgcggtatacttcgtgttaccgtaccggcctgccccaacgaaaaggaggtaactatggcaggtcaagaaaatcagcaatacaccgtactctacgggcggctcagtcaggaggac

SEQ ID NO: 14633 - DNA, 260 bp, Unknown; identical to SEQ ID NO: 13029
  Description of Unknown: LeftRegion for integrase B1634 sequence

SEQ ID NO: 14634 - DNA, 260 bp, Unknown
  Description of Unknown: LeftRegion for integrase B1635 sequence
taaaaaaagaagttcaaaaaaagataataaattatttatatcaaaataacgatattactattagtgagtatgaggcattaatttcaaagtgtgatgaaaagataaataaattaaatgaacaattagaaaaaaataaagaaaaatattcttatccaatgaaagttgatataagaatataaaaataaatggaggtgatttaagtggatttatatgctataagaaatatgctaggtcaaggaaaaagtatttatgatttacca

SEQ ID NO: 14635 - DNA, 260 bp, Unknown
  Description of Unknown: LeftRegion for integrase B1636 sequence
gtcggtgggaagtgcttccttgtgacctccgtattccccggcggcgcatcggcaacacccacagacaagctcctgcagctcatcgacacgaagttagagcgggagcatcatgagcagtaaaattccggtagacttgcgagagccggtgcggtatacttcgtgttaccgtaccggcctgccccaacgaaaaggaggtaactatggcaggtcaagaaaatcagcaatacaccgtactctacgggcggctcagtcaggaggac

SEQ ID NO: 14636 - DNA, 260 bp, Unknown
  Description of Unknown: LeftRegion for integrase B1637 sequence
ttatgaaaataggtaatacaacttacgaagtaaacacacattttaatcctaatggcagagaaaatgtacttcaacaatttgaatatttacttacagaattgaaaatagcataagtttgcacaatcgacactgcggcattgcaaatgtaaaatacaattacattgcaatgccctgttgtcacagaagggagcaaatagtttatggcaacaaataaaaatatacaagggcaagaagtaaaaatcaccgctctgtattgccgt

SEQ ID NO: 14637 - DNA, 260 bp, Unknown
  Description of Unknown: LeftRegion for integrase B1638 sequence
caggtgcggaatcaaaaaactttgccattccatttgctacaaaactggataaaatgttaatcagtaaatttcacaagctccccgaagaaattcagcaggaagttttaagttatatcgactttaaaatagctcaaactattgatgccaccagtcgcaaggtatcattataaatgttgatctcaaaagaggtgtaagaatccatgactgatccaagggtagctatctatatccgtgtttcgacaacacatcagatagacaag

SEQ ID NO: 14638 - DNA, 260 bp, Unknown
  Description of Unknown: LeftRegion for integrase B1639 sequence
caggcgcggaatccaaaaactttgccattccatttgctacaaaactggataaaatgttaatcagtaaatttcacaagctccccgaagaaattcagcaggaagttttaagttatattgactttaaaatagctcaaactattgatgccaccagtcgcaaggtatcattataaaaattgattttaagaaggaggtgagaatttatgactagtgcccgtgttgccatttatatccgtgtttcgacaacacatcaggttgataaa

SEQ ID NO: 14639 - DNA, 260 bp, Unknown
  Description of Unknown: LeftRegion for integrase B1640 sequence
aaattaattaaagcaaaaaagtcccctgctaccaacagaggacctacactgacaatccaatgctaccaacaaaggattgtcaaagtaccatacaaggcagatgccctgatataatacaccaacaaagatattatatcacttaagcacctgttttgtaaaggtgttatttttatacccaaaatacaggagagtgatataatatgaaaaataaaatagcagtatatataagagtatcgacaacacatcagattgataaagaa

SEQ ID NO: 14640 - DNA, 260 bp, Unknown
  Description of Unknown: LeftRegion for integrase B1641 sequence
caggcgcggaatccaaaaactttgccattccatttgctacaaaactggataaaatgttaatcagtaaatttcacaagctccccgaagaaattcagcaggaagttttaagttatattgactttaaaatagctcaaactattgatgccaccagtcgcaaggtatcattataaaaattgattttaagaagggggtgagaatttatgactagtgcccgtgttgccatttatatccgtgtttcgacaacacatcaggttgataaa

SEQ ID NO: 14641 - DNA, 260 bp, Unknown
  Description of Unknown: LeftRegion for integrase B1642 sequence
cttgatgggtcgataggtcaatgcctacatctgggatatgcccaaggatgccgttgcattgcgttgccagtgttatcagcagaggacgtacaattgcctgcaagagttcatgttcgtggtgaaataaaagagatatcagacatggacgaattgtattctctcattggatattgaccaagtcaagaatggaggtcgcaagggtggcccgaaagaaagtaaccgaatcggaggggaatgctgtcgcatacgcgcgatacgcc

SEQ ID NO: 14642 - DNA, 260 bp, Unknown
  Description of Unknown: LeftRegion for integrase B1643 sequence
gggctactggctgtaaaatgctggtagccctcattttttagttgtatctagtatataaggggtgtataatagataggaactgaaaacagcctcataaagccatctattttatcgagggtaagaagtctacacctaatatataaaagtggctgtatgaggcacacaggagctcacaggactattacaggagggtaaacaggatggcatacaggaaaataacggatataagagatactattggtatgagagcggtattttat

SEQ ID NO: 14643 - DNA, 260 bp, Unknown
  Description of Unknown: LeftRegion for integrase B1644 sequence
gaataatactattaaaaaagtcccctgctaccaacagaggacctacactgacaatccaatgctaccaacaaaggattgtcaaagtaccatacaaggcagatgccctgatataataccaaccacaaagatattatatcacttaagcacctgttttgtaaaggtgttatttttatactcaaaatacaggagagtgatataatatgaaaaataaaatagcagtatatataagagtatcaacaacacatcagattgataaagaa

SEQ ID NO: 14644 - DNA, 260 bp, Unknown
  Description of Unknown: LeftRegion for integrase B1645 sequence
cgcagaaattgagagcggctgtattgccgtggtcgtggtagacggtacagaagggtttttaaaacaggtcgagttcggtgaggactctacttcgcttcactccttcaacccttactatcctgatatggagttcgtaggtgccgaccagaaacgtttgcactttatcggtcgcgtccgggaaatgaagcggaggttctgatatgcgtaaaaagtttaatatcgacctctccatgctgaccccggaggaacagcagcagttt

SEQ ID NO: 14645 - DNA, 260 bp, Unknown
  Description of Unknown: LeftRegion for integrase B1646 sequence
gttgttctacgatgatcgccaaactgctgatgaagtataaatctatggaaacagaagaagaccaagagggctggatgcaagaaggggcatccagccctcttctttttttactgcagctattgaaaagttttttgtcatcgtttatactgtttgaagtagatgtttattactgacaaaacagaatgaaggaggtaccgtccatggaaaatgcatacatatatacacgtgtttcaactttgatacaggtggacggtttttct

SEQ ID NO: 14646 - DNA, 260 bp, Unknown
  Description of Unknown: LeftRegion for integrase B1647 sequence
agaataatacaattaaaaaagtcccctgctaccaacagaggacccacactgacaatccaatgctaccaacaaaggattgtcaaagtaccatacaaggcagatgccctgatataatacactaacaaagatattatatcacttaagcacctgttttgtaaaggtgttatttttatacccaaaatacaggagagtgatataatatgaaaaacaaaatagcaatatatataagagtatcaacaacacatcagattgataaagaa

SEQ ID NO: 14647 - DNA, 260 bp, Unknown
  Description of Unknown: LeftRegion for integrase B1648 sequence
ctggatcattgacatggttatgatctgttgcaacaaattcaccgacagtaccggcgcggtggttggtctgaaggttgctgagtataccagacagccggatcctgatcttgcagaggcttctctggaggagcagcgggaggcagcggccgagactgccagagcttacggctataccgtaatagagtcaggcgctcaggataatgccgacaggtaaaaacacggctcgaaaatatgccgcaggaggtggctcggataattcc

SEQ ID NO: 14648 - DNA, 260 bp, Unknown
  Description of Unknown: LeftRegion for integrase B1649 sequence
caaaaactattaataaaaaagtcccctgctaccaacagaggacctacactgacaatccaatgctaccaacaaaggattgtcgaagtaccatacaaggcagatgccctgatataatacaccaacaaagatattatatcacttaagcacctgttttgtaaaggtgttatttttatacccaaaatacaggagagtgatataatatgaaaaataaaatagcagtatatataagagtatcaacaacacatcagattgataaagaa

SEQ ID NO: 14649 - DNA, 260 bp, Unknown
  Description of Unknown: LeftRegion for integrase B1650 sequence
cgcagaaattgagagcggctgtattgccgtggtcgtggtagacggcacagaagggtttttaaaacaggtcgagttcggtgaaaactccacctcgcttcactccttcaacccttactatcctgatatggagttcgtaggtgccgaccagaaacgcttgcactttatcggccgcgtccgggaaatgaagcggaggttctgatatgcgtaaaaagtttaatatcgacctctccatgttaaccccggaggaacagcagcagttt

SEQ ID NO: 14650 - DNA, 260 bp, Unknown
  Description of Unknown: LeftRegion for integrase B1651 sequence
ttatgaaaataggcaacacaacttatgaagtcagtacacattttaatcctaacggcagagaaaatgtgcttcaacaatttgaagatttacttacagaattaaagatagcataagtttgcacaatcgacactgcggcattgcaagtgtacaatacctatacattgcaatgccatgttgtcacagaaaggagcaaatagtttatggcaacaaacaaaaatatacaagggcaagaagaaaaaatcaccgctctgtattgccgt

SEQ ID NO: 14651 - DNA, 260 bp, Unknown
  Description of Unknown: LeftRegion for integrase B1652 sequence
atatctcacatatctgccaacaaaggaacagctaaaagcagagattgaaaggcagaaagaaatattttatatgcagcatcctgcattgtctgaaaaagataaagaagatatgaaggaatagtaagacagctaatacaattcagttgttcggaattcccgaacagctgaagggagaattttgacacaggagataacatctgatgaaaaaacagcagaaatgttacatatatacaagagtttccacttccatgcaggtagaa

SEQ ID NO: 14652 - DNA, 260 bp, Unknown; identical to SEQ ID NO: 14644
  Description of Unknown: LeftRegion for integrase B1653 sequence

SEQ ID NO: 14653 - DNA, 260 bp, Unknown
  Description of Unknown: LeftRegion for integrase B1654 sequence
ctggatcatcgacatggttatgatctgttgtaacaaattcaccgacagcaccggcgcggtggtcggtctgaaggttgctgagtataccagacagccggatcttgatcttgcagaggcttctctggaggagcagcgggaggcagcggccgagactgccagagcttacggctataccgtaatagagtcaggcgctcaggataatgccgacaagtaaaaacacggctcgaaaatatgccgcaggaggtagctcggataattcc

SEQ ID NO: 14654 - DNA, 260 bp, Unknown
  Description of Unknown: LeftRegion for integrase B1655 sequence
atttcagttaaataataatacaaaagaagataaaaaaatagaattataaaaaaggataatgtgtattgttttgcggacaccacacattatccagagcgtaatcactattgaaagtgaatacttttttattatatcgtaaagtaacttcattttcaatagtaaatctaaaatttattataagaaaatggaggttttttattatggataaaaagaaaaaatcggctttatatgtaagggtatctactactcatcaaattgat

SEQ ID NO: 14655 - DNA, 260 bp, Unknown
  Description of Unknown: LeftRegion for integrase B1656 sequence
aatatatcagcgaatatatggcccaaaatccgaatcttgaaaaagcgctgaattcccatttgataagtgccgcctcaggctggggcgttttggaagatgattatcaaacatttttccaaaacaggttaaactggttctgcgaggaactgaacaaacgagtgattgttacacaggcggatagaacagcataaggaagttttatgaaaaaagaaaagataaaagtttatacatatacgagagtgtccaccgccatgcagatt

SEQ ID NO: 14656 - DNA, 260 bp, Unknown; identical to SEQ ID NO: 13137
  Description of Unknown: LeftRegion for integrase B1657 sequence

SEQ ID NO: 14657 - DNA, 260 bp, Unknown; identical to SEQ ID NO: 14654
  Description of Unknown: LeftRegion for integrase B1658 sequence

SEQ ID NO: 14658 - DNA, 260 bp, Unknown
  Description of Unknown: LeftRegion for integrase B1659 sequence
ggctactggctgtaaaatgctggtagccctcattttttagttgtatctagtatataaggggtgtataatagataggaactgaaaacagcctcataaagccctctgttttatcgagggtaaagaagtctacacctaatatataaaagtggctgtatgaggcacacaggagctcacaggactattacaggagggtaaacaggatggcatacaggaaaataacggatataaaagatactattggtatgagagctgtattttat

SEQ ID NO: 14659 - DNA, 260 bp, Unknown; identical to SEQ ID NO: 13032
  Description of Unknown: LeftRegion for integrase B1660 sequence

SEQ ID NO: 14660 - DNA, 260 bp, Unknown
  Description of Unknown: LeftRegion for integrase B1661 sequence
acaccacaatagaatattttctaacaggaaaacgccctatatctaatctgactgatatggaaaatcttctattagaagcatacagatcagcagatgtaaaaggacaagctacaatcatccaagtctgcatgaatgaaaaggatgcaaaaggggaaactatcattgcaggataataagcattgaagaatggaggaagaaccatgtacgaagagattaagactgcctgtctatatctgcgatattcaagcagcaaccaaact

SEQ ID NO: 14661 - DNA, 260 bp, Unknown
  Description of Unknown: LeftRegion for integrase B1662 sequence
aagacggatggattgtaaaaacagaattataaagttgcgggaaagcacaggactgaatcggaaagatttttgcaagctcgtccatattccttaccggactatgactgaatgggaattggacaaccgccatgcaccggattatgtgctgtggcttttggagtattatatccgtaacgagggacttatggtaaaaggaaggaatgagggaggtggagattctgaaaaagaaacaacttaaatgctatctttatacaagagtg

SEQ ID NO: 14662 - DNA, 260 bp, Unknown
  Description of Unknown: LeftRegion for integrase B1663 sequence
gatatatcctccgaatggttggaaaactcatacacatatacgccaagaccatataagccttcaaagcgcgccctccaaatggaggctgacatcaaagaaactgctcacaagtacataacaaacgaaaaagccctcctgctgggcgcagaagggcgtaacgggtaacagatatgtcgatagatattaaatggcgggtgccaatggcaaagccggaggtcagcgaactggccgtcgtatacgcccggtattcaagccacagt

SEQ ID NO: 14663 - DNA, 260 bp, Unknown
  Description of Unknown: LeftRegion for integrase B1664 sequence
tagattggaaatagaaaaagaaggagtacagataatattggaatatcctcaacctactgacaaagactatatggttaaacaagagatacaaaagaatttagaaagtatgctcaaggagcaaattaaacaaatatcttaatatatcggagagaactttatctctccgatgtaatttctttacgaaaggaatactaaaaattatgaaagcgaaaatagttagaatgttattaagagtaagttcagaccaacaattagaggct

SEQ ID NO: 14664 - DNA, 260 bp, Unknown
  Description of Unknown: LeftRegion for integrase B1665 sequence
atcgactcaggggatgtggctgtcgtactggtcaatgatggtatcagtacagaagggtttgtgaagaagatcgagctggatgagacaggtgtggtgctgcactcctacaatccatactacccgcccatggtcttctcaggcatgaacgctcaacaggtctccttcgttggtaaggtgatcgaactgaaaaggaagttctgatgagaaagaagaacaaatttccaatcgacctctctatgctaacagacttggagatccag

SEQ ID NO: 14665 - DNA, 260 bp, Unknown
  Description of Unknown: LeftRegion for integrase B1666 sequence
ccgccgtcgcgatctgcttcaggttactggtgcactgccggcccttggccgtcgcccgcgctttgttcagcgacggcaggagcatggcggcgagaatcgcgatgatggctattactacaattagttctatgtaaaacatgtagtttggttgattatcggtaaacgacgacctatattaaagcaagcaacctgaggtgataatgaaagcaattatttacgcacgacaaagctctggttctgatgatatctccgaatcggtc

SEQ ID NO: 14666 - DNA, 260 bp, Unknown; identical to SEQ ID NO: 14344
  Description of Unknown: LeftRegion for integrase B1667 sequence

SEQ ID NO: 14667 - DNA, 260 bp, Unknown
  Description of Unknown: LeftRegion for integrase B1668 sequence
aatacaaccttcaccgtcaattcgttcttcctggaacaaacaaaagacggtgtggtttctaaaatagagcggcttatcaaggatgatgtccgaaaaaaagccgctacaatttgacctccataggcagacaaaaccaacaaagcgcggtagaatgaagatagaacttcataccgtgtttgactgccagattggaggttattatgtttcatcagtcaaacaccgctgccgcacttcaattcccttacaacgctatgagcgtc

SEQ ID NO: 14668 - DNA, 260 bp, Unknown; identical to SEQ ID NO: 13552
  Description of Unknown: LeftRegion for integrase B1669 sequence

SEQ ID NO: 14669 - DNA, 260 bp, Unknown
  Description of Unknown: LeftRegion for integrase B1670 sequence
aggaaaaatgccgtccttcgtccatagactacgatgcgggtattgccatttttgagggttcaggtaaaaagccttacgaaaccacggtaaattcctgcacctgcagagatttctttgtccgccgtttgccgtgcaagcatatctaccggcttcggatggagcttgaaaacagagaagctcgttaaaaatgggggcgttatatggctcgatcaaagaaaactgaatgcttgccacttgagcggatcggcgtgatctatgcc

SEQ ID NO: 14670 - DNA, 260 bp, Unknown; identical to SEQ ID NO: 14186
  Description of Unknown: LeftRegion for integrase B1671 sequence

SEQ ID NO: 14671 - DNA, 260 bp, Unknown; identical to SEQ ID NO: 14654
  Description of Unknown: LeftRegion for integrase B1672 sequence

SEQ ID NO: 14672 - DNA, 260 bp, Unknown
  Description of Unknown: LeftRegion for integrase B1673 sequence
tagcatttgcgcgatgtgcaatttgcacacaattcccgctcaatgacttttgcggcggcagtccgtatacttgaaaaaatcaagcaaaaaagaaccgccattcagcaaaaaatgtgtcgaaagcccctacacaaatcgtgcaaagagagttatactacagctggcagacatcctgaatcgctgttcggaaaggatggaaaatgaaagagaaacagctacaggatattaccgctttatatggcagattgagccgcgatgat

SEQ ID NO: 14673 - DNA, 260 bp, Unknown; identical to SEQ ID NO: 14534
  Description of Unknown: LeftRegion for integrase B1674 sequence

SEQ ID NO: 14674 - DNA, 260 bp, Unknown
  Description of Unknown: LeftRegion for integrase B1675 sequence
cacgacctttatcgtcaattcttttttccctcaaacgggaaaccagacgatagcctccaaactggagaacctgataaaagccgatgttcagaaacaaactgtgacttgaaaacctcctaacaggcagacagggaaaagaaagcgcggtataatgaagttggacttcaatatcgtgtttgactgccggataggaggtatttatgtattatcagtcaaacaccgctgccgcgcttcaattcccttacacggctatgagctcc

SEQ ID NO: 14675 - DNA, 260 bp, Unknown; identical to SEQ ID NO: 13141
  Description of Unknown: LeftRegion for integrase B1676 sequence

SEQ ID NO: 14676 - DNA, 260 bp, Unknown
  Description of Unknown: LeftRegion for integrase B1677 sequence
ttttcagtgaagcagaggcaggcagtttgaaagaaaaaggttatcctgtgggatatgccgaaaacggaacaaaaggaacaggccatcgtccagcatggtacataaaattcgtcaaataaaaaccgcctcagcttgcgccgagacggaaacatttagaaagcgaaagcaccaccaaacgctttccgttgccagtatagcatatgctgcgcggcgttgtaaagccccgaaaggaaaactttatgaacgcagtgatttatgcc

SEQ ID NO: 14677 - DNA, 260 bp, Unknown; identical to SEQ ID NO: 13141
  Description of Unknown: LeftRegion for integrase B1678 sequence

SEQ ID NO: 14678 - DNA, 260 bp, Unknown
  Description of Unknown: LeftRegion for integrase B1679 sequence
atccgacagttttctgattttggcaaagatatccgaccattcgctcgtagtcatacggcatggctcctttctcaaatttactgtcggcagcaactgaattatatcaaatacgcacccgcttttcagggattcgtagaattataccgaaaatcggaaaaatattgcgaattttgaagaagataatcgtgaggtgatggttgatggcccgaaaaaagaatattgctgctggcctcgatgccgtcatctatgcccggtactcg

SEQ ID NO: 14679 - DNA, 260 bp, Unknown
  Description of Unknown: LeftRegion for integrase B1680 sequence
tataatccaaaagggttgttttgagagggctatcagtgtaagggctgatagccctatttttttttgtctaaatttcaggagatttctggttattactcaaataatatgtaatgggtttacatagtatcaaaaagatgtataataagtatgagatattatgacaaacctgtacaaattctaatcaacaggaggaaaacaggatggtacaggagaaattaagagcggtattttatgcaagggtatctacagaggaagagaga

SEQ ID NO: 14680 - DNA, 260 bp, Unknown; identical to SEQ ID NO: 13141
  Description of Unknown: LeftRegion for integrase B1681 sequence

SEQ ID NO: 14681 - DNA, 260 bp, Unknown
  Description of Unknown: LeftRegion for integrase B1682 sequence
aaagccttcgaccgaggccttataactatcactccttccatgaaaatctatgtttctccaataattttggatagccctcaggacgcttttacagcccgctggctggcttctcttgacggaatggttttaccccccccccgatttccgccgcgtagagagcttctggagtaccataacgacgaaatttttaggagggtcacatgaatacagtaatttatgctcggtattctgccggcccgagacagaccgaccagagtatc

SEQ ID NO: 14682 - DNA, 260 bp, Unknown
  Description of Unknown: LeftRegion for integrase B1683 sequence
gcagagttggtagtattgaaaatgatgtagatataatcaaaactgatatgagtataattaagactagattagaaattaaacaatagggatgtttttatagcatccctttttttcgttttttggttatatttgccttgtttatgttgtatgtgttatactatgtataatgaaaaatacatacaaattaggggtgattttacatgaagaatactgtaaaagtatgtgcttattgcagggtgtcaacaaataaatcagaacaa

SEQ ID NO: 14683 - DNA, 260 bp, Unknown
  Description of Unknown: LeftRegion for integrase B1684 sequence
atgagccgatcattcctgaaaacacggtgtatgagaaaaagctgttgaagtatttcagtatgtgcgacggagaaggaaagctgagaatcattcagctagcaatgaatgaatttgacagaacgcagaaagaaaaaaaggaaaatcaagaaccggctgttgtcggataagattattagcttttacgaatggagacaaatactatgaaatttccgattgatctctccactttaacaaaagaagaaatctcgcaatttgaagaa

SEQ ID NO: 14684 - DNA, 260 bp, Unknown
  Description of Unknown: LeftRegion for integrase B1685 sequence
aacacgacctttatcgtcaattccttctttcgggaaaagggcgatgagggtattgccgtaaagctggaacgtctgatgaaagcggacgttcagaaagaagctacaacttaattctcccaaacaggcagacagggacaaaaagacgcggtataatgaaggtgacttcaaaaccgtgtttgactgccggatgggaggttactatgtatcatcagtcaaacaccgctgccgcgcttcaattcccttacagcgctatgagcgtc

SEQ ID NO: 14685 - DNA, 260 bp, Unknown
  Description of Unknown: LeftRegion for integrase B1686 sequence
cacgacctttatcgtcaattcttttttccctcaaacgggaaatcagacgatagcctccaaactggagaacctgataaaagccgatgttcagaaacaaactgtgacttgaaaacctcttaacaggcagacagggaaaagaaagcgcggtataatgaagttggacttcaatatcgtgtttgactgccagataggaggtatttatgtattatcagtcaaacaccgctgccgcgcttcaattcccttacacggctatgagctcc

SEQ ID NO: 14686 - DNA, 260 bp, Unknown
  Description of Unknown: LeftRegion for integrase B1687 sequence
aaaaaatattttgcaaaatgaaaaatacaggggtgatgcattgcttcagaaacggtattccagagactttcttgaccgtgaaatgcgtaaaaacgagggcgcagttcctcaatattatattgttggaaatcatgaagcaatcattgatacagagatgtttcagagagtgcaggaagaactgaaaagaagagaatccaggcatggaaaataacaaaaagctgagggtcgcagcgtatgtgagggtttctgaagagacaaaa

SEQ ID NO: 14687 - DNA, 260 bp, Unknown
  Description of Unknown: LeftRegion for integrase B1688 sequence
catcttctccgcagaaaagacagggcgttttggaacgagttgaacctaaacgtgcaactctacttatataaatggctcccagatatgatatttcggaaatgaatttaactttttgactgttgaaagtgtggaaagatttattttccccagaacttgcaacggcttgcaacaaacttaaaactacttgaaaggtggtatttatgcctcgcaaaaagaaactgcaagaggtaggcggactgcggctggtggcgtactatcgc

SEQ ID NO: 14688 - DNA, 260 bp, Unknown; identical to SEQ ID NO: 13018
  Description of Unknown: LeftRegion for integrase B1689 sequence

SEQ ID NO: 14689 - DNA, 260 bp, Unknown; identical to SEQ ID NO: 13141
  Description of Unknown: LeftRegion for integrase B1690 sequence

SEQ ID NO: 14690 - DNA, 260 bp, Unknown
  Description of Unknown: LeftRegion for integrase B1691 sequence
ctattcaaattgacatcgaagaggcaaagtctcttggtttagcaccgtgtaaaaggtgctgtaactaaaaaaccgccctgcagcggcaactgcagagcgtttatatagatgttacctatcaacccgagggccaatataataactccataagcaagtcttattatatcacatgccctcttttttagaaaggggctttttatatgtctaaaactgtcgctatatacgtcagagtttcaacagggaaacaggctgacagagac

SEQ ID NO: 14691 - DNA, 260 bp, Unknown
  Description of Unknown: LeftRegion for integrase B1692 sequence
ctattcaaattgacatcgaagaggcaaagtctcttggtttagcaccgtgtaaaaggtgctgtaactaaaaaaccgccctgcagcggcaactgcagagcgtttatatagatgttacctatcaacccgagggccaatataataactccctagacaagtcttattatatcacatgccctcttttttagaaaggggctttttatatgtctaaaactgtcgctatctatgtcagggtttccacagggaaacaggctgacagagac

SEQ ID NO: 14692 - DNA, 260 bp, Unknown
  Description of Unknown: LeftRegion for integrase B1693 sequence
ctattcaaattgacatcgaagaggcaaagtctcttggtttagcaccgtgtaaaaggtgctgtaactaaacaaacgccctgcagcggcaactgcagagcgtttatatagatgttacctattaacccgagggccaatataataactccataagcaagtcttattatatcacatgccctcttttttagaaaggggctttttatatgtctaaaactgtcgctatctatgtcagggtttccacagggaaacaggctgacagagac

SEQ ID NO: 14693 - DNA, 260 bp, Unknown
  Description of Unknown: LeftRegion for integrase B1694 sequence
ctattcaaattgacatcgaagaggcaaagtctcttggtttagcaccgtgtaaaaggtgctgtaactaaacaaacgccctgcagcggcaactgcagagcgtttatatagatgttacctattaacccgagggccaatataataactccataagcaagtcttattatatcacatgccctcttttttagaaaggggctttttatatgtctaaaactgtcgctatctatgtcagggtttcaacagggaaacaggctgacagagac

SEQ ID NO: 14694 - DNA, 260 bp, Unknown
  Description of Unknown: LeftRegion for integrase B1695 sequence
ttgaagacctcacatttatgtggggtcttttacgttatctatgttttgttggagtcaacaaaacgtaaaaatcgccctgcagctaccaactgcagagcgattatatagatgttacctatcaacccgagggccaatataataactccatgaacaagtcttattatatcacacgccctcttttttagaaaggggctttttatatgtctaaaattgtcgctatctatgtcagggtttctacagggaaacaggctgacagagac

SEQ ID NO: 14695 - DNA, 260 bp, Unknown
  Description of Unknown: LeftRegion for integrase B1696 sequence
agatatggttattcaaccctaatcaaagtctcttggtttagcaccgtgtaaaaggtgctgtaactaaacaaccgccctgcagctaccaactgcagagcgattatatagatgttacctatcaacccgagggccaatataataactccctaagcaagtcttattatatcacatgccctcttttttagaaaggggctttttatatgtctaaaactgtcgctatctatgtcagggtttccacagggaaacaggctgacagagac

SEQ ID NO: 14696 - DNA, 260 bp, Unknown
  Description of Unknown: LeftRegion for integrase B1697 sequence
ctattcaaattgacatcgaagaggcaaagtctcttggtttatcaccgtgtaaaaggtgctgtaactaaacaaacgccctgcagcggcaactgcagagcgtttatatagatgttacctattaacccgagggccaatataataactccataagcaagtcttattatatcacatgccctcttttttagaaaggggctttttatatgtctaaaactgtcgctatctatgtcagggtttccacagggaaacaggctgacagagac

SEQ ID NO: 14697 - DNA, 260 bp, Unknown
  Description of Unknown: LeftRegion for integrase B1698 sequence
ctattcaaattgacatcgaagaggcaaagtctcttggtttagcaccgtgtaaaaagtgctgtaattaaacaaacgccctgcagcggcaactgcagagcgattatatagatgttacctattaacccgagggccaatataataactccctagacaagtcttattatatcacatgccctcttttttagaaaggggctttttatatgtctaaaactgtcgctatctatgtcagggtttccacagggaaacaggctgacagagac

SEQ ID NO: 14698 - DNA, 260 bp, Unknown
  Description of Unknown: LeftRegion for integrase B1699 sequence
tattaagattttacaatgaagaggcaaaatctcttggtttagcaccgtgtaaaaggtgctgtaactaaacaatcgccctgcagcggcaactgcagagcgattaaatagatgttacctatcaacccgagggctgatgtagtaaaaccctagacaagtcttattatatcacatgccctcttttttagaaaggggctttttatatgtctaaaactgtcgctatctatgtcagggtttccacagggaaacaggctgacagagac

SEQ ID NO: 14699 - DNA, 260 bp, Unknown
  Description of Unknown: LeftRegion for integrase B1700 sequence
tattcaaattgacatcgaagaggcaaagtctcttggtttatcaccgtgtaaaaggtgctgtaactaaacaaacgccctgcagctaccaactgcagagcgattatatagatgttacctattaacccgagggccaatataataactccctaagcaagtcttattatatcacatgccctcttttttagaaaggggctttttatatgtctaaaaccgtcgctatctatgtcagggtttcaacagggaaacaggctgacagagac

SEQ ID NO: 14700 - DNA, 260 bp, Unknown; identical to SEQ ID NO: 13535
  Description of Unknown: LeftRegion for integrase B1701 sequence

SEQ ID NO: 14701 - DNA, 260 bp, Unknown
  Description of Unknown: LeftRegion for integrase B1702 sequence
agaaagaagaatattatggttccgaagatggtaaatcctacatcaaatatctgcattctgtagatggcgcgcctatatttgatgttaaaaaaggtgatacgtcttattccctgattagctgccgtgaaattctttaatctttaatcacctagcccctatcgttataatacgcggtaggggcgtttttgtttggaaatggtatgaaaactaaactgtattcgtatattcgcttctcgtctatgcgtcagaatgatggttcg

SEQ ID NO: 14702 - DNA, 260 bp, Unknown
  Description of Unknown: LeftRegion for integrase B1703 sequence
ctattcaaattgacatcgaagaggcaaagtctcttggtttagcaccgtgtaaaaggtgctgtaactaaacaaacgccctgcagcggcaactgcagagcgtttatatagatgttacctatcaacccgagggccaatataataactccctaagcaagtcttattatatcacatgccctcttttttagaaaggggctttttatatgtctaaaactgtcgctatctatgtcagggtttcaacagggaaacaggctgacagagac

SEQ ID NO: 14703 - DNA, 260 bp, Unknown
  Description of Unknown: LeftRegion for integrase B1704 sequence
agaaagaagaatattatggttccgaagatggtaagtcttacatcaaatatctgcattctattgatggttctcctatatttgatgttaaaaaaggtgatacgtcttattccctgattagctgccgtgaaattctttaatctttaatcacctagcccctatcgttataatacacggtaggggcgtttttgtttggaaatggtatgaaaactaaactgtattcgtatattcgcttctcgtctatgcgtcagaatgatggttcg

SEQ ID NO: 14704 - DNA, 260 bp, Unknown; identical to SEQ ID NO: 14693
  Description of Unknown: LeftRegion for integrase B1705 sequence

SEQ ID NO: 14705 - DNA, 260 bp, Unknown
  Description of Unknown: LeftRegion for integrase B1706 sequence
ctattcaaattgacatcgaagaggcaaagtctcttggtttatcaccgtgtaaaaggtgctgtaactaaacaaacgccctgcagcggcaactgcagagcgtttatatagatgttacctattaacccgagggccaatataataactccataagcaagtcttattatatcacatgccctcttttttagaaaggggctttttatatgtctaaaactgtcgctatctatgtcagggtttcaacagggaaacaggctgacagagac

SEQ ID NO: 14706 - DNA, 260 bp, Unknown
  Description of Unknown: LeftRegion for integrase B1707 sequence
agatatggttattcaaccctaatcaaagtctcttggtttagcaccgtgtaaaaggtgctgtaactaaacaaccgccctgcagctaccaactgcagagcgattatatagatgttatctatcaacccgagggccaatataataactccataagcaagtcttattatatcacatgccctcttttttagaaaggggctttttatatgtctaaaactgtcgctatctatgtcagggtttcaacagggaaacaggctgacagagac

SEQ ID NO: 14707 - DNA, 260 bp, Unknown; identical to SEQ ID NO: 14697
  Description of Unknown: LeftRegion for integrase B1708 sequence

SEQ ID NO: 14708 - DNA, 260 bp, Unknown; identical to SEQ ID NO: 14692
  Description of Unknown: LeftRegion for integrase B1709 sequence

SEQ ID NO: 14709 - DNA, 260 bp, Unknown
  Description of Unknown: LeftRegion for integrase B1710 sequence
ctgaatcaattgtgtagtgaaatagctgtactggctggtcaacctaatgatgaagaacttattaccgcgtgtatctggagtcatgtagaggatattaatattcgtgatgctcgactgaaaggtaaaaaatactaatgacttactaaccaatgcccctatcgttataatacgcggtaggggcttttttgtttggaaatggtatgaaaactaaactgtattcgtatattcgcttctcgtctatgcgtcagaatgatggttcg

SEQ ID NO: 14710 - DNA, 260 bp, Unknown
  Description of Unknown: LeftRegion for integrase B1711 sequence
ggaacggtttatacggaggacagcgttcatcatatcgaaatgcatccgggcaaccgggtgctgtttgtttttcaggacggtcacaccgaggaacacttctgggaagaccattcccgcaaagacagctggaatgaggaaaagcgtcagaaagccgcggagaaaaccagaatccagcaccagaaaaggaaggagcaggaacaatgagcgaagccagaacctatgaacccacagtcacgcgcgtcaaaacggttcgggtcatc

SEQ ID NO: 14711 - DNA, 260 bp, Unknown
  Description of Unknown: LeftRegion for integrase B1712 sequence
actcgctgtctataggcgatgagcattacgaggataaattaatacgttttgactttaccattcttgaaggtgacatatttgctgattcatatgatggcaacatagaaacttatgatgacatagtggaaaagagaaatgaactggccgagacggctggactgaaaaagagaaaatgattatgtaactgtggcggtgagtctatgaaaacaaaaaagcccgctcgaaagcgggaaaatttaataggcgttaattactgccga

SEQ ID NO: 14712 - DNA, 260 bp, Unknown; identical to SEQ ID NO: 14693
  Description of Unknown: LeftRegion for integrase B1713 sequence

SEQ ID NO: 14713 - DNA, 260 bp, Unknown
  Description of Unknown: LeftRegion for integrase B1714 sequence
tgaaggtcagtatatgaaagcaattttacttgctctgttggagggaggaaaaataaatcaggcacagtatgacgagtgcaaaaggaggctcaaaataaattagctggactttcaaattactttgaatataatgtgtgttgaaaaaggcaggtgcctttacatccggtgcctgcctgtgaaaaaacagaaaggagaaagttatgcttaaaactgatgacagggtactgcgagtggcggcgtactgccgtgtatccaccgac

SEQ ID NO: 14714 - DNA, 260 bp, Unknown
  Description of Unknown: LeftRegion for integrase B1715 sequence
ttaaatcaactgtgtactgaattagcacagattgccggagttggtgacgatgacgactttattactgcgtgtgtatggagtcatatcgaggatattaataaacgtgatgcaaaactaactggaaagaaatattaatgacttactaaccaatgcccctatcgttataatacacggtaggggcgtttttgtttggaaatggtatgaaaactaaactgtattcgtatattcgcttctcgtctatgcgtcagagtgatggttcg

SEQ ID NO: 14715 - DNA, 260 bp, Unknown; identical to SEQ ID NO: 14694
  Description of Unknown: LeftRegion for integrase B1716 sequence

SEQ ID NO: 14716 - DNA, 260 bp, Unknown; identical to SEQ ID NO: 14693
  Description of Unknown: LeftRegion for integrase B1717 sequence

SEQ ID NO: 14717 - DNA, 260 bp, Unknown
  Description of Unknown: LeftRegion for integrase B1718 sequence
attttcagacgtgttttaacgcatcgcaagccttctagctggtgttattcggttttagttgtgttgggaagtggtgaaaaacggcaataaaaagtgctgttttcagagagaaaccccgcgcgggaacttggcggaacgcgcgcggggctggtcaagaagcagggcgctttaccgcgctcgctctaaggggtgattttagcatggtaaagaaccgcgccgccatatatgcgcgcttcagctcgcacaatcagcgctcagag

SEQ ID NO: 14718 - DNA, 260 bp, Unknown; identical to SEQ ID NO: 14696
  Description of Unknown: LeftRegion for integrase B1719 sequence

SEQ ID NO: 14719 - DNA, 260 bp, Unknown; identical to SEQ ID NO: 14695
  Description of Unknown: LeftRegion for integrase B1720 sequence

SEQ ID NO: 14720 - DNA, 260 bp, Unknown
  Description of Unknown: LeftRegion for integrase B1721 sequence
agatatggttattcaaccctaatcaaagtctcttggtttagcaccgtgtaaaaggtgctgtaactaaacaaccgccctgcagctaccaactgcagagcaattatatagatgttacctatcaacccgagggccaatataataactccctagacaagtcttattatatcacatgccctcttttttagaaaggggctttttatatgtctaaaactgtcgctatctatgtcagggtttccacagggaaacaggctgacagagac

SEQ ID NO: 14721 - DNA, 260 bp, Unknown
  Description of Unknown: LeftRegion for integrase B1722 sequence
agatatggttattcaaccctaatcaaagtctcttggtttagcaccgtgtaaaaggtgctgtaactaaacaaccgccctgcagctaccaactgcagagcgattatatagatgttatctatcaacccgagggccaatataataactccataagcaagtcttattatatcacatgccctcttttttagaaaggggctttttatatgtctaaaactgtcgctatctatgtcagggtttccacagggaaacaggctgacagagac

SEQ ID NO: 14722 - DNA, 260 bp, Unknown
  Description of Unknown: LeftRegion for integrase B1723 sequence
ttaaatcaactgtgtactgaattagcacaggttgccggagttggtgacgatgacgactttattactgcgtgtgtatggagtcatatcgaggatattaataaacgtgatgcaaaactaactggaaagaaatattaatgacttactaaccaatgcccctatcgttataatacgcggtaggggcttttttgtttggaaatggtatgaaaactaaactgtattcgtatattcgcttctcgtctatgcgtcagagtgatggttcg

SEQ ID NO: 14723 - DNA, 260 bp, Unknown
  Description of Unknown: LeftRegion for integrase B1724 sequence
taattttcaagccggatatttattagatgcttccggtaagtggacgatattttgataacagatattctctatatctaatttaattatacaagtgacagagaaatgcgtcaacatggaaaataagtattgaaaagaattggaataagtactaaaataaagttgggacaataaagcggagttactatatagaggaaaagactatgaagaatataaaaattaaatgtaatatctataccagagtatccacaaccatgcaggta

SEQ ID NO: 14724 - DNA, 260 bp, Unknown; identical to SEQ ID NO: 13291
  Description of Unknown: LeftRegion for integrase B1725 sequence

SEQ ID NO: 14725 - DNA, 260 bp, Unknown
  Description of Unknown: LeftRegion for integrase B1726 sequence
ctattcaaattgacatcgaagaggcaaagtctcttggtttatcaccgtgtaaaaggtgctgtaactaaacaaacgccctgcagcggcaactgcagagcgtttatatagatgttacctattaacccgagggccaatataataactccataagcaagtcttattatatcacatgccctcttttttagaaaggggctttttatatgtctaaaactgttgctatctatgtcagggtttccacagggaaacaggctgacagagac

SEQ ID NO: 14726 - DNA, 260 bp, Unknown
  Description of Unknown: LeftRegion for integrase B1727 sequence
ctattcaaattgacatcgaagaggcaaagtctcttggtttagcaccgtgtaaaaggtgctgtaactaaacaaacgccctgcagcggcaactgcagagcgattatatagatgttacctattaacccgagggccaatataataactccataagcaagtcttattatatcacatgccctcttttttagaaaggggctttttatatgtctaaaactgtcgctatctatgtcagggtttcaacagggaaacaggctgacagagac

SEQ ID NO: 14727 - DNA, 260 bp, Unknown; identical to SEQ ID NO: 14696
  Description of Unknown: LeftRegion for integrase B1728 sequence

SEQ ID NO: 14728 - DNA, 260 bp, Unknown; identical to SEQ ID NO: 14721
  Description of Unknown: LeftRegion for integrase B1729 sequence

SEQ ID NO: 14729 - DNA, 260 bp, Unknown; identical to SEQ ID NO: 14693
  Description of Unknown: LeftRegion for integrase B1730 sequence

SEQ ID NO: 14730 - DNA, 260 bp, Unknown
  Description of Unknown: LeftRegion for integrase B1731 sequence
cgcagaaatcgagagcggctgtattgccgtggtcgtggtggacggtacagaagggtttttaaaacaagtcgagttcggtgagaattccacctcgcttcactcgttcaatccgtattatcccgacatggagtttgtagatgccgaccagaaacgtttgcactttatcggccgcgtccgggaaatgaagcggaggttctgatatgcctcagaagtttaaaatcgacctctctatgctgaccccggaagaacagcagcagttt

SEQ ID NO: 14731 - DNA, 260 bp, Unknown; identical to SEQ ID NO: 13434
  Description of Unknown: LeftRegion for integrase B1732 sequence

SEQ ID NO: 14732 - DNA, 260 bp, Unknown; identical to SEQ ID NO: 14721
  Description of Unknown: LeftRegion for integrase B1733 sequence

SEQ ID NO: 14733 - DNA, 260 bp, Unknown
  Description of Unknown: LeftRegion for integrase B1734 sequence
atgaagattttacaatgaagaggcaaaatctcttggtttagcaccgtgtaaaaggtgctgtaactaaacaaccgccctgcagctaccaactgcagagcgattatatagatgttacctatcaacccgagggccaatataataactccctaagcaagtcttattatatcacatgccctcttttttagaaaggggctttttatatgtctaaaactgtcgctatctatgtcagggtttccacagggaaacaggctgacagagac

SEQ ID NO: 14734 - DNA, 260 bp, Unknown
  Description of Unknown: LeftRegion for integrase B1735 sequence
gtcaggtttaatggatgaattaagcaaatcacatgatgaatagtcagttttgcgccggcgcaaattaaaaaccgccctgcagctaccaactgcagagcgattaaatagatgttacctatcaacccgagggccaatataataactccctaagcaagtcttattatatcacatgccctcttttttagaaaggggctttttatatgtctaaaactgtcgctatctatgtcagggtttctacagggaaacaggctgacagagac

SEQ ID NO: 14735 - DNA, 260 bp, Unknown
  Description of Unknown: LeftRegion for integrase B1736 sequence
ccgtgagataattgtgggcggacgaaaattctttgtccgctccatcttctctaccgcagagaaagcaaaaacgcctacggagcagatgctccaaatcatcgacagtgatttagaaaaaggttcgatttgaggatagacattgggcaggagatacggtatgtttgttgttaccgtatcggcttgcccggaaaggagtagcaatggcaagcaataaaaaatatgccgtcctctatggccggctgagtcaggaggatacgcag

SEQ ID NO: 14736 - DNA, 260 bp, Unknown; identical to SEQ ID NO: 14692
  Description of Unknown: LeftRegion for integrase B1737 sequence

SEQ ID NO: 14737 - DNA, 260 bp, Unknown
  Description of Unknown: LeftRegion for integrase B1738 sequence
tcaggtttaatggatgaattaagcaaatcacatgatgaatagtcagttttgcgccggcgcaaattaaaaaatcgccctgcagctaccaactgcagagcgattatatagatgttacctatcaacccgagggccaatataataactccctagacaagtcttattatatcacatgccctcttttttagaaaggggctttttatatgtctaaaactgtcgctatctatgtcagagtttcaacggggaaacaggctgacagagac

SEQ ID NO: 14738 - DNA, 260 bp, Unknown
  Description of Unknown: LeftRegion for integrase B1739 sequence
tattcaaattgacatcgaagaggcaaagtctcttggtttatcaccgtgtaaaaggtgctgtaactaaacaaacgccctgcagctaccaactgcagagcgattatatagatgttacctattaacccgagggccaatataataactccataagcaagtcttattatatcacatgccctcttttttagaaaggggctttttatatgtctaaaactgtcgctatctatgtcagggtttcaacagggaaacaggctgacagagac

SEQ ID NO: 14739 - DNA, 260 bp, Unknown; identical to SEQ ID NO: 14694
  Description of Unknown: LeftRegion for integrase B1740 sequence

SEQ ID NO: 14740 - DNA, 260 bp, Unknown; identical to SEQ ID NO: 14738
  Description of Unknown: LeftRegion for integrase B1741 sequence

SEQ ID NO: 14741 - DNA, 260 bp, Unknown; identical to SEQ ID NO: 13018
  Description of Unknown: LeftRegion for integrase B1742 sequence

SEQ ID NO: 14742 - DNA, 260 bp, Unknown; identical to SEQ ID NO: 14738
  Description of Unknown: LeftRegion for integrase B1743 sequence

SEQ ID NO: 14743 - DNA, 260 bp, Unknown; identical to SEQ ID NO: 13396
  Description of Unknown: LeftRegion for integrase B1744 sequence

SEQ ID NO: 14744 - DNA, 260 bp, Unknown
  Description of Unknown: LeftRegion for integrase B1745 sequence
gtgagtaggaataaatgtgataacaagaacagaagtagaagaatgttttgccgttattgatgatgaaatagtatggcatggcgggatgaatctacttggaaaagctgatgtctgggataacttaatgcgtatcagaaattcacaagttgcaacggaattgttggaaattgctttgggatgttctgaggagaggaggaaaagtgaataaaaagataaaatgtgatacctataccagagtatccacaaccatgcaggtagat

SEQ ID NO: 14745 - DNA, 260 bp, Unknown; identical to SEQ ID NO: 14697
  Description of Unknown: LeftRegion for integrase B1746 sequence

SEQ ID NO: 14746 - DNA, 260 bp, Unknown; identical to SEQ ID NO: 14721
  Description of Unknown: LeftRegion for integrase B1747 sequence

SEQ ID NO: 14747 - DNA, 260 bp, Unknown; identical to SEQ ID NO: 14695
  Description of Unknown: LeftRegion for integrase B1748 sequence

SEQ ID NO: 14748 - DNA, 260 bp, Unknown
  Description of Unknown: LeftRegion for integrase B1749 sequence
taacaatatagtcagttttagaatgccgccagcaaatgaccagcaaattgctggcaaatgaaaatcccccggtgttaccagcaccgagggacctgcaagaacgtgttaccagcacgctcaattatcaacccaagcactaccaagagctgattacttttttattatatcagctctgctcaaaaaatgaaaggagtacaaatatgcttagagcagtaatttacgcgcgcttcagcagcgatatgcagcgcgaagaatccatt

SEQ ID NO: 14749 - DNA, 260 bp, Unknown
  Description of Unknown: LeftRegion for integrase B1750 sequence
ctattcaaattgacatcgaagaggcaaagtctcttggtttagcaccgtgtaaaaggtgctgtaactaaaaaaccgccctgcagcggcaactgcagagcgtttatatagatgttacctatcaacccgagggccaatataataactccctagacaagtcttattatatcacatgccctcttttttagaaaggggctttttatatgtctaaaaccgtcgctatctatgtcagggtttcaacagggaaacaggctgacagagac

SEQ ID NO: 14750 - DNA, 260 bp, Unknown; identical to SEQ ID NO: 14694
  Description of Unknown: LeftRegion for integrase B1751 sequence

SEQ ID NO: 14751 - DNA, 260 bp, Unknown
  Description of Unknown: LeftRegion for integrase B1752 sequence
gtattctgactatgagtggtgagcagttgcttgtcggaaacggcactgtgacgcacaagcaggccgtggacaaagccaccactgaatatcggaagtataagacaagaacgctcagcgacgtagaacaagactatctggattccatccagttcttagagcaaaaaatcgacaagaaataacggtatctgtgaggatttcttatgtcacagggaaagacaaaagtttatatttacactcgtgtatctaccacgatgcaaatc

SEQ ID NO: 14752 - DNA, 260 bp, Unknown
  Description of Unknown: LeftRegion for integrase B1753 sequence
agaaagaagaatattatggttccgaagatggtaagtcttacatcaaatatctgcattctgtagatggcgctcctatatttgatgttaaaaaaggtgatacatcttataccctgattagctgccgtgaaattctttaatctttaatcacctagcccctatcgttataatacgcggtaggggcgtttttgtttggaaatggtatgaaaactaaactgtattcgtatattcgcttctcgtctatgcgtcagaatgatggttcg

SEQ ID NO: 14753 - DNA, 260 bp, Unknown; identical to SEQ ID NO: 14697
  Description of Unknown: LeftRegion for integrase B1754 sequence

SEQ ID NO: 14754 - DNA, 260 bp, Unknown
  Description of Unknown: LeftRegion for integrase B1755 sequence
ggtcgtttcaaaatgaaacagccttccagatggcgatgtatctggcaaggcggatgctggccgaaaagctcatcaccgggaaggagtaccgggacttcgagcaggagatgcttcgccgctatcagcctttttccggggacttatacacttgataattgtatcaaacagagtgatatatagtgtcgaaaggagctgattctatgcggactatccgtaagattgaacgacgcataccaaatttgaagcaaagaaagaaagtc

SEQ ID NO: 14755 - DNA, 260 bp, Unknown
  Description of Unknown: LeftRegion for integrase B1756 sequence
ctattcaaattgacattgaaaaggcaaagtctcttggtttagcaccgtgtaaaaggtgctgtaactaaacaaacgccctgcagcggcaactgcagagcgattatatagatgttacctattaacccgagggccaatataataactccctagacaagtcttattatatcacatgccctcttttttagaaaggggctttttatatgtctaaaactgtcgctatctatgtcagggtttccacagggaaacaggctgacagagac

SEQ ID NO: 14756 - DNA, 260 bp, Unknown; identical to SEQ ID NO: 14701
  Description of Unknown: LeftRegion for integrase B1757 sequence

SEQ ID NO: 14757 - DNA, 260 bp, Unknown; identical to SEQ ID NO: 14695
  Description of Unknown: LeftRegion for integrase B1758 sequence

SEQ ID NO: 14758 - DNA, 260 bp, Unknown
  Description of Unknown: LeftRegion for integrase B1759 sequence
cgcagaaattgagagcggctgtattgccgtggtcgtggtagacggtacagaagggtttttaaaacaggtcgagttcggtgaggactctacttcgcttcactccttcaacccttactatcctgatatggagttcgtaggtgccgaccagaaacgcttgcactttatcggtcgtgtccgggaaatgaagcggaggttctgatatgcatatcgacctctctatgttaaccccggaagaacagcagcagtttcgtgatgatcct

SEQ ID NO: 14759 - DNA, 260 bp, Unknown; identical to SEQ ID NO: 13821
  Description of Unknown: LeftRegion for integrase B1760 sequence

SEQ ID NO: 14760 - DNA, 260 bp, Unknown
  Description of Unknown: LeftRegion for integrase B1761 sequence
aaagatacagaatcgtatatcaacatcctgtataagggcaatacccgcaaatggatctgccggctaaagctaacggataatcagaaaacactgattattcctgatgagaataaaaaggaaaccaagtattccatgcaggacatctatgagttaaacaactacaaggaacagttggtagccgttttgaaccgctatctgtgatgcatcccgcagaccacaaccgaacactgttttgttgtggtctgcatttttacacccgc

SEQ ID NO: 14761 - DNA, 260 bp, Unknown
  Description of Unknown: LeftRegion for integrase B1762 sequence
gataggaaacacctgttatgtggtaaaatcccgctcaaaagaacaggcacaggaagacgcagtaacgaaagtaaaaaggcttatccgtaatgacttgaaacaataattttgctataaaacagggcagacagaaaacagaaaatgcggtacaataaagttgcaaaagcattgtctgtttgactgtcggataggaggtatttatgttacagcagtcaaacaacactatcacttccatttatccgattggaaatcaaacagag

SEQ ID NO: 14762 - DNA, 260 bp, Unknown
  Description of Unknown: LeftRegion for integrase B1763 sequence
aaatattacctattaaattataacactgcatttagcaaaaagcaacaggaatatgtacaaacaatgtaagaatattttgttgcgaggtgatattatggaaataaccgaagcagagatagaaataattacaaggcagattgttaaaatcatcataaatcatcaacgtgacgcatcagctgtcattcctgaggatgcagacgatgaataagctcagagccgcagcctattgccgtgtttcgaccgaccgtgccgagcaatcc

SEQ ID NO: 14763 - DNA, 260 bp, Unknown
  Description of Unknown: LeftRegion for integrase B1764 sequence
aaatattacctatttaattataacactgcatttatcaaaaagcaacaggaatatgtacaaacaatgtaagaatattttgttgcgaggtgatattatggaaataaccgaagcagagatagaaattattacaaggcagatcgttaaaatcatcataaatcatcaacgtgacgcatcagctgtgggtcctgaggacgcagacgatgaataagctcagagccgcagcctattgccgtgtttcgaccgaccgcaccgagcaatcc

SEQ ID NO: 14764 - DNA, 260 bp, Unknown; identical to SEQ ID NO: 13821
  Description of Unknown: LeftRegion for integrase B1765 sequence

SEQ ID NO: 14765 - DNA, 109 bp, Unknown
  Description of Unknown: LeftRegion for integrase B1766 sequence
gtaattagtacaaatgccatgcttgtctgttgtcggaaaggaggacaaaatgttacagacaagcaagattaccgctttatattgcagattgagccaggaagatatgcaa

SEQ ID NO: 14766 - DNA, 260 bp, Unknown
  Description of Unknown: LeftRegion for integrase B1767 sequence
atgtttttgatgatatggtaagactcagtcccgtgaatccggaatatcaacccaaagagctaaggggtgttgatatggaaacatatcacattctcggcgtaccacgtattcttattcgcgaaataagttaaaaagcccgctcccgtgagaacaggaacgaacgagaaagtgccacagaaaagtaagaaagcggagagagtatgacaaatgcagtgatatatgcccggtatagcccgggaccaaatcaaacggatcaatca

SEQ ID NO: 14767 - DNA, 260 bp, Unknown
  Description of Unknown: LeftRegion for integrase B1768 sequence
aaatattacctatttaattataacactgcatttatcaaaaagcaacaggaatatgtacaaacaatgtaagaatattttgttgcgaggtgatattatggaaataaccgaagcagagatagaaattattacaaggcagatcgttaaaatcatcataaatcatcaacgtgacgcatcagctgttagtcctgaggacgcagacgatgaataagctcagagccgcagcctattgccgtgtttcgaccgaccgtaccgagcaatcc

SEQ ID NO: 14768 - DNA, 260 bp, Unknown
  Description of Unknown: LeftRegion for integrase B1769 sequence
caagccaccatcacccggcagagcgaagactaccggcggcacatcatgcagatgcagacctactacggaatgctgcaccgtcaggagcaccgggcaattctattcctgtccatcggtgtcaccgtgctggtggtgtttctggttgcctggctggtgttagatgttctccacccgagcattgggtggattaagaggtaactatgagaaattgcaccattgatttatcgtctctcacccctgaggagcgccggcagttctcg

SEQ ID NO: 14769 - DNA, 260 bp, Unknown
  Description of Unknown: LeftRegion for integrase B1770 sequence
aaatattacctattaaattataacactgcatttagcaaaaagcaacaggaatatgtacaaacaatgtaagaatattttgttgcgaggtgatattatggaaataaccgaagcagagatagaaataattacaaggcagattgttaaaatcatcataaatcatcaacgtgatgcatcagctgtcattcctgaggatgcagacgatgaataagctcagagccgcagcctattgccgtgtttcgaccgaccgtgccgagcaatcc

SEQ ID NO: 14770 - DNA, 260 bp, Unknown
  Description of Unknown: LeftRegion for integrase B1771 sequence
aaatattacctatttaattataacactgcatttatcaaaaagcaacaggaatatgtacaaacaatgtaagaatattttgttgcgaggtgatattatggaaataaccgaagcagagatagaaatcattacaaggcagattgttaaaatcatcataaatcatcaacgtgacgcatcagctgtcggtcctgaggacgcagacgatgaataagctcagagccgcagcctattgccgtgtttcaaccgaccgtgccgagcaatcc

SEQ ID NO: 14771 - DNA, 260 bp, Unknown; identical to SEQ ID NO: 13821
  Description of Unknown: LeftRegion for integrase B1772 sequence

SEQ ID NO: 14772 - DNA, 260 bp, Unknown
  Description of Unknown: LeftRegion for integrase B1773 sequence
aaatattacctattaaattataacactgcatttagcaaaaagcaacaggaatatgtacaaacaatgtaagaatattttgttgcgaggtgatattatggaaataaccgaagcagagatagaaatcattacaaggcagattgttaaaatcatcataaatcatcaacgtgacgcatcagctgtgggtcctgaggacgcagacgatgaataagctcagagccgcagcctattgccgtgtttcaaccgaccgtgccgagcaatcc

SEQ ID NO: 14773 - DNA, 260 bp, Unknown
  Description of Unknown: LeftRegion for integrase B1774 sequence
actcgagtataataagaagaaaatacatatgacattggaatttccttatacagtagatcctaaggatgccgaacgctttgagaaaactttgagacaggtatatctcaataggattcaaaaagggtctggacaaatggcatataatgcggtatcctcccactccttaaaagaaaagtcaggtgtaaaaggaggatacgataatgagtaaaagagtaaggacattattacgtgtgtcatctaggcaacagttacatgatgat

SEQ ID NO: 14774 - DNA, 260 bp, Unknown
  Description of Unknown: LeftRegion for integrase B1775 sequence
ttgttaaacatctgctatatgctgtatatattggtatttacgcgcgttttcttatcattttgattgttgcatgatatttgacgttgtattggcgttgtattagcgttgctcgtttcgacaaataagaaactaaagttgtatagactattgcatatttcattgaaaatgagtacctttgcaccgtcaaatgaaataacgctatggataagaaaatactttgcatcatacgagccagcaccgaaaagcaagaaacggaatcc

SEQ ID NO: 14775 - DNA, 260 bp, Unknown
  Description of Unknown: LeftRegion for integrase B1776 sequence
ggctactggctgtaaaatgctggtagccctcattttttagttgtatctagtatataaggggtgtataatagatagaaactgaaaacagcctcataaagccctctattttatcgagggtaaagaagtctacacctaatatataaaagtggctgtatgaggcacacaggagctcacaggactattacaggagggtaaacaggatggcatacaggaaaataacggatataaaagatactattggtatgagagcggtattttat

SEQ ID NO: 14776 - DNA, 260 bp, Unknown
  Description of Unknown: LeftRegion for integrase B1777 sequence
tttgtataagcaaggtctaataactgaaatggaaaggaataaaatggtaaataaaatagcaaatacgcaagcttcattcattaaggttgacaacatcagtaacaaaattgaaaaaatgtcgagtttagtctaatttcttggtttacaaactttatgtatcatgatataataatgatataattgttaattaggaggaaaaaatggatatacatgaaactagacaaaaattaaaattaaaaaatatatttgatattaatttg

SEQ ID NO: 14777 - DNA, 260 bp, Unknown; identical to SEQ ID NO: 14761
  Description of Unknown: LeftRegion for integrase B1778 sequence

SEQ ID NO: 14778 - DNA, 260 bp, Unknown
  Description of Unknown: LeftRegion for integrase B1779 sequence
atgaagatatcatggcacgatgcatcttaagagcaatcaacaaccggatgcttcagagcggaattattgatgaggagactaagaagcgaatagaaaatcgcattcagaggtcgaaatttgtcagtaattgattgaaaaacaattatgcaggggatataatcaaattgattttgcccctgcattttttgcaggaggacattatggatatatataaggtaaggcagcttttaaaagagcaaagtatttttgacatcccgcta

SEQ ID NO: 14779 - DNA, 260 bp, Unknown
  Description of Unknown: LeftRegion for integrase B1780 sequence
tggcaccgctattaatagaacaacaataagcaaatgggaaaacggaacccaagaagctggtatgggttttgtccttatttttgctgatttctttggcgtttccttagattatataatggaaaaatggtgagtgtccctactcctgcggggacaggaacgagcgagaaagtgacaatgaaaagtaagaaagcggagagagtatgacaaatgcagtaatatatgcccggtatagcccggggccaaatcaaacggatcaatca

SEQ ID NO: 14780 - DNA, 260 bp, Unknown
  Description of Unknown: LeftRegion for integrase B1781 sequence
cgcagaaattgagagcggctgtattgccgtggtcgtggtagacggtacagaagggtttttaaaacaggtcgagttcggtgaaaattccatctcgcttcactccttcaacccttactatcctgatatggagttcgtaggtgccgaccagaaacgcttgcactttatcggtcgtgtccgggaaatgaagcggaggttctgatatgcgtaaaaagtttaatatcgacctctccatgttaaccccggaggaacagcagcagttt

SEQ ID NO: 14781 - DNA, 260 bp, Unknown; identical to SEQ ID NO: 13028
  Description of Unknown: LeftRegion for integrase B1782 sequence

SEQ ID NO: 14782 - DNA, 260 bp, Unknown
  Description of Unknown: LeftRegion for integrase B1783 sequence
caagccaccatcacccggcagagcgaagactaccggcggcacatcatgcagatgcagacctactacggaatgctgcaccgtcaggagcaccgggcaattctattcctgtccatcggcgtcaccgtgctggtggtgtttctggttgcctggctggtgttagatgttctccacccgagcattgggtggattaagaggtaactatgagaaattgcaccattgatttatcgtctctcacccctgaggagcgccggcagttctcg

SEQ ID NO: 14783 - DNA, 260 bp, Unknown
  Description of Unknown: LeftRegion for integrase B1784 sequence
ttcgtgatcagcttgtttctgattatggggaacagtttactaaagaagaggccgactatgcaatagatcatcttgaataacactatagttgctataccattttgaaataatggagctttgctattataagatgtaccggtgcaactattgagttacatccttatcaaacggtgacaaattgtcaccgtttgataaattaaatgtccgaaaatacgattcaaataattaaaatcgctcagggcataccgggacggaatcac

SEQ ID NO: 14784 - DNA, 260 bp, Unknown; identical to SEQ ID NO: 13821
  Description of Unknown: LeftRegion for integrase B1785 sequence

SEQ ID NO: 14785 - DNA, 260 bp, Unknown
  Description of Unknown: LeftRegion for integrase B1786 sequence
gtgcgtcgcttttgcgttttagcggtgatggcggtgcaggcaaagatgctttgactggaacgatggttgatacgagatctggggaaactgtttcaacaaagatcgaaagcctagaagacctttgcaaactgtttcctgcggtgaagttatacgtggcaggataatattcgtatttgtgaacagaaagagggcgggcagcattgtcgaagcgcgaatcgaaaagcagccagaagtgtttggcagcggagcagatcggcgtg

SEQ ID NO: 14786 - DNA, 260 bp, Unknown; identical to SEQ ID NO: 13027
  Description of Unknown: LeftRegion for integrase B1787 sequence

SEQ ID NO: 14787 - DNA, 260 bp, Unknown; identical to SEQ ID NO: 13028
  Description of Unknown: LeftRegion for integrase B1788 sequence

SEQ ID NO: 14788 - DNA, 260 bp, Unknown; identical to SEQ ID NO: 13857
  Description of Unknown: LeftRegion for integrase B1789 sequence

SEQ ID NO: 14789 - DNA, 260 bp, Unknown; identical to SEQ ID NO: 14779
  Description of Unknown: LeftRegion for integrase B1790 sequence

SEQ ID NO: 14790 - DNA, 260 bp, Unknown
  Description of Unknown: LeftRegion for integrase B1791 sequence
cacttttgatttcaccacgcaaaaagacctcgacaacgagtataaaaaactcaataacggggagattggttctgtagtagcgacagttatattcggtgccttatttattgcagttttaggtttcctaaaatagtaatcgtttttcagccattaaacgcaaatttgaggctgttttcgttaaataaggggggggtgacagtttgagttcggttgacaaaatcgccgttgtttacgcacggtattcttcccacgggcagacc

SEQ ID NO: 14791 - DNA, 260 bp, Unknown
  Description of Unknown: LeftRegion for integrase B1792 sequence
atatcggtgctaacttttttctagacagaaatccgttaaattgcgacagaaaaaaagagcgtggaatcgtcctgttgtccattccacttcctgaggctcttgcaattgcctattgttgtaaataagaaactaaagttgtatagactattgcatatttcattgaaaatgagtacctttgcaccgtcaaatgaaataacgctatggataagaaaatactttgcatcatacgagccagcaccgaaaagcaagaaacggaatcc

SEQ ID NO: 14792 - DNA, 260 bp, Unknown
  Description of Unknown: LeftRegion for integrase B1793 sequence
tcgcaccctcggcattctgctgattgcgcttggcgttctcctgctggtgcttgggcttctatcatgggcgtgggcgatccttggtgcgctgagtgccgtcggcggggtgctgctgcttaaaaatgcaaaattgatttctgaacgcgggaacgctgctgctttggctgcggctcgaaacgtggccgaggcaaggatggaagatgaagaagaagccgattgaacctgaaatgcaggatgccgtgatctacactcggtactcg

SEQ ID NO: 14793 - DNA, 260 bp, Unknown
  Description of Unknown: LeftRegion for integrase B1794 sequence
gccaaatacgcctgtgtattgagcggaatgtctgttcatcagcaggaggacaagccagaacttcgtccggatgaaacaacaatgcccaaagtcgccattgcctaacctaaaacagcgtgatataattttcattgcataacctgtctaaaccttctgcggaggaaatcaaaaaactccgcagaaggtgattggagaagacgatgaaggaaagaacgaaggtatacctatatacccgcgtgtccaccgccatgcagattgat

SEQ ID NO: 14794 - DNA, 260 bp, Unknown
  Description of Unknown: LeftRegion for integrase B1795 sequence
aaatattacctattaaattataacactgcatttatcaaaaagcaacaggaatatgtacaaacaatgtaagaatattttgttgcgaggtgatattatggaaataaccgaagcagagatagaaatcattacaaggcagattgttaaaatcatcataaatcatcaacgtgacgcatcagctgtgggtcctgaggatgcagacgatgaataagctcagagccgcagcctattgccgtgtttcgaccgaccgtgccgagcaatcc

SEQ ID NO: 14795 - DNA, 260 bp, Unknown
  Description of Unknown: LeftRegion for integrase B1796 sequence
atgaagatatcatggcacgatgcatcttaagagcaatcaataaccggatgcttcggagcggaattattgatgaggagactaagaagcgaatagaaaatcgcattcagaggtcgaaatttgtcagtaattgattgaaaaacaattatgcaggggatataatcaaattgattttgcccctgcattttttgcaggaggacattatggatatatataaggtaaggcagcttttaaaagggcaaagtatctttgacatcccgcta

SEQ ID NO: 14796 - DNA, 260 bp, Unknown; identical to SEQ ID NO: 13138
  Description of Unknown: LeftRegion for integrase B1797 sequence

SEQ ID NO: 14797 - DNA, 260 bp, Unknown; identical to SEQ ID NO: 14770
  Description of Unknown: LeftRegion for integrase B1798 sequence

SEQ ID NO: 14798 - DNA, 260 bp, Unknown; identical to SEQ ID NO: 13853
  Description of Unknown: LeftRegion for integrase B1799 sequence

SEQ ID NO: 14799 - DNA, 260 bp, Unknown
  Description of Unknown: LeftRegion for integrase B1800 sequence
tggcacctctattaatagaacaacaataagcaaatgggaaaacggaacccaagaagctggtatgggttttgtccttatttttgctgatttctttggcgtttccttagattatataatggaaaaatggtgagtgtccctactcctgcggggacaggaacgagcgagaaagtgacaatgaaaagtaagaaagcggagagagtatgacaaatgcagtaatatatgcccggtatagcccgggaccgaatcaaacagatcaatca

SEQ ID NO: 14800 - DNA, 260 bp, Unknown
  Description of Unknown: LeftRegion for integrase B1801 sequence
gttcatctcgcggggctcctttctcgaacttttgttcgatttatattgtagactcattttttgaggttgtcaatagaaactttaaagaaaaatatcggttcctatcagcaccgatatgtaaaataaataaaaaagcccgctcccgtgagaacaggaacgagcgagagagtgccacagaaaagtaagaaagcggagagagtatgacaaatgcagtgatatatgcccggtatagcccgggaccgaatcaaacagatcaatca

SEQ ID NO: 14801 - DNA, 260 bp, Unknown
  Description of Unknown: LeftRegion for integrase B1802 sequence
aaatattacctatttaattataacactgcatttatcaaaaagcaacaggaatatgtacaaacaatgtaagaatattttgttgcgaggtgatattatggaaataaccgaagcagagatagaaatcattacaaggcagattgttaaaatcatcataaatcatcaacgtgacgcatcaactgtcggtcctgaggacgcagacgatgaataagctcagagccgcagcctattgccgtgtttcaaccgaccgtgccgagcaatcc

SEQ ID NO: 14802 - DNA, 260 bp, Unknown; identical to SEQ ID NO: 13026
  Description of Unknown: LeftRegion for integrase B1803 sequence

SEQ ID NO: 14803 - DNA, 260 bp, Unknown
  Description of Unknown: LeftRegion for integrase B1804 sequence
aaatattacctattaaattataacactgcatttatcaaaaagcaacaggaatatgtacaaacaatgtaagaatattttgttgcgaggtgatattatggaaataaccgaagcagagatagaaatcattacaaggcagattgttaaagtcatcataaatcatcaacgtgacgcatcagctgtgggtcctgaggatgcagacgatgaataagctcagagccgcagcctattgccgtgtttcgaccgaccgtgccgagcaatcc

SEQ ID NO: 14804 - DNA, 260 bp, Unknown; identical to SEQ ID NO: 13821
  Description of Unknown: LeftRegion for integrase B1805 sequence

SEQ ID NO: 14805 - DNA, 260 bp, Unknown; identical to SEQ ID NO: 14779
  Description of Unknown: LeftRegion for integrase B1806 sequence

SEQ ID NO: 14806 - DNA, 260 bp, Unknown; identical to SEQ ID NO: 13027
  Description of Unknown: LeftRegion for integrase B1807 sequence

SEQ ID NO: 14807 - DNA, 260 bp, Unknown; identical to SEQ ID NO: 14761
  Description of Unknown: LeftRegion for integrase B1808 sequence

SEQ ID NO: 14808 - DNA, 260 bp, Unknown; identical to SEQ ID NO: 13264
  Description of Unknown: LeftRegion for integrase B1809 sequence

SEQ ID NO: 14809 - DNA, 260 bp, Unknown; identical to SEQ ID NO: 14770
  Description of Unknown: LeftRegion for integrase B1810 sequence

SEQ ID NO: 14810 - DNA, 260 bp, Unknown
  Description of Unknown: LeftRegion for integrase B1811 sequence
gacttccggctggcggctctgataaaggcagaacggaatacataccgcaaacccgctccgcagaatgagccgcggcagcaggaaacagtgttcacagaatatgagccgactgacgagattcagcgcatgactaatgaaatcaatcggttaatcaattcggaagatactgataaggaaaaggttgaagcacttatagtaagatgcgctcaattgaaatatgcgacaataagtgtggtgagaagatgatgcaaacattggca

SEQ ID NO: 14811 - DNA, 260 bp, Unknown; identical to SEQ ID NO: 13027
  Description of Unknown: LeftRegion for integrase B1812 sequence

SEQ ID NO: 14812 - DNA, 260 bp, Unknown
  Description of Unknown: LeftRegion for integrase B1813 sequence
aaatattacctatttaattataacactgcatttatcaaaaagcaacaggaatatgtacaaacaatgtaagaatattttgttgcgaggtgatattatggaaataaccgaagcagagatagaaatcattacaaggcagattgttaaaatcatcataaatcatcaacgtgatgcatcagctgtgggtcctgaggatgcagacgatgaataagctcagagccgcagcctattgccgtgtttcaaccgaccgtgccgagcaatcc

SEQ ID NO: 14813 - DNA, 260 bp, Unknown; identical to SEQ ID NO: 13018
  Description of Unknown: LeftRegion for integrase B1814 sequence

SEQ ID NO: 14814 - DNA, 260 bp, Unknown
  Description of Unknown: LeftRegion for integrase B1815 sequence
ttgataaactcgaaggagaggtgaatcgactgcttggatacaggaagtatctaacagctgctgactgggaggaattagaacggaactaccagaaaaacaattgatgacattcgtgacataatcggaaagtacagatgaatcttcctcctctcgttgcaaaaagggagaaatctaattgatcggtcaaataggagaaaacaatggcgaaaaaaagatatgacctgcggccggtgcgcaccgtatgcatctatgcgcggtac

SEQ ID NO: 14815 - DNA, 260 bp, Unknown
  Description of Unknown: LeftRegion for integrase B1816 sequence
gtcgtaaatatcggcggttccgtcggcaacggtgtcacaaagaaaaccgactttctcgttgtcggctctacagattattgcgcctctgtaaagggcggcaaaactggcaagctgaaaaaagccgaggatttgcagaaaaagggcgcaaaccttgccattatcgacgagggcgctttttacgacatgttgggcgagtgattatggcacaacaaaaaaaggccgccggggccgagtttgacggtacgccgcgggcggttatc

SEQ ID NO: 14816 - DNA, 260 bp, Unknown; identical to SEQ ID NO: 13441
  Description of Unknown: LeftRegion for integrase B1817 sequence

SEQ ID NO: 14817 - DNA, 260 bp, Unknown
  Description of Unknown: LeftRegion for integrase B1818 sequence
ttacggccttacaagcctgtgcatcatcctggctatggccctgatggcctatgttgttctggatgcccaaaatcccacgattggcctcatccgggccgacggtatcaatatttgggtgtatctggcggcattggcaatcatcgggatttgcctgtttatcgggcaaacaatggttaaaaagagactgcggaggaaagaaaatgaaaatgccgattgatttgtcttccctgacaccggcggaaagaacactatttgatagc

SEQ ID NO: 14818 - DNA, 260 bp, Unknown
  Description of Unknown: LeftRegion for integrase B1819 sequence
taaaagcgcattgattccttcagatgaaatccggtcagaagaacttctggcggaacaaaaatttgaagcgtttatcacttcgctggcacatatcatcgagaaatatggtatgagagtgctgggcgaggttgacggagctgcgtgagaatcgcagctttacataggatattttccaaaagtaaattttggaggtatgaattatgaaccgatatggaaaacgctgtgttttgtatccgagggtcagcacagagatgcaagtg

SEQ ID NO: 14819 - DNA, 260 bp, Unknown
  Description of Unknown: LeftRegion for integrase B1820 sequence
gagcaaaaagacgacggatcgatgccgccgattggcaccagactggttaaaacctattgcggcaaggaatacaatgtgatgatttccaccgccggtttccaatttgaaggcgtgtattacaaaacgctgtccgccgtggttaaaaagataaccggcagaaaaatatcaggcaggttctttttcggcataggaggcaaagcgtgaacaccgtgcgatgcgccatatacacccgaaaatccaccgaagaaggcttggacaag

SEQ ID NO: 14820 - DNA, 260 bp, Unknown
  Description of Unknown: LeftRegion for integrase B1821 sequence
catcttctccgcagaaaagacagggcgttttggaacgagttgaacctaaacgtacaactctacttatataaatggctcccagatatgatatttcggaaatgaatttaactttttgactgttgaaagtgtggaaagatttattttccccagaacttgcaacggcttgcaacaaacttaaaactacttgaaaggtggtatttatgcctcgcaaaaagaaactgcaagaggttggcggcctgcgcctggtggcgtactatcgc

SEQ ID NO: 14821 - DNA, 260 bp, Unknown; identical to SEQ ID NO: 13491
  Description of Unknown: LeftRegion for integrase B1822 sequence

SEQ ID NO: 14822 - DNA, 260 bp, Unknown
  Description of Unknown: LeftRegion for integrase B1823 sequence
atactgcgagaattgcggatacagctttgactttaccacacaggatgacctcaacgcccaatataataaactgaacacaaacgagggatgcgccattttggtggcggtcattctcggcgttattcttataacaatttggttttacagccattaaatgcaaatttgaggatgttttcgttaaataaggagggggtgacagtttgaatccagttgacaaaatcgccgttgtttacgcacgatattcttcccacgggcagacc

SEQ ID NO: 14823 - DNA, 260 bp, Unknown
  Description of Unknown: LeftRegion for integrase B1824 sequence
tatgtcaacggttttatggttggcaatattcccggcgacgataccgatttcataaaccgggcccgccgccgcggtgtcgaggtcgtcggttttaaggtcgattatttcgagcccgaggacgagcccgagcgcggtcgtgtgtactatgcccgaatcaagctcgagatcgtgcccgttcgtgcggcaaaggcggcgaaataatgccgcgggccgcgcaagccgccggggccgcgttcgacggaacgccgcgggcggtaatt

SEQ ID NO: 14824 - DNA, 260 bp, Unknown
  Description of Unknown: LeftRegion for integrase B1825 sequence
aaagaatttgaaaagcagtacatgagcgcggtactgctgtcgctctacgaaaacaagatgatcaattatcagcagtatgaagaatgtaagcgcaggctcaaaattgtttagctggactttgaagattctttgcatataatgtgtgttgaaagcgggcgccggaataaacaaaggcgcccgcaaatgaaaggaggataaaaatgtttattgatgataacagaccaaaacgggtggcggcgtactgccgcgtgtctaccgac

SEQ ID NO: 14825 - DNA, 109 bp, Unknown
  Description of Unknown: LeftRegion for integrase B1826 sequence
actggtaaaaaaatatccggacgatttttctttaaattaggaaataaaaatgaaaacgattaagtgtgcaatctataccagaaaatctacagacgaaggcttagataaa

SEQ ID NO: 14826 - DNA, 260 bp, Unknown
  Description of Unknown: LeftRegion for integrase B1827 sequence
ttacggccttacaagcctgtgcatcatcctggccatggccctgatggcctatgttgttctggatgcccagcatcccacgattggccttatccgggccgacggtatcaatatgtgggtgtatctggcggcattggcaatcatcgggatttgcctgtttatcggacagacaataattaaaaagagacttcggaggaaagaacatgaaaatgcagattgatttgtccgccctgacaccggcggaaagaacactattcgacggc

SEQ ID NO: 14827 - DNA, 260 bp, Unknown
  Description of Unknown: LeftRegion for integrase B1828 sequence
ttacggtcttacaagcctgtgcatcatcctggctatggccctgatggcctatgtcgtcctggatgcccggaatcccacgattggcctcatccggtccgacggtatcaatatgtgggtgtatctggtggcattggcaatcatcgtgacttgcctgtttatcggacaaaccgtgatgaaaaagagactgcggaggaaagaacatgaaaatgcagattgatttgtccgccctgacaccggcggaaagaacactattcgacagc

SEQ ID NO: 14828 - DNA, 260 bp, Unknown
  Description of Unknown: LeftRegion for integrase B1829 sequence
ctttgtctggaatagatgcccaccgtgacggaatttctttccagtttggttctaacaactacaccgtccttttaaataatgcagcatatgcaagtcgtattttggaggcagcaatcaacggagttccagctgccgatgaactggtttcttcggccgaagtgtaagtgcaatatgagatggtttaaatggagggtaatgggatgaacgaacaaaataaatggcccattgctgatattttggcccggtactcaacagacaat

SEQ ID NO: 14829 - DNA, 260 bp, Unknown; identical to SEQ ID NO: 13421
  Description of Unknown: LeftRegion for integrase B1830 sequence

SEQ ID NO: 14830 - DNA, 260 bp, Unknown
  Description of Unknown: LeftRegion for integrase B1831 sequence
cggggagattggttctgtagtagcgacaattatattcggcgtcttattcattgcggttttaggttttctaaaatagtaaccgtttttcagccattaaacgcaattttgagagtttttgtatctaatttagccttttaagcataaaattggagccttaattacaaatttaggctcattttcgttagataagaggtgatactttgagttcggttgataaaatcgccgttatttacgcgcgttattcgtctcacggccagacc

SEQ ID NO: 14831 - DNA, 260 bp, Unknown
  Description of Unknown: LeftRegion for integrase B1832 sequence
gacaaaatcctcgaactgcgcgaatcgaccgggatgaaccgccgggagttttgcactttcttccaaattccctaccgcactgtaacagaatgggaactcggccaccgccatgcgccagagtatgtactccggttgctagagtattatatccagcatgaaaatctcacacaacaaccaaccgccgaaagtgaggatttcttatgaaaaaagcacgcaccaaatgctacatttatactcgcgtatctacggccatgcaggtg

SEQ ID NO: 14832 - DNA, 260 bp, Unknown; identical to SEQ ID NO: 13341
  Description of Unknown: LeftRegion for integrase B1833 sequence

SEQ ID NO: 14833 - DNA, 260 bp, Unknown
  Description of Unknown: LeftRegion for integrase B1834 sequence
gtatctgataccctatggatagggtatctataccgtatccataccatagcgatacctcgcgtgcgcgtgcgcgggtgcgcgtgatcgggcgcgcactgttactgtctctgtatctgtaactggtactgtatctgtaaactgttatctgtttctgtatttctatcttaggaaatctatcgttagaagaaggaggtggcgctgtgcctaaaaaacctacaaagcacccggccaagccgaaacggggcaagaagctggaaatc

SEQ ID NO: 14834 - DNA, 260 bp, Unknown; identical to SEQ ID NO: 14687
  Description of Unknown: LeftRegion for integrase B1835 sequence

SEQ ID NO: 14835 - DNA, 109 bp, Unknown
  Description of Unknown: LeftRegion for integrase B1836 sequence
cgggcaaacgaatttccggacgctttttctttggattgggagagaataaatgaaaactatacgatgtgccgtttatacccgaaaatcaactgaagatggtctggaaaaa

SEQ ID NO: 14836 - DNA, 260 bp, Unknown
  Description of Unknown: LeftRegion for integrase B1837 sequence
aagaaaagaatttttcaaagtaaatatagatgacttaagaaaaatagttgataatatagatccttctgctgagtttaatactacaatgttagcagaacagtatagagaaacattagctcttgaagaataagtattcagctactttgtagctgtttattttatagtttaaaataacatctattcgttaaggagatgataaattgaacaccattgctatttatactcgtaaatctaaattcactggaaaaggtgaatctatt

SEQ ID NO: 14837 - DNA, 260 bp, Unknown
  Description of Unknown: LeftRegion for integrase B1838 sequence
ggctactggctgtaaaatgctggtagccctcattttttagttgtatctagtatataaggggtgtataatagatagaaactgaaaaagagcctcataaagccctctattttatcgagggtaaagaagttacacctaatatataaaagtggctgtatgaggcacacaggagctcacaggactattacaggagggtaaacaggatggcatacaggaaaataacggatataagagatactattggtatgagagcggtattttat

SEQ ID NO: 14838 - DNA, 260 bp, Unknown; identical to SEQ ID NO: 14548
  Description of Unknown: LeftRegion for integrase B1839 sequence

SEQ ID NO: 14839 - DNA, 260 bp, Unknown; identical to SEQ ID NO: 13032
  Description of Unknown: LeftRegion for integrase B1840 sequence

SEQ ID NO: 14840 - DNA, 260 bp, Unknown
  Description of Unknown: LeftRegion for integrase B1841 sequence
aggtgattgcatggaaaaagttattttgattgccataaacgaaaggctttttaaactcggactaatcaatgaagaaaccagaaataaagtattggcagaaattaatgcaacaaaataacgaaaaaactattgaatggagttgagaataatgattataatattcttgattccattcctgcaattacaaaggggaatgatttatgaacatatattatgcaagggaaagattaaggacaggatctatttttgacctaaagtta

SEQ ID NO: 14841 - DNA, 260 bp, Unknown
  Description of Unknown: LeftRegion for integrase B1842 sequence
ccaatattcgataccctatggatagggtatctataccgtatccataccgtagcgatacttcgcgtgcgcgcgtgcgtgtgcgcgcgatcatgcgcgcactgtctctgtacctgtctctgtatctgagactgtatctgtaatctgtttctaattctgaaattctactactgcaatctatcgttagaaggggggtggcgctgttgccgaaaaagactgcaaagcacccggcaaagccgaagcggggcaagaaactggaaatc

SEQ ID NO: 14842 - DNA, 260 bp, Unknown
  Description of Unknown: LeftRegion for integrase B1843 sequence
gaggacaacgatggcacgtgccttcctccggttggaacccgtctggttaagacctaccgcggaaaagaatataatgttattgtttctaccgccggctttcaatttgaggggatttattacaaaagtctgtccgcggttgctttaaaaatcacgggcaaacgaatttccggacgctttttctttggattgggagagaataaatgaaaagcatacgatgtgctgtttatacccgaaaatcaacggaagatggtcttgaaaaa

SEQ ID NO: 14843 - DNA, 260 bp, Unknown
  Description of Unknown: LeftRegion for integrase B1844 sequence
aaatacagatatgctagttttaaaagatttactacttttagatttttgactggttcagataaatatattactgaaaattttaaagattttatagattctaaaaacaaagattatcacgaacacttaaattttataagtgcttttcaaggtaattttttttagcagcaaacagaacgtatattcgttaaggagatgataaattgaacaccattgctatttatactcgtaaatctaaattcactggaaaaggtgaatctatt

SEQ ID NO: 14844 - DNA, 260 bp, Unknown
  Description of Unknown: LeftRegion for integrase B1845 sequence
acgtatgttttaatacatttaggaggtggatttaatgtttaaactttacaaaataaaaatcaaaatatcactactaacattgactaacaaatctttatactatctgaaaaaactattaaacataaaagtagttgaagacctttacgtttcaagctactacaaaataatatctctattttctgagcttgagagtgttataaatgaaagcagctctttacgttagagtatcgacaacttatcagatagataaagattcgtta

SEQ ID NO: 14845 - DNA, 260 bp, Unknown
  Description of Unknown: LeftRegion for integrase B1846 sequence
gaggacaacgatggcacgtgccttcctccggttggaacccgtctggttaagacctaccgcggaaaagaatataatgttattgtttctaccgccggctttcaatttgaggggatttattacaaaagtctgtccgcggttgctttaaaaatcacgggcaaacgaatttccggacgctttttctttggattgggagaaaataaatgaaaaccatacgatgtgccgtttatacccggaaatcaacggaagatggtcttgaaaaa

SEQ ID NO: 14846 - DNA, 260 bp, Unknown
  Description of Unknown: LeftRegion for integrase B1847 sequence
cgtgaagtagacattgaagatggagatattgtcgtggccgtggtagatcggcaagacggttttatcaaacaagtccactttgaagagaatatccttaccctgcattccttcaacccttactaccctgatatggtctttaaggggaacgagatcaagcaagtccgctttgtaggtaaagcccgagaggtgaagagaattctatgaagaagttcaaattccctattgacttgtctatgctgacagaagaagagatcaaccaa

SEQ ID NO: 14847 - DNA, 260 bp, Unknown
  Description of Unknown: LeftRegion for integrase B1848 sequence
gaggataacgatggcacgggacttcctccggttggaacccgtctggttaagacctatcgcggaaaagaatataatgtcattgtttctaccgccggctttcaatttgaggggatttattacaaaagtctgtccgcgattgctttaaaaatcacgggcaaacgaatttccggacgctttttctttggattgggagagaataaatgaaaaccatacgatgtgccgtttatacccggaaatcaacggaagatggtcttgaaaaa

SEQ ID NO: 14848 - DNA, 260 bp, Unknown
  Description of Unknown: LeftRegion for integrase B1849 sequence
cgcagaaattgagagcggctgtattgccgtggtcgtggtagacggtgtggaaggatttttgaaacaggtcgagttcggtgagaactctacctcgcttcactccttcaacccttactatcctgatatggagtttgtaggtgccgaccagaaacgcttgcactttatcggtcgtgtccgggaaatgaagcggaggttctgatatgcgtcagaagtttaagatcgacctctctatgctgaccccggaagaacagcagcagttt

SEQ ID NO: 14849 - DNA, 260 bp, Unknown
  Description of Unknown: LeftRegion for integrase B1850 sequence
ttacaaagaaaacaaattatctagttgtcggctcattcgatttcataaaatcagtaaaaggcggcaaatcttcaaagatagtaaaagctgaacaaatgcgccttgacggtttcgacattaacgttattacagagaacacatttttagatatgctagcaggaaaataaaaagcctgctccgagtggataggagggcggacaatggcaagagccgcaaagcaagacaataattcagaaataattgacggcgtgatatatgcc

SEQ ID NO: 14850 - DNA, 260 bp, Unknown
  Description of Unknown: LeftRegion for integrase B1851 sequence
aatctgcttttgttgatctacgttgagtgcttcaaacatggtcaaggcttccttgtcagaaaccttaccttctttgttagtgatatgacatattctactccaatcttaggaagttcttcctatgtattagcgccaagtgatattatagcactttatctttcgtttgccattggtaaatagaggaaaggataacagatattatgacagttaaaaaatttccaatcgacctctcctgtctgacagaggaagaaatctctcaa

SEQ ID NO: 14851 - DNA, 260 bp, Unknown
  Description of Unknown: LeftRegion for integrase B1852 sequence
tgaggtgattgcatggaaaaagttattttgattgccataaatgaaaggctttttaaactcggactaatcaatgaagaaaccagaaataaagtattggcagaaattaatgcaacaaaataacaaaaactattgaatggagttgagaataacgattataatattcttgattccattcctgcaattacaaaggggaatgatttatgaacatatattatgcaagggaaagattaaggacaggatctatttttgacttaaagtta

SEQ ID NO: 14852 - DNA, 260 bp, Unknown
  Description of Unknown: LeftRegion for integrase B1853 sequence
ggctactggctgtaaaatgctggtagccctcattttttagttgtatctagtatataaggggtgtataatagataggaactgaaaacagcatcataaagccatctattttatcgagggtaaagaagtctacacctaatatataaaagtggctgtatgaggcacacaggagctcacaggactattacaggagggtaaacaggatggcatacaggaaaataacggatataagagatactattggtatgagagcggtattttat

SEQ ID NO: 14853 - DNA, 260 bp, Unknown; identical to SEQ ID NO: 13476
  Description of Unknown: LeftRegion for integrase B1854 sequence

SEQ ID NO: 14854 - DNA, 109 bp, Unknown
  Description of Unknown: LeftRegion for integrase B1855 sequence
cgggcaaacgaatttccggacgctttttctttggattgggagagaataaatgaaaaccatacgatgtgccgtttatacccggaaatcaacggaagatggtcttgaaaaa

SEQ ID NO: 14855 - DNA, 260 bp, Unknown; identical to SEQ ID NO: 13530
  Description of Unknown: LeftRegion for integrase B1856 sequence

SEQ ID NO: 14856 - DNA, 260 bp, Unknown; identical to SEQ ID NO: 13077
  Description of Unknown: LeftRegion for integrase B1857 sequence

SEQ ID NO: 14857 - DNA, 260 bp, Unknown; identical to SEQ ID NO: 13013
  Description of Unknown: LeftRegion for integrase B1858 sequence

SEQ ID NO: 14858 - DNA, 260 bp, Unknown
  Description of Unknown: LeftRegion for integrase B1859 sequence
gatacggattacacggtagatcaaaagcgcaacccgtctctgccagaggatgttactactatgctttctgagctcgacagcgcggacctcgaaaaagttatgatctacgcccgcggtttgctggacggggacaagtatcagaaacgccgtccgcggtaaagcaggaagtgcttctggcacgaaatagaaaggggcagacaatgagagtatccgtaaacttaaacgcacaaaagccggataccacgacaaacgccgtcatt

SEQ ID NO: 14859 - DNA, 260 bp, Unknown
  Description of Unknown: LeftRegion for integrase B1860 sequence
aggtgattgcatggaaaaagttattttgattgccataaatgaaaggctttttaaactcggactaatcaatgaagaaaccagaaataaagtattgacagaaattaatgcaacaaaatagcgaaaaaactattgaatggagtcaagaataacgattataatattcttgattccattcctgcaattacaaaggggaatgatttatgaacatatattatgcaagggaaagattaaggacagggtctatttttgacctaaagtta

SEQ ID NO: 14860 - DNA, 260 bp, Unknown; identical to SEQ ID NO: 14583
  Description of Unknown: LeftRegion for integrase B1861 sequence

SEQ ID NO: 14861 - DNA, 260 bp, Unknown; identical to SEQ ID NO: 14186
  Description of Unknown: LeftRegion for integrase B1862 sequence

SEQ ID NO: 14862 - DNA, 260 bp, Unknown
  Description of Unknown: LeftRegion for integrase B1863 sequence
ccctcacgatctgaggggaaaacatgaatacaccgccaataagagatcgtaccaaatcctcattccccacgccgaactgaaagccgccgtgaagaagggcttgactgagatttgggaactggctgaatactttgatgtaccgtgtgagttcatgcaaagagccgccgagtattggcagagggtagaaatggcaggataatatgaaaaagaagtttcccattgatctgtctatgctcacccctgaggaaattgaccagttt

SEQ ID NO: 14863 - DNA, 260 bp, Unknown
  Description of Unknown: LeftRegion for integrase B1864 sequence
ctatggcaaaaagcaaaactgaaatccatgtcacaacggtatttgacggcgaactggacgctacggacgttttcgtgagcctgattgcacagaaatacagccagagaaatgataaagaatatcttgtgaaaaagcaagatttagagtataataaagacaaggttcagcatgaccgtgttccgtctggattgtgcgggtaaatggttatgatgaacggaatggaatatacaggcatggacgcaatactggcgggcagcttc

SEQ ID NO: 14864 - DNA, 260 bp, Unknown
  Description of Unknown: LeftRegion for integrase B1865 sequence
aggtgattgcatggaaaaagttattttgattgccataaacgaaaggctttttaaactcggactaatcaatgaagaaaccagaaataaagtattggcagaaattaatgcaacaaaataacgaaaaaactattgaatggagtcgagaataacgattataatattcttgattccattcctgcaattacaaaggggaatgatttatgaacatatattatgcaagggaaagattaaggacaggatctatttttgacctaaagtta

SEQ ID NO: 14865 - DNA, 260 bp, Unknown
  Description of Unknown: LeftRegion for integrase B1866 sequence
aattctattctgatgatttaatagacagttgtgcatttttaaatcaactacctttttcttatttttctatcgatacatttaaacttatagtaaatgatttaatagaaaatgatgagataaatctgaatgattataaaaaatatattaatgaacctaaataaaactctcacggaaatattttaatctaaggagatgataaattgaacaccattgctatttatactcgtaaatctaaattcactggaaaaggtgaatctatt

SEQ ID NO: 14866 - DNA, 260 bp, Unknown
  Description of Unknown: LeftRegion for integrase B1867 sequence
tactttgtagatatggtatctataccgtatctataccgtatccataccgtaccgatacctcgcgtgcgcgcgtgcgtgtgcgcgcgatcgtgcgcgcactgtctctgtatctgtatctgtatctgagactgtatctgtaatctgtttctgattctgaatatctactactgcaaatctatcgttagaagggggtggcgctgttgccgagaaaacctgcaaagcacccggcgaagccgaagcggggcaagaagctggaaatc

SEQ ID NO: 14867 - DNA, 260 bp, Unknown
  Description of Unknown: LeftRegion for integrase B1868 sequence
cgaacaatagataccctatagatatggtatctataccgtatctatatggtagcgatacatcgcgtgcgcgcgtgcgtgtgcgcgcgatcgtgcgcgcactgtctctgtacctgtatctgtatctgagactgtatctgtaatctgtttctgattctgaatatctactactgcaaatctatcgttagaagggggtggcgctgttgccaagaaaacctgcaaagcacccggcgaaaccgaagcggggcaagaagctggaaatc

SEQ ID NO: 14868 - DNA, 260 bp, Unknown; identical to SEQ ID NO: 14237
  Description of Unknown: LeftRegion for integrase B1869 sequence

SEQ ID NO: 14869 - DNA, 260 bp, Unknown
  Description of Unknown: LeftRegion for integrase B1870 sequence
gaggacaacgatggcacatgccttcctccggttggaacccgtctggttaagacctaccgaggaaaagaatataatgtcattgtttctaccgccggctttcaatttgaggggatttattacaaaagtctgtccgcggttgctttaaaaatcacaggcaaacgaatttccggacgctttttctttggattgggggagaataaatgaaaaccatacgatgtgctgtttatacccgaaaatcaacggaagatggtcttgaaaaa

SEQ ID NO: 14870 - DNA, 260 bp, Unknown
  Description of Unknown: LeftRegion for integrase B1871 sequence
gaaacagatgacacgggctttttgcctccggttgggacacgtttggtgaagacgtatagagggtgtgaatacaacgtgattgtgtcaaccgcaggtttccaatttgaaggaatttattataaaagtctgtcggcagtggcacaaaaaataacgggaaagcgaatttcaggccgcttcttctttggcttgggagaaagtaaatgaaaacgatgcgatgcgccatttacactcgtaaatcaaccgaagatggtttggataaa

SEQ ID NO: 14871 - DNA, 260 bp, Unknown; identical to SEQ ID NO: 14449
  Description of Unknown: LeftRegion for integrase B1872 sequence

SEQ ID NO: 14872 - DNA, 260 bp, Unknown
  Description of Unknown: LeftRegion for integrase B1873 sequence
gcatctgataccctatggatagggtatctataccgtatccatatcatagcgatacctcgcgtgcgcgtgcgcgggtgcgcgcgatcgggcgcgcactgttactgtctctgtatctgtaactggtactgtatctgtaaactgttatctgtttctgtatttctatcttaggaaatctatcgttagaagaaggaggtggcgctgtgcctaaaaaacctacaaagcatccggccaagccgaaacggggcaagaagctggaaacc

SEQ ID NO: 14873 - DNA, 260 bp, Unknown; identical to SEQ ID NO: 14864
  Description of Unknown: LeftRegion for integrase B1874 sequence

SEQ ID NO: 14874 - DNA, 260 bp, Unknown
  Description of Unknown: LeftRegion for integrase B1875 sequence
gaaacggatgacacgggctttttgcctccggtcgggacacgtttggtgaagacgtatcgagggcgtgaatacaacgtgattgtgtcaaccgcaggtttccaatttgaaggaatttattataaaagtctgtcggcagtggcgcaaaaaataacgggaaagcgaatttcaggccgcttcttctttggcttgggagaaagtaaatgaaaacgatgcgatgcgccatttacactcgtaaatcaaccgaagatggtttggataaa

SEQ ID NO: 14875 - DNA, 260 bp, Unknown
  Description of Unknown: LeftRegion for integrase B1876 sequence
aggtgattgcatggaaaaagttattttgattgccataaatgaaaggctttttaaactcggactaatcaatgaagaaaccagaaataaagtattgacagaaattaatgcaacaaaatagcgaaaaaactattgaatggagtcaagaataacgattataatattcttgattccattcctgcaattacaaaggggaatgatttatgaacatatattatgcaagggaaagattaaggacaggatctatttttgacctaaagtta

SEQ ID NO: 14876 - DNA, 260 bp, Unknown
  Description of Unknown: LeftRegion for integrase B1877 sequence
tgcttattttcttgtgtgttctttaatgtgtaacgtttttcttggattttcaggtgtaatttgtaatgtttttcttaaaaattttgaaaacatttccaaaaactaattctgtgtttgatatagatatatgaattactatgtgatataatcatcataataaagtgatgatacaacgaaattgaaaatagggaagtgaagaaatggatattttaaaaacgagggaacagctcaggagttgcagtatatatgacctgccgttg

SEQ ID NO: 14877 - DNA, 260 bp, Unknown
  Description of Unknown: LeftRegion for integrase B1878 sequence
caaaggtctggtgaaacagttggaatacgaaggctattcaaatgaagctgcaacatttgcagtagataattgtggcgctgactggaatgaacaggctgcaaaagtagctgaaagttatatcaaccattcttctttttcacgttctggattgattgatcagttacagtacgaaggatttacaaaagatcaggcagagtacggtgctactgctgttggatattaattttaatagaacttttgaaccgaactatagattaata

SEQ ID NO: 14878 - DNA, 260 bp, Unknown; identical to SEQ ID NO: 14628
  Description of Unknown: LeftRegion for integrase B1879 sequence

SEQ ID NO: 14879 - DNA, 260 bp, Unknown
  Description of Unknown: LeftRegion for integrase B1880 sequence
ggctactggctgtaaaatgctggtagccctcattttttagttgtatctagtatataaggggtgtataatagataggaactgaaaacagcctcataaagccctctattttatcgatagtaaagaagtctacacctaatatataaaagtggctgtatgaggcacacaggagctcacaggactattacaggagggtaaacaggatggcatacaggaaaataacggatataaaagatactattggtatgagagcggtattttat

SEQ ID NO: 14880 - DNA, 260 bp, Unknown
  Description of Unknown: LeftRegion for integrase B1881 sequence
cacctacgctgtaagaacctttttcagcgaggatgctagggataacatcaccgaaaaggtgcagcgcatcatcctgaaaagcgatgataatagcaaagagatttgaaactaccgcattaaagcgttaaagtttacagtcggatatggtagaatgggttcacctataaattcgatcatatccggctgtggaaaggagagctatgacaaaacaaccggataaaatcacagccctgtactgccgcctgtcccgtgacgatgaa

SEQ ID NO: 14881 - DNA, 260 bp, Unknown
  Description of Unknown: LeftRegion for integrase B1882 sequence
ctaaatctgaaactctttccgtcaaaggctgcaaagtcaagattacttatgcgccttcggatacggactgtctggatgcgatccagaagctgctgcaaaccaccatcctgcgcacggcagggcacaccgctgcctgacatccttgtgttccttgaatgcgtgagataagataaaatcgaactgaaccttgaaaacaaaatatggacgaaacacgtttgatttttccttcctcactcaaagaaagagagattgaaatgaaa

SEQ ID NO: 14882 - DNA, 260 bp, Unknown
  Description of Unknown: LeftRegion for integrase B1883 sequence
aaattgacatgaaaaacgctatcaaagaaatctgatcggaactgatatgggcaactatatgagtgcagacgaactggccggaagaaaaaacctgatcaacctgatcgccgaatccgtcgcacacgacatcgaacaagaaaaaaacaaccccgctgtatctgataacatcatcctgttagtgcccccagaaaaacgaaaaaatgaaatctaccatttacgcccgctacagcaccgacaaacaacgcgagtcatccatcgat

SEQ ID NO: 14883 - DNA, 260 bp, Unknown
  Description of Unknown: LeftRegion for integrase B1884 sequence
tatatatggtatcgcacgcaaactttttgagaaaatcatcatggtataccgtagtgatacctcgcgtgcgcgtgcgtgtgcgcgcgatcgtgcgcgcactgtctctgtacctgtatctgtatctgagactgtatctgtattctgtttctgattctgaatatctactactgcaaatctatcgttagaagggggtggcgctgttgccgagaaaacctgcaaagcacccggcgaagccgaagcggggcaagaagctggaaatc

SEQ ID NO: 14884 - DNA, 260 bp, Unknown
  Description of Unknown: LeftRegion for integrase B1885 sequence
cctgcagagatgctgcgtgagtatttcaaccgcgtatacgacggggtgtgcgatgaggagacggaaggttacttgtacaacctggagcaagccgccgaagccgccgggttcgaggtcgtggagaaggactttggagaagcgtaggaggcattgaaggcaatgaatacatataagcagaaattacgggagggggtaagagcttggcacgcaagaagaagttcgagctgaacgacaacaatctcgccatcgcctactaccga

SEQ ID NO: 14885 - DNA, 260 bp, Unknown; identical to SEQ ID NO: 13421
  Description of Unknown: LeftRegion for integrase B1886 sequence

SEQ ID NO: 14886 - DNA, 260 bp, Unknown
  Description of Unknown: LeftRegion for integrase B1887 sequence
ctaaatcggaaactctttccgtcaaaggctgcaaagtcaagatcacctatgcgtctgcggatacggactgtctggatgcaatccagaagctgctgcaaaccaccatcctgcgcacggcagggcacaccgctgcctgacatccttgtgttccttgaatgcgtgagataagataaaatcgaactgaaccttgaaaacaaaatatggacgaaacacgtttgatttttcctttctcactcaaagaaagagagattgaaatgaaa

SEQ ID NO: 14887 - DNA, 260 bp, Unknown
  Description of Unknown: LeftRegion for integrase B1888 sequence
aagttagttaggaggttatatatggacaagaatacatcacaaagtattattgataagattagtaattttaaaatacagctaatcttgaacaagaacttatatattgatgaagtaataacaaaggaatactatgaagttgtagaaaataacctattagaaaagatacatactctatctaatgaattggagttgtatgtataatgatgactctatttgaaataagaaatgctttagctgatggtacttctatctatgaacta

SEQ ID NO: 14888 - DNA, 260 bp, Unknown
  Description of Unknown: LeftRegion for integrase B1889 sequence
aatctgcttttgttgatctacgctgagtgcttcaaacatggttaaggcttccttgtcagaaaccttaccttctttgttagtgatatgacatattctactccaatcttaggaagttcttcctatgtattagcgccaagtgatattatagcactttatctttcgtttgccattggtaaatagaggaaaggataacggacattatgacagttaaaaaatttccaatcgacctctcctgcctgacagaggaagaaatctctcaa

SEQ ID NO: 14889 - DNA, 260 bp, Unknown; identical to SEQ ID NO: 13412
  Description of Unknown: LeftRegion for integrase B1890 sequence

SEQ ID NO: 14890 - DNA, 260 bp, Unknown
  Description of Unknown: LeftRegion for integrase B1891 sequence
aatctgcttttgttgatctacgctgagtgcttcaaacatggtcaaggcttccttgtcagaaaccttaccttctttgttagtgatatgacatattctactccaatcttaggaagttcttcctatgtattagcgccaagtgatattatagcactttatctttcgtttaccattggtaaatagaggaaaggataacagacattatgacagttaaaaaatttccaatcgacctctcctgtctgacagaggaagaaatctctcaa

SEQ ID NO: 14891 - DNA, 260 bp, Unknown
  Description of Unknown: LeftRegion for integrase B1892 sequence
ataatccaaaagggttattttgagagggctatcagtgtaagggctgatagccctatttttttttgtgtctaaatttcaggagatttctggttattactcaaataataagtaatgggtttacatagtatcaaaaagatgtataataagtatgagatattatgacaaacctgtataacaaggataatacaggaggtcacaggatgaacaggaaagaactattatttaaaggataccgggttgtattttatgcccgtgtttca

SEQ ID NO: 14892 - DNA, 260 bp, Unknown
  Description of Unknown: LeftRegion for integrase B1893 sequence
aataccatatagggcatacgatttacagagttaaaaccgtctttaacccagcttttcggcaaagcctgagcgacattcttgcaaggctcatcacggctgactgtgagaaaatgctcggtgaaaccggacaagaacaggacaagcaggctgtttgattttggaatatcggcgcattgaaaaaagaaataaggtgcgctataatgataatagcttgctgtatcctgtcggaaagtgaggttaaaatgacagacaagataaca

SEQ ID NO: 14893 - DNA, 260 bp, Unknown
  Description of Unknown: LeftRegion for integrase B1894 sequence
tattagtgctgttggctacctttgcagcaataattacacatgttacatatatacaaaaaacgtggagccagtcctgtcactcgttccactgtagaaaggccttcgcattgccctgattgtaagttgaaaatcaaagttctagcagctattgcatattccaaatattctttgtatctttgcaccatcaaaacaaagaaatcatggataaaagaatactgtgcattattagagcgagcaccgagaaacaagaaacggaatcg

SEQ ID NO: 14894 - DNA, 260 bp, Unknown
  Description of Unknown: LeftRegion for integrase B1895 sequence
cacctacgctgtaagagcctttttcagtgaaggtgcaagggagaacatcaccgaaaaggtgcagcgcatcatcctgaaaaacgatgataaaagcaacgaacattaaaactatcgcattaaagcgttgaagtttatggccggatatggtagaatgggctcacctacaaattcgatcatatccggctgtggaaaggagagctatgacaaaacaaccggataaaatcacagccctgtattgccgcctgtcccgtgacgatgag

SEQ ID NO: 14895 - DNA, 260 bp, Unknown
  Description of Unknown: LeftRegion for integrase B1896 sequence
attaaatgctgcgttaaacgacataaattcaaagattgaaaagggctatgtatataagcccagaggaaagagtaggaaataaaaaatccccgcccggcgctggaacaccgaacggggaagaagctgtgatacaatcacaaccttagacaagtttattgtatcatagctccctgaaaatgtcaaggagtgataacaaatatatgaaaaccgccgtaatatacgcccggtattcgtccgacaagcagacggagcagtccatt

SEQ ID NO: 14896 - DNA, 260 bp, Unknown
  Description of Unknown: LeftRegion for integrase B1897 sequence
ccttttaatcggcggtctggttatctgcgtggcgtcgctctggcacctgttcgacgggacgttcttcccgcgcctgctcgtcgggtggctgatgattctggccgcatatctcgtctttaaatacaactagaccccaccgcctcatggtgcgagggatggggtctgccagatagccgcccgtttggagggcatcatagattatgccagaagatataaagaccgccgtcatatacgcccgcttctcgtgctcgaagcagcgc

SEQ ID NO: 14897 - DNA, 260 bp, Unknown
  Description of Unknown: LeftRegion for integrase B1898 sequence
taaaagcgcattgattccttcagatgaaatccggtcagaagaacttctggcggaacaaaaatttgaagcgtttatcacttcgctggcacatatcatcgagaaatatggtatgagagtgctgggcgaggttgacggagctgcgtgagaatcgcagctttacataggatattttccaaaagttaattttggaggtatgaattatgaaccgatatggaaaacgctgtgttttgtatccgagggtcagcacagagatgcaagtg

SEQ ID NO: 14898 - DNA, 260 bp, Unknown
  Description of Unknown: LeftRegion for integrase B1899 sequence
ctaaatcggaaactctttccgtcaaaggctgcaaggtcaaaatcacctatgcgcctacggatacggactgtctggatgcgatccagaagctgctgcaaaccaccatcctgcgcacggcaggacacaccgctgcctgacatccttgtgttccttgaatgcgtgagataagataaaatcgaactgaaccttgaaaacaaaatatggacgaagcacgtttgatttttcctttctcactcaaagaaagagagattgaaatgaaa

SEQ ID NO: 14899 - DNA, 260 bp, Unknown
  Description of Unknown: LeftRegion for integrase B1900 sequence
tatatggtatcgcacgcaaactttttgtgaaaatcatcatggtataccgtagtgatacctcgcgtgcgcgcgtgcgtgtgcgcgcgatcgtgcgcgcactgtctctgtacctgtatctgtatctgagactgtatctgcaatctgtttctgattctgaatatctactactgcaaatctatcgttagaagggggtggcgctgttgccgaaaaaaactgcaaagcacccggccaagccgaagcggggcaagaagctggaaatc

SEQ ID NO: 14900 - DNA, 260 bp, Unknown
  Description of Unknown: LeftRegion for integrase B1901 sequence
ctcagtggcttcgattaaccttttgtttttttgttcatctgtcgttttgttcggatatgcagtttttgcttctttcatattgccttgttcctttcgtcagaatttctaatttcgctacaaccattataatacaattaaatagaactacttcaattttgttattttataacaaatatatgaataagcaaggaggcgagctcatggcacgcaaacgaataaacacaccagaagcgacaggtgtcatatacgctcgtttttct

SEQ ID NO: 14901 - DNA, 260 bp, Unknown
  Description of Unknown: LeftRegion for integrase B1902 sequence
cacctacgccgtaagagccttcttcagcgaggatgcaagggagaacatcactgaaaaggtgcagcgcatcatcctgaaaagcgatgataataacaaagaggtttgaaactaccacattaaagcgttgaagtttacagtcggatatggtagaatgggctcacctacaaatttgatcatatccggctgtggaaaggagaactatgacaaaacaaccggataaaatcacagccctgtactgccgcctgtcccgcgacgatgag

SEQ ID NO: 14902 - DNA, 260 bp, Unknown
  Description of Unknown: LeftRegion for integrase B1903 sequence
tatatggtatcgcacgcaaactttttgggaaaatcatcatggtataccgtagtgatacctcgcgtgcgcgcgtgcgtgtgcgcgcgatcgtgcgcgcactgtttctgtacctgtatctgtatctgagactgtatctgtattctgtttctgattctgaatatctactactgcaaatctatcgttagaagggggtggcgctgttgccgagaaaacctgcaaagcacccggcgaagccgaagcggggcaagaagctggaaatc

SEQ ID NO: 14903 - DNA, 260 bp, Unknown
  Description of Unknown: LeftRegion for integrase B1904 sequence
tgtaacatctggtctttctgtgctgtttggtttgctcctgatagtatatgtaaccttggacgctaggaatccaaatttaggactaattaagggaactgcagcagccccaattgtgtacgttgcggctttttcctttatcggaatgtgcttgtatatcgcccgaaccgtggtaaagagaaacgcaaaacggaggaaacgtgatgcaaacaatgcccattgacctgtcggcgctgactgcggaggaaagacagcagtttgcg

SEQ ID NO: 14904 - DNA, 260 bp, Unknown
  Description of Unknown: LeftRegion for integrase B1905 sequence
gatacaccccctgaaacagatactcttatggttgtcattgttgatgacgaagaaggatttgttaagaaaatcagcattgatgaagatactgtgacccttcgctcttttaacccacactatcctccccgtgtttttggtggtgttgaaattggacgattgcgctttgtcggtagagtcatggagttaaaaaggagatttgcatgaaaaaatttcctatcgacctctcctgtctgacagaggaagaaatctctcaatttcaa

SEQ ID NO: 14905 - DNA, 260 bp, Unknown; identical to SEQ ID NO: 13013
  Description of Unknown: LeftRegion for integrase B1906 sequence

SEQ ID NO: 14906 - DNA, 260 bp, Unknown
  Description of Unknown: LeftRegion for integrase B1907 sequence
gatacacctcccgaaacagatactcttatggttgtcattgttgatgacgaagaaggatttgttaagaaaatcagcattgatgaagatactgtgacccttcgctcttttaatccacactatcctccccgtgtttttggcggtgttgaaattggacgattgcgctttgtcggtagagtcatggagttaaaaaggagatttgcatgaaaaaatttccaatcgacctctcctgtctgacagaggaagaaatctctcaatttcag

SEQ ID NO: 14907 - DNA, 260 bp, Unknown
  Description of Unknown: LeftRegion for integrase B1908 sequence
gacacaccccctgaaacagatactcttatggttgtcattgttgatgacgaagaaggatttattaagaaaatcagtattgatgaagatactgtgacccttcgctcttttaatccacactatcctccccgtgtttttggtggtgttgaaattggacgattgcgctttgtcggtagagtcatggagttaaaaaggagatttgcatgaaaaaatttctaatcgacctctcctgtctgacagaggaagaaatctctcaatttcag

SEQ ID NO: 14908 - DNA, 260 bp, Unknown
  Description of Unknown: LeftRegion for integrase B1909 sequence
gatacacctcccgaaacagatactcttatggttgtcattgttgatgacgaagaaggatttgttaagaaaatcagtattgatgaagatactgtgacccttcgttcttttaacccacactatcctccccgtgtttttggcggtgttgaaattggacgattgcgctttgtcggtagagtcatggagctaaaaaggagatttgcatgaaaaaatttccaatcgacctctcctgtctgacagaggaagaaatctctcaatttcag

SEQ ID NO: 14909 - DNA, 260 bp, Unknown
  Description of Unknown: LeftRegion for integrase B1910 sequence
gccgggctacatccgcacctccgaggtggtcgagatcgtcggacgccgcggcgggctgctgtctgtagggcgcgagggttcgctgacgggcaaccgcgtggactgcttcatcctcgacgacctctacagaaagtaatcaattttgtcgcaaaatatcgtaaaaaacattatatttgcacaaaagattgattattagcgttatggagaaatcgaaacgagttgtgggttatgcccgtgtatcgacggaagcgcaagacatc

SEQ ID NO: 14910 - DNA, 260 bp, Unknown
  Description of Unknown: LeftRegion for integrase B1911 sequence
cgcagaaattgagagcggctgcattgccgtagtcgtggtagacggtacagaagggtttttaaaacaagtcgagttcggtgagaactctacttcgcttcactccttcaacccttactatcccgacatggagtttgtagatgccgatcagaaacgtttgcactttatcggccgcgtccgggaaatgaagcggaggttctgatatgcgtaaaaagtttaatatcgacctctctatgctgaccccggaagaacagcagcaattt

SEQ ID NO: 14911 - DNA, 260 bp, Unknown
  Description of Unknown: LeftRegion for integrase B1912 sequence
ggtgataccctatggatagggtatcgataccgtatccataccgtatcgatagtctatcgatacctcgcgtgcgcgcgtgcgtgtgcgcgcgatcgcgcgcgcactgtctctgtatctgtaactgatactgcatctgtaatctgtttctgtattctgaatatttactactgcaaatctatcgttagaaggaggtggcactgttgccgaagaaacccatcaagcacccagcgaaaccgaagaggggagtaaagctggatatt

SEQ ID NO: 14912 - DNA, 260 bp, Unknown
  Description of Unknown: LeftRegion for integrase B1913 sequence
gtgccagcgtgtgaagacgatcagttcgcgcgaggcgttgtgcatgcgcgtccgcacgaccgaggtataccactcccagcaattggcgcggacgatgggcgaattggcttcgagggcatccttgtacagaaagtaatcaattttgtcgcaaaatatcataaaaaacattatatttgcacaaaagattgattattagcgttatggagaaatcgaaacgagttgtgggttatgcccgtgtatcgacggaagcccaagacatc

SEQ ID NO: 14913 - DNA, 260 bp, Unknown; identical to SEQ ID NO: 14908
  Description of Unknown: LeftRegion for integrase B1914 sequence

SEQ ID NO: 14914 - DNA, 260 bp, Unknown
  Description of Unknown: LeftRegion for integrase B1915 sequence
atcttctgggtcttagtgaagtaagaaaaccttctcccgctttgtcggaagaagaaatgcttctgcttaacgcatacagaagcgctacttcacaaggacgcttccgcattatccaggtctgcatgaatgaacaggatagtgcaggaaaaggggaaaccgcaaatgtagggtgatagacctaaacgaatggaggaagcatcatgtatgaagatataaaaacctgtgtcctgtatgtcaggtattcaagtaacaaccaaacc

SEQ ID NO: 14915 - DNA, 260 bp, Unknown
  Description of Unknown: LeftRegion for integrase B1916 sequence
aaatcttcttcgtgaacacggggttaaatttgaagttgacaatccggatcttttattctccggtgtatgcgtttcttcagaagaaacatcaaaaatcaataataacacccagatattgaaaattcttaaaatttgtttactgattattttttggcctgttggcttatattatttgatacgcaaaaaaaataggagtaccaatgtctgatactcctaaattaaatgcagctttttatggtagatattccgccggacctaat

SEQ ID NO: 14916 - DNA, 260 bp, Unknown
  Description of Unknown: LeftRegion for integrase B1917 sequence
tctggtgatagcgattttgttccagccgcgaaattggctcggagagaaggaatcgattttattctcgatccaatgtgggcagatatcaaggctgatttgtttgaacacatcgacggccttaatagtcaatggaaaaagaaagaaagccaataaggaatatttcggtataaggtgccgggttttttaggagggctgaaagagtggaagaacttgatacgcgcccggtagccgatattctggcccggtactcaacagacaat

SEQ ID NO: 14917 - DNA, 260 bp, Unknown
  Description of Unknown: LeftRegion for integrase B1918 sequence
cgcagaaatcgagagcggctgtattgccgtggtcgtggtagacggtgtggaaggatttttgaaacaggtcgagttcggtgagaactctacctcgcttcactccttcaacccttactatcctgatatggagtttgtaggtgctgatcagaaacgcttgcactttatcggtcgtgtccgggaaatgaagcggaggttctgatatgcgtcagaagtttaagatcgacctctctatgctgaccccagaagaacagcagcagttt

SEQ ID NO: 14918 - DNA, 260 bp, Unknown
  Description of Unknown: LeftRegion for integrase B1919 sequence
gagcctgccgagcctgccgagcctcccgatgctgaaaaactccgcgccgagaacgcggcccttcgtgcgcagcttgctcagcagcagaagtccctgcgcatgcaccggcttgtgacgcttatcctcttgggtattcttttgctgtgtgcccttgcgcttgtggccgacgtgctcatcccatcgatcggctggatccgcacatgaataaaaccgccccggcccagcgccggagcggtatccgtataaccttttgcccttgt

SEQ ID NO: 14919 - DNA, 260 bp, Unknown
  Description of Unknown: LeftRegion for integrase B1920 sequence
ggctactggctgtaaaatgctggtagccctcattttttagttgtatctagtatataaggggtgtataatagataggaactgaaaacagcctcataaagccctctgttttatcgagggtaaagaagtctacacctaatatataaaagtggctgtatgaggcacacaggagctcacaggactattacaggagggtaaacaggatggcatacaggaaaataacggatataaaagatactattggtatgagagcggtattttat

SEQ ID NO: 14920 - DNA, 260 bp, Unknown
  Description of Unknown: LeftRegion for integrase B1921 sequence
tgtaacatctggtctttctgtgctgtttggtttgctcctgatggtatatgtaaccttggacgctaggaatccaaatcttggcctaattaggggcaccacaacagccccaattgtgtacgttgcggctttttccattatcggaatgtgcttgtatatcgtccgaacagtggcaaggcgaaacgcaaaagggaggaaacgggatgcaaacaatgcccattgacctgtcggcgctgactccggaggaaaggcagcagtttgcg

SEQ ID NO: 14921 - DNA, 260 bp, Unknown
  Description of Unknown: LeftRegion for integrase B1922 sequence
gatacacctcccgaaacagatactcttatggttgtcattgttgatgacgaagaaggatttgttaagaaaatcagcattgatgaagatactgtgacccttcgctcttttaacccacactatcctccccgtgtttttggcggtgttgaaattggacgattgcgctttgtcggtagagtcatggagctaaaaaggagatttgcatgaaaaaatttccaatcgacctttcctatctgacagaggaagaaatctctcaatttcag

SEQ ID NO: 14922 - DNA, 260 bp, Unknown; identical to SEQ ID NO: 13516
  Description of Unknown: LeftRegion for integrase B1923 sequence

SEQ ID NO: 14923 - DNA, 260 bp, Unknown
  Description of Unknown: LeftRegion for integrase B1924 sequence
gatacacctcccgaaacagatactcttatggttgtcattgttgatgacgaagaaggatttgttaagaaaatcagtattgatgaagatactgtgacccttcgttcttttaacccacactatcctccccgtgtttttggcggtgttgaaattggacgattgcgctttgttggtagagtcatggagctaaaaaggagatttgcatgaaaaaatttccaatcgacctctcctgcctgacagaggaagaaatctctcaatttcag

SEQ ID NO: 14924 - DNA, 260 bp, Unknown
  Description of Unknown: LeftRegion for integrase B1925 sequence
cgcagaaattgagagcggctgtattgccgtggtcgtggtagacggtacagaagggtttttaaaacaagtcgagttcggtaagaactccacctcgcttcactcgttcaatccgtattatcccgacatggagtttgtagatgccgaccagaaacgtttgcactttatcggtcgcgtccgggaaatgaagcggaggttctgacatgcctcagaagtttaaaatcgacctctctatgctgaccccggaagaacagcagcagttt

SEQ ID NO: 14925 - DNA, 260 bp, Unknown
  Description of Unknown: LeftRegion for integrase B1926 sequence
ccaagctgcccaagcgcgattttaccggatcggaggccgtttctttgttgcttatatttcgaggttttgatagctattcaacctgaaatgtgagataatcaaggtggcaaaatgccgtgtactttgaaaagtgaatacatgaaaaggtgtatctgaacctctcacatttctaaatcattcattgagaggaaggatacattatggctgaaagagtttgttgttcttatcaaaatgtactcagcatccagaacagagtatgc

SEQ ID NO: 14926 - DNA, 260 bp, Unknown; identical to SEQ ID NO: 14916
  Description of Unknown: LeftRegion for integrase B1927 sequence

SEQ ID NO: 14927 - DNA, 260 bp, Unknown; identical to SEQ ID NO: 13476
  Description of Unknown: LeftRegion for integrase B1928 sequence

SEQ ID NO: 14928 - DNA, 260 bp, Unknown
  Description of Unknown: LeftRegion for integrase B1929 sequence
gacacacctcctgaaacagatactcttatggttgtcattgttgatgacgaagaaggatttgttaagaaaatcagcattgatgaagatactgtgacccttcgctcttttaatccacactatcctccccgtgtttttggcggtgttgaaattgggcgattgcgctttgtcggtagagtcatggagttaaaaaggagatttgcatgaaaaaatttccaatcgacctctcctgtctgacagaggaagaaatctctcaatttcag

SEQ ID NO: 14929 - DNA, 260 bp, Unknown; identical to SEQ ID NO: 14010
  Description of Unknown: LeftRegion for integrase B1930 sequence

SEQ ID NO: 14930 - DNA, 260 bp, Unknown
  Description of Unknown: LeftRegion for integrase B1931 sequence
gacacacctcctgaaacagatactcttatggttgtcattgttgatgacgaagaaggatttgttaagaaaatcagcattgatgaagatactgtgacccttcgctcttttaatccacactatcctccccgtatttttggcggtgttgaaattggacgattgcgctttgtcggtagagtcatggagttaaaaaggagatttgcatgaaaaaatttccaatcgacctctcctgtctgacagaggaagaaatctctcaatttcaa

SEQ ID NO: 14931 - DNA, 260 bp, Unknown
  Description of Unknown: LeftRegion for integrase B1932 sequence
tgtaacatctggtctttctgtgctgtttggtttgctcctgatggtatatgtaaccttggacgctaggaatccaaatctaggcctaattagaggcaccacaacagccccaattgtgtacgttgcggctttttccattatcggaatgtgcttgtatatcgtccgaacagtggcaaggcgaaacgcaaaagggaggaaacgggatgcaaacaatgcccattgacctgtcggcgctgactccggaggaaaggcagcagtttgcg

SEQ ID NO: 14932 - DNA, 260 bp, Unknown
  Description of Unknown: LeftRegion for integrase B1933 sequence
aaattgaaattttgcaacaactttgataaagtcgagccgacaaaagtggaaaacacttctgaatcgtgtttggaatcagaattctatgaagcggcggctcatttagtatatctaatattgcagaaaaataaataatcgcaaatgctgttgataattttttattgacagcatttgttttctaagaatgttggaggtaatctatgaataatcacaggaaaatagctgcttgctatatgagatacagttcacacgctcaagat

SEQ ID NO: 14933 - DNA, 260 bp, Unknown
  Description of Unknown: LeftRegion for integrase B1934 sequence
gagcctgccgagtcttccgagcctcccgatgctgaaaaactccgtgccgagaccgtggcccttcgtgcgcagcttgcccagcagcagaagtccctgcgcatgcaccgacttgtgacgctcatcctcttgggtattcttttgctgtgtgcccttgcgcttgtggccgacgtgctcatcccatcaatcggctggatccgcacatgaataaaaccgccccggcccagcgccggagcggtatccgtataaccttttgcccttgt

SEQ ID NO: 14934 - DNA, 260 bp, Unknown
  Description of Unknown: LeftRegion for integrase B1935 sequence
gacacaccccctgaaacagatactcttatggttgtcattgttgatgacgaagaagggtttgttaagaaaatcagcatcgatgaagatactgtgacccttcgctcttttaatccacactatcctccccgtgtttttggtggtgttgaaattggacgattgcgctttgtcggtagagtcatggagttaaaaaggagatttgcatgaaaaaatttccaatcgacctctcctgtctgacagaggaagaaatctctcaatttcag

SEQ ID NO: 14935 - DNA, 260 bp, Unknown; identical to SEQ ID NO: 14933
  Description of Unknown: LeftRegion for integrase B1936 sequence

SEQ ID NO: 14936 - DNA, 260 bp, Unknown; identical to SEQ ID NO: 13129
  Description of Unknown: LeftRegion for integrase B1937 sequence

SEQ ID NO: 14937 - DNA, 260 bp, Unknown; identical to SEQ ID NO: 13476
  Description of Unknown: LeftRegion for integrase B1938 sequence

SEQ ID NO: 14938 - DNA, 260 bp, Unknown; identical to SEQ ID NO: 14904
  Description of Unknown: LeftRegion for integrase B1939 sequence

SEQ ID NO: 14939 - DNA, 260 bp, Unknown; identical to SEQ ID NO: 13013
  Description of Unknown: LeftRegion for integrase B1940 sequence

SEQ ID NO: 14940 - DNA, 260 bp, Unknown
  Description of Unknown: LeftRegion for integrase B1941 sequence
ccgcatgatgagcctgccgagtcttccgatgccgaaaaactccgcgccgagaacgcggcgcttcgtgcacagcttgcccagcagcagaagtccctgcgcatgcaccgacttgtgacgctcatcctcttgagtattcttttgctgtgtgcccttgcgcttttggccgacgtgctcatcccatcgatcggctggatccgcacatgaataaaaccgccccggcccagcgccggagcggtatccgtataaccttttgcccttgt

SEQ ID NO: 14941 - DNA, 260 bp, Unknown; identical to SEQ ID NO: 13402
  Description of Unknown: LeftRegion for integrase B1942 sequence

SEQ ID NO: 14942 - DNA, 260 bp, Unknown
  Description of Unknown: LeftRegion for integrase B1943 sequence
ggctactggctgtaaaatgctggtagccctcattttttagttgtatctagtatataaggggtgtataatagataggaactgaaaacagcctcataaagccctctattttatcgatggtaaagaagtctacacctaatatataaaagtggctgtatgaggcacacaggagttcacaggactattacaggagggtaaacaggatggcatacaggaaaataacggatataaaagatactattggcatgagagctgtattttat

SEQ ID NO: 14943 - DNA, 260 bp, Unknown
  Description of Unknown: LeftRegion for integrase B1944 sequence
ggctactggctgtaaaatgctggtagccctcattttttagttgtatctagtatataaggggtgtataatagataggaactgaaaacagcctcataaagccctctattttatcgaggataaagaagtctacacctaatatataaaagtggctgtatgaggcacgcaggagctcacaggactattacaggagggtaaacaggatggcatacaggaaaataacggatataagagatactattggtatgagagcggtattttat

SEQ ID NO: 14944 - DNA, 260 bp, Unknown; identical to SEQ ID NO: 13442
  Description of Unknown: LeftRegion for integrase B1945 sequence

SEQ ID NO: 14945 - DNA, 260 bp, Unknown
  Description of Unknown: LeftRegion for integrase B1946 sequence
gcccggttatatccgtacggccgacgaagtggaggtcatcggccgccgcggcgggctgctctccgtcgggcgcgaaggggcgctcacgggtaaccgcgtcgactgcttcatcctcgacgacctctacagaaagtaatcaattttgtcgcagaatatcataaaaaacattatatttgcacaaaagattgattattagcgttatggggaaatcgaaacgagttgtgggttatgcccgtgtatcgacggaagcgcaagacatc

SEQ ID NO: 14946 - DNA, 260 bp, Unknown
  Description of Unknown: LeftRegion for integrase B1947 sequence
tgtaacatctggtctttctgtgctgtttggtttgctcctgatgatatatgtaaccttggacgctaggaacccaaatctaggcctaattaggggcaccacagcggccccaattgtgtacgttgcggctttttctattatcggaatgtgcttgtatatcacccgaaccgtcgtaaggcgaaacgccaaaaggaggaaacgtgatgcaaacaatgcccattgacctctcggcgctgactccggaggaaagacagcagtttgcg

SEQ ID NO: 14947 - DNA, 260 bp, Unknown
  Description of Unknown: LeftRegion for integrase B1948 sequence
gtgccagcgggtgaagacgatcagctcgcgcgaagcgttgtgcatgcgggtgcggaccaccgacgtataccactcccagcagttggcgcggatgagcggagaattggcttcgagggcgtccttgtacagaaagtaatcaattttgtcgcaaaatatcataaaaaacattatatttgtacaaaagattgattattagcgttatggagaaatcgaaacgagttgtgggttatgcccgtgtatcgacggaagcgcaagacatc

SEQ ID NO: 14948 - DNA, 260 bp, Unknown
  Description of Unknown: LeftRegion for integrase B1949 sequence
gggctactggctgtaaaatgctggtagccctcattttttagttgtatctagtatataaggggtgtataatagataggaactgaaaacagcctcataaagccctctattttatcgagggtaagaagtctacacctaatatataaaagtggctgtatgaggcacacaggagctcacaggactattacaggagggtaaacaggatggcatacaggaaaataacggatataagagatactattggtatgagagcggtattttat

SEQ ID NO: 14949 - DNA, 260 bp, Unknown; identical to SEQ ID NO: 14628
  Description of Unknown: LeftRegion for integrase B1950 sequence

SEQ ID NO: 14950 - DNA, 260 bp, Unknown
  Description of Unknown: LeftRegion for integrase B1951 sequence
tagcatataaggaaggggggctaagacagtgacggaggttgatcgcgagattgctttggctttattaaaacgactatggaagcgggagttgatttcggaagaaacgtatgtttctgccagcagctcccgtttttttgacaaacggcaatttacatctgatactgaaaccgtcaacaaaataactgaggaggtcagtacggatggtaacaattagatggcttcgagagcagattcggcagggaaaaaccatttacgatctg

SEQ ID NO: 14951 - DNA, 260 bp, Unknown
  Description of Unknown: LeftRegion for integrase B1952 sequence
gtggtgggcggctccggcagcggcaagacccggttttggctcaagcccaaccttttacaatgtcacagttcctatgtggttactgacccgaaaggctataatgaataaggataaagcaaagatgcgtttacaagagagtaaaaatatcgtatctttgttacatatcaagcaaccccactaaaaacaaagaaggtgaaactatggcaaaatccaaccaaggaaaaatcacggcattgtacgaaagactttccagagatgac

SEQ ID NO: 14952 - DNA, 260 bp, Unknown
  Description of Unknown: LeftRegion for integrase B1953 sequence
cgcagaaattgagagcggctgtattgccgtggtcgtggtagacggtacagaagggtttttaaaacaggtcgagttcggtgaaaattccacctcgcttcactccttcaacccttactatcctgatatggagttcgtaggtgccgaccagaaacgcttgcactttatcggtcgtgtccgggaaatgaagcggaggttctgatatgcgtaaaaagtttaatatcgacctctctatgttaaccccggaagaacagcagcagttt

SEQ ID NO: 14953 - DNA, 260 bp, Unknown; identical to SEQ ID NO: 14933
  Description of Unknown: LeftRegion for integrase B1954 sequence

SEQ ID NO: 14954 - DNA, 260 bp, Unknown
  Description of Unknown: LeftRegion for integrase B1955 sequence
tgaaattcattgagtgataccatatggatagggtatctataccgtatccataccgtaccgatacctcacgtgcgcgcgtgcgtgtgcgcacgatcgtgcgcgcactgtctctgtacctgtatctgagactgtatctgtaatctgtttctgattctgaatatctactactgcaaatctatcgttagaagggggtggcgctgttgccgagaaaacctgcaaagcacccggcgaagccgaagcggggcaagaagctggaagtc

SEQ ID NO: 14955 - DNA, 260 bp, Unknown
  Description of Unknown: LeftRegion for integrase B1956 sequence
gggacgcaaaaattgagagcggctggcggtggccgtagtagacggtacagaagggtttttaaaacaagtcgagttcggtgagaactccacctcgcttcactcgttcaatccgtattatcccgacatggagtttgtagatgccgaccagaaacgtttgcactttatcggccgcgtccgggaaatgaagcggaggttctgatatgcctcagaagtttaaaatcgacctctccatgctgaccccggaagaacagcagcagttt

SEQ ID NO: 14956 - DNA, 260 bp, Unknown; identical to SEQ ID NO: 13476
  Description of Unknown: LeftRegion for integrase B1957 sequence

SEQ ID NO: 14957 - DNA, 260 bp, Unknown; identical to SEQ ID NO: 13442
  Description of Unknown: LeftRegion for integrase B1958 sequence

SEQ ID NO: 14958 - DNA, 260 bp, Unknown; identical to SEQ ID NO: 13476
  Description of Unknown: LeftRegion for integrase B1959 sequence

SEQ ID NO: 14959 - DNA, 260 bp, Unknown; identical to SEQ ID NO: 13476
  Description of Unknown: LeftRegion for integrase B1960 sequence

SEQ ID NO: 14960 - DNA, 260 bp, Unknown
  Description of Unknown: LeftRegion for integrase B1961 sequence
ctacggcgctgtagggcttgccatgatgtttggtttgattttgatgatttacgtttccttagacatgcggaatccaaatctaggccttattcgggaggggcatacttccccaattgtatatgtggccgctatcttgatcgttggtgcgtttctgtccatcgggcacgcaatcagactgcaaagaatggagaaaaagaaaaatgcagacaatacccattgatttatcttccttgacggcgcaggagcagagacagttcgcc

SEQ ID NO: 14961 - DNA, 260 bp, Unknown
  Description of Unknown: LeftRegion for integrase B1962 sequence
attgcatatgtaacatctgggctttctgttctgtttggtttgttcctgatggtatatgtgttcctggacctgagaaacccaaatctgggcctgttcaggggcaccacagcagctcccattgtatatgtcgctgtctttgctattgccggaacgttcctgtatatcgtctgtaaagcgaaacgaaaaaaggaggaaacgtgatgcaaacaatgcccattgacctgtcggctctgacaccggcggaaagacaacagttttcg

SEQ ID NO: 14962 - DNA, 260 bp, Unknown
  Description of Unknown: LeftRegion for integrase B1963 sequence
tgtaacatctgggctttctgtgctgtttggtttattcctgatggtatatgtgttcctggacctgagaaacccaaatctgggcctgttcaggggcaccacagcagcccctattgtgtatgttgctgcctttaccattatcggaacgtgcctgtatatcatccgcactgcagtaaagcgaaacgcgaaaaggagaaaacgtgatgcaaacaatacccattgacctgtcggctctgacaccggcggaaagacagcagttttcg

SEQ ID NO: 14963 - DNA, 260 bp, Unknown
  Description of Unknown: LeftRegion for integrase B1964 sequence
cgtgccagcgcgtgaagacgatcaactcgccggagaagttgtgcatacgggtcttcacgaccgaggtgtaccactcccaacagttctcccgcacgacgggcgaattggcctccatcgcatctttgtacatatagtaatcaattttgtcgcagattaacaaaaaaacgttaaatttgcgctaaagattgattgacagcgttatggaaaaatcgaaaagagtagtcggttacgcccgtgtttcgacggaggcacaagacatt

SEQ ID NO: 14964 - DNA, 260 bp, Unknown
  Description of Unknown: LeftRegion for integrase B1965 sequence
gatacacctcccgaaacagatactcttatggttgtcattgtcgatgacgaagaaggatttgttaagaaaatcagcattgatgaagatactgtgacccttcgctcttttaatccacactatcctccccgtgtttttggcggtgttgaaattggacgattgcgctttgtcggtagagtcatggagttaaaaaggagatttgcatgaaaagatttccaatcgacctctcctgtctgacagaggaagaaatctctcaatttcaa

SEQ ID NO: 14965 - DNA, 260 bp, Unknown
  Description of Unknown: LeftRegion for integrase B1966 sequence
gacacacctcctgaaacagatactcttatggttgtcattgttgatgacgaagaaggatttgttaagaaaatcagtattgatgaagatactgtgacccttcgctcttttaatccacactatcctccccgtgtttttggcggtgttgaaattggacgattgcgctttgtcggtagagtcatggagttaaaaaggagatttgcatgaaaaaatttccaatcgacctctcctgtctgacagaggaagaaatctctcaatttcag

SEQ ID NO: 14966 - DNA, 260 bp, Unknown
  Description of Unknown: LeftRegion for integrase B1967 sequence
gtaaaaccatcatttcagaagggtcactttacgaagataagctactgcgatacttctctttatgtgacgcagagggtaaacttcgagtcattcaatgtgccatgaacgagttcgatagaacccaaaaagaaaaaacagaagttgaagaaccgattgctgtcggttaaggttgttgaccttatagaatggagagaaacactatgaaactacctatcgacatctcctgtctgacaaaggaagaaatctctcaatttcaggaa

SEQ ID NO: 14967 - DNA, 260 bp, Unknown
  Description of Unknown: LeftRegion for integrase B1968 sequence
gacacacctcctgaaacagatactcttatggttgtcattgttgatgacgaagaaggatttgttaagaaaatcagcattgatgaagatactgtgacccttcgctcttttaatccacactatcctccccgtgtttttggcggtgttgaaattggacgattgcgctttgtcggtagagtcatggagttaaaaaggagatttgcatgaaagaatttccaatcgacctctcctgtctgaccgaggaagaaatctctcaatttcag

SEQ ID NO: 14968 - DNA, 260 bp, Unknown; identical to SEQ ID NO: 13476
  Description of Unknown: LeftRegion for integrase B1969 sequence

SEQ ID NO: 14969 - DNA, 260 bp, Unknown
  Description of Unknown: LeftRegion for integrase B1970 sequence
cgtgcgagctggtggtcttcacccgctggcacgaggcgttgtgcatgcgggtccgcacgacggaggtgtaccactcccagcagttggcgcggacgagcggcgaattggcttcaagcgcgtctttatacatatagtaatcaattttgtcgcagattaacaaaaaaacgttaaatttgcgctaaagattgattgacagcgttatggaaaaatcgaaaagagtggtcggttacgcccgtgtttcgacggaggcacaagacatt

SEQ ID NO: 14970 - DNA, 260 bp, Unknown; identical to SEQ ID NO: 14908
  Description of Unknown: LeftRegion for integrase B1971 sequence

SEQ ID NO: 14971 - DNA, 260 bp, Unknown; identical to SEQ ID NO: 14904
  Description of Unknown: LeftRegion for integrase B1972 sequence

SEQ ID NO: 14972 - DNA, 260 bp, Unknown; identical to SEQ ID NO: 13129
  Description of Unknown: LeftRegion for integrase B1973 sequence

SEQ ID NO: 14973 - DNA, 260 bp, Unknown
  Description of Unknown: LeftRegion for integrase B1974 sequence
gatacacctcccgaaacagatactcttatggttgtcattgtcgatgacgaagaaggatttgttaagaaaatcagcattgatgaagatactgtgacccttcgctcttttaatccacactatcctccccgtgtttttggcggtgttgaaattggacgattgcgctttgtcggtagagtcatggagttaaaaaggagatttgcatgaaaaaatttccaatcgacctctcctgtctgacagaggaagaaatctctcaatttcag

SEQ ID NO: 14974 - DNA, 260 bp, Unknown
  Description of Unknown: LeftRegion for integrase B1975 sequence
gatacacctcccgaaacagatactcttatggttgtcattgttgatgacgaagaaggatttgttaagaaaatcagtattgatgaagatactgtgacccttcgttcttttaacccgcactatcctccccgtgtttttggcggtgttgaaattggacgattgcgctttgttggtagagtcatggagctaaaaaggagatttgcatgaaaaaatttccaatcgacctctcctgtctgacagaggaagaaatctctcaatttcaa

SEQ ID NO: 14975 - DNA, 260 bp, Unknown; identical to SEQ ID NO: 13552
  Description of Unknown: LeftRegion for integrase B1976 sequence

SEQ ID NO: 14976 - DNA, 260 bp, Unknown
  Description of Unknown: LeftRegion for integrase B1977 sequence
gatacacctcccgaaacagatactcttatggttgtcattgttgatgacgaagaaggatttgttaagaaaatcagcattgatgaagatactgtgacccttcgctcttttaacccacactatcctccccgtgtttttggcggtattgaaattggacgattgcgctttgtcggtagagtcatggagctaaaaaggagatttgcatgaaaaaatttccaatcgacctttcctgtctgacagaggaagaaatctctcaatttcag

SEQ ID NO: 14977 - DNA, 260 bp, Unknown; identical to SEQ ID NO: 13476
  Description of Unknown: LeftRegion for integrase B1978 sequence

SEQ ID NO: 14978 - DNA, 260 bp, Unknown
  Description of Unknown: LeftRegion for integrase B1979 sequence
ttacaaagaaaacaaattatctcgttgtcggctcattcgatttcataaaatcagtaaaaggcggcaaatcttcaaagatagtaaaagctgaacaaatgcgccttgacggtttcgacattaacgttattacagagaacacatttttagatatgctagcaggaaaataaaaagcctgctccgagtggataggagggcggacaatggcaagagccgcaaagcaagacaataattcagaaataattgacggcgtgatatatgcc

SEQ ID NO: 14979 - DNA, 260 bp, Unknown; identical to SEQ ID NO: 14976
  Description of Unknown: LeftRegion for integrase B1980 sequence

SEQ ID NO: 14980 - DNA, 260 bp, Unknown; identical to SEQ ID NO: 14908
  Description of Unknown: LeftRegion for integrase B1981 sequence

SEQ ID NO: 14981 - DNA, 260 bp, Unknown; identical to SEQ ID NO: 13402
  Description of Unknown: LeftRegion for integrase B1982 sequence

SEQ ID NO: 14982 - DNA, 260 bp, Unknown
  Description of Unknown: LeftRegion for integrase B1983 sequence
tggagccgcagggcttgcggttctgttcggcatcttccttatggtatatgtctttctggatatgcaaaatccgaatcttggcctgttccagtccggccacgccgcgccgatcgtttatgtcgcggccttttccattatcgaaacatgcctgtatatcgtccgaactgtgacaaagcgaaacgcaaaaaggaggaaccgcgatgcaaacaataccaattgatctatcggctcttacaccggaggaaagacagcagtttgcg

SEQ ID NO: 14983 - DNA, 260 bp, Unknown
  Description of Unknown: LeftRegion for integrase B1984 sequence
gatacacctcccgaaacagatactcttatggttgtcattgtcgatgacgaagaaggatttgttaagaaaatcagcattgatgaagatactgtgacccttcgctcttttaatccacactatcctccccgtgtttttggcggtgttgaaattggacgattgcgctttgtcggtagagtcatggagttaaaaaggagatttgcatgaaaaaatttccaatcgacctctcctgtctgacagaggaagaaatctctcaatttcaa

SEQ ID NO: 14984 - DNA, 260 bp, Unknown
  Description of Unknown: LeftRegion for integrase B1985 sequence
gacacacctcctgaaacagatactcttatggttgtcattgttgatgacgaagaaggatttgttaagaaaatcagcattgatgaagatactgtgacccttcgctcttttaacccacactatcctccccgtgtttttggcggtgttgaaattggacgattgcgctttgtcggtagagtcatggagctaaaaaggagatttgcatgaaaaaatttccaatcgacctctcctgtctgacagaggaagaaatctctcaatttcaa

SEQ ID NO: 14985 - DNA, 260 bp, Unknown
  Description of Unknown: LeftRegion for integrase B1986 sequence
tggagccgcagggcttgcggctctgttcggtattttccttatgatctatgtctttctggatatgcggaacccgaaccttggtctgttccagtccggccacgcctcgccgatcgtttatgccgcaggcttttccattatcggaacatgcctgtatatcgtccgaactgtgataaagcgaaacgcaaaaaggaggaaacacgatgcaaacaataccaattgatctatcggctcttacaccggaggaaagacagcagtttgcg

SEQ ID NO: 14986 - DNA, 260 bp, Unknown
  Description of Unknown: LeftRegion for integrase B1987 sequence
ttgataaactcgaaggagaggtgaatcgactgcttggatacaggaagtatctaacagctgctgactgggaggaattagaacggaactaccagaaaaacaattgatgacattcgtgacataatcggaaagtacagatgaatctttctcctctcgttgcaaaaagggagaaatctaattgatcggtcaaataggagaaaacaatggcgaaaaaaagatatgacctgcggccggtgcgcaccgtatgcatctatgcgcggtac

SEQ ID NO: 14987 - DNA, 260 bp, Unknown; identical to SEQ ID NO: 14596
  Description of Unknown: LeftRegion for integrase B1988 sequence

SEQ ID NO: 14988 - DNA, 260 bp, Unknown; identical to SEQ ID NO: 14904
  Description of Unknown: LeftRegion for integrase B1989 sequence

SEQ ID NO: 14989 - DNA, 260 bp, Unknown
  Description of Unknown: LeftRegion for integrase B1990 sequence
tggagccgcagggcttgcggttctgttcggcatcttccttatggtatatgtctttctggatatgcaaaacccgaatcttggcctgttccagtccggccacgcctcgccgatcgtttatgtcgcggcctttttcattatcggaacatgcctgtatatcgtccgaactgtgataaagcgaaacgcaaaaaggagtaaacacgatgcaaacaataccaattgatctatcggctcttacgccggaggaaagacagcagtttgcg

SEQ ID NO: 14990 - DNA, 260 bp, Unknown
  Description of Unknown: LeftRegion for integrase B1991 sequence
gacacacctcctgaaacagatactcttatggttgtcattgttgatgacgaagaaggatttgttaagaaaatcagtattgatgaagatactgtgacccttcgctcttttaacccgcactatcctccccgtgtttttggcggtgttgaaattggacgattgcgctttgtcggtagagtcatggagttaaaaaggagatttgcatgaaagaatttccaatcgacctctcctgtctgacagaggaagaaatctctcaatttcag

SEQ ID NO: 14991 - DNA, 260 bp, Unknown
  Description of Unknown: LeftRegion for integrase B1992 sequence
gatacacctcccgaaacagatactcttatggttgtcattgttgatgacgaagaaggatttgttaagaaaatcagtattgatgaagatactgtgacccttcgctcttttaacccacactatcctccccgtgtttttggcggtgttgaaattggacgattgcgctttgtcggtagagtcatggagttaaaaaggagatttgcatgaaaaaatttccaatcgacctctcctgtctgacagaggaagaaatctctcaatttcag

SEQ ID NO: 14992 - DNA, 260 bp, Unknown
  Description of Unknown: LeftRegion for integrase B1993 sequence
gatacacctcccgaaacagatactcttatggttgtcattgttgatgacgaagaaggatttgttaagaaaatcagtattgatgaagatactgtgacccttcgttcttttaacccacactatcctccccgtgtttttggcggtgttgaaattggacgattgcgctttgtcggtagagtcatggagttaaaaaggagatttgcatgaaaaaatttccaatcgacctctcctgtctgacagaggaagaaatctctcaatttcaa

SEQ ID NO: 14993 - DNA, 260 bp, Unknown
  Description of Unknown: LeftRegion for integrase B1994 sequence
gacacacctcctgaaacagatactcttatggttgtcattgttgatgacgaagaaggatttgttaagaaaatcagtattgatgaagatactgtgacccttcgctcttttaatccacactatcctccccgtgtttttggtggtgttgaaattggacgattgcgctttgttggtagagtcatggagttaaaaaggagatttgcatgaaaaaatttccaatcgacctctcctgtctgacagaggaagaaatctctcaatttcag

SEQ ID NO: 14994 - DNA, 260 bp, Unknown
  Description of Unknown: LeftRegion for integrase B1995 sequence
gacacaccccctgaaacagatactcttatggttgtcattgttgatgacgaagaagggtttgttaagaaaatcagcattgatgaagatactgtgacccttcgctcttttaatccacactatcctccccgtgtttttggcggtgttgaaattggacgattgcgctttgtcggtagagtcatggagttaaaaaggagatttgcatgaaaaaatttccaatcgacctctcctgtctgacagaggaagaaatctctcaatttcag

SEQ ID NO: 14995 - DNA, 260 bp, Unknown
  Description of Unknown: LeftRegion for integrase B1996 sequence
cgcagaaatcgagagcggctgtattgccgtggtcgtggtagacggtacagacgggtttttaaaacaagtcgagttcggtgagaactccacctcgcttcactcgttcaatccgtattatcccgacatggagtttgtagatgccgaccagaaacgtttgcactttgtcggtcgcgtccgggaaatgaagcggaggttctgatatgcgtaaaaagtttaatatcgacctctccatgttgaccccggaagaacagcagcaattt

SEQ ID NO: 14996 - DNA, 260 bp, Unknown; identical to SEQ ID NO: 14908
  Description of Unknown: LeftRegion for integrase B1997 sequence

SEQ ID NO: 14997 - DNA, 260 bp, Unknown
  Description of Unknown: LeftRegion for integrase B1998 sequence
tggagccgcggggcttgcggttctgtttggcgccttccttacggtatatgtctttctggatatgcgaaacccgaatcttggcctgttccagtccggccacgcctcgccgatcgtttatgtcgcggccttttccattatcggaacatgcctgtatatcgtccgaactgtgataaagcgaaacgcaaaaaggaggaaccgcgatgcaaacaataccaattgatctatcggctctaacaccggaggaaagacagcagtttgcg

SEQ ID NO: 14998 - DNA, 260 bp, Unknown
  Description of Unknown: LeftRegion for integrase B1999 sequence
gacacacctcctgaaacagatactcttatggttgtcattgttgatgacgaagaaggatttgttaagaaaatcagtattgatgaagatactgtgacccttcgctcttttaatccacactatcctccccgtgtttttggtggtgttgaaattggacgattgcgctttgtcggtagagtcatggagttaaaaaggagatttgcatgaaaaaatttccaatcgacctctcctgtctgacagaggaagaaatctctcaatttcaa

SEQ ID NO: 14999 - DNA, 260 bp, Unknown
  Description of Unknown: LeftRegion for integrase B2000 sequence
gacacacctcctgaaacagatactcttatggttgtcattgttgatgacgaagaaggatttgttaagaaaatcagcattgatgaagatactgtgacccttcgctcttttaacccacactatcctccccgtgtttttggcggtgttgaaattggacgattgcgctttgtcggtagagtcatggagttaaaaaggagatttgcatgaaaaaatttccaatcgacctttcctgtctgacagaggaagaaatctctcaatttcaa

SEQ ID NO: 15000 - DNA, 260 bp, Unknown
  Description of Unknown: LeftRegion for integrase B2001 sequence
tggagccgcagggcttgcggttctgttcggcatcttccttatggtatatgtctttctggatatgcaaaacccgaatcttggcctgttccagtccggccacgcctcgccgatcgtttatgtcgcggccttttccattatcggaacatgcctgtatatcgtccgaactgtgataaaacgaaacacaaaaagggggaaacacgatgcaaacaataccaattgatctatcggctcttacgccggaggaaagacagcagtttgca

SEQ ID NO: 15001 - DNA, 260 bp, Unknown
  Description of Unknown: LeftRegion for integrase B2002 sequence
ctctgtctggtccttcatggtatatccctcctaatttgtggtgtctgtaaatattactaaagtatttcaccacaaatacgactttgttacattctaacgaaccgcgttagggaaatcagcgtcaatgcaagtttggagggcaaacttgctgaaatcggagcattttgtacaattacacttgtacgtgagggggcgcgcgcatggccaggaaaaaggcggagaaggccgagggcaacatctgtgtggtgtacgctcggtat

SEQ ID NO: 15002 - DNA, 260 bp, Unknown
  Description of Unknown: LeftRegion for integrase B2003 sequence
aggaaatcttctcttggtagctatcaactatgacaagaaaacgaagaaacatcagtgccttattgaaaaagtagtataaagatcatgccgtggaaggaaccttcttccacggcttttctataccatgattgagtcattgacttgtacattttgaaaatactgaatgcagtattatactgatgggaaaggagggaaaaccgatgcaatatgataaagcagaccagcaaaactgcccgcgcagagtcgtgttctatgggcgc

SEQ ID NO: 15003 - DNA, 260 bp, Unknown
  Description of Unknown: LeftRegion for integrase B2004 sequence
ctatggagccgcagggcttgcggttctgttcggcatcttccttatggtatatgtctttctggatatgcaaaacccgaacctcgggctttttagaggaagcaacagcagccccgttgtttatgctgctgcgttcgccatcgccggtgtctgtctgctcgtctgccgaaaaatggtaaaaagaagaatggagcaaaagaaaaatgcaaacgatacccattgatttatccgcgctcaccgcccaggagcggcaacagtttgcc

SEQ ID NO: 15004 - DNA, 260 bp, Unknown; identical to SEQ ID NO: 13129
  Description of Unknown: LeftRegion for integrase B2005 sequence

SEQ ID NO: 15005 - DNA, 260 bp, Unknown; identical to SEQ ID NO: 14596
  Description of Unknown: LeftRegion for integrase B2006 sequence

SEQ ID NO: 15006 - DNA, 260 bp, Unknown; identical to SEQ ID NO: 13476
  Description of Unknown: LeftRegion for integrase B2007 sequence

SEQ ID NO: 15007 - DNA, 260 bp, Unknown
  Description of Unknown: LeftRegion for integrase B2008 sequence
tctgataccctatggatagggtatcgataccgtatccataccgtatcgataccctatcgatacctcgcgtgcgcgcgtgcgtgtgcgcgcgatcacgcgcgcactgtctctgtatctgtaactgatactgcatctgtaatctgtttttgcattctgaatatctactactgcaaatctatcgttagaaggaggtggcactgttgccgaagaaacccatcaagcacccagcgaaaccgaagaggggagtaaagctggatatt

SEQ ID NO: 15008 - DNA, 260 bp, Unknown
  Description of Unknown: LeftRegion for integrase B2009 sequence
gacacacctcctgaaacagatactcttatggttgtcattgttgatgacgaagaaggatttgttaagaaaatcagcattgatgaagatactgtgacccttcgctcttttaatccacactatcctccccgtgtttttggcggtgttgaaattggacgattgcgctttgtcggtagagtcatggagttaaaaaggagatttgcatgaaaaaatttccaatcgacctctcctgtctaacagaggaagaaatctctcaatttcaa

SEQ ID NO: 15009 - DNA, 260 bp, Unknown; identical to SEQ ID NO: 14410
  Description of Unknown: LeftRegion for integrase B2010 sequence

SEQ ID NO: 15010 - DNA, 260 bp, Unknown; identical to SEQ ID NO: 13476
  Description of Unknown: LeftRegion for integrase B2011 sequence

SEQ ID NO: 15011 - DNA, 246 bp, Unknown
  Description of Unknown: LeftRegion for integrase B2012 sequence
ggcttgcggttctgttcggcatcttccttatggtatatgtctttctggatatgcaaaacccgaacctcgggcttttccgaggaacccgcagcagcccagttgtttatgctgctgcgttcgccatcgccggtgtctgtctgctcgtctgccgaaaaatggtaaaaagaagaatggagcaaaagaaaaatgcaaacgatacccattgatttatccgcgctcaccgcccaggagcggcaacagtttgac

SEQ ID NO: 15012 - DNA, 260 bp, Unknown; identical to SEQ ID NO: 13476
  Description of Unknown: LeftRegion for integrase B2013 sequence

SEQ ID NO: 15013 - DNA, 260 bp, Unknown; identical to SEQ ID NO: 13402
  Description of Unknown: LeftRegion for integrase B2014 sequence

SEQ ID NO: 15014 - DNA, 260 bp, Unknown
  Description of Unknown: LeftRegion for integrase B2015 sequence
cgtgccagcgggtgaagaccaccagctcgcgcgaggcgttgtgcatgcgggtccgcacgacggaggtgtaccactcccagcagttggcgcggacgagcggcgaattggcttcaagcgcgtctttatacacattataatcaattttgtcgcagattaacaaaaaatcgttaaatttgcgctaaagattgattgacagcgttatggaaaaatcgaaaagagtggtcggttacgcccgtgtttcgacggaggcacaagacatt

SEQ ID NO: 15015 - DNA, 260 bp, Unknown
  Description of Unknown: LeftRegion for integrase B2016 sequence
ctatggggccgcagggcttgcgacgctgtttggggcctgcctgatgatttatgtattcctggatatgaaaaatccgaacctcgggctttttagaggaacccgcagcagccccgttgtttatgctgctgcgttcgccattgctggtgtctgtctgttcgtctgccgaaaaatggtaaaaaaaaggatggagcaaaagaaaaatgcaaacgatacccattgatttatccgcgctcaccgcccaggagcggcaacagtttgcc

SEQ ID NO: 15016 - DNA, 260 bp, Unknown
  Description of Unknown: LeftRegion for integrase B2017 sequence
gatacaccccctgaaacagatactcttatggttgttattgttgatgacgaagaaggatttgttaagaaaatcagcattgatgaagatactgtgacccttcgctcttttaatccacactatcctccccgtgtttttggcggtgttgaaattggacgattgcgctttgtcggtagagtcatggagttaaaaaggagatttgcgtgaaaaaatttccaatcgacctctcctgtctgacagaggaagaaatctctcaatttcaa

SEQ ID NO: 15017 - DNA, 260 bp, Unknown; identical to SEQ ID NO: 14455
  Description of Unknown: LeftRegion for integrase B2018 sequence

SEQ ID NO: 15018 - DNA, 260 bp, Unknown
  Description of Unknown: LeftRegion for integrase B2019 sequence
tggagccgcggggcttgcggttctgttcggcatcttccttatggtatatgtctttctggatatgcaaaacccgaatcttggcctgttccagtccggccacgcctcgccgatcgtttatgtcgcggccttttccattatcggaacatgcctgtatatcgtccgaactgtgataaagcgaaacgcaaaaaggagtaaacacgatgcaaacaataccaattgatctatcggctcttacgccggaggaaagacagcagtttgca

SEQ ID NO: 15019 - DNA, 260 bp, Unknown
  Description of Unknown: LeftRegion for integrase B2020 sequence
cgtgccagcgcgtgaagaccaccagttcgcgcgaggcgttgtgcatccgagtccgcaccaccgaggtgtaccactcccagcagttggcccgcacaatcggcgagttggcctcaagcgcatccttgtacacattataatcaatcttgtcgcagattaacaaaaaaacgttaaatttgcgataaagattgcttgagcgcgttatggaaaaatcgaaaagagtagtcggttacgcccgtgtttcgactgaggcacaagacatt

SEQ ID NO: 15020 - DNA, 260 bp, Unknown; identical to SEQ ID NO: 15015
  Description of Unknown: LeftRegion for integrase B2021 sequence

SEQ ID NO: 15021 - DNA, 260 bp, Unknown
  Description of Unknown: LeftRegion for integrase B2022 sequence
agcgtatgctgcctgtactatggcggtactgctagggttctttttaatgatatacgttatcctggatgcccggaatccaaacatgggcctgtttcggcggcgggagataagccccatcgtttatgttgcggcgttctcaatcgtcctggttctgttcgtgatagcacattcgctcgttaagaaaaaagttggtgataaaaatgcagatgataccaattgatttatcagccctgacagcctcggaacagcggcagtttacg

SEQ ID NO: 15022 - DNA, 260 bp, Unknown
  Description of Unknown: LeftRegion for integrase B2023 sequence
tggagccgcagggcttgcggttctgttcggcatctttcttatggtatatgtctttctggatatgcaaaacccgaatcttggcctgttccagtccggccacgcctcgccgatcgtttatgtcgcggccttttccattatcggaacatgcctgtatatcgtccgaactgtgataaagcgaaactcaaaaaggagtaaacacgatgcaaacaatcccaattgatctatcggctcttacaccggatgaaagacagcagtttgcg

SEQ ID NO: 15023 - DNA, 260 bp, Unknown
  Description of Unknown: LeftRegion for integrase B2024 sequence
gatacacctcccgaaacagatactcttatggttgtcattgttgatgacgaagaaggatttgttaagaaaatcagtattgatgaagatactgtgacccttcgttcttttaacccacactatcctccccgtgtttttggcggtgttgaaattggacgattgcgctttgtcggtagagtcatggagctaaaaaggagatttgcatgaaaaaatttccaatcgacctctcttgtctgacagaggaagaaatctctcaatttcag

SEQ ID NO: 15024 - DNA, 260 bp, Unknown
  Description of Unknown: LeftRegion for integrase B2025 sequence
cgtgccagcgggtgaagaccaccagctcgcgcgaggcgttgtgcatgcgggtccgcacgacggaggtgtaccactcccagcagttggcgcggacgagcggcgaattggcttcaagcgcgtctttatacatatagtaatcaattttgtcgcatattaacaaaaaaacgttaaatttgcgctaaagattgattgacagcgttatggaaaaatcgaaaagagtggtcggttacgcccgtgtttcgacggaggcacaagacatt

SEQ ID NO: 15025 - DNA, 260 bp, Unknown; identical to SEQ ID NO: 14983
  Description of Unknown: LeftRegion for integrase B2026 sequence

SEQ ID NO: 15026 - DNA, 260 bp, Unknown
  Description of Unknown: LeftRegion for integrase B2027 sequence
cgtgatgactccttgccggatgctgaatatggaagtaacgaatccctaggcaatttaaaggtcgagtccgaagcaatttttatgcattctcatctgctggacttgaaatatgaatcaactacagaagattatgaaagtcttttacagtctcgtaatgagcttgccggcgttctcggcaagtctggcaggtgatgtagataatgaaaaaaattgagacaaatcaaccaaccgttgagcgcggagtaatttatgctcgatac

SEQ ID NO: 15027 - DNA, 260 bp, Unknown
  Description of Unknown: LeftRegion for integrase B2028 sequence
taatatgtttctgttgatccgcgctgagtgcttcaaacattgcaacagcttcctcttcggaaactgtgctttcattagtggtatgacatactctactcctatcctgtcctaaagaaatacttcctacgtattagtgtcaagagtattatagcactttttattcaatttgccatgttaaattgtgtaaaggaaatagatatatgtcaattacaaaatttccaattgatctttcgtggttaacagaagaagaattggcccaa

SEQ ID NO: 15028 - DNA, 260 bp, Unknown
  Description of Unknown: LeftRegion for integrase B2029 sequence
catcttctccgcagaaaagacagggcgttttggaacgagttgaacctaaacgtgcaactctacttatataaatggctcccagatatgatatttcggaaatgaatttaactttttgactgttgaaagtgtggaaagatttatttttcccagaacttgcaacggcttgcaacaagcttaaaactacttgaaaggtggtatttatgcctcgtaaaaagaaactgcaagaggtgggcggcctgcgcctggtggcgtactatcgc

SEQ ID NO: 15029 - DNA, 260 bp, Unknown
  Description of Unknown: LeftRegion for integrase B2030 sequence
gcggccttcggcaatgcgctctgtgtgcaaagcctatcgcttttgtgtatggacattctcgtgtgtatcactcgacgacttggtgtaccgatgcaatgtcacaaccgtttcaaatgtttgaagaagaagctattgcaaaaggatttcggaagtgcaaggcttgtcaaaagcgagatgaaagcattaaggagtaatggtgtatggcacgttcagcgaagaaaattgaatatgcacccgctgaacagatcggtgtgatctat

SEQ ID NO: 15030 - DNA, 260 bp, Unknown; identical to SEQ ID NO: 14983
  Description of Unknown: LeftRegion for integrase B2031 sequence

SEQ ID NO: 15031 - DNA, 260 bp, Unknown; identical to SEQ ID NO: 14982
  Description of Unknown: LeftRegion for integrase B2032 sequence

SEQ ID NO: 15032 - DNA, 260 bp, Unknown
  Description of Unknown: LeftRegion for integrase B2033 sequence
ctatggagccgcagggcttgcggttctgttcggcatcttccttatggtatatgtctttctggatatgcaaaacccgaacctcgggctttttagaggaagcaacagcagccccgttgtttatgctgctgcgttcgccatcgccggtgtctgtctgctcatctgccgaaaaatggtaaaaagaagaatggagcaaaagaaaaatgcaaacgatacccattgatttatccgcgctcaccgcccaggagcggcaacagtttgcc

SEQ ID NO: 15033 - DNA, 260 bp, Unknown
  Description of Unknown: LeftRegion for integrase B2034 sequence
tggagccgcagggcttgcggttctgttcggcatcttccttatggtatatgtctttctggatatgcaaaatccgaatcttggcctgttccagtccggccacgccgcgccgatcgtttatgtcgcggccttttccattatcgaaacatgcctgtatatcgtccgaactgtgacaaagcgaaacgcaaaaaggaggaaccgcgatgcaaacaataccaattgatctatcggctcttacaccggaggaaagacagcagttcgcg

SEQ ID NO: 15034 - DNA, 260 bp, Unknown
  Description of Unknown: LeftRegion for integrase B2035 sequence
ctatggtgccgcagggcttgcggcgctgtttggggcctgcctgatgatttatgtattcctggatatgaaaaatccgaacctcgggctttttagaggaacccgcagcagccccgttgtttatgccgccgcgttcgccatcgccggtgtctgtctgttcgtctgccgaaaaatggtaaaaaaaaggatggagcaaaagaaaaatgcaaacgatacccattgatttatccgcgctcaccgcccaggagcggcaacagtttgcc

SEQ ID NO: 15035 - DNA, 260 bp, Unknown; identical to SEQ ID NO: 14908
  Description of Unknown: LeftRegion for integrase B2036 sequence

SEQ ID NO: 15036 - DNA, 260 bp, Unknown
  Description of Unknown: LeftRegion for integrase B2037 sequence
cgtgcgacgatcgcccgccagaccgaggaatacaaccggcacgtcacccagctgcaaacccactacagcatgctgcatcggcaggaccgacggacgatcctgtttctgtccatcggcgtcaccgtgctggtgatttttctgatcttctggctggtgctggacgttctccgcccggaaatcggctggatcaagaggtaactatgaaaaactgcgtcattgatttatcaactctcaccccggaggagcgccgccagtttgcg

SEQ ID NO: 15037 - DNA, 260 bp, Unknown; identical to SEQ ID NO: 14904
  Description of Unknown: LeftRegion for integrase B2038 sequence

SEQ ID NO: 15038 - DNA, 260 bp, Unknown; identical to SEQ ID NO: 13476
  Description of Unknown: LeftRegion for integrase B2039 sequence

SEQ ID NO: 15039 - DNA, 260 bp, Unknown; identical to SEQ ID NO: 14908
  Description of Unknown: LeftRegion for integrase B2040 sequence

SEQ ID NO: 15040 - DNA, 260 bp, Unknown; identical to SEQ ID NO: 13129
  Description of Unknown: LeftRegion for integrase B2041 sequence

SEQ ID NO: 15041 - DNA, 260 bp, Unknown
  Description of Unknown: LeftRegion for integrase B2042 sequence
accccgctattcacacaaatgatggtggtcttactaagcagttacttcaatggtttaatctctgtgacatggagggtaaactaacgattgtacaatgtgcttctcaagagtttaagagaactcaaaaagaaaaaacagaagttgaagaaccggttgctgtcggttaaggttattgaccttatagaatggagaaaaacactatgaaactacctatcgacctctcctgtttgacagaggaagaaatctctcaatttcaggaa

SEQ ID NO: 15042 - DNA, 260 bp, Unknown
  Description of Unknown: LeftRegion for integrase B2043 sequence
gatacacctcctgaaacagatactcttatggttgtcattgttgatgacgaagaaggatttgttaagaaaatcagcattgatgaagatactgtgacccttcgctcttttaacccacactatcctccccgtgtttttggcggtgttgaaattggacgattgcgctttgtcggtagagtcatggagttaaaaaggagatttgcatgaaaaaatttccaatcgacctctcctgtctgacagaggaagaaatctctcaatttcaa

SEQ ID NO: 15043 - DNA, 260 bp, Unknown; identical to SEQ ID NO: 13468
  Description of Unknown: LeftRegion for integrase B2044 sequence

SEQ ID NO: 15044 - DNA, 260 bp, Unknown; identical to SEQ ID NO: 14983
  Description of Unknown: LeftRegion for integrase B2045 sequence

SEQ ID NO: 15045 - DNA, 260 bp, Unknown; identical to SEQ ID NO: 13476
  Description of Unknown: LeftRegion for integrase B2046 sequence

SEQ ID NO: 15046 - DNA, 260 bp, Unknown; identical to SEQ ID NO: 13129
  Description of Unknown: LeftRegion for integrase B2047 sequence

SEQ ID NO: 15047 - DNA, 260 bp, Unknown
  Description of Unknown: LeftRegion for integrase B2048 sequence
ctatggagccgcagggcttgcgacgctgtttggggcctgcctgatgatttatgtattcctggatatgaaaaacccgaacctcgggcttttccgaggaacccgcagcagccccgttgtttatgctgctgcgtttgccatcgccggtgtctgtctgctcgtctgccgaaaaattgtaaaaaggaaaatggagcaaaagaaaaatgcaaacgatacccattgatttatccgcgctcaccgcccaggagcggcaacagtttgcc

SEQ ID NO: 15048 - DNA, 260 bp, Unknown
  Description of Unknown: LeftRegion for integrase B2049 sequence
taaaaaaatcaggcttcccgcaaaggaagccttttatcgttgataatcatccatcagagcagttcaccataccttttgacataaatcgtctttacaaccgtagcaagcagcacacactatcctccccgtgtttttggcggtgttgaaattggacgattgcgctttgtcggtagagtcatggagctaaaaaggagatttgcatgaaaaaatttccaatcgacctctcctgtctgacagaggaagaaatctctcaatttcag

SEQ ID NO: 15049 - DNA, 260 bp, Unknown; identical to SEQ ID NO: 13442
  Description of Unknown: LeftRegion for integrase B2050 sequence

SEQ ID NO: 15050 - DNA, 260 bp, Unknown; identical to SEQ ID NO: 14967
  Description of Unknown: LeftRegion for integrase B2051 sequence

SEQ ID NO: 15051 - DNA, 260 bp, Unknown; identical to SEQ ID NO: 14990
  Description of Unknown: LeftRegion for integrase B2052 sequence

SEQ ID NO: 15052 - DNA, 260 bp, Unknown; identical to SEQ ID NO: 14683
  Description of Unknown: LeftRegion for integrase B2053 sequence

SEQ ID NO: 15053 - DNA, 260 bp, Unknown
  Description of Unknown: LeftRegion for integrase B2054 sequence
atcttgtagttctatttttgcttgtttttttgaaatttttacaagaggaagttcattaatcccatctttcatgatgggatatagtttattcccccgaacaaggtagcgatctctattatcatctgtacatatagcaatcaattttgtcgcagattaacaaaaaaacgttaaatttgcgctaaagattgattgacagcgttatggaaaaatcgaaaagagtagtcggttacgcccgtgtttcgacggaggcacaagacatt

SEQ ID NO: 15054 - DNA, 260 bp, Unknown
  Description of Unknown: LeftRegion for integrase B2055 sequence
tggagccgcagggcttgcggttctgttcggcatcttccttatggtatatgtctttctggatatgcaaaacccgaatcttggcctgttccagtccggccacgcctcgccgatcgtttatgtcgcggccttttccattatcggaacatgcctgtatatcgtccgaactgtgataaagcgaaacgcaaaaaggagtaaacacgatgcaaacaataccaattgatctatcggctcttacgccggaggaaagacagcagtttgcg

SEQ ID NO: 15055 - DNA, 260 bp, Unknown; identical to SEQ ID NO: 13442
  Description of Unknown: LeftRegion for integrase B2056 sequence

SEQ ID NO: 15056 - DNA, 260 bp, Unknown
  Description of Unknown: LeftRegion for integrase B2057 sequence
gacacacctcctgaaacagatactcttatggttgtcattgttgatgacgaagaaggatttgttaagaaaatcagcattgatgaagatactgtgacccttcgctcttttaacccacactatcctccccgtgtttttggcggtgttgaaattggacgattgcgctttgttggtagagtcatggagttaaaaaggagatttgcatgaaaaaatttccaatcgacctctcctgtctgacagaggaagaaatctctcaatttcag

SEQ ID NO: 15057 - DNA, 260 bp, Unknown
  Description of Unknown: LeftRegion for integrase B2058 sequence
agcgtatgctgcctgtactatggcggtactgctagggttctttttaatgatatacgttatcctggatgcccggaatccaaacatgggcctgtttcggcggcgggagataagccccatcgtttatgttgcggcgttctccatcgttctggttctgtccctgatagcacattcgctcgttaagaaaaaagttggtgataaaaatgcagatgataccaattgatttatcagccctgacagcctcggagcaacagcagtttacg

SEQ ID NO: 15058 - DNA, 260 bp, Unknown; identical to SEQ ID NO: 14994
  Description of Unknown: LeftRegion for integrase B2059 sequence

SEQ ID NO: 15059 - DNA, 260 bp, Unknown
  Description of Unknown: LeftRegion for integrase B2060 sequence
tgtgatttagctgagaatttaaatgttacaactgatttcttaattcaatctatcgagcattataaaagaaaatatggtgtttattatgttggtgataaatatttacttgtttttgaaccattacatattgttgaaatgtgttgacatgtacatatatttacccaactttgaatatatattttctgaagggagttgtgactatgaattcaaatatagcaatctattctcgtaaatcaaagtttactggtaaaggcgaaagt

SEQ ID NO: 15060 - DNA, 260 bp, Unknown; identical to SEQ ID NO: 14908
  Description of Unknown: LeftRegion for integrase B2061 sequence

SEQ ID NO: 15061 - DNA, 260 bp, Unknown
  Description of Unknown: LeftRegion for integrase B2062 sequence
ctatggggccgcagggcttgcgacgctgtttggggcctgcctgatgatttatgtattcctggatatgaaaaatccgaacctcgggcttttccgaggaacccgtagcagccccgttatttatgctgctgcgttcgccattgctggtgtctgtctgttcgtctgccgaaaaatagtaaaaaaaaggatggagcaaaagaaaaatgcaaacgatacccattgatttatccgcgctcaccgcccaggagcggcaacagtttgcc

SEQ ID NO: 15062 - DNA, 260 bp, Unknown
  Description of Unknown: LeftRegion for integrase B2063 sequence
tggagccgcagggtttgcggttctgttcggcatcttccttatgggatatgtctttctggatatgcgaaacccgaaccttggcctgttccagtccggccacaccgcgccgatcgtttatgtcgcggccttttccattatcggaacatgcctgtatatcgtccgaactgtgataaaacgaaacacagaaagggggaaacacgatgcaaacaataccaattgatctatcggctcttacactggaggaaagacagcagtttgcg

SEQ ID NO: 15063 - DNA, 260 bp, Unknown
  Description of Unknown: LeftRegion for integrase B2064 sequence
tggagccgcagggcttgcggttctgttcggcatcttccttatggtatatgtctttctggatatgcaaaacccgaatcttggcctgttccagtccggccacgcctcgccgatcgtttatgtcgcggccttttccattatcggaacatgcctgtatatcgtccgaactgtgataaagcgaaacgcaaaaaggagtaaacacgatgcaaacaataccaattgatctatcggctcttacgccggaggaaagacagcagtttgca

SEQ ID NO: 15064 - DNA, 260 bp, Unknown
  Description of Unknown: LeftRegion for integrase B2065 sequence
gacacacctcctgaaacagatactcttatggttgtcattgtcgatgacgaagaaggatttgttaagaaaatcagcattgatgaagatactgtgacccttcgctcttttaatccacactatcctccccgtgtttttggcggtgttgaaattggacgattgcgctttgtcggtagagtcatggagttaaaaaggagatttgcatgaaaaaatttccaatcgacctctcctgtctgacagaggaagaaatctctcaatttcaa

SEQ ID NO: 15065 - DNA, 260 bp, Unknown; identical to SEQ ID NO: 14982
  Description of Unknown: LeftRegion for integrase B2066 sequence

SEQ ID NO: 15066 - DNA, 260 bp, Unknown
  Description of Unknown: LeftRegion for integrase B2067 sequence
cgccgggctacatccgcacctccgaggaggtcgagatcgtcggacgccgcggcgggctgctgtctgtagggcgcgagggttcgctgacgggcaaccgcgtggattgcttcatcctcgacgacctctacatattataatcaatattgtcgcagattaacagaaaaacgttaaatttgcgataaagattgtttgagcgcgttatggaaaaatcgaaaagagtagtcggttacgctcgtgtttcgactgaggcacaagatatt

SEQ ID NO: 15067 - DNA, 260 bp, Unknown; identical to SEQ ID NO: 14908
  Description of Unknown: LeftRegion for integrase B2068 sequence

SEQ ID NO: 15068 - DNA, 260 bp, Unknown; identical to SEQ ID NO: 14908
  Description of Unknown: LeftRegion for integrase B2069 sequence

SEQ ID NO: 15069 - DNA, 260 bp, Unknown
  Description of Unknown: LeftRegion for integrase B2070 sequence
accccgctattcacacaaatgatggtggtcttacgaagcagttgcttcaatggtttaatctctgtgacatggagggtaaactaacgattatacaatgtgcttctcaagagtttaaaagaactcaaaaagaaaaaaatgaaaatgcggaacaggttgctgtcagctaaagtcattgacctcgaaaagtggaggaaaacattatgaaatcacctatcgacctctcctgtctgacagaggaagaaatctctcaatttcaagaa

SEQ ID NO: 15070 - DNA, 260 bp, Unknown
  Description of Unknown: LeftRegion for integrase B2071 sequence
taatttggaaggaggagtatttataaaaatgaatggagaaacaaaaaaggcaggaatttatattcgtgtaagtacagaagatcaagcaagagaacggatttagtttaggagaacaggaagaaaaactaaaacaactttgtaagtataaggaatatgagatattcaaggtttacaaagatgcaggaattagtgcaaaagatatggaacacagaccagcttttcagcaaatgctaacagacatgagagcaggaaaaatcaat

SEQ ID NO: 15071 - DNA, 260 bp, Unknown
  Description of Unknown: LeftRegion for integrase B2072 sequence
ggctactggctgtaaaatgctggtagccctcattttttagttgtatctagtatataaggggtgtataatagataggaactgaaaacagcttcataaagccctctattttatcgagggtaaagaagtctacacctaatatataaaagtggctgtatgaggcacacaggagctcacaggactattacaggagggtaaacaggatggcatacaggaaaataacggatataaaagatactattggtatgagagcggtattttat

SEQ ID NO: 15072 - DNA, 260 bp, Unknown
  Description of Unknown: LeftRegion for integrase B2073 sequence
ttgtcagcgtttcggtagatttttccgtttttcagcaaaataaaaacgcccacggtgttaccagcaccgcaggcgttccagatcagcttgctcagagagatggtacagggataaaacctgtccagagcaataacagacctcgcagatgttattgtaccacctccgggcaggcttgtcaaagtgtacccggaggtatttttatgggcaaaaaacaaaagacaaacggcggcgatgcggtcatctacgcccgctattcttcc

SEQ ID NO: 15073 - DNA, 260 bp, Unknown
  Description of Unknown: LeftRegion for integrase B2074 sequence
tattaatttattatcagataagattgatgatttacaagctgatattaataatttaactataagaacattaaaaaatgaaaataatataattaatttttctaaagttattaagatcaataacagagatgctcaataaaaaatactattaaagattttaaagagttatgatattcatagctctttaaaaatatggaggaaaaatgaataagaaaagtgcaatttacgttagagtatcaacttcacatcaaatagataaagac

SEQ ID NO: 15074 - DNA, 260 bp, Unknown; identical to SEQ ID NO: 15070
  Description of Unknown: LeftRegion for integrase B2075 sequence

SEQ ID NO: 15075 - DNA, 260 bp, Unknown
  Description of Unknown: LeftRegion for integrase B2076 sequence
gaagccccattagaaacagataccttaatggtagttcttgttgatgacgatgaaggttttgtgaaaaaagtgagtattcatgcagatagtgttacacttcattcgtttaacccgcattatccacctcgtgtattcggtggttctgaaattggacgcttacgctttgtagggcgtgtggttgaaatgaagcggaggtttgtatgaaatatcctatcgacctctcctgtctgacagaggaagaaatctctcaatttcaggaa

SEQ ID NO: 15076 - DNA, 260 bp, Unknown
  Description of Unknown: LeftRegion for integrase B2077 sequence
gtgggcgccgaaacggtcttgctttccagtcgtcggggaggacgccaaaacatagcctgttggaaaccacgtcttggaggaatcagcatctttattgtatacaatgtcctccggtttgtcaacgagaaaatgtagaatctggatgcatcatctaaaatgttgtccatgatcgcgtaaatatttgaggaggcttgtatgctatgacgcacggcgcttatattttagcccggtactccaccgagaaccagtccgaggccagt

SEQ ID NO: 15077 - DNA, 260 bp, Unknown
  Description of Unknown: LeftRegion for integrase B2078 sequence
ctttgtcagcgtttcggtagatttttccgtttttcagcaaaataaaaacgcccacggtgttaccagcaccgcaggcgttccagatcagcttactcagagatggtacagggataaaacctgtccagagcaataacagacctcgcagatgttattgtaccacctccgggcaggcttgtcaaagtgtacccggaggtatttttatgggcaaaaagcaaaagacaaacggcggcgatgcggtgatctacgcccgctattcttcc

SEQ ID NO: 15078 - DNA, 260 bp, Unknown
  Description of Unknown: LeftRegion for integrase B2079 sequence
atgcgccgaaacggtcttgctttccagtcgtcggggaggacggcccaaaacatagcctgttggaaaccatgtcttggaggaatcagcatctttattgtatacaatgtcctccggtttgtcaatgcaaaaatgtagaatctggatacatcatctaaaatgttgtccatgatcgcgtaaaaattttaggaggcttgtatgctatgatgcatggcgcttatattttagcccggtactccaccgagaaccagtccgaggccagt

SEQ ID NO: 15079 - DNA, 260 bp, Unknown
  Description of Unknown: LeftRegion for integrase B2080 sequence
gggcgccgaaacggtcttgctttccagtcgtcggggaggacggcccaaaacatagcctgttggaaaccacgtcttggaggaatcagcatctttattgtatacaatgtcctccggtttgtcaatgcaaaaatgtagaatctggatacatcatctaaaatgttgtccatgatcgcgtaaaaattttaggaggcttgtatgctatgatgcatggcgcttatattttagcccggtactccaccgagaaccagtccgaggccagt

SEQ ID NO: 15080 - DNA, 260 bp, Unknown
  Description of Unknown: LeftRegion for integrase B2081 sequence
taaaaccgccatttcagaagggtctccatacgaagataagctattgcgatacttctctttgtgtgacgcagagggtaaacttcgtgttattcagtgcgccatgaatgaattcgatagaacccaaaaagaaaaaaacagaagttgaagaaccgattgctgtcggctaaagttatcaaccttatcgaatggagaaatatactatgaaactacctatcgacctctcctgtctgacggaagaagaaatctctcaatttcaggaa

SEQ ID NO: 15081 - DNA, 260 bp, Unknown
  Description of Unknown: LeftRegion for integrase B2082 sequence
ctggataaactggccagtctctttgagagcgccatgacggaggtcgccgtcgtgaactacccgcgcaagagcgcgtaaagatctcgaaccaaaaaaagatgcccccggcgctaccaacaccgagggcgatcaaagggcagctgactatcgacaggtcttactgcccttctatcttacaacagaataggaggtttcgcaacatgaaaatgatgcagaacgacaaccggacggccatcacctactaccgctattccagccac

SEQ ID NO: 15082 - DNA, 260 bp, Unknown
  Description of Unknown: LeftRegion for integrase B2083 sequence
ctcgaagtggatgaattctgcgcttgaaaagcagatggcagaggcaaatgagcagcttaatgaaaaagcggcggcgattggcgcggacgctatcgttggcttgcgccattctggaattggcgcaaatcatgtgtttattggtacggcagtaaggtttaagtaagccgtttccttgagaagcacttgaaatggagggtatgatggctcgatcaaagcgaaatgaatactcatctgctgaacagatcggcgtgatctatgcc

SEQ ID NO: 15083 - DNA, 260 bp, Unknown
  Description of Unknown: LeftRegion for integrase B2084 sequence
gcgcaggaactggaaaagtacattgccacctacgaagaatccaaagcaactgcgtccagcggaaatgttgtgtccgtggtggatgaaattcgtggcttgaagcagctgctggatgagggcatcctgacggaagaagagtttgctgccaagaaaaagcagcttttgggaatttgaattttgaaagtggatggtgatagataatggcaaaaaagaagaagcccgccgggggcaatgccatcatctatgcccgctactcatcc

SEQ ID NO: 15084 - DNA, 260 bp, Unknown
  Description of Unknown: LeftRegion for integrase B2085 sequence
gtgggcgccgaaacggtcttgctttccagtcgtcggggaggacgccaaaacatagcctgttgaaaaccatgtcttggaggaatcagcatctttattgtatacaatgtcctccggtttgtcaacgagaaaatgtagaatttggatgcatcatctaaaatgttgtccatgatcgcgtaaatatttgaggaggcttgtatgctatgacgcacggcgcttatattttagcccggtactccaccgagaaccagtccgaggccagt

SEQ ID NO: 15085 - DNA, 260 bp, Unknown
  Description of Unknown: LeftRegion for integrase B2086 sequence
catcttctccgcagaaaagacagggcgttttggaacgagttgaacctaaacgtgcaactctacttatataaatggctcccagatatgatatttcggaaatgaatttaactttttgactgttgaaagtgtggaaagatttatttttcccagaacttgcaacggcttgcaacaaacttaaaactacttgaaaggtggtatttatgcctcgcaaaaagaaactgcaagaggtaggcggactgcggctggtggcgtactatcgc

SEQ ID NO: 15086 - DNA, 260 bp, Unknown; identical to SEQ ID NO: 15077
  Description of Unknown: LeftRegion for integrase B2087 sequence

SEQ ID NO: 15087 - DNA, 260 bp, Unknown; identical to SEQ ID NO: 13395
  Description of Unknown: LeftRegion for integrase B2088 sequence

SEQ ID NO: 15088 - DNA, 260 bp, Unknown
  Description of Unknown: LeftRegion for integrase B2089 sequence
ggctactggctgtaaaatgctggtagccctcattttttagttgtatctagtatataaggggtgtataatagataggaactgaaaacagcctcataaagccctctattttatcgaaagtaaagaagtctacacctaatatataaaagtggctgtatgaggcacacaggagctcacaggactattacaggagggtaaacaggatggcatacaggaaaataacggatataaaagatactattggtatgagagcggtattttat

SEQ ID NO: 15089 - DNA, 260 bp, Unknown
  Description of Unknown: LeftRegion for integrase B2090 sequence
catcttctccgcagaaaagacagggcgttttggaacgagttgaacctaaacgtgcaactctacttatataaatggctcccagatatgatatttcggaaatgaatttaactttttgactgttgaaagtgtggaaagatttattttccccagaacttgcaacggcttgcaacaaacttaaaactacttgaaaggtggtatttatgcctcgcaaaaagaaactgcaagaggttggcggcctgcggctggtggcgtactatcgc

SEQ ID NO: 15090 - DNA, 260 bp, Unknown; identical to SEQ ID NO: 13019
  Description of Unknown: LeftRegion for integrase B2091 sequence

SEQ ID NO: 15091 - DNA, 260 bp, Unknown
  Description of Unknown: LeftRegion for integrase B2092 sequence
catcttctccgcagaaaggacagggcgttttggaacgagttgaacctaaacgtgcaactctacttatataaatggctcccagatatgatatttcggaaatgaatttaactttttgactgttgaaagtgtggaaagatttattttccccagaacttgcaacggcttgcaacaaacttaaaactacttgaaaggtggtatttatgcctcgcaaaaagaaactgcaagaggtgggcggactgcggctggtggcgtactatcgc

SEQ ID NO: 15092 - DNA, 260 bp, Unknown
  Description of Unknown: LeftRegion for integrase B2093 sequence
aaatataacaggatgctgcaacactgtcagcgttttggcggatttttccgttttttagcaaaataaaaacgcccacggtgctaccaacaccgtaagcgttccagatcagcttacccagagggcaataacagccaacctcacaggtgttattgtaccacctccgggcaggcttgtcaaagtgtaccttggaggaaattacaatggcaagaaaaaagaaatcagtgagcggcgatgctgtcatctatgcccgctactcgtcc

SEQ ID NO: 15093 - DNA, 260 bp, Unknown; identical to SEQ ID NO: 14094
  Description of Unknown: LeftRegion for integrase B2094 sequence

SEQ ID NO: 15094 - DNA, 260 bp, Unknown
  Description of Unknown: LeftRegion for integrase B2095 sequence
tctttattcatactataacataatgtgctcaaaattaaataagtattttaaaatctttttatctccatattgaataaacttttatcatcaagtatcataatgagtatatagcttattacataatattcttaacttgtcagctccttgtagtatactacttggagcttctaatttatattttaatggcagaggtgttttctatgaagatagcaatctattctcgtaaatcaaaagccaccgacaaaggtgaatctatagaa

SEQ ID NO: 15095 - DNA, 260 bp, Unknown; identical to SEQ ID NO: 14094
  Description of Unknown: LeftRegion for integrase B2096 sequence

SEQ ID NO: 15096 - DNA, 260 bp, Unknown
  Description of Unknown: LeftRegion for integrase B2097 sequence
gtgggcgccgaaacggtcttgctttccagtcgtcggggaggacgccaaaacatagcctgttgaaaaccatgtcttggaggaatcagcatctttattgtatacaatgtcctccggtttgtcaacgaaaaaatgtagaatctggatacatcgtccaaaatgatgtccatgatcgcgtgataattttaggaggcttgtatgcaatgacgcatggcgcttatattttagcccggtactccaccgagaaccagtccgaggccagt

SEQ ID NO: 15097 - DNA, 260 bp, Unknown
  Description of Unknown: LeftRegion for integrase B2098 sequence
tctccaactggacggcaaaggcacccgcgccggcagttgcaccgcagcctgcgccacaggttattgaacaaaagccgtctgcagctgatgaaatccgcaagtacaagggcctgctggatgatggtatcatttcacaggaagaatttgaggcaaagaagaagcagttgcttggcctgtaaaaccgaaaggagcgtgacggcatgaaaaagcgaatcaacactaattccgcagcccgtgccgtcatctacgctcgttattcc

SEQ ID NO: 15098 - DNA, 260 bp, Unknown; identical to SEQ ID NO: 13344
  Description of Unknown: LeftRegion for integrase B2099 sequence

SEQ ID NO: 15099 - DNA, 260 bp, Unknown; identical to SEQ ID NO: 14660
  Description of Unknown: LeftRegion for integrase B2100 sequence

SEQ ID NO: 15100 - DNA, 260 bp, Unknown
  Description of Unknown: LeftRegion for integrase B2101 sequence
acgattccgcaccggtatgcccgcctgatatggagcaccaacttcttttctttttcgatcaatgtgaccaagagggtaaacttcgtatcatccaacttgccatgaacgaatatgatcgcgccatgaaagaaaaaacagaacatgcggagccgattgctgttggataaaaccatcgacttaaacgaatggaggaaaacgctatgacattacccgtcgacctaagatgtctcactgaggaggaacttactcaattcctcgaa

SEQ ID NO: 15101 - DNA, 260 bp, Unknown; identical to SEQ ID NO: 15097
  Description of Unknown: LeftRegion for integrase B2102 sequence

SEQ ID NO: 15102 - DNA, 260 bp, Unknown; identical to SEQ ID NO: 13344
  Description of Unknown: LeftRegion for integrase B2103 sequence

SEQ ID NO: 15103 - DNA, 260 bp, Unknown
  Description of Unknown: LeftRegion for integrase B2104 sequence
gaataaaagatattgaagagttatctgatctcgaacaaactcttctgttttgttttgaaaattgtgacgcaataggccaaatgcgtatcattcaagttgccatgaatgaacacgatagaacgcaaaaagaaaaaacaggctctacgggagagtctgttatcagctaaggttgttgacctgaacgaatggagaaaaacccaatgaaaaacatgaaattccccatcgacctgtccatgttgacagaggaagagattaaccag

SEQ ID NO: 15104 - DNA, 260 bp, Unknown
  Description of Unknown: LeftRegion for integrase B2105 sequence
atagcagccgttagaattgatgattctgctacactcaaacgtttttataaaatccctggcggttgcatgctattaccagaaaatgccaaatataaagccatgacttttacttccgagaattgcgataatatagccataatcggcattcctgttgcgaaatatacaaaacatgtcgcccaataaattaagcggagggaaaaatggatacttccaaatatatgccggcttgctattgccgagtatctactgtgcaccaaata

SEQ ID NO: 15105 - DNA, 260 bp, Unknown
  Description of Unknown: LeftRegion for integrase B2106 sequence
cgtgaagtagacattgaagatggagatattgtcgtggccgtggtagatcggcaagacggctttatcaaacaagtccactttgaagagaatgtccttaccctgcactccttcaacccttactaccctgatatggtctttaaggggaacgagatcaagcaagtccgctttgtaggtaaagcccgagaggtgaagagaattctatgaagaagttcaaattccccattgacctgtccatgctgacagaggaagagatcaaccaa

SEQ ID NO: 15106 - DNA, 260 bp, Unknown
  Description of Unknown: LeftRegion for integrase B2107 sequence
ccgatgacaggggaactgtaacaatccctattcaggaatctattcagctttctgaggaagaacgtattttgatttccgcatttaggagtgcttctatagaaggacgcatgagaatcatccaagtctgtatgaatgaaaaggatgcaaaaggggaaactatcattgcaggataataagcattgaggaatggaggaagaatcatgtacgaagagattaagactgcttgtctatatctaagatattcaagcagcaaccaaact

SEQ ID NO: 15107 - DNA, 260 bp, Unknown
  Description of Unknown: LeftRegion for integrase B2108 sequence
ttaacatatatgtaaaattagcgaccatttgagagccattgagcaccgaccctttaaataccattgattttaaaatgcatggttgatatattaaattaagaagccctaagaggcacttaataaaaccctacgaggttcccgaagcctatgcatttttgtattagacttctttttatataaaattaataggaggtggctatatgatagctgcaatttattcacgaaagtctaaattcacaggcaaaggtgaatctatagaa

SEQ ID NO: 15108 - DNA, 260 bp, Unknown
  Description of Unknown: LeftRegion for integrase B2109 sequence
gatagcagccgttagaattgatgattctgctacactcaaacgtttttataaaatccctggtggttgcatgctattaccagaaaatgccaaatataaagccatgacttttacttccgagaattgcgataatatagctataatcggcattcctgtcgcgaaatatacaaaacatgtcgcccaataactttagcggagggaaaatggatacttccaaatatatgccggcttgctattgccgagtatctactgtgcaccaaata

SEQ ID NO: 15109 - DNA, 260 bp, Unknown
  Description of Unknown: LeftRegion for integrase B2110 sequence
ctttgaaagaccgtttattcccagaagatacttattcccttcaagaaaaagaattaatagacctgtttcgtgacagcagtccttctattcaatttgaggtcatcactatattgaaaaatcacataaaagaaaaaacaaattctacaaagagagcttctggcaaataaaatcattgacttgtctgaatggagaaagacattatgaaaagtgtgaaatttccgattgacctctccatgttgaccgaagaggaaatagaccaa

SEQ ID NO: 15110 - DNA, 260 bp, Unknown
  Description of Unknown: LeftRegion for integrase B2111 sequence
gttatgatattttccgtgacaaagaggggatattcgtcattccatacggagcgcaacaggtaaaacggcccgatgggcaatatgtttatgattttccgaatgatgaagtaaccgatatgctgaacaagtatcattgcaatagatgtgctggcggttatgttacaaaggcgcgtgagtgaaactgaaaggggcgtgacggcatgaaaaagcgaatcagccctaattctgcggcccgtgccgtcatctatgcccggtattcc

SEQ ID NO: 15111 - DNA, 260 bp, Unknown; identical to SEQ ID NO: 13967
  Description of Unknown: LeftRegion for integrase B2112 sequence

SEQ ID NO: 15112 - DNA, 260 bp, Unknown
  Description of Unknown: LeftRegion for integrase B2113 sequence
cggttcctcccgttttacccaatgattacaaaaaattgcttaccctttacagagagtcagacgatgatggaaaaacagtaatcatgagtcatgctattcaagaatgcagaagatcaatgagggaaaaagaaaaaacagactctacggaagagtctgctatcggctaaggtcatcgacctaaatgaatggagaaagactctatgaagaagttcaaattccctatcgacctgtccatgctgacagaggaagagatcaaccaa

SEQ ID NO: 15113 - DNA, 260 bp, Unknown
  Description of Unknown: LeftRegion for integrase B2114 sequence
tattaatttattatcagataagattgatgatttacaagctgatattaataatttaactataagaacattaaaaaatgaaaataatataattaatttttctaaggttattaagagcaataacagagatgctcaataaaaaatactattaaagattttaaagagttatgatattcatagctctttaaaaatatggaggaaaaatgaataaaaaaagtgcaatttatgtgagagtatcaacttcccatcaaatagataaagac

SEQ ID NO: 15114 - DNA, 260 bp, Unknown; identical to SEQ ID NO: 13967
  Description of Unknown: LeftRegion for integrase B2115 sequence

SEQ ID NO: 15115 - DNA, 260 bp, Unknown
  Description of Unknown: LeftRegion for integrase B2116 sequence
ttacaaaccatagatatggtcaaagacaaatataaaaaagatttatattcttccgattcacaaaaaataggttgaaaataaaaaatccccgactgctactaacagtcggggaaatagtgtagtgttatggtacaccaattaaaaacatatatattgtaccataacaccgattaaaaatcaagttaagaggtgttatttttatgaaaaaaactaaaaattcagtgcaaagggctgttatatatgcacgttattcgtgtagt

SEQ ID NO: 15116 - DNA, 260 bp, Unknown
  Description of Unknown: LeftRegion for integrase B2117 sequence
gaaaggtcagtatttccggcgcgtcagagttagaagaacggctactcagatacttttctttttgtgacgcagagggtaaattgcgtattattcaatgcgccatgaatgaatttgaccgaacagcaaaagaaaaaacagacccttcggaagagcctgttgttggctaaggtcatcgacctgtctgaatggagaaagacgctatgaaaatcacaaaattccccattgacctctccatgttgaccgaagaggaaatagaccag

SEQ ID NO: 15117 - DNA, 260 bp, Unknown
  Description of Unknown: LeftRegion for integrase B2118 sequence
atagcagccgttagaattgatgattctgccacactcaaacgtttttataaaattcctggcggttgcatgctgttaccagaaaatgccaaatataaagccatgacttttacttccgagaattgcgataatatagctataatcggcattcccgtagcgaaatatacaaagcatgtcgcccaataaattaagcggagggaaaaatggatacttccaaatatatgccggcttgctattgccgagtatctactgtgcatcagatc

SEQ ID NO: 15118 - DNA, 260 bp, Unknown
  Description of Unknown: LeftRegion for integrase B2119 sequence
atccctgaacatcctgccagagcgctgtgcgctagtggaaagtgagccggagcgcactcaagggctgcggcagatgctggtggacaactactcggtgttctacattgtgggcgaggataccgtgtcggtggcgcgtgtgctgtacagtgcatccgaccttgtgcgccgcctgcggagaatgaagtgaaaggggtgtttgcatgaccgccgtaatctacgcccgctattcgtcggacaaccagcgtgaagaatccatcgaa

SEQ ID NO: 15119 - DNA, 260 bp, Unknown
  Description of Unknown: LeftRegion for integrase B2120 sequence
gatagcagccgttagaattgatgattctgctacactaaagcgtttttataaaattcctggcggttgcatgctgttaccagaaaatgccaaatataaagccatgacttttacttccgagaattgcgataatatagctataatcggcattcctgtcgcgaaatatacaaaacatgtcgcccaataactttagcggaggggaaatggatacttccaaatatatgccggcttgctattgccgagtgtctactgtccatcaaatc

SEQ ID NO: 15120 - DNA, 260 bp, Unknown
  Description of Unknown: LeftRegion for integrase B2121 sequence
gttatgatattttccgtgacaaagagggcgtattcgttattccatacggagcacagcaggtaaaacagcccgatgggcaatatgtttatgattttccgaacgatgaagtaaccgatatgctgaataagcatcattgcaatagatgtgctggcggttatgttacaaaggcgcgcgagtaagcccgaaaggagcgtgacggcatgaaaaagcgaatcaacactaattccgcagcccgtgccgtcatctatgcccggtattcc

SEQ ID NO: 15121 - DNA, 260 bp, Unknown
  Description of Unknown: LeftRegion for integrase B2122 sequence
ttgatgataaaaacatcaatatccctgagtttggtcagactcttttattcttctttgaaaactgtgatgcacccggccaactgcgtataattcaattagccatgaacgaatatgatcgaacacaaaaagaaaaaacaaacccgccaaaagactctgctatcggctaaggtcatcgacctatctgaatggagaaagacgctatgaaaatcacgaaatttcccattgacctctccatgctgaccgaagaagagatagaccag

SEQ ID NO: 15122 - DNA, 260 bp, Unknown
  Description of Unknown: LeftRegion for integrase B2123 sequence
gaaaggtcagtatttccggcgcgtcagagttagaagaacggctactcagatacttttctttttgtgacgcagagggtaaattgcgtattattcaatgcgccatgaatgaatttgaccgaacagcaaaagaaaaaacagaccctccggaagagcctgttgttggctaaggtcatcgacctgtccgaatggagaaagacgctatgaaaatcacaaaattccccattgacctctccatgttgaccgaagaggaaatagaccag

SEQ ID NO: 15123 - DNA, 260 bp, Unknown; identical to SEQ ID NO: 13709
  Description of Unknown: LeftRegion for integrase B2124 sequence

SEQ ID NO: 15124 - DNA, 260 bp, Unknown
  Description of Unknown: LeftRegion for integrase B2125 sequence
ctttccatgcgtcgcctgcccttacagcatagcacgctttttcgatatgggcaaataaatgccccggcgctggtacgatgcagcgccggggataacatggagtgcagcacaaaaccggacaaagaaaattttatgcttgcaggggtcagtatatcacactccctgcatatgggcaaaccgcccggaaaggaagtgttatcatgccccgtaaaaaagctcctgcggccgaagtgccgcgcctggtggcttactaccgctac

SEQ ID NO: 15125 - DNA, 260 bp, Unknown; identical to SEQ ID NO: 14410
  Description of Unknown: LeftRegion for integrase B2126 sequence

SEQ ID NO: 15126 - DNA, 260 bp, Unknown; identical to SEQ ID NO: 13967
  Description of Unknown: LeftRegion for integrase B2127 sequence

SEQ ID NO: 15127 - DNA, 260 bp, Unknown
  Description of Unknown: LeftRegion for integrase B2128 sequence
tactgaggaagcagcaactactgaatatacttcaagttctattaatatcgattatgaggttgaatcatatagacaagaacttgaagctgaacaaaaggagaaaacatcatcagcttcagaaaagccaaaaggcgcttaaagttataaaataatcaataaagagttatgttatcatagctctttaaaaatatggaggaaaaatgaataaaaaaagtgcaatttatgtgagagtatcgacttcacatcaaatagataaagac

SEQ ID NO: 15128 - DNA, 260 bp, Unknown; identical to SEQ ID NO: 15097
  Description of Unknown: LeftRegion for integrase B2129 sequence

SEQ ID NO: 15129 - DNA, 260 bp, Unknown
  Description of Unknown: LeftRegion for integrase B2130 sequence
cgtgaagtagacattgaagacggcgatattgtagtggccgttgtagatcggcaagacggctttatcaaacaagtctacatggaagagaatgttcttaccctacattctttcaatccctactacccagatatggtctttaagggaaacgaaattaaacaagtccgttttgtaggtaaagcccgagaggtgaaaagaattctatgaaaaaattcaaattccctatcgacctttccatgctgacagaggaagagatcaaccaa

SEQ ID NO: 15130 - DNA, 260 bp, Unknown
  Description of Unknown: LeftRegion for integrase B2131 sequence
aaaacgctgtgaagaacttataggaggccattatggaaaagaaagagatttccgaattatttgaccaattcaccaatgaaccggacaaagaaaagcgtcataccataatcgacaatcttacagaggaacaggcaaaacttatcctgaaatccattgctgatttcaaatatagaacctctccgttttaagaggtgtaccgtatgaagaagttcaaattccccattgacctgtccatgctgacagaggaagagatcaaccaa

SEQ ID NO: 15131 - DNA, 260 bp, Unknown; identical to SEQ ID NO: 13984
  Description of Unknown: LeftRegion for integrase B2132 sequence

SEQ ID NO: 15132 - DNA, 260 bp, Unknown
  Description of Unknown: LeftRegion for integrase B2133 sequence
aaaacactgtaaagaacttgtgggaggcaattatggaaaagaaagagatttctgaattatttgaccgatttaccaatgaaccggacaaagaaaagcgtcatgccatgatcgacaatcttacagaggaacaggcaaaacttatcctgaaatctattgccgatttcaaatatagaacctccccgttttaagaggtgtgctgtatgaagaagttcaaattccccatcgacctgtccatgctgacagaggaagagatcaaccaa

SEQ ID NO: 15133 - DNA, 260 bp, Unknown
  Description of Unknown: LeftRegion for integrase B2134 sequence
acgattccgcaccggtatgcccgcctgatatggagcaccaacttcttttctttttcgatcaatgtgaccaagagggtaaacttcgtatcatccaacttgccatgaacgaatacgaccgctccacgaaagaaaaaacggcacatgaggatccggttgctgtcggataaaacaatcgacctgaacgaatggaggaaaacactatgacattccccgtcgacctaagctgcctcactgaggaggaacttgcccaattccgtgaa

SEQ ID NO: 15134 - DNA, 260 bp, Unknown
  Description of Unknown: LeftRegion for integrase B2135 sequence
aattataaatgctttggtaaagtgttgggaaaagctaaagttttaattaaggtttaaagttacatatagagtatcgataacaaataaaaatcccgctcagtgctaccaacaccgaacgggaaagagctgcggtataaccacaacattttacaagttaattgtaccacagctccttgtaaatgtcaaggagtgatataaaaatgaaaagaaccgcaatatacgctcgttacagctctgataatcaacgggcggagagtatt

SEQ ID NO: 15135 - DNA, 260 bp, Unknown
  Description of Unknown: LeftRegion for integrase B2136 sequence
cgagggttggcaagaaaaaattaaaaggctgacataactttggaaacaccagtttcgcacaaaaaataagaaagaacccccggtgcgactaccacatgttaaccatgctgttaaactctccctctcgttctccggtgacgtttactgtactgaaccgcaataatagaaagtcttgcatagcctttgaaaggagtgaaactatgtaccgtccgccagagctgaccctcaacccggatgagatccttgtctacctgcgaaag

SEQ ID NO: 15136 - DNA, 260 bp, Unknown
  Description of Unknown: LeftRegion for integrase B2137 sequence
cggacattagcaacatggattttggctttttcaccgccgaaaaccgcgtggaaaggcttgggctgcttgcttccgcggtgattgcggtcatcctaacggcaatgcaatttatagaaaaggccagaacgaaaagaaagaaggataaagagaacgacaacttaatataatcaaacaataacccacgaaagaagctgatcgttttgtattatcaaccgaagatagattttaagccggaagaagtcattgattatttaagaaaa

SEQ ID NO: 15137 - DNA, 260 bp, Unknown
  Description of Unknown: LeftRegion for integrase B2138 sequence
atcgcgctggacatcagcgatagggagcacggcctttttgttgcaagcagattccccgtcattgggtgtgcgctgtgcattctcattggtgccgccgtctttgggtttctatactatattgcaaagagcagaagaaaagaggataaatagaaagacagtttaatataatcgaacaataacatcagaaagaagttgattttttgtattatcaaccaaagatagatttcaagccagaagaagtcattgactatttgagaaag

SEQ ID NO: 15138 - DNA, 260 bp, Unknown
  Description of Unknown: LeftRegion for integrase B2139 sequence
tagacattagcaacatggattttggctttttcaccgccgaaaaccgcgtggaaaggcttggactgcttgctgctgcggtgattgcggtcatcctaacggcaatgcaatttatagaaaaggccagaacgaaaagaaagaaggataaagagaacgacaacttaatataatcaaacaataaccaacgaaagaagctgatcgttttgtattatcaaccgaagatagattttaagccggaagaagtcattgattatttaaggaaa

SEQ ID NO: 15139 - DNA, 260 bp, Unknown
  Description of Unknown: LeftRegion for integrase B2140 sequence
tggacattagcaacatggattttggctttttcaccgccgataaccgcttggaaaggctcggactgcttgcttctgcggtgattgcggtcatcctaacggcaatgcaatttatagaaaaggccagaacgaaaagaaaaaaggataaagagaacgacaacttaatataatcaaacaataacccacgaaagaagctgatcgttttgtattatcaaccgaagatagattttaagccggaagaagtcattgattatttaagaaaa

SEQ ID NO: 15140 - DNA, 260 bp, Unknown
  Description of Unknown: LeftRegion for integrase B2141 sequence
tagacattagcaacatggattttggctttttcaccgccgaaaacagcgtggaaaggcttggactgcttgctgctgcggtgattgctgtcatcctaacggcaatgcaatttatagaaaaggccagaacgaaaagaaagaaggataaagagaacgacaacttaatataatcaaacaataacccacgaaagaagctgatcgttttgtattatcaaccgaagatagattttaagccggaagaagtcattgattatttaagaaaa

SEQ ID NO: 15141 - DNA, 260 bp, Unknown; identical to SEQ ID NO: 15140
  Description of Unknown: LeftRegion for integrase B2142 sequence

SEQ ID NO: 15142 - DNA, 260 bp, Unknown
  Description of Unknown: LeftRegion for integrase B2143 sequence
atcgcgctggacatcagcgatagggagcacggcctttttgttgcaagcagattccccgtcattgggtgtgcgctgtgcattttcattggtgccgccgtctttgggtttctatactatattgcaagaagcagaagaaaaaaggataaatagaaagacagtttaatataatcgaacaataacctaagaaagaagttgattttttgtattatcaaccaaagatagatttcaagccagaagaagtcattgactatttgagaaag

SEQ ID NO: 15143 - DNA, 260 bp, Unknown
  Description of Unknown: LeftRegion for integrase B2144 sequence
atcgcgctggacatcagtgataagaagcacggcctttttgttgcaaacagattccccgtcattgggtgtgcgctgtgcattctcattggtgccgccgtctttgggttcctatactatgttgcaaaaagcagaagaaaaaaggataaatagaaagacagtttaatataatcgaacaataacctaagaaagaagttgattttttgtattatcaaccgaagatagatttcaagcccgaagaagtcattgactatttaagaaag

SEQ ID NO: 15144 - DNA, 260 bp, Unknown
  Description of Unknown: LeftRegion for integrase B2145 sequence
ctgatgaagttatcaaagatagcaaagaaaggattgactatctaaaaaagatagcagatggaaggctgaaggtaatcactatattaggttttgcacttggaataaccctgcttataattattattgctttacttatggataaagcaaatcctgatcttgggttcttttggaaaaaaccctaatcgaaaggaagatgaaatgtgtattatcaaccgaaaatagattttacgcctgatgaagttatagattatttaaggaaa

SEQ ID NO: 15145 - DNA, 260 bp, Unknown; identical to SEQ ID NO: 13176
  Description of Unknown: LeftRegion for integrase B2146 sequence

SEQ ID NO: 15146 - DNA, 260 bp, Unknown
  Description of Unknown: LeftRegion for integrase B2147 sequence
ccgccgtaattattgaggatgaagcttcgctgaaacgtgtcaattatttcccggaaaagaacttgctgatactgaaggcagaaaacgcaaaatatgaagatctggtttataccggtgaggaactgaatcatattcgaattctgggccgtgctgttgcctttcaaagcgatatccgctaacgtgcaatgaggtgattttatttgtactaccagccaaagattaatttctctcccaacgaagttatagcatatttgcgcaag

SEQ ID NO: 15147 - DNA, 260 bp, Unknown
  Description of Unknown: LeftRegion for integrase B2148 sequence
tggacattagcaacatggattttggctttttcaccgccgataaccgcttggaaaggctcggactgcttgcttccgtggtgattgcggtcatcctaacagcaatgcaatttatagaaaaggccagaacgaaaagaaagaaggataaagagaacgacaacttaatataatcaaacaataacccacgaaagaagctgatcgttttgtattatcaaccgaagatagattttaagccggaagaagtcattgattatttaagaaaa

SEQ ID NO: 15148 - DNA, 260 bp, Unknown; identical to SEQ ID NO: 14597
  Description of Unknown: LeftRegion for integrase B2149 sequence

SEQ ID NO: 15149 - DNA, 260 bp, Unknown
  Description of Unknown: LeftRegion for integrase B2150 sequence
tgcgaaatagagcggtagctttaacttcccaagaggaaactttaattgaagtgttccgttccgtaaatgagatggataaatttgaaattatccactatctgatgacacttcgagataaaatgacaaaagaaaaaacagactctcaggacgagtctgctgtcggctaaggttattgatctgaatgagtggagaaaaacactatgaaaagagataagttccccattgatctgtccatgctgacccaagaggaaattgaccaa

SEQ ID NO: 15150 - DNA, 260 bp, Unknown
  Description of Unknown: LeftRegion for integrase B2151 sequence
agaagatgataagccgatggtaaaagtagacttgtcccactcatacaatccatctaaataaatatttaataattatatgaaatggccgaacagagttttttcagtcggcctttccttttcgcctcaaaaccgaacatacgtaccattttagattaatttcgttgtgaaaatcacttatatttaatcaggctggtgactttatgaaaataaatatgcgtgtcgcaatatatgttcgtgtcagcaccgatgagcaagccgat

SEQ ID NO: 15151 - DNA, 260 bp, Unknown; identical to SEQ ID NO: 13421
  Description of Unknown: LeftRegion for integrase B2152 sequence

SEQ ID NO: 15152 - DNA, 260 bp, Unknown; identical to SEQ ID NO: 15140
  Description of Unknown: LeftRegion for integrase B2153 sequence

SEQ ID NO: 15153 - DNA, 260 bp, Unknown
  Description of Unknown: LeftRegion for integrase B2154 sequence
tggacattagcaacatggattttggctttttcaccgccgaaaaccgcgtggaaaggcttggactgcttgctgccgcggcgattgcggtcatcctaacggcaatgcaatttatagaaaaggccagaacgaaaagaaagaaggataaagagaacgacaacttaatataatcaaacaataacccacgaaagaagctgatcgttttgtattatcaaccgaagatagattttaagccggaagaagtcattgattatttaaggaaa

SEQ ID NO: 15154 - DNA, 260 bp, Unknown
  Description of Unknown: LeftRegion for integrase B2155 sequence
atcgcgctggatataagcgacatggaacatggtttttttactgagaatggcctttccgtcatgggtggtgtactgtgcatttttcttgtgtccgttgtcctcgcgctgttgcactttgccgcaaaggccaaaagaaagaaggataatgagaaagacaacttaatataatcaaaccataacctaagaaagaagttgattttttgtattatcaaccgaagatagatttcaagcccgaagaagtcattgactatttgagaaag

SEQ ID NO: 15155 - DNA, 260 bp, Unknown
  Description of Unknown: LeftRegion for integrase B2156 sequence
tggacattagcaacatggattttggctttttcaccgccgataaccgcttggaaaggctcggactgcttgcttccgcggtgattgcggtcatcctaacggcaatgcaatttatagaaaaggccagaacgaaaagaaagaaggataaagagaacgacaacttaatataatcaaacaataacccacgaaagaagctgatcgttttgtattatcaaccgaagatagattttaagccggaagaagtcattgattatttaagaaaa

SEQ ID NO: 15156 - DNA, 260 bp, Unknown
  Description of Unknown: LeftRegion for integrase B2157 sequence
tcccggatgattggcaaaagaaaattcaaaagctgccataacttcgggaatacatacttcgaacaaaataatgatccccttatcgtaacagtcacatgctaaccatgctgttacactcttcctctcgttctccggtgacgtttactgtacagaaccgcaataatatagaaccttgcacagcctttgaaaggagtgaaactatgtaccgcccgccagagctgaccctcaacccggatgaggtcctcatctacctgcgaaag

SEQ ID NO: 15157 - DNA, 260 bp, Unknown; identical to SEQ ID NO: 14965
  Description of Unknown: LeftRegion for integrase B2158 sequence

SEQ ID NO: 15158 - DNA, 260 bp, Unknown
  Description of Unknown: LeftRegion for integrase B2159 sequence
tagacattagcaacatggattttggctttttcaccgccgaaaaccgcgtggaaaagcttggactgcttgcttccgtggtgattgcggtcatcctaacagcaatgcaatttatagaaaaggccagaacgaaaagaaagaaggataaagagaacgacaacttaatataatcaaacaataacccacgaaagaagctgatcgttttgtattatcaaccgaagatagattttaagccggaagaagtcattgattatttaagaaaa

SEQ ID NO: 15159 - DNA, 260 bp, Unknown
  Description of Unknown: LeftRegion for integrase B2160 sequence
atcgcgctggacatcagcgatagggagcacggcatttttactgagaatggcctttccgtcatgggtggtgtgctgtgcatttttcttgtgtccgttgtcctcgcgctgttgcactttgccgcaaaggccaaaagaaagaaggataatgagaaagacaacttaatataatcaaaccataacctaagaaagaagttgattttttgtattatcaaccgaagatagatttcaagcccgaagaagtcattgactatttgagaaag

SEQ ID NO: 15160 - DNA, 260 bp, Unknown; identical to SEQ ID NO: 13534
  Description of Unknown: LeftRegion for integrase B2161 sequence

SEQ ID NO: 15161 - DNA, 260 bp, Unknown
  Description of Unknown: LeftRegion for integrase B2162 sequence
gtgcgtcgcttttgcgttttagcggtgatggcggtgcaggcaaagatgctttgactggaacgatggttgatacgagatctggggaaactgtttcaacaaagatcgaaagcctagaagatctttgcaagctgtttcctgcggtgaagttatacgtggcaggataatattcgtatttgtgaacagaaagagggcgggcagcattgtcaaagcgcgaatcgaaaagcggccagaagtgtttggcagcggagcagatcggcgtg

SEQ ID NO: 15162 - DNA, 260 bp, Unknown
  Description of Unknown: LeftRegion for integrase B2163 sequence
gaaaccgtagactcagacggttctattacgcaaaaaatcgccgactgcgttcccgagcctatccgttcaaggctcgacgttgttttcgtcctgcagcatatcagtgaccccgcgaaacttcaagccctataccaaacagcgcggctttactcggcgcaggcggacttcgtcgttccttatgactcggaggacggtgtaaaatgattgtcgttgcttatgctcgttattcctccgaagcccagcgcgacggctactctatc

SEQ ID NO: 15163 - DNA, 260 bp, Unknown
  Description of Unknown: LeftRegion for integrase B2164 sequence
ctgatgaagttatcaaagatagcaaagaaaggattgactatctaaaaaagatagcagatggaaggctgaaggtaatcactatattaggttttgcacttggaataaccctgcttataattattattgctttacttatggataaagtaaatcctgatcttgggttcttttggaaaaaaccctaatcgaaaggaagatgaaatgtgtattatcaaccgaaaatagattttacgcctgatgaagttatagattatttgaggaaa

SEQ ID NO: 15164 - DNA, 260 bp, Unknown
  Description of Unknown: LeftRegion for integrase B2165 sequence
ccaccccttcttctgctccaacacaatcacaattagacacgctggttaagtatttctctctgtgcaacgaagaaggacggtttcgcatcatacagtttgccatgaacgaatacgaccgagcggcaaaaggaaaaacagactcgtctaaagagtctgctgtctaagaaattgatagacttgtctgaggtgagaaagctactatgaaaacgaagaaactgcctatcgacctatctatgcttaccgtagaggaacagcaacag

SEQ ID NO: 15165 - DNA, 260 bp, Unknown
  Description of Unknown: LeftRegion for integrase B2166 sequence
tggctcgtcgggaaggcattgactttatccttgatccaatgtgggcaaacatccgagatgaattggttgagcatatcgatggattaaagtctcagtggaaaaagcgtgacacaaaagtaatacagggacatgttgcagaataaaaaatcgccaagcccaataatagagaaccttgcatagcctttgaaaggagtgaaactatgtaccgtccgccagagctgaccctcaacccggatgaggtcctcgtctacctgcgaaag

SEQ ID NO: 15166 - DNA, 260 bp, Unknown
  Description of Unknown: LeftRegion for integrase B2167 sequence
tagacattagcaacatggattttggctttttcaccgccgaaaaccgcgtggaaaagcttggactgcttgcttccgtggtgattgcggttatcctaacagcaatgcaatttatagaaaaggccagaacgaaaagaaagaaggataaagagaacgacaacttaatataatcaaacaataacccacgaaagaagctgatcgttttgtattatcaaccgaagatagattttaagccggaagaagtcattgattatttaagaaaa

SEQ ID NO: 15167 - DNA, 260 bp, Unknown
  Description of Unknown: LeftRegion for integrase B2168 sequence
ccggtattccggtcataaaaaccccgatgccatccgcggaatcaaggaaatccttctcacaaatattgcgaaaaaggcgtaaaattttgcactatttgatgaaatatgagataataatggtgtagagatgcaccttgaaaattgaaacaaggccatatacaccgttccaaagaccgttaagaacaacaggagtgatgtatatgttagagaacttgatagccgatttgcggcgcgtgtattgcctgtaccgtgtttcgacg

SEQ ID NO: 15168 - DNA, 260 bp, Unknown
  Description of Unknown: LeftRegion for integrase B2169 sequence
cggacattagcaacatggattttggctttttcaccgccgaaaaccgcgtggaaaggcttggactgcttgcttccgcggtgattgcggtcatcctaacggcaatgcaatttatagaaaaggccagaacgaaaagaaagaaggataaagagaacgacaacttaatataatcaaacaataacccacgaaagaagctgatcgttttgtattatcaaccgaagatagattttaagccggaagaagtcattgattatttaagaaaa

SEQ ID NO: 15169 - DNA, 260 bp, Unknown
  Description of Unknown: LeftRegion for integrase B2170 sequence
cgtgaagtagacattgaagacggagatattgtcgtggccgttgtagatcggcaagacggctttatcaaacaagtccactttgaagagaatgtccttaccctgcattctttcaacccctactatcctgatatggtctttagagggaatgagatcaagcaagttcggtttgtaggtaaagcccgagaggtgaagagaattctatgaagaagttcaaattccccattgatctgtctatgctgacagaggaagaaattaaccaa

SEQ ID NO: 15170 - DNA, 260 bp, Unknown; identical to SEQ ID NO: 13129
  Description of Unknown: LeftRegion for integrase B2171 sequence

SEQ ID NO: 15171 - DNA, 260 bp, Unknown
  Description of Unknown: LeftRegion for integrase B2172 sequence
attgcgctggacatcagcgatagggatcacggcctttttgttgcaaacagattccccgtcattgggtgtgcgctgtgcattctcattggtgccgccgtctttgggttcctatactatattgcaaaaaacagaagaaaaaaggataaatagaaagacagtttaatataatcgaacaataacctaagaaagaagttgattttttgtattatcaaccgaagatagattttaagcccgaagaagtcattgactatttgagaaag

SEQ ID NO: 15172 - DNA, 260 bp, Unknown
  Description of Unknown: LeftRegion for integrase B2173 sequence
cgtgaagtagacattgaggatggagatattgtcgtggccgtagtagatcggcaagacggctttatcaaacaagttcattttgaagaaaatgttattaccctacactctttcaatccctattaccctgatatggtctttagagggaacgagattaaacaagtccggtttgtaggtaaagcccgagaggtgaagagaattctatgaagaagttcaaattccccattgacctatccatgctgacagaagaagagatcaaccaa

SEQ ID NO: 15173 - DNA, 260 bp, Unknown
  Description of Unknown: LeftRegion for integrase B2174 sequence
ccgtcgtaattattgaggatgaagcttcgctgaaacgtgtcaattatttcccggaaaagaacttgctgatactgaaggcagaaaacgcaaaatatgaagatctggtttataccggtgaggaactgaatcatattcgaattctgggccgtgctgttgcctttcaaagcgatatccgctaacgtgcaatgaggtgattttatttgtactaccagccaaagattaatttctctcccaacgaagttatagcatatttgcgcaag

SEQ ID NO: 15174 - DNA, 260 bp, Unknown
  Description of Unknown: LeftRegion for integrase B2175 sequence
gtagtggttcgtgagttttctggggacaaaaccatgcgggaagcctttgagcagctgatcgagcgtcagacctgcgaacacttcgaggaatggttagagcatcaggaaatggcacgaaaagcggcgtaaagcagttgaatcatggacaggggcatggtattataatggtatcgtgtccctgttcatagaaggagaacactatgagcaggaaaaaacaagtgaatcagaaaatcacagccctttattgccgtatctctctg

SEQ ID NO: 15175 - DNA, 260 bp, Unknown; identical to SEQ ID NO: 15132
  Description of Unknown: LeftRegion for integrase B2176 sequence

SEQ ID NO: 15176 - DNA, 260 bp, Unknown; identical to SEQ ID NO: 13421
  Description of Unknown: LeftRegion for integrase B2177 sequence

SEQ ID NO: 15177 - DNA, 260 bp, Unknown
  Description of Unknown: LeftRegion for integrase B2178 sequence
tggtggtgcgggagttctccggggagaagtccatgcgggaagcctttgagcagctcattgagcgccagacctgcgaacacttcgaggaatggcgtcatcagcgggaaatggcagaaaaagctgcgtaaaaacggttgattcagggacggggacatggtactataatggtatcgtgtccctgttcatagaaggagaacgctatgagcaggaaaaaacaagtctatgagaaaatcaccgctctctactgccgtatctctctg

SEQ ID NO: 15178 - DNA, 260 bp, Unknown
  Description of Unknown: LeftRegion for integrase B2179 sequence
aaaaagaaataaaaaaaattttaatagatgaaaatttaaatgtttctaaattggcaaacttacttaatacaagtagtcaaaatttaactgctaaactaaaaagaaataatctgaaattaaatgatatacaagaaattgcaaatgcattagggtatcatgttgaaatatcattcaaaaaaaataattaggaggattttcttatgaaaatagcaatttactgtagagtttcaactcatcatcaaatagataaagaatcttta

SEQ ID NO: 15179 - DNA, 260 bp, Unknown
  Description of Unknown: LeftRegion for integrase B2180 sequence
gtcgcatccctaaagctggcgagtgtcaaaacggaggaatatgaatcacaccggctccgccgcatccttggttcgcaggcaaagctgtgggagctggacgcaaacctcctgcggcagagcatccgaaaaatcacctatgacagtaagacagtcaaagtcctgctgaaaaacaatcaagtcttagaggagtgtgatgatacatgacgcagtcccgccctgaaccgaaggtcatcgtgattcccgcaaaggaggaatcgccg

SEQ ID NO: 15180 - DNA, 260 bp, Unknown
  Description of Unknown: LeftRegion for integrase B2181 sequence
cggacattagcaacatggattttggctttttcaccgccgaaaaccgcgtggaaaggcttggactgcttgctgctgcggtgattgcggtcatcctaacggcaatgcaatttatagaaaaggccagaacgaaaagaaagaaggataaagagaacgacaacttaatataatcaaacaataacccacgaaagaagctgatcgttttgtattatcaaccgaagatagattttaagccggaagaagtcattgattatttaagaaaa

SEQ ID NO: 15181 - DNA, 260 bp, Unknown; identical to SEQ ID NO: 15140
  Description of Unknown: LeftRegion for integrase B2182 sequence

SEQ ID NO: 15182 - DNA, 260 bp, Unknown
  Description of Unknown: LeftRegion for integrase B2183 sequence
tggatgttagcgacagcaacaacggctttttcaccgccgacaatcgcataggaaatatttggttgctgaccgtcgcggcggttgctgttgtcctcacagcaacgcattttattgaaaaagccagaacgaaaagaaagaaggataaagagaccgacaacttaatataatcaaacaataacccacgaaagaagctgattgtattgtattatcaaccaaagatagatttcaagccggaagaagtaattgactatttgagaaag

SEQ ID NO: 15183 - DNA, 260 bp, Unknown
  Description of Unknown: LeftRegion for integrase B2184 sequence
ggctactggctgtaaaatgctggtagccctcattttttagttgtatctagtatataaggggtgtataatagataggaactgaaaacagcctcataaagccctctattttatagagggtaaagaagtctacacctaatatataaaagtggctgtatgaggcacacaggagctcacaggactattacaggagggtaaacaggatggcatacaggaaaataacggatataagagatactattggtatgagagcggtattctat

SEQ ID NO: 15184 - DNA, 260 bp, Unknown
  Description of Unknown: LeftRegion for integrase B2185 sequence
cgcagaactcgcaggaatctacgaaaagcaggttgccaactggaacagtaatcccgctccggcttgccagcccgatatagcggttccaacaataaatgatttgcgcgccctcaagcagctcgttgatgaaggtgtgcttaccgaagaagaatttacagccaaaaagaagcagttgctcggcatctgagcaaggaggctatatggcttcgcagaagtataaaaagaagtcagacaatttgataatcaccggtgtaatatac

SEQ ID NO: 15185 - DNA, 260 bp, Unknown
  Description of Unknown: LeftRegion for integrase B2186 sequence
ctcccgtgagtttgcaggcagccaaaccatgcagcaagcctttgagcagcttattgagcggcagacctgtgaacggtttgaggaatggatggggcaaaaagccagttaaaaggctaaaatccggcgaaaaacagttgaaaggacggcgggggcatggtactataatagtatcgtgtccctgttcgtagaaggagaacactatgaacaggaataaaaaaatagtcaaaaaagtaaccgccctctattgcaggatttccctt

SEQ ID NO: 15186 - DNA, 260 bp, Unknown
  Description of Unknown: LeftRegion for integrase B2187 sequence
tggggccgcagggcttgcggttctgttcggcatcttccttatggtatatgtctttttggatatgcaaaacccgaatcttggcctgttcaagtccggccacgcctcgccgatcgtttatgtcgcggccttttccattatcggaacatgtctgtatatcgtccgaactgtgataaagcgaaacgcaaaaaggagtaaacacgatgcaaacaataccaattgatctatcggctcttacgccggaggaaagacagcagtttgcg

SEQ ID NO: 15187 - DNA, 260 bp, Unknown
  Description of Unknown: LeftRegion for integrase B2188 sequence
ctgggctgcttcggtgcgcactatttctatgttggccgcatcggccgcggcattgttgccctttttaccatgaatttcttctttatcggctctattattgacattatccacattttgaccggcaaatttaaagacaacaccggcgcaccgctgcgccagtgatcggctgcacttgactgcaaaacaggggaggcgttacgatgtacagcactgtgtccggccctatacatccacccttggcgttcggctattgccgcaaa

SEQ ID NO: 15188 - DNA, 260 bp, Unknown; identical to SEQ ID NO: 13291
  Description of Unknown: LeftRegion for integrase B2189 sequence

SEQ ID NO: 15189 - DNA, 260 bp, Unknown; identical to SEQ ID NO: 14155
  Description of Unknown: LeftRegion for integrase B2190 sequence

SEQ ID NO: 15190 - DNA, 260 bp, Unknown
  Description of Unknown: LeftRegion for integrase B2191 sequence
ggtagccctcattttttagttgtatctagtatataaggggtgtataatagataggaactgaaaacagcctcataaagccctctattttatcgagggtaaagaagtctacacctaatatataaaagtgactgtacgaggcacacaggagctcacaggactattacaggagctcacaggactattacaggagggtaaacaggatggcatacaggaaaataacggatataagagatactattggtatgagagcggtattttat

SEQ ID NO: 15191 - DNA, 260 bp, Unknown; identical to SEQ ID NO: 13291
  Description of Unknown: LeftRegion for integrase B2192 sequence

SEQ ID NO: 15192 - DNA, 260 bp, Unknown
  Description of Unknown: LeftRegion for integrase B2193 sequence
ggctactggctgtaaaatgctggtagccctcattttttagttgtatctagtatataaggggtgtataatagatagaaactgaaaacagcctcataaagccatctattttatcgagggtaaagaagtctacacctaatatataaaagtggctgtatgaggcacacaggagctcacaggactattgcaggaggataaacaggatggcatacaggaaaataacggatataagagatactattggtatgagagcggtattttat

SEQ ID NO: 15193 - DNA, 260 bp, Unknown; identical to SEQ ID NO: 14199
  Description of Unknown: LeftRegion for integrase B2194 sequence

SEQ ID NO: 15194 - DNA, 260 bp, Unknown
  Description of Unknown: LeftRegion for integrase B2195 sequence
gcaaggtcagtgtttccaaagcgtctgaattggaagaacgcttactccgttatttttcattttgtgacgcagaaggaaagctgcgtattatccaatgtgccatgaacgaatttgaccgaaccgcaaaagaaaaaacagactcttcggaagagcctgctgttggctaaggtcgttgacctggaagaatggagaaagacactatgatgaaatttccaatagacttgtccatgctgacagaggaagagattgaccagttccgg

SEQ ID NO: 15195 - DNA, 260 bp, Unknown
  Description of Unknown: LeftRegion for integrase B2196 sequence
ttaaatgatagtttgtaaaataaaaatttaagaaataatttgtatgtaattatttctttttttgtgtaataagattaattggtgatataaatgattgatactgaacttgctataattttaaatgagtacttatataagagaaaaataattaattttgatttatataatgatgctttaaaaaaattaggagttgatagttgatggacttatgtaaaatcagaaatgaaatatcaagaggagaaagtatatataacatacca

SEQ ID NO: 15196 - DNA, 260 bp, Unknown; identical to SEQ ID NO: 13709
  Description of Unknown: LeftRegion for integrase B2197 sequence

SEQ ID NO: 15197 - DNA, 260 bp, Unknown
  Description of Unknown: LeftRegion for integrase B2198 sequence
ctaatgaacaatatgtaaggcatgtagaggcttggcataaaatgtttggtatggatccatttacagatgaagaacacgagaagctaatggaatatggtaagttcctgatttcaatgaggaaaaataaaggaggtgatgcctaaaactcttgccgagcagtaccaaaaatataaaaaacatcttagaggagagatcatccaatgtactacaaagaataccctaaaatttattattacgaaactaaagaatatggaagaaag

SEQ ID NO: 15198 - DNA, 260 bp, Unknown; identical to SEQ ID NO: 14115
  Description of Unknown: LeftRegion for integrase B2199 sequence

SEQ ID NO: 15199 - DNA, 260 bp, Unknown
  Description of Unknown: LeftRegion for integrase B2200 sequence
ccatgggcggcttatccgtgtggtgtctgtgttcccgcagcagggcagcgccaccccggaggacaagctgaaagccctcatcgacctggacgcacagcagggaaagctgtgcgcctaaagggctggacattccccaggctttggggtattgtgtagacgcgatgcgctgaatcggtttgacgagaaaaaaggagggctgtatgaaacagtcaaaccagaatgagatcaccgccctgtactgccgtctcagccaggatgac

SEQ ID NO: 15200 - DNA, 260 bp, Unknown; identical to SEQ ID NO: 15195
  Description of Unknown: LeftRegion for integrase B2201 sequence

SEQ ID NO: 15201 - DNA, 260 bp, Unknown; identical to SEQ ID NO: 14115
  Description of Unknown: LeftRegion for integrase B2202 sequence

SEQ ID NO: 15202 - DNA, 260 bp, Unknown
  Description of Unknown: LeftRegion for integrase B2203 sequence
ctaatgtttcatgaaaaaaaccgcccagtggatgacagcactgggcggttcgaacagggttacaggggatcgatgcagacgaaagagatgtgattgatgctcgacgcttacgtatcgggctggagagcaatcatatcaaccctgtgcccttattatagcatagcaagataggggaatacaatgtgagattgaatacattgatgccggacgattgtgcggtcatctatgcgcgctactcatcacacgcgcagcgtgatgtg

SEQ ID NO: 15203 - DNA, 260 bp, Unknown; identical to SEQ ID NO: 13291
  Description of Unknown: LeftRegion for integrase B2204 sequence

SEQ ID NO: 15204 - DNA, 260 bp, Unknown; identical to SEQ ID NO: 15063
  Description of Unknown: LeftRegion for integrase B2205 sequence

SEQ ID NO: 15205 - DNA, 260 bp, Unknown
  Description of Unknown: LeftRegion for integrase B2206 sequence
cccgcacgatctgaggggaaaacatgaatacaccgccaataagagatcgtaccaaatcctcattccccacgccgaactgaaagccgccgtgaagaagggcttgactgagatttgggaactggctgaatactatgatgtaccgtgtgagttcatgcaaagagccgccgagtattggcagagggtagaaatggcaggataatatgaaaaagaagtttcccattgatctgtctatgctcacccctgaggaaatcgaccagttt

SEQ ID NO: 15206 - DNA, 260 bp, Unknown
  Description of Unknown: LeftRegion for integrase B2207 sequence
agggctactggctgtaaaatgctggtagccctcatttttagttgtatctagtatataagggatgtataatagataggaactgaaaacagcctcataaagccctctattttatcgagggtaagaagtctacacctaatatataaaagtggctgtatgaggcacacaggagctcacaggactattacaggagggtaaacaggatggcatacaggaaaataacggatataagagatactattggtatgagagcggtattttat

SEQ ID NO: 15207 - DNA, 260 bp, Unknown; identical to SEQ ID NO: 14983
  Description of Unknown: LeftRegion for integrase B2208 sequence

SEQ ID NO: 15208 - DNA, 260 bp, Unknown
  Description of Unknown: LeftRegion for integrase B2209 sequence
tggtggtgcgggagttctccggggagaagtccatgcgggaagcctttgagcagctcattgagcgccagacctgcgaacacttcgaggaatggcgtcatcagcgggaaatggcagaaaaagctgcgtaaaaacggttgattcagggacagggacatggtactataatggtatcgtgtccctgttcatagaaggagaacgctatgagcaggaaaaaacaagtctatgagaaaatcaccgctctctactgccgcatctctctg

SEQ ID NO: 15209 - DNA, 260 bp, Unknown; identical to SEQ ID NO: 13434
  Description of Unknown: LeftRegion for integrase B2210 sequence

SEQ ID NO: 15210 - DNA, 260 bp, Unknown
  Description of Unknown: LeftRegion for integrase B2211 sequence
atatcgccaactggtcggccgctcaaggtgcagctaccgcaccgcagcccgttcatcaggtagtggagcagaaaccgtctcccgccgatgaaatccgcaaatacaagggcctgctggatgacggtatcatcacgcaggaagaatttgaagctaagaaaaagcaactgctgggcctgtaaatttgaaaggagcgtgacggcatgagaaaaaaatccaacctcaatgcggctactcgtgccgtcatctatgccaggtattcc

SEQ ID NO: 15211 - DNA, 260 bp, Unknown
  Description of Unknown: LeftRegion for integrase B2212 sequence
tgaaatgttaatttatgtgcttgaaatgttaatttttaactaaaaaatgtttaaaagtgcaattttaaacaaaaaaagtccccgttggtgcaacaacgaggaccgagtacagaaaataaaattacctaccacagcaattctttttctgtactctcattataccatattgcaagaaaatatgctagaaagagagtgaatttatggaagaattttacgatgtaattgactataacacaatattagaaaaaattaataatgat

SEQ ID NO: 15212 - DNA, 260 bp, Unknown
  Description of Unknown: LeftRegion for integrase B2213 sequence
ctgggctgcttcggtgcgcactatttctatgttggccgcatcggccgcggcattgttgccctttttaccatgaatttcttctttatcggctctattattgacattatccacattttgaccggcaaatttaaagacaacaccggcgcaccgctgcgccagtgatcggctgcacttgactgcaaaacaggggaggcgttacgatgtacagcactgtgtccggccctatgcatccacccttggcgttcggctattgccgcaaa

SEQ ID NO: 15213 - DNA, 260 bp, Unknown
  Description of Unknown: LeftRegion for integrase B2214 sequence
gctactggctgtaaaatgctggtagccctcattttttagttgtatctagtatataaggggtgtataatagatagaaactgaaaaacagcctcataaagccctctattttatcgagggtaaagaagtctacacctaatatataaaagtggctgtatgaggcacacaggagctcacaggactattacaggagggtaaacaggatggcatacaggaagataacggatataagagatactattggtatgagagcggtattttat

SEQ ID NO: 15214 - DNA, 260 bp, Unknown
  Description of Unknown: LeftRegion for integrase B2215 sequence
cggaacaatgccccgcatgaaagcgaggaagatcttttgaagaagcggctgctcttggcttgcgatgccttgaacagtgcggcggttgaaaaggtcattacatacgcagaagatctcgcatataatccatacaatagaaaacccagcaatggctgagggtcccccggtgaagccaaaaaagaaaagggagggccgtccgggtggacagctctccctttttaatgcaggaaaggatgggtattgaactcatggcaaaaaat

SEQ ID NO: 15215 - DNA, 260 bp, Unknown
  Description of Unknown: LeftRegion for integrase B2216 sequence
gagggctactggctgtaaaatgctggtagccctcattttttagttgtatctagtatataaggggtgtataatagataggaactgaaaacagcctcataaagccctctattttatagagggtaaaaagtctacataatatataaaagtggctgtatgaggcacacaggagctcacaggactattacaggagggtaaacaggatggcatacaggaaaataacggatataagagatactattggtatgagagcggtattttat

SEQ ID NO: 15216 - DNA, 260 bp, Unknown
  Description of Unknown: LeftRegion for integrase B2217 sequence
ttgaaggtgaaaacatcaatattcctgaattttgtcagactcttttattcttctttgaaaactgtgatgcacctggtcaactgcgcataatccaattagccatgaatgaatatgaccgaacacaaaaagaaaaaacaaatccaacgaaagactctgctatcggctaagatcattgacctatctgaatggagaaagacgctatgaaaatcacgaaatttcccattgacctctccatgctgaccgaagaagagatagaccag

SEQ ID NO: 15217 - DNA, 260 bp, Unknown; identical to SEQ ID NO: 13002
  Description of Unknown: LeftRegion for integrase B2218 sequence

SEQ ID NO: 15218 - DNA, 260 bp, Unknown
  Description of Unknown: LeftRegion for integrase B2219 sequence
aaacatacggctcccgcaacgcgcatacgatggactattctcaaggaggaggcctgtttatgtcaaccgatcagccggcgctcaccgtcacccgcaattttctcggtcagcagacagcggaagcgctggttctggagctgatccgcgcccacacacaggcggcttgacggctgcggcagtccacggaaaggagggagcgtatggagcagcgaccgctgcccaccgcgctgtactgccgcctgtcccgtgaggacggcgac

SEQ ID NO: 15219 - DNA, 260 bp, Unknown
  Description of Unknown: LeftRegion for integrase B2220 sequence
ggcgtcggaaccggtcaagacaatccgttaaagattggaggatgatatgggcaactatatgagcgcggacgaactggccggaagaaaaaacctgatcaacctgatcgccgaatccgtcgcacacgacatcgaacaagaaaaaaacaaccccgctgtatctgataacatcatcctgttagtgcccccagaaaaacgaaaaaatgaaatctaccatttacgcccgctacagcaccgacaaacagcgcgagtcatccatcgat

SEQ ID NO: 15220 - DNA, 260 bp, Unknown
  Description of Unknown: LeftRegion for integrase B2221 sequence
atggacggcggattaaagcattctttcgaggtaaaaaacaaggtaacttccataattggaaaatggactgtctatcaagcgcaaaagcgccttccgcttttagaattatgccaagacctgtccgaagaagaattagccgaagtaatcaactatatcaaatttgttcaatcgaaacgacaaggcgggaagggggaagaataatgcagcaagcattaaacgcggtcatatacgcccgctattcttcccatagccagcaggaa

SEQ ID NO: 15221 - DNA, 260 bp, Unknown
  Description of Unknown: LeftRegion for integrase B2222 sequence
aagggcaaagaggtaaaagggctgtatgaggcaaatagagggcttattcgtgtgagagcatgggtaggctcttttttattgcatgaaaataattatatagcccctgtataatttttccctaaaaaatgaggagggctgtgattatgtttattaaggctaagtagagccacaggataataagcataacaggaggtagcaggatgagtacagggacagaacttagagcggtattttacgccagagtatccacagaggaagaa

SEQ ID NO: 15222 - DNA, 260 bp, Unknown
  Description of Unknown: LeftRegion for integrase B2223 sequence
atttgacagcgcaaacgaccttgttttcaaaattgggcgttttgatgttgctgccgtcaagctccgtgggaaaaactttttcctgcaagtgcagtttgttcaaccgcgccgttatgtcatcgaaagcgttgcagacgtgagcgaccacttgcaagaggtcgctcggtgtggcaatggaattttgaagagaatgtcagtgtatgaataatttcggatatagtgcgccccgcgcattcggctactgccgcaaatccacgacc

SEQ ID NO: 15223 - DNA, 260 bp, Unknown
  Description of Unknown: LeftRegion for integrase B2224 sequence
tatttgaaaagctgggctgataaactagtatttgcaaatgccagccatatttttatggctggcatttgcttttcgcaagggaaaaaagagcttgaccgccgcacagagttttccacccggaagcaggcaggcgttgaaagaacggctgcatatggcgtaaaaagccctgccgggaaatccggcaggcagggagtaatatcatgtctgctacaattccatctcttatgcaagccccgcgggctttcggctactgccgtaaa

SEQ ID NO: 15224 - DNA, 260 bp, Unknown
  Description of Unknown: LeftRegion for integrase B2225 sequence
tgatagacgattttaataataatttttatatggtggactggccggacaaatacaaggaatcacgcgtagccgtgcagcgcgctatcacgccaaacaaagggcaatacgatactcatgtagtaactatttctgttgatataactaaaatagggacgcccgatttagttaaaatagagcgcataaaataaggggggtatcgggtggcaacaaaaaagaaaaagaccgtcccgcggcaggacggcgtatataatcgcgctgtt

SEQ ID NO: 15225 - DNA, 260 bp, Unknown
  Description of Unknown: LeftRegion for integrase B2226 sequence
gacacacctcctgaaacagatactcttatggttgtcattgttgatgacgaagaaggatttgttaagaaaatcagtattgatgaagatactgtgacccttcgctcttttaatccacactatcctccccgtgtttttggtggtgttgaaattggacgattgcgctttgtcggtagagtcatggagttaaaaaggagatttgtatgaaaaaatttccaatcgacctctcctgtctgacagaggaagaaatctctcaatttcag

SEQ ID NO: 15226 - DNA, 260 bp, Unknown
  Description of Unknown: LeftRegion for integrase B2227 sequence
gcataatgggcggcgaccgtattcaggcaaccatggtatttgaaaagctgggctgataagctagtatttgcaaatgccagccatatttttatggctggcatttgcttttcacaaggggaaagagcttgaccgccgcaaagaacggctgcatatggcgtaaaaagccctgccgggaaatccggcaggcagggagtaatatcatgtctgctacaattccatctcttatgcaagccccgcgggctttcggctactgccgtaaa

SEQ ID NO: 15227 - DNA, 260 bp, Unknown
  Description of Unknown: LeftRegion for integrase B2228 sequence
tcatgagtcccgttcgctcggtacaatctttcacccgggactgcgtcttaatttcaaatctgtacgtccgctatatagtctagcctatttctagtccgccttactatatagttttttctctcataaaaggggatgtaatttacgcgaaggaggtgatgccaacttaaccctggcagcacatcatagaaaggaagaacagaatgtataaagaatatccaaagttttacaattatgaggtaaaagagtatggaagaaagtcg

SEQ ID NO: 15228 - DNA, 260 bp, Unknown; identical to SEQ ID NO: 14965
  Description of Unknown: LeftRegion for integrase B2229 sequence

SEQ ID NO: 15229 - DNA, 260 bp, Unknown
  Description of Unknown: LeftRegion for integrase B2230 sequence
ggcgtcggaaccggccaagacaatccgttaaagattggaggatgatatgggcaactatatgagcgcgaacgaactggccggaagacagaacctgatcaacctgatcgccgaatccgtcgcacacgacatcgaacaagaaaaaaacgaacccgctgtatctgataacatcatcctgttagtgcccccacaaaaacgaaaaaatgaaatctaccatttacgcccgttacagcaccgacaaacagcgcgagtcatccatcgat

SEQ ID NO: 15230 - DNA, 260 bp, Unknown
  Description of Unknown: LeftRegion for integrase B2231 sequence
ttgatttatggatttttccatccattttttcgcagcctcagcgcacttgaattcagcagcatattctttttccaagatcgccattactttttcataatctgtcataaatgtcactcctttcataaaggaggttgttttttgcgcgaaggaggtgatgccaacttaacccctggcaccatatcatagaaaggaagaacggaatgtataaagaatacccaacattttattattatgacacacgagaatatggtcgaaagtcg

SEQ ID NO: 15231 - DNA, 260 bp, Unknown
  Description of Unknown: LeftRegion for integrase B2232 sequence
cgcctgcatactatctccaccacaagcagcggcagcaaaggcataatgggcggcgaccgtattcaggcaaccatggtatttgaaaagctgggctgataaactagtatttgcaaattccagccatatttttatggctggaatttgcttttcacaaggggaaagagccctgccgggaaatccggcaggcagggagtaatatcatgtctgctacaattccatctcttatgcaagccccgcgggctttcggctactgccgtaaa

SEQ ID NO: 15232 - DNA, 260 bp, Unknown
  Description of Unknown: LeftRegion for integrase B2233 sequence
caatcatagaatcaaccattacaggcaatacagatttttacattgttggtgatatacctttagaaaaactcgacagcaattgcttgagcagcaacggacgaaagcttgaacgcctgcttgataagggtgagtgctatgcaacggagctggatgaagataaactgttagccctgcttgcggaagaataaccgaggtatcgcatgaaattcaagtatcccgccatgggaacaacaaaaaacgcggttatctatgcccgatac

SEQ ID NO: 15233 - DNA, 260 bp, Unknown
  Description of Unknown: LeftRegion for integrase B2234 sequence
gacacacctcctgaaacagatactcttatggttgtcattgttgatgacgaagaaggatttgttaagaaaatcagtattgatgaagatactgtgacccttcgctcttttaatccatactatcctccccgtgtttttggtggtgttgaaattggacgattgcgctttgtcggtagagtcatggagttaaaaaggagatttgcatgaaaaaatttccaatcgacctctcctgtctgacagaggaagaaatctctcaatttcag

SEQ ID NO: 15234 - DNA, 260 bp, Unknown
  Description of Unknown: LeftRegion for integrase B2235 sequence
aagtgtagtcttgtacagttcatttcctgcccgagagtcgctcggtcttatttcttatgtgacagcatctcagctgctgggactctcacccaggactcacttctgctacttctttctctcataaaagagcatgtaaaattagcgaaggaggtgatgccaacttatccccctggcagtacatcatagaaaggaagaacagaatgtataaagaatgtccaaagttttacaattatgaagtaaaagagtatggaagaaagtcg

SEQ ID NO: 15235 - DNA, 260 bp, Unknown
  Description of Unknown: LeftRegion for integrase B2236 sequence
tatagctggagtatttcaagaattaagacgaactgaattaaaaatgtaaaaaagagaattatgttcctatttggcgatacgacacataattctctatatcaaagaaccttgaaagaaggtatctttatgctacatattatagcataacataaagccttttttcaagaaaattttaaaattttagaaagaaggtattttttatgaaatatgcagcttgttattgccgtgtaagcactgacgaacaggcaagatttggcttt

SEQ ID NO: 15236 - DNA, 260 bp, Unknown
  Description of Unknown: LeftRegion for integrase B2237 sequence
aagggtaaagaggtaaaagggctgtaagaggcaaatagagggcttattcatgtgagagcatgggtaggctcttttttagtgcgtaaaaataattatacagcccctgtataattttcccctaaaaaatgaggagggctgtgattatgtttattaaggctaagtagagccacaggataataagcataacaggaggtagcaggatgagtataggaacagaacttagagcggtattttacgccagagtatccacagaggaagaa

SEQ ID NO: 15237 - DNA, 260 bp, Unknown
  Description of Unknown: LeftRegion for integrase B2238 sequence
agcaaataagacaatttattatagaattattagatgacataattctataaagtaaattgcccattgttatagagttcttttactcggcccttcctacatattttaaagttatttcggcccccttatatatctctagtaatattctatactagggatattattttatctttatttatatactaattgtggaggtgaaccatatgaaggttgctatatatagtagaaaatccgtattcactggtaaaggtgaaagtatagaa

SEQ ID NO: 15238 - DNA, 260 bp, Unknown
  Description of Unknown: LeftRegion for integrase B2239 sequence
cgcctgcatactatctccaccacaagcagcggcagcaaaggcataatgggcggcgaccgtattcaggcaaccatggtatttgaaaagctgggctgataaactagtatttgcaaatgccagccatatttttatggctggcatttgcttttcacaaggggaaagagccctgccgggaaatccggcaggcagggagtaatatcatgtctgctacaattccatctcttatgcaagccccgcgggcttttggctattgccgtaaa

SEQ ID NO: 15239 - DNA, 260 bp, Unknown
  Description of Unknown: LeftRegion for integrase B2240 sequence
cgcctgcatactatctccaccacaagcagcggcagcaaaggcataatgggcggcgaccgtattcaggcaaccatggtatttgaaaagctgggctgataaactagtatttgcaaatgccagccatatttttatggctggcatttgcttttcgcaaggggaaagagccctgccgggaaatccggcaggcagggagtaatatcatgtctgctacaattccatctcttatgcaagccccgcgggctttcggctactgccgcaag

SEQ ID NO: 15240 - DNA, 260 bp, Unknown
  Description of Unknown: LeftRegion for integrase B2241 sequence
ccttgcggtctgcgtcgtgtcgttcccggtcggcttgatcattgcgtccgttggagtgtaccgggcggtaaaggccggggatatttatgacgctgcggttgctcggtacgagcagcaaatctcggactatgttgactggctggatgaagtcaacgcaaaataaaaagccgccctcggtgggcggcgggaggttgctctgaatgtgcgcaaaaaagaaaccggccatgcttgagccggatatgcaggatgccgtgatctac

SEQ ID NO: 15241 - DNA, 260 bp, Unknown; identical to SEQ ID NO: 14558
  Description of Unknown: LeftRegion for integrase B2242 sequence

SEQ ID NO: 15242 - DNA, 260 bp, Unknown; identical to SEQ ID NO: 14519
  Description of Unknown: LeftRegion for integrase B2243 sequence

SEQ ID NO: 15243 - DNA, 260 bp, Unknown
  Description of Unknown: LeftRegion for integrase B2244 sequence
gcataatgagcggcgaccgtattcaggcaaccatggtatttgaaaagctgggctgataagctagtatttgcaaatgccagccatatttttatggctggcatttgctttttacaagggaaaagagcttgaccgccgcaaagaacggctgcatatggcgtaaaaagccctgccgggaaatccggcaggcagggagtaatatcatgtctgctacaattccatctcttatgcaagccccgcgggctttcggctactgccgcaag

SEQ ID NO: 15244 - DNA, 260 bp, Unknown
  Description of Unknown: LeftRegion for integrase B2245 sequence
aatatgtattcacagacgaagaacataacaaacttgtagaatatgccgagttcttaatccatcaaagagaaaaataaaagaaatagtttttgctcttggagcagagccgtatcagcatacgggagactgtttttatgtgaaggaggtgatgccaacttattccccccccctggcaccatatcatagaaaggaagagcaaaatgtataaagaatatccaacgttttattattacgacacaagagaatatggtcgaaagtcg

SEQ ID NO: 15245 - DNA, 260 bp, Unknown
  Description of Unknown: LeftRegion for integrase B2246 sequence
tcaatgaatgaagaatatgtgaggcatgtggaaatgtggcataaagtattcggtatggacccgttcacagatgaagaacatgagaagctgatcgaatatggaaagttcttaatttctatgcgtaaaggaggtgatgtctaaagttattcgggcagtacacatcttttataaaacacacatcatagaaaggaagaacaccaatgtacaaagaatatccgaagttttattattacgaatcgttagaatatggaagaaagtca

SEQ ID NO: 15246 - DNA, 260 bp, Unknown
  Description of Unknown: LeftRegion for integrase B2247 sequence
tctatgaatgaacaatatgtgaagcatgtggaagcatggcataaggtattcggtatggacccgttcacagatgaagaacatgagaagttaatggagtatggaaagttcttaatttctatgcgtaaaggaggtgatgtctaaagttattcgggcagtacacatcttttataaaacacacatcatagaaaggaagaacaccaatgtacaaagaatatccgaagttttattattacgaatcgttagaatatggaagaaagtca

SEQ ID NO: 15247 - DNA, 260 bp, Unknown
  Description of Unknown: LeftRegion for integrase B2248 sequence
atgcaccccgacgtcgggatcatggggtaaataaaaaagaccgtcccggcggtgggcgccgaaacggtctatacagtgcgatgtcggggagacattcagatgatatttcattctctggaggagccagccgaaatatcatccgcgaactgtaagtatattttaacgtggctcctccagaatgtcaagtatagaggtgtaaaatgatacatggagcgtttattctcgcacgctactccaccgagaaccagtccgaggccagt

SEQ ID NO: 15248 - DNA, 260 bp, Unknown
  Description of Unknown: LeftRegion for integrase B2249 sequence
gctactggctgtaaaatgctggtagccctcattttttagttgtatctagtatataaggggtgtataatagatagaaactgaaaaacagcctcataaagccctctattttatcgaggataaagaagtctacacctaatatataaaagtggctgtatgaggcacacaggagctcacaggactattacaggagggtaaacaggatggcatacaggaagataacggatataagagatactattggtatgagagcggtattttat

SEQ ID NO: 15249 - DNA, 260 bp, Unknown
  Description of Unknown: LeftRegion for integrase B2250 sequence
aaagctcttaacagacataaagttatatgttaagcagaaatatacatttaaaaaatattctaatccaattgatgaagaacttgagaattatagacgagaacttgaagctgaacaaaaggaacaaatattatcagtttcagaagagcaaagcgaaaaaaagaaaaacgcttaaaataaacacatatatagaggtgataagtatgatagctgctatttatagtagaaaatctaaatttacgggcattggagaatctatcgat

SEQ ID NO: 15250 - DNA, 260 bp, Unknown; identical to SEQ ID NO: 15232
  Description of Unknown: LeftRegion for integrase B2251 sequence

SEQ ID NO: 15251 - DNA, 260 bp, Unknown; identical to SEQ ID NO: 14519
  Description of Unknown: LeftRegion for integrase B2252 sequence

SEQ ID NO: 15252 - DNA, 260 bp, Unknown
  Description of Unknown: LeftRegion for integrase B2253 sequence
agatgattgttcggcttttagtttaccggatctaatccatcgtctaactgtttcctcgttaacatctaataactcagaaagttctttagtgttatacatgctcatacaatcactcctttcattaaaggatatgtaaaatcagcgaaggaggtgatgccaacttatccccctggcagcacatcatagaaaggaagaacagaatgtataaagaatatccaaagttttacaattatgaagtaaaagagtatggaagaaagtcg

SEQ ID NO: 15253 - DNA, 260 bp, Unknown
  Description of Unknown: LeftRegion for integrase B2254 sequence
aagggtaaagaggtaaaagggctgtatgaggcaaatagagggcttattcgtgtgagagcatgggtaggcttttttttagtgcatgaaaataattatatagcccctgtataatttttccctaaaaaatgaggagggctgtgattatgtttattaaggctaagtagagccacaggataataagcataacaggaggtagcaggatgagtacaggaacagaacttagagcggtattttacgccagagtatccacagaggaagaa

SEQ ID NO: 15254 - DNA, 260 bp, Unknown
  Description of Unknown: LeftRegion for integrase B2255 sequence
ggacaataaaccaatctcagcgatggatacaatcactgactactatcgactgtccattggccgtgaggataatatacgagttaaacgatttgatacttgggccaaaaaatttaacaaatacgtatttacagacgaggagcacaataaactcgtggaatatgcagaatttttgattcatcaacgagagaggaagaacgacaatgtataaagaatacccacatttttattactatgacacgcgagaatatggtagaaagtcg

SEQ ID NO: 15255 - DNA, 260 bp, Unknown
  Description of Unknown: LeftRegion for integrase B2256 sequence
ccttgcggtctgcatcgtgtcgctcccggtcggcttgatcattgtagccgtaggagcgtaccgggcggtaaaagccggggatatttatgatgctgcagttgctcggtacgagcagcaaatctcggactatgttgactggctggatgaagtcaacgcaaaataaaaagccgccctctgtgggcggcgggaggttgctctgaatgcgcgcaaaaaagaaaccggccatgcttgagccggatatgcaggatgccgtgatctac

SEQ ID NO: 15256 - DNA, 260 bp, Unknown
  Description of Unknown: LeftRegion for integrase B2257 sequence
caatcatagaatcaaccattacaggcaatacagatttttacattgttggtgatatacctttagaaaaactcgacagcaattgcttgagcagcaacggacgaaagcttgaacgcctgcttgataagggtgagtgctatgcaacggagctggatgaagataaactgttagccctgctcgcggaagaataaccgaggtatcgcatgaaatttaagtatcccgccatgggaacaacaaaaaacgcggttatctatgcccgatac

SEQ ID NO: 15257 - DNA, 260 bp, Unknown
  Description of Unknown: LeftRegion for integrase B2258 sequence
ggctactggctgtaaaatgctggtagccctcattttttagttgtatctagtatataaggggtgtataataaatagaaactgaaaacagcctcataaagccctctattttatcgagggtaaagatgtctacacctaatatataaaagtggctgtatgaggcacacaggagctcacaggactattacaggagggtaaacaggatggcatacaggaaaataacggatataagagatactattggtatgagagcggtattttat

SEQ ID NO: 15258 - DNA, 260 bp, Unknown
  Description of Unknown: LeftRegion for integrase B2259 sequence
ctggatcattgacatggttatgatctgttgtaacaaattcaccgacagcaccggcgcggtggttggtctgaaggttgccgagtataccagacagccggatcctgatcttgcagaggcttctctggaggagcagcgggaggcagcggccgagactgccagagcttacggctataccgtaatagagtcaggcgctcaggataatgccgacaagtaaaaacacggctcgaaaatatgccgcaggaggtagctcggataattcc

SEQ ID NO: 15259 - DNA, 260 bp, Unknown
  Description of Unknown: LeftRegion for integrase B2260 sequence
cgcctgcatactatctccaccacaagcagcggcagcaaaggcataatgggcggcgaccgtatttaggcaaccatggtatttgaaaagctgggctgataaactagtatttgcaaatgccagccatatttttatggctggcatttgcttttcacaaggggaaagagccctgccgggaaatccggcaggcagggagtaatatcatgtctgctacaattccatctcttatgcaagccccgcgggctttcggctactgccgtaaa

SEQ ID NO: 15260 - DNA, 260 bp, Unknown
  Description of Unknown: LeftRegion for integrase B2261 sequence
aagggtaaagaggtaaaagggctgtatgaggcaaatagagggcttattcgtgtgagagcatgggtaggctcttttttagtgcatgaaaataattatatagcccctgtataatttttccctaaaaaatgaggagggctgtgattatgtttattaaggctaagtagagccacaggataataagcataacaggaggtagcaggatgagtacaggaacagaacttagagcggtattttacgccagagtatccacagaggaagaa

SEQ ID NO: 15261 - DNA, 260 bp, Unknown
  Description of Unknown: LeftRegion for integrase B2262 sequence
ggaaatacaaagccagccttattatgcagagcagatggcagaaatcctgtgcagaggtggaaaacaggaacaatttaatgaaggatgttttcaaaagacggtggagaaaatcatggtttttaagaatggaaccatggatgtacatatgagaaacggagtcataatccagattaaagagaatggagaggagggaagcagcgatgcaggcaagtgtaaaaaagaacatatctgtcataccggcaaagccagcttatgaccgg

SEQ ID NO: 15262 - DNA, 260 bp, Unknown
  Description of Unknown: LeftRegion for integrase B2263 sequence
ttgggaaagtaagccggtctcagtgcttgatacaattacagactattatcggctgtcggttggtaatgaagacaatgtacgaatcgagcgctttaaagtgtgggctaagaaattcgataaatatgtattcacagatgaggagcacaataaacttgtagaatacgctgagtttttaatttatcaaagaaagggagaacaaaatgtataaagaatacccaacgttttactattacgacacgcgagaatacggtagaaagtca

SEQ ID NO: 15263 - DNA, 260 bp, Unknown
  Description of Unknown: LeftRegion for integrase B2264 sequence
gttaggcatgtgcaaacctggcatagaatgtttggtatggacccatttactgacgaggagcatgagaagttgatcgagtatggcaagtttctaatctctttgaggaaaaaataaaagaaaatgttttataaaggaggtgatgctgacctaaatgccggcagtaccaaaaaatataaacaacctagagaggaagaacaccaatgtataaagaatatccgaagttttattattatcaaacgaaagaatatggtcgaaagtct

SEQ ID NO: 15264 - DNA, 260 bp, Unknown
  Description of Unknown: LeftRegion for integrase B2265 sequence
tcaatgaatgaagaatatgtgaggcatgttgaaacttggcataaagtattcggcatggatccatttaccgatgaagaacacgaaaaattgatagagtatggaaagttcttaatttctatgcgtaaaggaggtgatgtctaaagttattcgggcagtacacatcttttataaaacacacatcatagaaaggaagaacaccaatgtacaaagaatatccgaagttttattattacgaatcgttagaatatggaagaaagtca

SEQ ID NO: 15265 - DNA, 260 bp, Unknown
  Description of Unknown: LeftRegion for integrase B2266 sequence
tgcatcccgatgttgggatcatggggtaaataaaaaagaccgtcccggcggtgggcgccgaaacggtctatacagtgcgatgtcggggagacattcagatgatatttcattctctggaggaaccagccggaatatccatctgcgaactgtaggtatattttaacgtggttcctccagaatgtcaagtatagaggtgtaaaatgatacatggagcttttattctcgcccgctattccactgaaaaccagtctgaggccagt

SEQ ID NO: 15266 - DNA, 260 bp, Unknown; identical to SEQ ID NO: 13335
  Description of Unknown: LeftRegion for integrase B2267 sequence

SEQ ID NO: 15267 - DNA, 260 bp, Unknown; identical to SEQ ID NO: 13516
  Description of Unknown: LeftRegion for integrase B2268 sequence

SEQ ID NO: 15268 - DNA, 260 bp, Unknown
  Description of Unknown: LeftRegion for integrase B2269 sequence
aagggtaaagaggtaaaagggctgtatgaggcaaatagagggcttattcgtgtgagagcatgggtaggctcttttttagtgcatgaaaataattatatagcccctgtataatttttccctaaaaaatgaggagggctgtgattatgtttattaaggctaagtagagccacaggataataagcataacaggaggtagcaggatgagtacaggaacagaacttagagcggtattttatgccagagtttccacagaggaagaa

SEQ ID NO: 15269 - DNA, 260 bp, Unknown
  Description of Unknown: LeftRegion for integrase B2270 sequence
aaagccttcgaccgaggccttataactatcactccttccatgaaaatctatgtttctccaataattttggatagccctcaggacgcttttacagcccgctggctggcttctcttgacggaatggttttaccccccccccgatttccgccgcgtagagagcttctggagtaccataacgacgaaatttttaggagggtcacatgaatacagtaatctatgctcggtattctgccggcccgagacagaccgaccagagtatc

SEQ ID NO: 15270 - DNA, 260 bp, Unknown
  Description of Unknown: LeftRegion for integrase B2271 sequence
caatcatagaatcaaccattacaggcaatacagatttttacattgttggtgatatacctttagaaaaactcgacagcaattgcttgagcagtaacggacgaaagcttgaacgcctgcttgataagggtgagtgctatgcaacggagctggatgaagataaactgttagccctgcttgcggaagaataaccgaggtatcgcatgaaattcaagtatcccgccatgggaacaacaaaaaacgcggttatctatgcccgatac

SEQ ID NO: 15271 - DNA, 260 bp, Unknown
  Description of Unknown: LeftRegion for integrase B2272 sequence
cgcctgcatactatctccaccacaagcagcggcagcaaaggcataatgggcggcgaccgtattcaggcaaccatggtatttgaaaagctgggctgataaactagtatttgcaaatgccagccatatttttatggctggcatttgcttttcacaaggggaaagagccctgccgggaaatccggcaggcagggagtaatatcatgtctgctacaattccatctcttatgcaagccccgcgggctttcggctactgccgtaaa

SEQ ID NO: 15272 - DNA, 260 bp, Unknown
  Description of Unknown: LeftRegion for integrase B2273 sequence
tcgatgaatgagcaatatgtaaggcatgttgaaatgtggcataaagtatttggtatggatccattcactgatgaagagcacgaaaaattgatagagtatggaaagttcttaatttctatgcgtaaaggaggtgatacctaaatttattcgggcagtacacatcttttataaaatacacatcttagagaggaaaaacgccaatgtacaaagaatatccgaagttttattattacgaatcgttagaatatggaagaaaatca

SEQ ID NO: 15273 - DNA, 260 bp, Unknown
  Description of Unknown: LeftRegion for integrase B2274 sequence
aaaggcacttacgcaagttattgcgtgggtgtcttttactttatactgaatttataaaaacaaaagccccaccgaagtgaggctaatgctatcaggttgcaatgatacaacccgaaactcgcaatttcattgtatcatcgtcaccctgaaaaatcaatattcagggtatttttatacccatttttaaggagatgatacatatgactatcgcatgggcatactgccgcttcagcagcgatcaccagagagaagaatccatt

SEQ ID NO: 15274 - DNA, 260 bp, Unknown
  Description of Unknown: LeftRegion for integrase B2275 sequence
ccttgttaggactcaatcttcttgtttttattaatcgtgtaagtaaccgatcttgtacaaaaattttccgactaatgtccagaacttttgttcgatagtcatataaatcactcctttcttcataataggagttgtaaatttagcgaaggaggtgatgtcaacttaacccctagcagtacatcatagaaaggaagaacagaatgtataaggaatatccaaagttctacaattacgaaacaaaagagtacggaaggaagtct

SEQ ID NO: 15275 - DNA, 260 bp, Unknown
  Description of Unknown: LeftRegion for integrase B2276 sequence
gatacacctcccgaaacagatactcttatggttgtcattgttgatgacgaagaaggatttgttaagaaaatcagtattgatgaagatactgtgacccttcgttcttttaacccacactatcctccccgtgtttttggcggtgttgaaattggacgattgcgctttgtcggtagagtcatggagctaaaaaggagatttgcatgaaaaaatttccaatcgacctctcctgtctaacagaggaagaaatctctcaatttcag

SEQ ID NO: 15276 - DNA, 260 bp, Unknown
  Description of Unknown: LeftRegion for integrase B2277 sequence
aagggtaaagcggtaaaagggttgtatgaggcaaatagagggcttattcatgtgagagcatgggtaggctcttttttagtgcatgaaaataattatatagcccctgtataattttcccctaaaaaatgaggagggctgtgattatgtttattaaggctaagtagagccacaggataataagcataacaggaggtagcaggatgagtacaggaacagaacttagagcggtattttacgccagagtatccacagaggaagaa

SEQ ID NO: 15277 - DNA, 260 bp, Unknown
  Description of Unknown: LeftRegion for integrase B2278 sequence
atgcaccccggtattgggatcatgcagtaaataaaaaaagaccgtcccggcggtgggcgccgaaacggtctatacagtacgatgtcggggagacattcagatgatatttcatcctctggaggagccagcggaatatcatctgcgaactgtaagtatattttaacgtggctcctccagaatgtcaagtatagaggtgtaaaatgatacatggagcgtttattcttgcacgctactccacagagaaccagtccgaggccagt

SEQ ID NO: 15278 - DNA, 260 bp, Unknown; identical to SEQ ID NO: 14983
  Description of Unknown: LeftRegion for integrase B2279 sequence

SEQ ID NO: 15279 - DNA, 260 bp, Unknown
  Description of Unknown: LeftRegion for integrase B2280 sequence
tatttgaaaagctgggctgataaactagtatttgcaaatgccagccatatttttatggctggcatttgcttttcacaaggggaaaaagagcttgaccgccgcacagagttttccacccggaagcaggcaggcgttgaaagaacggctgcatatggcgtaaaaagccctgccgggaaatccggcaggcagggagtaatatcatgtctgctacaattccatctcttatgcaagccccgcgggctttcggctactgccgtaaa

SEQ ID NO: 15280 - DNA, 260 bp, Unknown
  Description of Unknown: LeftRegion for integrase B2281 sequence
tgcaccctgacgtcgggatcatggggtaaataaaaaaagaccgtcccggcggtgggcgccgaaacggtctatacagtacgatgtcggggagacattcagatgatatttcattctctggaggagccagccggaatatcatctgcgaactgtaagtatattttaacgtggctcctccagaatgtcaagtatagaggtgtaaaatgatacatggagcttttattctcgcccggtattccaccgaaaaccagtctgaggccagt

SEQ ID NO: 15281 - DNA, 260 bp, Unknown
  Description of Unknown: LeftRegion for integrase B2282 sequence
aagggtaaagcggtaaaaggtttgtatgaggcaaatagagggcttattcatgtgagagcatgggtaggctcttttttagtgcatgaaaataattatatagcccctgtataattttcccctaaaaaatgaggagggctgtgattatgtttattaaggctaagtagagccacaggataataagcataacaggaggtagcaggatgagtacaggaacagaacttagagcggtattttacgccagagtatccacagaggaagaa

SEQ ID NO: 15282 - DNA, 260 bp, Unknown
  Description of Unknown: LeftRegion for integrase B2283 sequence
gggcgccgaaacggtcttgctttccagtcgtcggggaggacggcccaaaacacagcctgttgaaaaccatgtcttggaggaatcagcatctttattgtatacaatgtcctccggtttgtcaatgaaaaaaagtagaatctggatacatcatccaaaatgatgtacatgatcgcgtgataattttaggaggcttgtatgctatgacgcatggcgcttatattttagcccggtactccaccgagaaccagtccgaggccagt

SEQ ID NO: 15283 - DNA, 260 bp, Unknown; identical to SEQ ID NO: 13476
  Description of Unknown: LeftRegion for integrase B2284 sequence

SEQ ID NO: 15284 - DNA, 260 bp, Unknown
  Description of Unknown: LeftRegion for integrase B2285 sequence
tcaatgaatgaagaatatgtgaggcatgttgaaacttggcataaagtattcggcatggatccatttaccgatgaagaacacgaaaaattgatagagtatggaaagttcttaatttctatgcgtaaaggaggtgatgtctaaagttattcgggcagtacacatcttttataaaacacacatcatagaaaggaagaacaccaatgtacaaagaatatccgaagttttattattacgaatcgttagaatatggaagaaagtcg

SEQ ID NO: 15285 - DNA, 260 bp, Unknown
  Description of Unknown: LeftRegion for integrase B2286 sequence
cgtcttctccgcagaaaagacagggcgttttggaacgagttgaacccaaacgtgcaactctacttatataaatggctcccagatatgatatttcggaaatgaatttaactttttgactgttgaaagtgtggaaagatttattttccccagaacttgcaacggcttgcaacaaacttaaaactacttgaaaggtggtatttatgcctcgcaaaaagaaactgcaagaggtgggcggactgcggctggtggcgtactatcgc

SEQ ID NO: 15286 - DNA, 260 bp, Unknown
  Description of Unknown: LeftRegion for integrase B2287 sequence
agcaaataagacaatttattatagaattattagatgacataattctataaagtaaattgcccattgttatagagttcttttactcggcccttcttacatattttaaagttatttcggcccccctatatatctctagtaatcttatatactagggatattattttatctttatttatatactaattgtggaggtgaaccatatgaaggttgctatttatagcagaaaatctgtattcactggtaaaggtgaaagtatagaa

SEQ ID NO: 15287 - DNA, 260 bp, Unknown; identical to SEQ ID NO: 15249
  Description of Unknown: LeftRegion for integrase B2288 sequence

SEQ ID NO: 15288 - DNA, 260 bp, Unknown
  Description of Unknown: LeftRegion for integrase B2289 sequence
tctatgaatccgtcgtatgtaaagcacgttgaaatgtggaataagacgttcggaatggacccgtttacggacgaagaacatgaaaaactaatggagtatggtaagttcttaatttctatgaggggtaagtaataatatctcttgaaaggaggtgatgccaaagatacccctggcaccacagcatagaaaggaagaacaaaatgtataaagaatacccaacgttttactattacgacacacgagaatatggtcgaaagtca

SEQ ID NO: 15289 - DNA, 260 bp, Unknown; identical to SEQ ID NO: 14596
  Description of Unknown: LeftRegion for integrase B2290 sequence

SEQ ID NO: 15290 - DNA, 260 bp, Unknown
  Description of Unknown: LeftRegion for integrase B2291 sequence
gacacacctcctgaaacagatactcttatggttgtcattgttgatgacgaagaaggatttgttaagaaaatcagcattgatgaagatactgtaacccttcgctcttttaatccacactatcctccccgtgtttttggcggtgttgaaattggacgattgcgctttgtcggtagagtcatggagttaaaaaggagatttgcatgaaaaaatttccaatcgacctttcctgtctgacagaggaagaaatctctcaatttcaa

SEQ ID NO: 15291 - DNA, 260 bp, Unknown
  Description of Unknown: LeftRegion for integrase B2292 sequence
gctactggctgtaaaatgctggtagccctcattttttagttgtatctagtatataaggggtgtataatagataggaattaaaaaacagcctcataaagccctttgttttatcgagggtaaagaagtctacacctaatacataaaagtggctgtatgaggcacacaggagctcacaggactattacaggagaataaacaggatggtaaaaaagaaattgagagcggtattttatgccagagtatccacagaggaagaaaaa

SEQ ID NO: 15292 - DNA, 260 bp, Unknown
  Description of Unknown: LeftRegion for integrase B2293 sequence
ggagaaggaaccgtcgttccatactgaagaaggaggaacaggctatggccgcttctgaaaacatgatagcgctggagataaatggactccatgtgcatctcactttcgcgccttttcctgctgatgatactgtggccaccgtccgagcgattctgaaaaacagctacgttcggacgctccaggcgtgagggggcgtgactttgggcaaaagagtttgctgcctgtaccgtgtttccacactgaagcaggtcgaaaaagac

SEQ ID NO: 15293 - DNA, 260 bp, Unknown
  Description of Unknown: LeftRegion for integrase B2294 sequence
ctcgaagtggatgaattctgcgcttgaaaagcagatggcagaggcaaatgagcagcttaatgaaaaagcggcggcgattggcgcggacgctatcgttggcttgcgccattctggaattggcgcaaatcatgtgtttattggtacggcagtaaggtttaagtaagctgtttccttgagaagcacttgaaatggagggtatgatggctcgatcaaagcgaaatgaatactcatctgctgaacagatcggcgtgatctatgcc

SEQ ID NO: 15294 - DNA, 260 bp, Unknown
  Description of Unknown: LeftRegion for integrase B2295 sequence
gatggatattcagaaggaagccatgtaccaggtgacgatgggcattgtaaagaagatgtttcatgcaaatctgatttcggaggatgaatatcgtcagattgatacaatgttcagggagaaatacgagccgaaaatcggcacattattcgttgacttagagcctgaacagcggtaatatgtgtagtgaaaggagagctgttatgcgtaaaatcatcaaaatagaacctacggagcccgtattgccaaggcgaaagcgagtg

SEQ ID NO: 15295 - DNA, 260 bp, Unknown
  Description of Unknown: LeftRegion for integrase B2296 sequence
atggctctcattttacagggggcagccgcacgatatgactgctgcccccagcctatttctgaatatgaaccctcagaccgcccagtggacgtggattggcaccgctttcgccgggtggtctcttatatcaccgtcgcgtcggacgctacggtgagtctcacatttacggataataacttcactggaaaggacaaataaccatggaagcagcaacaaccactttagaacggcgtgtgcgggagatcccaccgaccaggaag

SEQ ID NO: 15296 - DNA, 260 bp, Unknown
  Description of Unknown: LeftRegion for integrase B2297 sequence
gactactttgacgtgtcgctggactacattttcggcaggacggacgacccacacggcatgatctataacaactgtgtgaagctcggcctgaacaatcccgaaatggcgcggttcgtggaaatgtgcttcgaccccggctcggctatgaacgaaagactgaaggcaacgcttgtgcagatgctctcggaggtggatacgaaatgaaagccgtgatttacgcccgctattcctcggacagccagcgagaagaaagtattgaa

SEQ ID NO: 15297 - DNA, 260 bp, Unknown
  Description of Unknown: LeftRegion for integrase B2298 sequence
gacccgtgcggaaaaacgtaactattccatactggttaaatgaaacggccaaacagaaaaatataaacttttctaaagtattgcaaaacgccttacttgcagagctgaacttgaaaaataagtaaggaaatgaaacagttacaaattgtaaccgtttgaactatttgcctatgacgaaaatgtataaaggggtctttattatggcgaaaaagaaagcgacagccaatacctcatacagcgcaggaactcgtgccgttatc

SEQ ID NO: 15298 - DNA, 260 bp, Unknown
  Description of Unknown: LeftRegion for integrase B2299 sequence
ccctcatgcatacgcgtacttggaagacgcgcacaggattaaggagtacgtggcgaaccacgcaaagcacagcaatacactgtctcctatctctgtggctgacgagatcaagaagtacaaggaactcttagattgcggagcaataactgaagatgagtataccaaggccaaaaacaagcttttgaagtaggggtttcacgatgcgagattctatgcgcggtcgaattaaatattgtgatgcatcagatggggactcgact

SEQ ID NO: 15299 - DNA, 260 bp, Unknown; identical to SEQ ID NO: 13421
  Description of Unknown: LeftRegion for integrase B2300 sequence

SEQ ID NO: 15300 - DNA, 260 bp, Unknown; identical to SEQ ID NO: 13476
  Description of Unknown: LeftRegion for integrase B2301 sequence

SEQ ID NO: 15301 - DNA, 260 bp, Unknown
  Description of Unknown: LeftRegion for integrase B2302 sequence
gttattttttaatgaaataacttttcaggtaacgataaatctggcaaggaaaatgttgaatgataaacttattactaagaaggagtaccagtccttcaagaaggaaatgattcataaatatcaagcgtttttcggggatttatacacttgataattctactggttagagtgatatatatagttggaaggagggttcaactatggaaaagaaaatgtggaaaatagaacagaaggttaccgaaatttccaaacggaggcgg

SEQ ID NO: 15302 - DNA, 260 bp, Unknown; identical to SEQ ID NO: 13018
  Description of Unknown: LeftRegion for integrase B2303 sequence

SEQ ID NO: 15303 - DNA, 142 bp, Unknown
  Description of Unknown: LeftRegion for integrase B2304 sequence
aaagcactagtattcttgccttaacactcatatcattgttctcctgttcaatgaaccacttagataagcatagtccgaagatatgaagctgctagtgacatacatcaggtggagtactaaagagcaagactcaggagactcc

SEQ ID NO: 15304 - DNA, 260 bp, Unknown
  Description of Unknown: LeftRegion for integrase B2305 sequence
tttccccagtgaattggatactgaagagggaggaggaacaggctatggccgcttctaaaaacatgatagcgctggagataaatggactccatgtgcatctcacctttacaccatttcctgcggatgataccgtggccgccgtccgagcaattttgaagaatagctacgttcggacgctccagacgtaaggaggcgtgaccttgggtaaaagagtttgctgcctgtatcgcgtttccacgctgaagcaggtcgaaaaggat

SEQ ID NO: 15305 - DNA, 260 bp, Unknown; identical to SEQ ID NO: 14676
  Description of Unknown: LeftRegion for integrase B2306 sequence

SEQ ID NO: 15306 - DNA, 260 bp, Unknown
  Description of Unknown: LeftRegion for integrase B2307 sequence
aattcattttatgaattattttgagaaaggctaccagagtaaaggctggtagccttatttttttttgtctaaatttgaggagtatctgaggttaatacttacataaaaaataatgggtttacatagtatcaaaaaggtgtataataagagtgagatattgtgataaacctgtacaatttctattaacaggaggaaacaggatggtacaggaaaaattaagagcggtattctatgcaagagtatcaacagaggaggagaaa

SEQ ID NO: 15307 - DNA, 260 bp, Unknown; identical to SEQ ID NO: 13516
  Description of Unknown: LeftRegion for integrase B2308 sequence

SEQ ID NO: 15308 - DNA, 260 bp, Unknown; identical to SEQ ID NO: 13018
  Description of Unknown: LeftRegion for integrase B2309 sequence

SEQ ID NO: 15309 - DNA, 260 bp, Unknown
  Description of Unknown: LeftRegion for integrase B2310 sequence
accccgctattcacacaaatgatggtggtcttactaagcaattacttcaatggtttaatctctgtgacatggagggtaaactaacgattatacaatgtgcttctcaagagtttaagagaactcaaaaagaaaaaaatgaaaatgcggaacaggttgctgtcagctaaagtcattgacctcgaaaagtggaggaaaacattatgaaatcccctatcgacctctcctgtctgacagaagaagaaatctctcaatttcaagaa

SEQ ID NO: 15310 - DNA, 260 bp, Unknown
  Description of Unknown: LeftRegion for integrase B2311 sequence
atggctctcattttacagggggcagccgcacgatatgactgctgcccccagcctatttctgaatgtgaaccctcagactgcccagtggaagtggattggctccgctttcgccgggtggtctcttatatcaccgtcgcgtctgacgctacggtgagcctcacatttacggatgataacttcactggaaaggacaaataaccatggaagcagcaacaaccactttagaacggcgtgtgcgggagatcccaccgaccaggaag

SEQ ID NO: 15311 - DNA, 232 bp, Unknown
  Description of Unknown: LeftRegion for integrase B2312 sequence
gcttaacgacaacttctgcgccatccactttgcttgcaccctcagcaactgcgcgtgccatcgtttcaatatgtccgtacatggaataataaagcactagtattcttgccttaacactcatatcattgttctcctgttcaatgaaccacttagataagcatagtccgaagatatgaagctgctagtgacatacatcaggtggagtactaaagagcaagactcaggagactcc

SEQ ID NO: 15312 - DNA, 260 bp, Unknown
  Description of Unknown: LeftRegion for integrase B2313 sequence
tgaggggcttgtacctctttttttgtttttctgttgcaatctttatataggtagtatataatagatacagactgaaaaatatagccgttttaagggcttgtttggtttgggggtatagagatataccctaacaggattaaagccgctcagaggggctctgggttgctcagcgaggcattataaaataaggagtgtgcaggatggcatttagaagtattttagattacagaaatgttttagctacagagggattaagggct

SEQ ID NO: 15313 - DNA, 260 bp, Unknown
  Description of Unknown: LeftRegion for integrase B2314 sequence
ggctactggctgtaaaatgctggtagccctcattttttagttgtatctagtatataaggggtgtataatagataggaactgaaaacagcctcataaagccctctattttatcgaggataaagaagtctacacctaatatataaaagtggctgtatgaggcacacaggatctcacaggactattacaggagggtaaacaggatggcatacaggaaaataacggatataagagatactattggtatgagagcggtattttat

SEQ ID NO: 15314 - DNA, 141 bp, Unknown
  Description of Unknown: LeftRegion for integrase B2315 sequence
aagcactagtattcttgccttaacactcatatcattgttctcctgttcaatgaaccacttagataagcatagtccgaagatatgaagctgctagtgacatacatcaggtggagtactaaagagcaagactcaggagactcc

SEQ ID NO: 15315 - DNA, 260 bp, Unknown
  Description of Unknown: LeftRegion for integrase B2316 sequence
gataaagctgaacatacagacaaccgcatttcttcggatttctataatgtaataatagatgtcctcatcgaaatgcttaatatagattaaaatataaactttgaaaatcatctgtgcagttgcttttcagtgactgcactttattaaattataaatacatattattaaaatgaagaattattcttataggagtggtatatatggaagaaacaataaaagcagtcggatatgcacgattttcttcttcaatgcaacgagaa

SEQ ID NO: 15316 - DNA, 260 bp, Unknown; identical to SEQ ID NO: 15315
  Description of Unknown: LeftRegion for integrase B2317 sequence

SEQ ID NO: 15317 - DNA, 260 bp, Unknown
  Description of Unknown: LeftRegion for integrase B2318 sequence
tataatccaaaagggttattttgagagggctatcagtgtaagggctgatagccctatttttttttgtctaaatttcaggagatttctggttattactcaaataataagtaatgggtttacatagtatcaaaaagatgtataataagtatgagatattatgacaaacctgtacaaattctaatcaacaggaggaaaacaggatggtacaggagaaattaagagcggtattttatgcaagggtatctacagaggaagagaga

SEQ ID NO: 15318 - DNA, 260 bp, Unknown
  Description of Unknown: LeftRegion for integrase B2319 sequence
taatcttaatagattattgaataataatttaatatcgaataatgaatacataaaggcttgtgcaatattagatgcacaatttaaaaaatcacacacataaataactaattgggtgcatatttattgcacccttttggcatttatgatataatcaaaagtaatagcaaagaatattacagaaagcgaggaatcgaggaattatgaatgaaatagtaacgggtttagacacaaataaaatatataaagttgtgttttatgct

SEQ ID NO: 15319 - DNA, 260 bp, Unknown
  Description of Unknown: LeftRegion for integrase B2320 sequence
actaaggtcgaaagaaaaaaggagctattttttatattcgatacgttaaaaacaactggaaaaataacagaagaagactatgaaagttgtattgaagcaattcgcctgaaatataaataaacagatacaaacccacttaatggtatcatttcctgcaaagatatgttataattaagtgggatttttgtgaatggaggagtatgtatagtagcaagcgagcagttatttactgccgagtcagtaccgaggaagaatctcag

SEQ ID NO: 15320 - DNA, 260 bp, Unknown
  Description of Unknown: LeftRegion for integrase B2321 sequence
tgatcgttcggcttttaatttaccagatctaatccatcgcctaactgtttcttcgttaatattcaatagctccgcgatttctttagtgttatatatactcatacatttcactcctttcttcataataggagttgaaaattacgcgaaggaggtgatgccaacttaacccctggcagtacatcatagaaaggaagaacggaatgtataaagaatatccaacgttttacaattacgaaacaaaagagtacggcagaaagtct

SEQ ID NO: 15321 - DNA, 260 bp, Unknown; identical to SEQ ID NO: 13002
  Description of Unknown: LeftRegion for integrase B2322 sequence

SEQ ID NO: 15322 - DNA, 260 bp, Unknown
  Description of Unknown: LeftRegion for integrase B2323 sequence
gcattcttcctgttctttcctgtattgagattgtccagaaacaaaaacttcgttctggtaagtagtgcttatatttcgtttcgttccgttatcgtctaacagcctgcatctttcgtctaaaagcgcaggttgttagacgatactcaggtattcaacgtttcagctgtggaagcattctaattttctgaaaggtggtatttatgcctcacaaaaagaaactacaagaggtaggcggtcggcgtctggtggcctactatcgc

SEQ ID NO: 15323 - DNA, 260 bp, Unknown; identical to SEQ ID NO: 14094
  Description of Unknown: LeftRegion for integrase B2324 sequence

SEQ ID NO: 15324 - DNA, 260 bp, Unknown
  Description of Unknown: LeftRegion for integrase B2325 sequence
cctgcatcctggcaccgaaattattaagacctaccttggccggcagtataaggttactatcgcggaaattaatgattttatttacaacggacagcattataaaactctgtccgctatagccaaagaaatctgcggtataaaggtctccggttatgactttttcggattaaataacaaacgggtattaaaggagacagctcatggttagaataaactgcgcgatctatgtccgcaaatccaccgaaaagggcttggagctt

SEQ ID NO: 15325 - DNA, 260 bp, Unknown
  Description of Unknown: LeftRegion for integrase B2326 sequence
gatatatcctctgaatggttggaaaactcatacacatacacgccaaagccgtataagccttcaaagcgcgccctccaaatggaggcggacatcaaagaaactgctcacaaatacataacaagcgaaaaagccctcctgctgggcgcagaagggcgtaacgggtaacagatatgtcgatagatattaaatggcaagtgccaatggcaaagccggaggtcagcgaactggccgtcgtatatgcccggtattcaagccacagt

SEQ ID NO: 15326 - DNA, 260 bp, Unknown; identical to SEQ ID NO: 15315
  Description of Unknown: LeftRegion for integrase B2327 sequence

SEQ ID NO: 15327 - DNA, 260 bp, Unknown
  Description of Unknown: LeftRegion for integrase B2328 sequence
ccttgttaggactcaatcttcttgttttcattaatcgtgtaagtaaccgatcttgtacaaaaattttccgactaatgtccagaacttttgtttgatggtcatacaaatcactcctttcttcataataggagttgaaaattacgcgaaggaggtgatgccaacttaacccctggcagtacatcatagaaaggaagaacggaatgtataaagaatatccaatgttttacaattacgaaacaaaagagtacggcagaaagtct

SEQ ID NO: 15328 - DNA, 260 bp, Unknown
  Description of Unknown: LeftRegion for integrase B2329 sequence
ttttgaggggcttgtaccccttttttttgtttttctgttgctatttttatatagctggtgtataatagatacagactgaaaataaagccacttagagagcctcaagagttaggggtaggcagttatacccctgagcgattaaaacggctctgagaggctctcaagggctcaggatatgattttataaaggagtgtacaggatggcttacaggagagcacaggatactaaaggattaagggcggttttctatgctagggta

SEQ ID NO: 15329 - DNA, 260 bp, Unknown
  Description of Unknown: LeftRegion for integrase B2330 sequence
tataatccaaaagggttattttgagagggctatcagtgtaagggctgatagccctatttttttttgtctaaatttcaggagatttctggttattactcaaataataagtaatgggtttacatagtatcaaaaaggtgtataataagtatgagatattatgacaaacctgtacaaattctaatcaacaggaggaaaacaggatggtacaggagaaattaagagcggtattttatgcaagggtatctacagaggaagagaga

SEQ ID NO: 15330 - DNA, 260 bp, Unknown
  Description of Unknown: LeftRegion for integrase B2331 sequence
gtaacaagtaatcttaatagattattgaataataatttaatatcgaataatgaatacataaaggcttgtgcaatattagatgcacaatttaaaaaatcacacacataaataactaattgggtgcatatttattgcacccttttggcatttatgatataatcaaaagtaatagcaaagaatattacagaaagcgaggaattatgaatgaaatagtaacgggtttagacacaaataaaatatataaagttgtgttttatgct

SEQ ID NO: 15331 - DNA, 260 bp, Unknown; identical to SEQ ID NO: 15317
  Description of Unknown: LeftRegion for integrase B2332 sequence

SEQ ID NO: 15332 - DNA, 260 bp, Unknown
  Description of Unknown: LeftRegion for integrase B2333 sequence
attataaatgctttggtaaagtgttgggaaaagctaaagttttaattaaggtttaaagttacatatagagtatcgataacaaataaaaatcccgctcagtgctaccaacaccgaacgggaaagagctgcggtataaccacaaccttaagcaagtttaattgtaccacagcttcttgaaaatgtcaaggagtgataaaaaaatgaaaagaactgcaatatatgctcgttacagctctgataatcaacgggcggagagtatt

SEQ ID NO: 15333 - DNA, 260 bp, Unknown
  Description of Unknown: LeftRegion for integrase B2334 sequence
ggacggcagcttaaaacattcctttgaagtaaaaaatagagtaactgctattatcggaaaatggactgcgtaccaagccgaaaaacgcctgccgctgctggaactctgtcaagacttgtccgaagatgaattaaccgaagttataaactatatcaaatacgttcaatcaaagcgcgattgaacaggaagggggaataataatgccggaagcattaaacgcggtcatatacgcccgctattcctccgatcgtcagacagaa

SEQ ID NO: 15334 - DNA, 260 bp, Unknown; identical to SEQ ID NO: 15077
  Description of Unknown: LeftRegion for integrase B2335 sequence

SEQ ID NO: 15335 - DNA, 260 bp, Unknown; identical to SEQ ID NO: 15315
  Description of Unknown: LeftRegion for integrase B2336 sequence

SEQ ID NO: 15336 - DNA, 260 bp, Unknown
  Description of Unknown: LeftRegion for integrase B2337 sequence
gctgcagcccgctatgacgtcctcggatcggaagagtatgaaaccttacggattcgcgacctcttaacgaagaccgaaaagtctgaagaacttgataccacagtcctacggagtatagctacagagatagtcattcaccccgatggcaaaatcggattaaagatgaaaaacggacaaatcattgaaaggaatgaaagcacatgagccgagcatcccctaaagtcataacgatccctgcaaatccgaaccttgtgaaagat

SEQ ID NO: 15337 - DNA, 260 bp, Unknown; identical to SEQ ID NO: 13002
  Description of Unknown: LeftRegion for integrase B2338 sequence

SEQ ID NO: 15338 - DNA, 260 bp, Unknown; identical to SEQ ID NO: 15315
  Description of Unknown: LeftRegion for integrase B2339 sequence

SEQ ID NO: 15339 - DNA, 260 bp, Unknown
  Description of Unknown: LeftRegion for integrase B2340 sequence
tatagataaagctgaacatacagacaaccgcatttcttcagatttctataatgtaataatagatgtcctcattgaaatgcttaatatagattaaaacataaactttgaaaatcatctgtgcagttgcttttcagtgactgcactttattaaattttaaatatatattatatacttgaataatactttaggagtgataataatgaatgaaacaataaaagtagtcggatatgcacgattttcttcttcaatgcaaagagag

SEQ ID NO: 15340 - DNA, 260 bp, Unknown
  Description of Unknown: LeftRegion for integrase B2341 sequence
taaaactgaacatacagataattgcatttcttctgatttctacaatgctttagtagatttactgatagaaatagttgatatagatataaaataaatcataaattttgaaaatcatctgtgcagttgcttttcagtgactgcactttattaaattttaaatatatattatatacttgaataatactttaggagtgataataatgaatgaaacaataaaagtagtcggatatgcacgattttcttcttcaatgcaaagagag

SEQ ID NO: 15341 - DNA, 260 bp, Unknown
  Description of Unknown: LeftRegion for integrase B2342 sequence
aattcgtcagcggcacattcccgaacggcagtatcagggttgtttccgtagagcttacagcaatccgcttccaagtctgcattgacgcacttacgacaatcaatttcaatcatgccttatcctccccgtgtttttggcggtgttgaaattggacgattgcgctttgtcggtagagtcatggagctaaaaaggagatttgcatgaaaaaatttccaatcgacctctcctgtctgacagaggaagaaatctctcaatttcag

SEQ ID NO: 15342 - DNA, 260 bp, Unknown
  Description of Unknown: LeftRegion for integrase B2343 sequence
cattcgcttactgcatttaccaatttcagtctctaatttgcgtttgctcatttctctggtttccataattgtaaagtttttattcataataaacctccttaaaatttttgtttatggtgtcataataggagttgaaaattacgcgaaggaggtgatgctaacttaacccctggcagtacatcatagaaaggaagaacggaatgtataaagaatatccaacgttttacaattatgaagtaaaagagtacggaagaaagtct

SEQ ID NO: 15343 - DNA, 260 bp, Unknown
  Description of Unknown: LeftRegion for integrase B2344 sequence
agcccttgctagagctcaatcttcttgttttcattaatcgtgtaaataaccgatcttgtacaaaaattttccgactaatgtccagaacttttgtttgatggtcatacaaatcactcctttcatgataggagttgaaaattacgcgaaggaggtgatgccaacttaacccctggcagtacatcatagaaaggaagaacggaatgtataaagaatatccaacgttttacaattacgaaacaaaagagtacggcagaaagtct

SEQ ID NO: 15344 - DNA, 260 bp, Unknown
  Description of Unknown: LeftRegion for integrase B2345 sequence
gacacacctcccgaaacagatactcttatggttgtcattgttgatgacgaagaaggatttgttaagaaaatcagcattgatgaagatactgtgacccttcgctcttttaatccacactatcctccccgtgtttttggcggtgttgaaattggacgattgcgctttgtcggtagagtcatggagttaaaaaggagatttgcatgaaaaaatttccaatcgacctctcctgtctgacagaggaagaaatctctcaatttcaa

SEQ ID NO: 15345 - DNA, 260 bp, Unknown
  Description of Unknown: LeftRegion for integrase B2346 sequence
ttgtcagcgtttcggtagatttttccgtttttcagcaaaataaaaacgcccacggtgttaccagcaacgcaggcgtttcagatcagcttactcagagagatggtacagggataaaacctgtccagagcaatagcagacctcgcagatgttattgtaccacctccgggcaggcttgtcaaagtgtacccggaggtatttttatgggcaaaaaacaaaaggcaaccggcggcgatgcggtcatctacgcccgctattcttcc

SEQ ID NO: 15346 - DNA, 260 bp, Unknown
  Description of Unknown: LeftRegion for integrase B2347 sequence
aatcccgttgcgtctccgcttttctagcgtagcgctcttttggactgtacgcaacatggaaaaataaaagcgcccggcagctggtacgatcagccgtcgggcatggatgaatgcttcgcagaatgaaaggaaatcaatcttgcgcctgctccatgagtgtaccacacttttggcaggtacgcaatcatgggaggattgctatgccccgcacatcacgcaaagccaaaacatcgccttctgccgctatgcggctcgtggcc

SEQ ID NO: 15347 - DNA, 260 bp, Unknown
  Description of Unknown: LeftRegion for integrase B2348 sequence
ggcatgaacatattttactatattttagcacaatgttgcttgcagaagaagatttcaaacaaaataaaaaacgcccacggtgttaccagcaccgcaggcgttccagatcagcttacccagagggcaataacagccaacctcacagatgttattgtaccacctccgggcaggcttgtcaaagtgtacccggaggtatttttatgggcaaaaaacaaaaggcaaccggcggcgatgcggtcatctacgcccgctattcttcc

SEQ ID NO: 15348 - DNA, 260 bp, Unknown
  Description of Unknown: LeftRegion for integrase B2349 sequence
cttcgatcaagggcttatgacggtcttgcctgatcttacaattcaggtctcgaactacgtgaaggacggctacgacgaccaaaatacgagagactggctactcggcgtagagggtacaaaaatcatcaggccgaagaggttcgcaccaaatcgcgacatgctggcctaccacaatgagtttgtattcctgaggtgattccatgcagcgagcagtgatatatgccaggtacagccctggaccaaatcagacagagcagtcg

SEQ ID NO: 15349 - DNA, 260 bp, Unknown; identical to SEQ ID NO: 14904
  Description of Unknown: LeftRegion for integrase B2350 sequence

SEQ ID NO: 15350 - DNA, 260 bp, Unknown
  Description of Unknown: LeftRegion for integrase B2351 sequence
gatacacctcccgaaacagatactcttatggttgtcattgttgatgacgaagaaggatttgttaagaaaatcagtattgatgaagatactgtgacccttcgctcttttaatccacactatcctccccgtgtttttggtggtgttgaaattggacgattgcgctttgtcggtagagtcatggagttaaaaaggagatttgcatgaaaaaatttccaatcgacctctcctgtctgacagaggaagaaatctctcaatttcag

SEQ ID NO: 15351 - DNA, 260 bp, Unknown; identical to SEQ ID NO: 15315
  Description of Unknown: LeftRegion for integrase B2352 sequence

SEQ ID NO: 15352 - DNA, 260 bp, Unknown
  Description of Unknown: LeftRegion for integrase B2353 sequence
acccgctcgccggcgtcacttccgccgcgccggcggctctgtccccccagctccaggccctggccgacgccctcgatcagctgaatgaagagggacaggaaaagctgcttgactacgcggccgacctggtagccggtggccgatatataaaaacttgtgcgcctggactggatcaggcgcaggcgtgacgggcggaccccatgaaaaagcgcatgattcccatggcggtcagctccgccgacttcgacccctccatgaac

SEQ ID NO: 15353 - DNA, 260 bp, Unknown; identical to SEQ ID NO: 15315
  Description of Unknown: LeftRegion for integrase B2354 sequence

SEQ ID NO: 15354 - DNA, 260 bp, Unknown
  Description of Unknown: LeftRegion for integrase B2355 sequence
agtcccgttgcgtctctgcttttctattgtagcgctcttttggactgtacgcaacatggaaaaataaaagcgcccggcagctggtacgatcagccgtcgggcatggatgaatgcttcgcagaatgaaaggaaatcaatcttgcgcctgccccatgagtgtaccacacttttggcaggtacgcaatcatgggaggattgctatgccccgcacatcacgcaaagccaaaacatcgccttctgccgctatgcggctcgtggcc

SEQ ID NO: 15355 - DNA, 260 bp, Unknown; identical to SEQ ID NO: 13096
  Description of Unknown: LeftRegion for integrase B2356 sequence

SEQ ID NO: 15356 - DNA, 260 bp, Unknown
  Description of Unknown: LeftRegion for integrase B2357 sequence
ttattatagatatcatggactttaataaagtaacttatatatgatgcaatttagatatattaaataaaattaattttctatttgcatcatatatttttatatacagattttactttttgaaatataagtaatgtgtttacatattggaaatactatatttaagggtattttcaatataaaaccttagggaggtttgacttatgaaggctgcaatttattcaagaaaatcaaagtttactggaaaaggagactctatagaa

SEQ ID NO: 15357 - DNA, 260 bp, Unknown
  Description of Unknown: LeftRegion for integrase B2358 sequence
taaggcatgttgaagcttggcataaagcgttcggcatggacccgtttaccgatgaggaacatgagaagttaatggagtatggtagattcttaatttcgcagagacaaaaataaaagaaagagaataggagttgtaacttacgcgaaggaggtgatgccaacttattcccctggcagtacatcatagaaaggaagaacagaatgtataaagaatatccaaagttttacaattatgaagtaaaagagtatggcagaaagtcg

SEQ ID NO: 15358 - DNA, 260 bp, Unknown
  Description of Unknown: LeftRegion for integrase B2359 sequence
ttcatatcaatcacctttcttcaaacccaactaagcccggacacacaacattatggccacatttctttaaaagtaaaacgtgcacataggcgttttagttctttttttagatagatatgatgaattgtaaaactctataaactaaattatggcaatttataggcgtacaaagtaaaatatgtttacataaaggaagttttatgtttgaaacagaagatttaacaggtcaatacgtaaatatttatatccgtgtcagtact

SEQ ID NO: 15359 - DNA, 260 bp, Unknown
  Description of Unknown: LeftRegion for integrase B2360 sequence
attacgacaagagtatagataaagctgaacatacagacaaccgcatttcttcggatttctataatgtaataatagatgtcctcatcgaaatgcttaatatagattaaaatataaactttgaaaatcatctgtgcagttgcttttcagtgactgcactttattaaattttaaatatatattatactttaggagtgataataatgaatgaaacaataaaagtagtcggatatgcacgattttcttcttcaatgcaaagagaa

SEQ ID NO: 15360 - DNA, 260 bp, Unknown
  Description of Unknown: LeftRegion for integrase B2361 sequence
gcttagaaaatggtcaaataggtgttataagaattgatggtatggaagctacggttaagaaagtagttattagtggctctatgattactctaattccaatgtcaagtaataaagagcatataccacatatgtacaatttagaaactgatgatatagaaataatagggagagtaattcaagcaataaaaacttattaggaggtgttcgaaattaaggcagcgatatatacaagaaagtccaagtacaccgaagaaggagaa

SEQ ID NO: 15361 - DNA, 260 bp, Unknown
  Description of Unknown: LeftRegion for integrase B2362 sequence
ggcaaatttgatcaccttaacggcacagatgcagatgtaataaataaataaaatctcccgccctgttccagcagagcgagagataaatgcaggcctccagattataagctttccagatataagctttccagaccgcctacgccattagctaaattatagcatatctggagtcctccatgttaagcataggaggtttttttatgtcattttttggaaataagttgcccgaacggaacgaaatcgccgttgtttactgtcgc

SEQ ID NO: 15362 - DNA, 260 bp, Unknown
  Description of Unknown: LeftRegion for integrase B2363 sequence
aaacagccctctatctgttatcaggaggaacaaccggtgtgccaaaggtgattccaaaatcccatgccggatatatttgtaatacaggctcataaagcagatagtggtgtacaaggacgattccgtaagagtgatttttcctaacaataacagtataaagataggctaccgggatttataggagccggaaaggagcagatatgccacagacagcggtaaagaagaaagtatccatgatacctgcaaaaccgcagtatgac

SEQ ID NO: 15363 - DNA, 260 bp, Unknown; identical to SEQ ID NO: 13002
  Description of Unknown: LeftRegion for integrase B2364 sequence

SEQ ID NO: 15364 - DNA, 260 bp, Unknown
  Description of Unknown: LeftRegion for integrase B2365 sequence
agtccttgttaggactcaatcttcttgttttcattaatcgtgtaagtaaccgatcttgtacaaaaattttccgactaatgtccagaacttttgtttgatggtcatacaaatcgctcctttcataataggagttgaaaattacgcgaaggaggtgatgccaacttaacccctggcagtacatcatagaaaggaagaacggaatgtataaagaatatccaacgttttacaattatgaaacaaaagagtacggcagaaagtct

SEQ ID NO: 15365 - DNA, 260 bp, Unknown
  Description of Unknown: LeftRegion for integrase B2366 sequence
tggtggtgcgggagttctccggggagaagtccatgcgggaagcctttgagcagctgattgagcgtcagacctgcgaacacttcgaggaatggcgtcagcagcgggaaatggccgaaaacgctgcgtaaaaacggttgattcaggggcagggacatggtactataatggtatcgtgtccctgttcatagaaggagaacgctatgagcaggaaaaaacaagtctatgagaaaatcaccgctctctactgccgcatctctctg

SEQ ID NO: 15366 - DNA, 260 bp, Unknown
  Description of Unknown: LeftRegion for integrase B2367 sequence
acatatgttaggcatgtagaagcttggcacaatatgtttggtatggaccctttttcagacgaggagcatgaaaagctaatggagtacgggaagttcttaatctcgttgaggaaaaaataaaagaaaagagtcatgatctatgcgaaaggaggtgatgccaacttaacccccggcagtacatcatagaaaggaagaatagaatgtataaagaatacccaacatttcattattacgaaacaaaagaatatggaagaaagtca

SEQ ID NO: 15367 - DNA, 260 bp, Unknown
  Description of Unknown: LeftRegion for integrase B2368 sequence
accagcgagccgtcctgctcgccttgcagcgtcaaggggttcttaacgaaatgcagtgtaggaactgcgtacaaaaattagaagaacagaaaagaaatacaggaaaatcaaaatctgtaaaggaatagtgcctttcagtattcacacaattgcaaatgcacattctgtatcgtatgataccacgaaaaggagggatttttatgttacaagtagcagcgtattgtcgcgtatccacagataaggaagaccaggcaaattcc

SEQ ID NO: 15368 - DNA, 260 bp, Unknown; identical to SEQ ID NO: 13018
  Description of Unknown: LeftRegion for integrase B2369 sequence

SEQ ID NO: 15369 - DNA, 260 bp, Unknown
  Description of Unknown: LeftRegion for integrase B2370 sequence
gtaacatacgaatcgaaaggtttaagatttgggctaagaaatttgataaatatgtatttacagacgaagaacataacaaacttgtagaatatgctgagttcttgctttatcaaagagaaaaataaaagagaaaatgtatttttataaggaggtgatgccaactacaaacctggcaccacaaattagaaaggatgaatagaatgtataaggattatccagtgttttacaattatgaagtgaaagagtacggacgtaagtca

SEQ ID NO: 15370 - DNA, 260 bp, Unknown
  Description of Unknown: LeftRegion for integrase B2371 sequence
accagcgagccgtcctgctcgccttgcagcgtcaaggggttcttaacgaaatgcagtgtaggaactgcgtacaaaaattagaagaacagataagaaatacaggaaaatcaaaatctgtaaaggaatagtgcctttcagtattcgcacaattgcaaagacacattctgtatcgtatgataccacgaaaaggaggagtttttatgttacaagtagcagcgtattgccgtgtatccacggataaggaagaccaggcaaattcc

SEQ ID NO: 15371 - DNA, 260 bp, Unknown
  Description of Unknown: LeftRegion for integrase B2372 sequence
attctaaagaaaagtttgagattgcagctaatacttttgcagctgaattacttattgaggattcattgtttcatgaatataagcatcatacaattgaagaaatggctgctatggaaaatttacctatagaacttatcaagataaagctaaaatatatttaatttgtaataaaattgcatatactaaaacgaggtgattagatgaagattgctatttactcaagaaaaagtaaatatacaggtaaaggtgattccataggt

SEQ ID NO: 15372 - DNA, 260 bp, Unknown
  Description of Unknown: LeftRegion for integrase B2373 sequence
accagcgagccgtcctgctcgccttgcagcgtcaaggggttcttaacgaaatgcagtgtaggaactgcgtacaaaaattagaagaacagataagaaatacaggaaaatcaaaatctgtaaaggaatagtacctttcagtattcacacaattgcaaaggcccattctgtatcgtatgataccatgaaaaggagggatttttatgttacaagtagcagcgtattgccgtgtatccacggataaggaagaccaggcaaattcc

SEQ ID NO: 15373 - DNA, 260 bp, Unknown
  Description of Unknown: LeftRegion for integrase B2374 sequence
ccgtcgaggcttggctgaccggttcccgctcttgcccgctcagcacgagaatgatgtttcagcagttactcggccttctgccggtcgccgttgagttaggaggcggcaatggctgaggagttcaaaagctcccagcccttgacaaaaaacccgtttgcggttactatagccgcaaacgggttttttgtgaggtggttttgatgcatggcgcatatatccttgcgcgctactccacggacaggcaaaacgaggacagcata

SEQ ID NO: 15374 - DNA, 260 bp, Unknown
  Description of Unknown: LeftRegion for integrase B2375 sequence
accagcgagccgtcctgctcgccttgcagcgtcaaggggttcttaacgaaatgcagtgtaggaactgcgtacaaaaattagaagaacagataagaaatacaggaaaatcaaaatctgtaaaggaatagtgcctttcagtattcacacaattgcaaaggcacattctgtatcgtatgataccacgaaaaggaggagtttttatgttacaagtagcagcgtattgccgtgtatccacggataaggaagaccaggcaaattcc

SEQ ID NO: 15375 - DNA, 260 bp, Unknown
  Description of Unknown: LeftRegion for integrase B2376 sequence
caccgacgaggccggctggcttgctctgctggatgcccgtaatcagacctcgcatctttacgatgacgcggtggccgacgccgtgtatcaggccatcggaaatacctatttgcccctattgcgcgaactgagcgaaaagctgtctgccgctgtctgacttttcctgcccggttgttatcttctagccagggaggcacgccgtgaacatcgccatctacccgcgcaaaagcaagttttcgcccaccagcgaatccatcgcc

SEQ ID NO: 15376 - DNA, 260 bp, Unknown
  Description of Unknown: LeftRegion for integrase B2377 sequence
ctggatcattgacatggttatgatctgttgcaacaaattcaccgacagcaccggcgcggtggttggtctgaaggttgctgagtataccagacagccggatcctgatcttgcagaggcttctctggaggagcagcgggaggcagcggccgagactgccagagcttacggctatactgcaatagagtcaggcgctcaggataatgccgacaagtaaaaacacggctcgaaaatatgccgcaggaggtagctcggataattcc

SEQ ID NO: 15377 - DNA, 260 bp, Unknown
  Description of Unknown: LeftRegion for integrase B2378 sequence
ataatccaaaagggttattttgagagggctatcagtgtaagggctgatagccctattttttttttgtctaaatttcaggagatttctggttattactcaaataataagtaatgggtttacatagtatcaaaaagatgtataataagtatgagatattatgacaaacctgtacaaattctaatcaacaggaggaaaacaggatggtacaggagaaattaagagcggtattttatgcaagggtatctacagaggaagagaga

SEQ ID NO: 15378 - DNA, 260 bp, Unknown
  Description of Unknown: LeftRegion for integrase B2379 sequence
ctggatcattgacatggttatgatctgttgtaacaaattcaccgacagcaccggcgcggtggttggtctgaaggttgctgagtataccagacagccggatcctgatcttgcagaggcttctctggaggagcagcgggaggcagcggccgagactgccagagcttacggctataccgtaatagagtcaggcgctcaggataatgccgacaagtaaaaacacggctcgaaaatatgccgcaggaggtagctcggataattcc

SEQ ID NO: 15379 - DNA, 260 bp, Unknown
  Description of Unknown: LeftRegion for integrase B2380 sequence
ctgagccacggacggctgatccatgtggtttccgtgttccccgcggacggcgcctgttcgccggaggagaaactgaaaacactcattgacatggacctcaaaaattcccgcacagttgcggaaaggggtggacaaaccgccccggcagaggtaacatcacacaaactctggacggtttgactggagaaaaggaggattgcatgagtcagtcaaaccaaatgaaaatcaccgccctgtactgccgtctgagtcaggatgac

SEQ ID NO: 15380 - DNA, 260 bp, Unknown; identical to SEQ ID NO: 13018
  Description of Unknown: LeftRegion for integrase B2381 sequence

SEQ ID NO: 15381 - DNA, 260 bp, Unknown
  Description of Unknown: LeftRegion for integrase B2382 sequence
acaggtcttttgattgtgtgtagtgatccggcgcaaaagaaaattgacagagccgatgccttgaatattccaatcatttcagagcagcaatggtatgaactcatgccagaacttgaagccgttggaatgtggaacggaaagcaaattctgtttgcggacaatgatggcatctaccgtgttgaagtggacggtgaaagctgatgaccagaaaaaagaatattgctgctggcctcgatgccgtcatctatgcccggtactcg

SEQ ID NO: 15382 - DNA, 260 bp, Unknown
  Description of Unknown: LeftRegion for integrase B2383 sequence
tatatggtatcgcacgcaaacttttctttaaaatcatcggagcataccatagcgatacctcgcgtgcgcgcgtgcgtgtgcgcgcgatcgtgcgcgcactgtttctgtacctgtatctgtatctgagactgtatctgtaatctgtttctgattctgaatatctactactgcaaatctatcgttagaagggggtggcgctgttgccgagaaaacctgcaaagcacccggcgaagccgaagcggggcaagaagctggaaatc

SEQ ID NO: 15383 - DNA, 260 bp, Unknown
  Description of Unknown: LeftRegion for integrase B2384 sequence
aagctgccgctgggcgtaaggcgcgcgagcgcattatcaacggtgaggacggctccgaggcgttggccgatgccgaggctgagtgggcagcgtattgcgccgagcatatatgggactaatgccgcatccggctgtagcccttgacaaaaaacccgtttgcggttactatagccgcaaacggtttttttgaggtggttttgatgcatggcgcatatatccttgcgcgctactccacggacaggcaaaacgaggacagcata

SEQ ID NO: 15384 - DNA, 260 bp, Unknown
  Description of Unknown: LeftRegion for integrase B2385 sequence
attctagttaccgaactagaaaaagatttaaataatagttaaggtagttttgctacctttttattttaggcaaattattgacacgttattttttaatgaatcccctgcttaatatattattatgtaggggaatatttttatgtatatttttaacatagaagtctattatataaatataaataaacccaaaggagttaataatgaaaatagcaatatattcgagaaaatcaaaatacactggtgttggtgattcaatagag

SEQ ID NO: 15385 - DNA, 260 bp, Unknown
  Description of Unknown: LeftRegion for integrase B2386 sequence
cgccttgtgctatcaacagatcggcaacgaggcatatattgaaaatcagctaagatgcattcttgaacaggccgaatgcttggaatccttcgacgcagagctgacaaacaagatcgtcaagcagatcaggctctcggaagacggtcccgtaagaatcatactgatcaatgatcaagaagtacgaaaggagcagacggagcatgcaagcagcaacccaagcgacgccacctaaagtggtacatacgatccccgccaaaatc

SEQ ID NO: 15386 - DNA, 260 bp, Unknown
  Description of Unknown: LeftRegion for integrase B2387 sequence
aatctgcttttgttgatctacgctgagtgcttcaaacatggttaaggcttccttgtcagaaaccttaccttctttgttagtgatatgacatattctactccaatcttaggaagttcttcctatgtattagcgccaagtgatattatagcactttatctttcgtttgccattggtaaatagaggaaaggataacggacattatgacagttaaaaaatttccaatcgacctctcctgtctgacagaggaagaaatctctcaa

SEQ ID NO: 15387 - DNA, 260 bp, Unknown
  Description of Unknown: LeftRegion for integrase B2388 sequence
ctggatcattgacatggttatgatctgttgcaataaattcaccgacagcaccggtgcggtggtcggtctgaaggttgcggagtataccagacagccggatcctgatcttgcagaggcttctctggaggagcagcgggaggcagcggccgagactgccagagcttacggctataccgtaatagagtcaggcgctcaggataatgccgacaagtaaaaatacggctcgaaaatatgccgcaggaggtagctcggataattcc

SEQ ID NO: 15388 - DNA, 260 bp, Unknown
  Description of Unknown: LeftRegion for integrase B2389 sequence
cgcagaactcgcaggaatctacgaaaagcaggttgccaactggaacagcaatcccgctccggcttgccagcccgatatagcggttccaacaataaatgatttgcgcgccctcaagcagctcgttgatgaaggtgtgcttaccgaagaggaatttacagccaaaaagaagcagttgctcggcatctgagcaaggaggctatatggcttcgcagaagtataaaaagaagtcagacaatttgataatcaccggtgtaatatac

SEQ ID NO: 15389 - DNA, 260 bp, Unknown
  Description of Unknown: LeftRegion for integrase B2390 sequence
ttcccttggctacttgcaagttggagatgaggcatacgtcgagcacaagctgaagaacactcttgaacagcacgacatcctggactgcttcgattcagaactgaccaataaaatcgtcaaacggatcaggctcgcagagagtggttccgtcagcatcatactgatcaatgaccaagaaatacgaaaggagcagactgaccatgcaagcagcaacacaagtgatgccacctaaagtggtacatacgatccccgcaacaata

SEQ ID NO: 15390 - DNA, 260 bp, Unknown
  Description of Unknown: LeftRegion for integrase B2391 sequence
ctggatcattgacatggttatgatctgttgcaacaaattcaccgacagcaccggcgcggtggttggtctgaaggttgctgagtataccagacagccggatcctgatcttgcagaggcttctctggaggagcagagggaggcagcggccgagactgccagagcttacggctatactgcaatagagtcaggcgctcaggataatgccgacaagtaaaaacacggctcgaaaatatgccgcaggaggtagctcggataattcc

SEQ ID NO: 15391 - DNA, 260 bp, Unknown
  Description of Unknown: LeftRegion for integrase B2392 sequence
aagtaagcaccatgcgccggttcgcgtcgctcagctctcggaacttgctcaatactttaaataggtgaccctcgttatagttgaccataccacagcctcccaacattcgatttcggtatcttcggtatcattataccacgcttgaccggcaattgatagatgttgaaaaatcatttacgatatctatacaggtgatgcacatgcagaagtttggaatcttaacggaatctgagcggcaaatccttgatggagcgtccact

SEQ ID NO: 15392 - DNA, 260 bp, Unknown
  Description of Unknown: LeftRegion for integrase B2393 sequence
tcccctcgtctggatccccagatccggcagcaagtatcacagcaaaagtacctgctcaaacatgaaaaatcccattcaggtcactctttcggaagcaaagaaaagcggctatgatccctgtaaaaagtgccatccgccgacataagtctatggattgcaggtgtccccattcaacgacatcaaagggggggaggcacgccgtgaacatcgccatctacccgcgcaaaagcaagttttcgcccaccagcgaatccatcgcc

SEQ ID NO: 15393 - DNA, 260 bp, Unknown
  Description of Unknown: LeftRegion for integrase B2394 sequence
ctggatcattgacatggttatgatctgttgcaacaaattcaccgatagcaccggtgcggtggtcggcctgaaggttgccgagtataccagacagccggatctcgatcttgcagaggcttctctggaggagcagcgggaggcagcggccgagactgccagagcttacggctataccgtaatagagtcaggcgctcaggataatgccgacaagtaaaaccgtggctcgaaaatatgccgcaggaggtggctcggataattcc

SEQ ID NO: 15394 - DNA, 260 bp, Unknown
  Description of Unknown: LeftRegion for integrase B2395 sequence
ttcccttggctacttgcagattggcgatgaggcatacgtcgagcacaagctgaaaaacacgcttgaacagcacgacaccctggacagcttcgattcagaactgaccaataaaactgtcaagctgatcaagctcgcagagaatggttccgtcagcatcatactgatcaatgaccaagaaatacgaaaggagcagactgaccatgcaaacagcaatccaagcgacgccacctaaagtggtacatacgatccccgcaacaata

SEQ ID NO: 15395 - DNA, 260 bp, Unknown
  Description of Unknown: LeftRegion for integrase B2396 sequence
caccgacgaggacggctggcttgctctgctggatgcccgcaatcagacctcccacctctacgatgacgcggtggccgacgccgtgtatcaagccatcggaaatacctatttgcccctattgcgcgaactgagcgaaaagctgtctgccgctgtctgacttttcctgcccggttgttatcttctagccagggaggcacgccgtgaacatcgccatctacccgcgcaaaagcaagttttcgcccaccagcgaatccatcgcc

SEQ ID NO: 15396 - DNA, 260 bp, Unknown
  Description of Unknown: LeftRegion for integrase B2397 sequence
tcttgcggtctgcgtcgtgtcgctcccggtcggcttgatcgttgtggccattggagcgtaccgggtggcaaaggccggggatatttatgacgctgcggtcgctcggtacgagcagcaaatctcggactatgttgactggctggatgaagtcaacgcaaaataaaaagccgccctcggtgggcggcgggaggttgctctgaatgtgtgcaaaaaagaaaccggccatgcttgagccggatatgcaggatgccgtgatctac

SEQ ID NO: 15397 - DNA, 260 bp, Unknown
  Description of Unknown: LeftRegion for integrase B2398 sequence
ctcattatagaaaatatcgctcggcaggaagaacttcggaaaatgaagaatattttacgttggcaatttagttctcacgaagcaacacagtgaaatatcttttgcaatcaataagctgtaaagcaatagtgcctttcagtatccgcacagttgcaaaggcatgagattcgccgtatgatacccgcaaaggaggcggttttatgttacaagtagcggcgtactgccgcgtatccacggataaggaggatcaggcgaactcg

SEQ ID NO: 15398 - DNA, 260 bp, Unknown
  Description of Unknown: LeftRegion for integrase B2399 sequence
tcattatagaaaatatcgctcggcaggaagaacttcggaaaatgaagaatattttacgttggcaatttagttctcacgaagcaacacagtgaaataccttttgcaatcaataagctgtaaagcaatagtgcctttcagtattcacacaattgcaaaggcacattctgtatcgtatgataccacgaaaaggaggagtttttatgttacaagtagcagcgtattgccgtgtatccacggataaggaagaccaggcaaattcc

SEQ ID NO: 15399 - DNA, 260 bp, Unknown
  Description of Unknown: LeftRegion for integrase B2400 sequence
ctggatcattgacatggttatgatctgttgcaacaaattcaccgatagcaccggtgcggtggtcggcctgaaggttgccgagtataccagacagccggatcccgatcttgcagaggcttctctggaggagcagcgggaggcagcgaccgagactgccagagcttacggctataccgtaatagagtcaggcgctcaggataatgccgacaagtaaaaccgcggctcgaaaatatgccgcaggaggtggctcggataattcc

SEQ ID NO: 15400 - DNA, 260 bp, Unknown; identical to SEQ ID NO: 13224
  Description of Unknown: LeftRegion for integrase B2401 sequence

SEQ ID NO: 15401 - DNA, 260 bp, Unknown
  Description of Unknown: LeftRegion for integrase B2402 sequence
gaacgctccgcaggagtgagggaatcatacagcgcaagggccaattgcagatcttcggttcgggacatggctgatacctccttcgtgttgttgtctttatatattacgaaattattacatcacaaattcgacattgatagagaatatcattttgcgatattacaactatactttgagtattttccaggagttttgaagaaatgggggcggattcttgcatggctgcgtctgcgaaaaaggtttcagcgaacataatgatt

SEQ ID NO: 15402 - DNA, 260 bp, Unknown
  Description of Unknown: LeftRegion for integrase B2403 sequence
ggataatgtacgaattgaacgattcaaggtttgggctaagaaatttgataaatatgtatttacagacgaagaacatagcaagcttgtagagtatgctgagttcttattacatcgaagagaaaaataaaagaaaaagttctcgtaaaggaggtgatgccaactatacccctggcaccacaaattagagaggatggaatgtaatgtataaagattatccagtgttttacaactacgagacgatggagtacggacggaagtcg

SEQ ID NO: 15403 - DNA, 260 bp, Unknown
  Description of Unknown: LeftRegion for integrase B2404 sequence
aaatacatgtaatcgtcactatcctgccccctataaattaataatctatactatgcttgtacacttcttttagttacacttagtaatactttctactctaaagaaaagattgatattttttacctaaagaacttatcaggataaatctaaaatatatttattttaaaataatgttgcatatattaaactgaggtgattagatgaagattgctatttattcaagaaagagcaaatacacaggaaaaggtgattccataggt

SEQ ID NO: 15404 - DNA, 260 bp, Unknown; identical to SEQ ID NO: 13019
  Description of Unknown: LeftRegion for integrase B2405 sequence

SEQ ID NO: 15405 - DNA, 260 bp, Unknown
  Description of Unknown: LeftRegion for integrase B2406 sequence
tcgatgaagattataaaaagttcaataacggagaaattgggtctatagcggcaacagtaatattcggcattttgtttattgcggttttgggtttcctaaaatagcaatcatttttcaattctgacttggctttttaagcacaaaatcaaagccttaattgcaaatttaagcctattttcgttaaatgggggtgtggtattttgagctcagtagataaaacagccgtaatttatgcgcggtattcgtcccatggacagacc

SEQ ID NO: 15406 - DNA, 260 bp, Unknown
  Description of Unknown: LeftRegion for integrase B2407 sequence
gataacatattataaagtgccgtattattcaaaatgaatatgcggtattttttatttagttcgcaattcaaatatattgtgagcatattaaaataataaaacaggaattttaaaaggattagttttcgtctaagttggcgattactagtccttattttttttatttatggtataatattatgtaaagcgaggtggagaaagtgggaaaagtagcatattgtagagtgtcagataaaaaaggtatagattcattcgagaat

SEQ ID NO: 15407 - DNA, 260 bp, Unknown
  Description of Unknown: LeftRegion for integrase B2408 sequence
atgcatgtaatcgtcactatcctgccccctataaattaataatctatactatgcttgtacacttcttttggttacactgagtaacactttctactctaaagaaaaaattgagattgtatttatctaaagaacttattaggataaatataaaatatatttattttaaaataatgttgcatatattaaactgaggtgattagatgaagattgctatttactcaagaaagagcaaatacacaggaaaaggtgattccataggt

SEQ ID NO: 15408 - DNA, 260 bp, Unknown; identical to SEQ ID NO: 15232
  Description of Unknown: LeftRegion for integrase B2409 sequence

SEQ ID NO: 15409 - DNA, 260 bp, Unknown
  Description of Unknown: LeftRegion for integrase B2410 sequence
ctgccgctgggcgtaaggcgcgcgagcgcattatcaacggtgaggacggctccgaggcgttggccgatgccgaggctgagtgggcagcgtattgcgccgagcatatatgggactaatgccgcatccggctgtagcccttgacaaaaaacccgtttgcggttactatagccgcaaacgggtttttttgtgaggtggttttgatgcatggcgcatatatccttgcgcgctactccacggacaggcaaaacgaggacagcata

SEQ ID NO: 15410 - DNA, 260 bp, Unknown
  Description of Unknown: LeftRegion for integrase B2411 sequence
cggagagcgcaacgacaccgtctacattgtagagtatgccaccggcagcagtgccagggagtccgtatacgagaaggtcaagcggctcattctggaggacacaaaaagttatcttgtaaaatccgcataaacgcttgatatatccgcagttcagagccataatacagtaccgcttgaagactgtcgggaaggaggagcatatgaacaacaacagacagtcttacaacgccgaggagaaaataaccgctctgtactgccgc

SEQ ID NO: 15411 - DNA, 260 bp, Unknown
  Description of Unknown: LeftRegion for integrase B2412 sequence
tcgatgaagagtataaaaagttcaataacggagaaattgggtctatagcggcaacagtaatattcggcattttgtttattgcggttttgggtttcctaaaatagcaatcattttccaattctgacttggctttttaagcacaaaattaaagccttaattgcaaatgtaagcctattttcgttaaatgggggtgtggtattttgagctcagtagataaaacagccgtaatttatgcgcggtattcgtcccatggacagacc

SEQ ID NO: 15412 - DNA, 260 bp, Unknown
  Description of Unknown: LeftRegion for integrase B2413 sequence
ttttacgttgattatcttttattcttcattttcgtaaaatttgcaaaaagaaaaagcccgccgggccgaagcctgacgggctatagatgaaactgtatttatataattcagcagcgatttatgatttttcgtctcacacgttgtgctttcgtctaatctgctggtcaaatgagacgattacttgaaaggacgctcaaggtatggcaaaaagaaaattcaacaagggcggcgaggttcggcttgtcgcctattacagatac

SEQ ID NO: 15413 - DNA, 260 bp, Unknown
  Description of Unknown: LeftRegion for integrase B2414 sequence
accagcgagccgtcctgctcaccttgcagcggcaaggcttccttaacgaaatgcagtgtaggaactgcgtacaaaaattagaagaacagataagaaatacaggaaaatcaaaatctgtaaaggaatagtgcctttcagtattcacacaattgcaaaggcacattctgtatcgtatgataccacgaaaaggaggaatttttatgttacaagtagcggcgtattgccgtgtatccacggataaggaagaccaggcaaattcc

SEQ ID NO: 15414 - DNA, 260 bp, Unknown; identical to SEQ ID NO: 13018
  Description of Unknown: LeftRegion for integrase B2415 sequence

SEQ ID NO: 15415 - DNA, 260 bp, Unknown; identical to SEQ ID NO: 13002
  Description of Unknown: LeftRegion for integrase B2416 sequence

SEQ ID NO: 15416 - DNA, 260 bp, Unknown; identical to SEQ ID NO: 14224
  Description of Unknown: LeftRegion for integrase B2417 sequence

SEQ ID NO: 15417 - DNA, 260 bp, Unknown; identical to SEQ ID NO: 14186
  Description of Unknown: LeftRegion for integrase B2418 sequence

SEQ ID NO: 15418 - DNA, 260 bp, Unknown; identical to SEQ ID NO: 13002
  Description of Unknown: LeftRegion for integrase B2419 sequence

SEQ ID NO: 15419 - DNA, 260 bp, Unknown
  Description of Unknown: LeftRegion for integrase B2420 sequence
tattgccatgaaaatagcaatatctgagactgttttgcggaacaatttaatcatattgcttaccatgacaatacacctcctttgtatttattatatcagaggtcggaacaattttccactaaaatcgttttattgtccttgacaatttaatgaaaatatagtatagaaaatcccgcctcctggaccaacaggaaacgggaatgccagcagcattggcgtactgcatggccagtgtaaatcttgtgtttgcttgggctgat

SEQ ID NO: 15420 - DNA, 260 bp, Unknown; identical to SEQ ID NO: 15271
  Description of Unknown: LeftRegion for integrase B2421 sequence

SEQ ID NO: 15421 - DNA, 260 bp, Unknown; identical to SEQ ID NO: 13396
  Description of Unknown: LeftRegion for integrase B2422 sequence

SEQ ID NO: 15422 - DNA, 260 bp, Unknown
  Description of Unknown: LeftRegion for integrase B2423 sequence
gctgtctgatgaattaccacaaaatacaatgaatgctgtacttattaaattagggttttctaaaaactggaaatcagacctcattctcccttaaaaattgaaatagctgaaatcgttatcgtcaactattacccggccgcataatccactaaatatctaaataaaaaaatccccgtctcctggaccaacaggaaacgggaatgccagcagcattggcgtactgcatggcaagtgtaaatcttgtgtttgcttgggctgat

SEQ ID NO: 15423 - DNA, 260 bp, Unknown; identical to SEQ ID NO: 13002
  Description of Unknown: LeftRegion for integrase B2424 sequence

SEQ ID NO: 15424 - DNA, 260 bp, Unknown
  Description of Unknown: LeftRegion for integrase B2425 sequence
tgtaaaatgctggtagccctcattttttagttgtatctagtatataaggggtgtataatagataggaactgaaaacagcctcataaagccctctattttatcgagggtaaagaagtctacacctaatatataaaagtggctgtatgaggcacacaggagctcacaggagctcacaggactattacaggagggtaaacaggatggcatacaggaaaataacggatataagagatactattggtatgagagcggtattttat

SEQ ID NO: 15425 - DNA, 260 bp, Unknown
  Description of Unknown: LeftRegion for integrase B2426 sequence
ccatccgcgggcaaagtgctggacagaatccatgagattctgcttgcctcaaggcttaaaaaatagccgccgcacatttgcatctttgttacctcgatgcaataatgatgatgtacttgtaccttgaaaatcgaaaataaagaaaacggaccggatacatcatctttcagacgatctaagacagaaacgaggtatgtataatggaaaagacagtctatgaatccaacgttccgcgtgtttacacgctttacagagtttct

SEQ ID NO: 15426 - DNA, 260 bp, Unknown
  Description of Unknown: LeftRegion for integrase B2427 sequence
cgatgaaggacgctacgacatagtgctggtcgcatcaatttcaagcctttcgagagaccgtaggcggtttttaagactggctaagcatatcacccgcaacgggcggcgactcgtatttctgaaagaaggatatgcgctcgacacggaatccatagaaacgcaactccaactcctgcgcgccattgaaagaagtgtgcgccatgcctgaaacgccagccaaaaccgtaacggtcatacctgcaactataaccggcccgcag

SEQ ID NO: 15427 - DNA, 260 bp, Unknown
  Description of Unknown: LeftRegion for integrase B2428 sequence
tattcgctgcaatacatcaacggtggcgaggaaaacccagaggttgaagtcgtttacctgatcgctgaatgtaaataaaaaatccgcccaggctgctacctgtgcggatcaaacgcaaggaaaatgcaaacaccactaagcactttccgcagttagtatatcacaagctgcctgcgttgtaaagtcggaaaggattaagattgaacgctgtaatctatgcccgtttctcgtcgcacagccagcgggagcagtccatcgaa

SEQ ID NO: 15428 - DNA, 260 bp, Unknown; identical to SEQ ID NO: 13335
  Description of Unknown: LeftRegion for integrase B2429 sequence

SEQ ID NO: 15429 - DNA, 260 bp, Unknown
  Description of Unknown: LeftRegion for integrase B2430 sequence
agggctactggctgtaaaatgctggtagccctcattttttagttgtatctagtatataaggggtgtataatagataggaactgaaaacagcctcataaagccctctattttatcgagggtaaaagtctacacctaatatataaaagtggctgtatgaggcacacaggagctcacaggactattataggagggtaaacaggatggcatacaggaaaataacggatataaaagatactattggtatgagagcggtattttat

SEQ ID NO: 15430 - DNA, 260 bp, Unknown; identical to SEQ ID NO: 13005
  Description of Unknown: LeftRegion for integrase B2431 sequence

SEQ ID NO: 15431 - DNA, 260 bp, Unknown
  Description of Unknown: LeftRegion for integrase B2432 sequence
ggctactggctgtaaaatgctggtagccctcattttttagttgtatctagtatataaggggtgtataatagataggaactgaaaacagcctcataaagccatctattttatcgaggataaagaagtctacacctaatatataaaagtggctgtatgaggcacacaggagctcacaggactattacaggagggtaaacaggatggcatacaggaaaataacggatataagagatactattggtatgagagcggtattttat

SEQ ID NO: 15432 - DNA, 260 bp, Unknown
  Description of Unknown: LeftRegion for integrase B2433 sequence
gcggctctcagaaaccctccgaggttttaaaacgagtaatcaccgaccaaatcgaaaagaaactgaacaagaatgaaaacaagccaaacaatgccgcaaattaagagaaattacacccaaaaagcacttgaaataaacggataattgatgtataatgatgatagtcgaaatcggttgtccgtgcattaaaggaggttaaaatgacaaacggacagacccgatacaacacagcattatatcttcgtttatccaaagacgac

SEQ ID NO: 15433 - DNA, 260 bp, Unknown; identical to SEQ ID NO: 13548
  Description of Unknown: LeftRegion for integrase B2434 sequence

SEQ ID NO: 15434 - DNA, 260 bp, Unknown; identical to SEQ ID NO: 13002
  Description of Unknown: LeftRegion for integrase B2435 sequence

SEQ ID NO: 15435 - DNA, 260 bp, Unknown
  Description of Unknown: LeftRegion for integrase B2436 sequence
aaagataaaagaacaagaaactctcataaaaaatctacgaatgagagatatggtaaaagggaaatataagaaatcggatgagctgacggaacaaatggcggagttccttgtaaaggcaacagtaaaagactggacgattacattcgagttccaaaatggatataagacaacgaaagaatatacaaacgggagggcaggaaatgtcaatggaaaactgtgcaaacactaaacccaaaattacgattatcccagccaagacg

SEQ ID NO: 15436 - DNA, 260 bp, Unknown; identical to SEQ ID NO: 13002
  Description of Unknown: LeftRegion for integrase B2437 sequence

SEQ ID NO: 15437 - DNA, 260 bp, Unknown
  Description of Unknown: LeftRegion for integrase B2438 sequence
taaggatgcagaaatatctactagtttgcaacgtgttgaaacaaaagtagataaacttgaattaagagtcctaagaaataacattaatctaccctcaacaaatgaaaactaaaaagacctagtgattgtaacgctaggtctttttataaatcacatattattcattttattttttgaaaatactataggaggtgtctactgtgaaagtagctatctattcaagaaagtctaaattcaccggtaaaggtgattcaatcgaa

SEQ ID NO: 15438 - DNA, 260 bp, Unknown
  Description of Unknown: LeftRegion for integrase B2439 sequence
ggctactggctgtaaaatgctggtagccctcattttttagttgtatctagtatataaggggtgtataatagataggaactgaaaacagcctcataaagccctctattttatcgagagtaaagaagtctacacctaatatataaaagtggctgtatgaggcacacaggagctcacaggactattacaggagggtaaacaggatggcatacaggaaaataacggatataagagatactattggtatgagagcggcattttat

SEQ ID NO: 15439 - DNA, 260 bp, Unknown; identical to SEQ ID NO: 13002
  Description of Unknown: LeftRegion for integrase B2440 sequence

SEQ ID NO: 15440 - DNA, 260 bp, Unknown
  Description of Unknown: LeftRegion for integrase B2441 sequence
atttgactgctgcacattagatacagctaaggcttttaataccgtgcttgcctattatttcggtaaaaagcaaataaccgaagaaatcaatcttcaggtacttcgcgacacggtagataaaatcatagtaagtaaggacggcaccgtaaacgtaaggttcctaaacggtgcggaaatttcaaaggataaggagaatagcaatggaaacggctgtgacggcaccgagacagaaaacagtaactaaaatagaagcgaatccg

SEQ ID NO: 15441 - DNA, 260 bp, Unknown
  Description of Unknown: LeftRegion for integrase B2442 sequence
tgcatcggttggtggtggtggatgattgacatgctcttttggtgtgttgcttttatcccgcgcctcataattcaatcccttaaagggcgaaaggataaaacgcgatccacaacaaaaactgtctccaatgaaaagatacataccgtgtatcgttccatgtgtatatgccacgactgtggacatcattgggagaaataattatgcccgctgaaatcaacttcaaccttcccggaaataaaaaatccgaacataacagccgt

SEQ ID NO: 15442 - DNA, 260 bp, Unknown; identical to SEQ ID NO: 14046
  Description of Unknown: LeftRegion for integrase B2443 sequence

SEQ ID NO: 15443 - DNA, 260 bp, Unknown; identical to SEQ ID NO: 13552
  Description of Unknown: LeftRegion for integrase B2444 sequence

SEQ ID NO: 15444 - DNA, 260 bp, Unknown
  Description of Unknown: LeftRegion for integrase B2445 sequence
ggctactggctgtaaaatgctggtagccctcattttttagttgtatctagtatataaggggtgtataatagataggaactgaaaacagcctcataaagccatctattttatcaagggtaaagaagtctacacctaatatataaaagtggctgtatgaggcacacaggagctcacatgactattacaggagggtaaacaggatggcatacaggaaaataacggatataagagatactattggtatgagagcggtattttat

SEQ ID NO: 15445 - DNA, 260 bp, Unknown; identical to SEQ ID NO: 15223
  Description of Unknown: LeftRegion for integrase B2446 sequence

SEQ ID NO: 15446 - DNA, 260 bp, Unknown; identical to SEQ ID NO: 14344
  Description of Unknown: LeftRegion for integrase B2447 sequence

SEQ ID NO: 15447 - DNA, 260 bp, Unknown
  Description of Unknown: LeftRegion for integrase B2448 sequence
gctactggctgtaaaatgctggtagccctcattttttagttgtatctagtatataaggggtgtataatagatagaaactgaaaacagcctcataaagccctctgttttatcgagggtaaagaagttctacacctaatatataaaagtggctgtatgaggcacacaggagctcacaggactattacaggagggtaaacaggatggcatacaggaaaataacggatataaaagatactataggtatgagagcggtattttat

SEQ ID NO: 15448 - DNA, 260 bp, Unknown
  Description of Unknown: LeftRegion for integrase B2449 sequence
aaagataaaagaacaagaaactctcataaagaatctacgaacgagagatatggtaaaagggaaatataagaaatcggatgagatgacggaacaaatggcggagttccttgtaaaagcaacagtaaaagactggaagattacattcgagttccaaaatggatataagacaacgaaagaatatacaaacgggagggcaggaaatgtcaatggaaaactgtgcaaacactaaacccaaaattacgattatcccagccaagacg

SEQ ID NO: 15449 - DNA, 260 bp, Unknown; identical to SEQ ID NO: 14511
  Description of Unknown: LeftRegion for integrase B2450 sequence

SEQ ID NO: 15450 - DNA, 260 bp, Unknown; identical to SEQ ID NO: 14251
  Description of Unknown: LeftRegion for integrase B2451 sequence

SEQ ID NO: 15451 - DNA, 260 bp, Unknown; identical to SEQ ID NO: 13002
  Description of Unknown: LeftRegion for integrase B2452 sequence

SEQ ID NO: 15452 - DNA, 260 bp, Unknown; identical to SEQ ID NO: 13548
  Description of Unknown: LeftRegion for integrase B2453 sequence

SEQ ID NO: 15453 - DNA, 260 bp, Unknown
  Description of Unknown: LeftRegion for integrase B2454 sequence
ggctactggctgtaaaatgctggtagccctcattttttagttgtatctagtatataaggggtgtataatagatagaaactgaaaacagcctcataaagccctctattttatcgagggtaaagaagtctacacctaatatataaaagtgactgtacgaggcacacaggagctcacaggactattacaggagggtaaacaggatggcatacaggagaataacggatataagagatactattggtatgagagcggtattttat

SEQ ID NO: 15454 - DNA, 260 bp, Unknown; identical to SEQ ID NO: 13007
  Description of Unknown: LeftRegion for integrase B2455 sequence

SEQ ID NO: 15455 - DNA, 260 bp, Unknown; identical to SEQ ID NO: 15448
  Description of Unknown: LeftRegion for integrase B2456 sequence

SEQ ID NO: 15456 - DNA, 260 bp, Unknown
  Description of Unknown: LeftRegion for integrase B2457 sequence
ggctactggctgtaaaatgctggtagccctcattttttagttgtatctagtatataagaggtgtataatagataggaactgaaaacagcctcataaagccctctattttatagagggtaaagaagtctacacctaatatataaaagtggctgtatgaggcacacaggagctcacaggactattacaggagggtaaacaggatggcatacaggaaaataacggatataagagatactattggtatgagagcggtattttat

SEQ ID NO: 15457 - DNA, 260 bp, Unknown
  Description of Unknown: LeftRegion for integrase B2458 sequence
aaagataaaagaacaggaaactctcataaaaaatctacaaacgagagatatggtaaaagggaaatataagaaatcggatgagctgacggaacaaatggcggagttccttgtaaaggcaacagtaaaagactggacgattacattcgagttccaaaatggatataaggcaacgaaagaatatacaaacgggagggcaggaaatgtcaatggaaaactgtgcaaacactaaacccaaaattacgattattccagcgaaaaca

SEQ ID NO: 15458 - DNA, 260 bp, Unknown
  Description of Unknown: LeftRegion for integrase B2459 sequence
aaagataaaagaacaggaaactctcataaaaaatctacaaacgagagatatggtaaaagggaaatataagaaatcggataagctgacggaacaaatggcggagttccttgtaaaggcaatagtaaaagaatggactattacattcgagttccaaaatggatataaggcaacgaaagaatatacaaacgggagggcgggaaatgtcaatggaaaactgtgcaaacactaaacccaaaattacgattataccagcgaaaaca

SEQ ID NO: 15459 - DNA, 260 bp, Unknown; identical to SEQ ID NO: 13002
  Description of Unknown: LeftRegion for integrase B2460 sequence

SEQ ID NO: 15460 - DNA, 260 bp, Unknown; identical to SEQ ID NO: 13002
  Description of Unknown: LeftRegion for integrase B2461 sequence

SEQ ID NO: 15461 - DNA, 260 bp, Unknown
  Description of Unknown: LeftRegion for integrase B2462 sequence
ggctactggctgtaaaatgctggtagccctcattttttagttgtatctagtatataaggggtgtataatagataggaactgaaaacagcctcataaagccctctattttatcgagggtaaagaagtctacacctaatatataaaagtgactgtatgaggcacacaggagctcacaggactattacaggagggtaaacaggatggcatacaggaaaataacggatataaaagatactattggtatgagagcggtattttat

SEQ ID NO: 15462 - DNA, 260 bp, Unknown; identical to SEQ ID NO: 14775
  Description of Unknown: LeftRegion for integrase B2463 sequence

SEQ ID NO: 15463 - DNA, 260 bp, Unknown
  Description of Unknown: LeftRegion for integrase B2464 sequence
aaaagatgctttgtataaaacggaagaaatcagggatattcttgctggccgggaaaagatagtggaattcgacagggaattatacaaaaagctgattcggaagatttatttatgcaacgggaatatggcagaagtagaattcctgaatggtggacgaatgaaggtagggtacacggataaaaagcccggaaaggaggcaaatgggtacaacagctaaaaaggtgtctgtaatacctgcaaaagtacagttcgataccagc

SEQ ID NO: 15464 - DNA, 260 bp, Unknown
  Description of Unknown: LeftRegion for integrase B2465 sequence
ggctactggctgtaaaatgctggtagccctcattttttagttgtatctagtatataaggggtgtataatagatagaaactgaaaaacagcctcataaagccctctattttatcgagggtaaagaagttatacctaatatataaaagtggctgtataaggcacacaggagctcacaggactattacaggagggtaaacaggatggcatacaggaaaataacggatataagagatactattggtatgagagcggtattttat

SEQ ID NO: 15465 - DNA, 260 bp, Unknown
  Description of Unknown: LeftRegion for integrase B2466 sequence
agggctactggctgtaaaatgctggtagccctcattttttagttgtatctagtatataaggggtgtataatagataggaactgaaaacagcctcataaagccctctattttatcgagggtaaaagtctacacctaatatataaaagtggctgtatgaggcacacaggagctcacaggactattacaggagggtaaacaggatggcatacaggaaaataactgatataaaagatactattggtatgagagcggtattttat

SEQ ID NO: 15466 - DNA, 260 bp, Unknown
  Description of Unknown: LeftRegion for integrase B2467 sequence
tattgccatgaaaatagcaatatctgagactgttttgcggaacaacttaatcatattgcttaccatgacaatacacctcctttgtatttattatatcagaggtcggaacaatttaccactaaaatcgttttattgtccttgacaatttaatgaaaatatagtatagaaaatcccgcttcctgaatcaacaggaaacgggaatgccagcagcattggcgtactgcatggccagtgtaaatcttgtgtttgcttgggctgat

SEQ ID NO: 15467 - DNA, 260 bp, Unknown; identical to SEQ ID NO: 14511
  Description of Unknown: LeftRegion for integrase B2468 sequence

SEQ ID NO: 15468 - DNA, 260 bp, Unknown
  Description of Unknown: LeftRegion for integrase B2469 sequence
cgccgcagaaatgtatgcggacattgaccccagagagtacgaaacccagcggctgcgaaggctgtttcaaaaggaagcgccgcgctcagagttggatgcaaatcttatcactatgagcatatccgctgttctggtggacagcaatggaaatgtaaagatcagactgaaaaacgagcagatcgtggaaaggggtgagcaaaatggatgatattcgcaggacagtaacggtcataccggcaaaaccgcagatggatcagcgg

SEQ ID NO: 15469 - DNA, 260 bp, Unknown
  Description of Unknown: LeftRegion for integrase B2470 sequence
ggctactggctgtaaaatgctggtagccctcattttttagttgtatctagtatataaggggtgtataatagataggaactgaaaacagcctcataaagccctctattttatcaagggtaaagaagtctacacctaatatataaaagtggctgtatgaggcacacaggagctcacaggactattacaggagggtaaacaggatggcatacaggaaaataacggatataagagatactattggtatgagagcggtattttat

SEQ ID NO: 15470 - DNA, 260 bp, Unknown; identical to SEQ ID NO: 14186
  Description of Unknown: LeftRegion for integrase B2471 sequence

SEQ ID NO: 15471 - DNA, 260 bp, Unknown; identical to SEQ ID NO: 14046
  Description of Unknown: LeftRegion for integrase B2472 sequence

SEQ ID NO: 15472 - DNA, 260 bp, Unknown
  Description of Unknown: LeftRegion for integrase B2473 sequence
tggaggtcagggatggggagttccggacagaggaggtcaaaaacatccttgcagggaaaaaggaactggaaacatttgatgaaaatttatatagaaaaataatcgcacgcatctgggtgcatggcggaaacatggcagaagtggagcttatcaatgggagccgtgtcacagccgggtacaaggattaggagggagagcagatggcagaaacagcaaaaaagatcagcatgatacctgccaaggtgcagtatgaccggaat

SEQ ID NO: 15473 - DNA, 260 bp, Unknown; identical to SEQ ID NO: 13521
  Description of Unknown: LeftRegion for integrase B2474 sequence

SEQ ID NO: 15474 - DNA, 260 bp, Unknown
  Description of Unknown: LeftRegion for integrase B2475 sequence
taaagccttcgaccgaggccttataactatcactccttccatgaaaatctatgtttctccgataattttggatagccctcaggacgcttttacagcccgctggctggcttctcttgacggaatggttttacccccccccgatttccgccgcgtagagagcttctggagtaccataacgacgaaatttttaggagggtcacatgaatacagtaatttatgctcggtattctgccggcccgagacagaccgaccagagtatc

SEQ ID NO: 15475 - DNA, 260 bp, Unknown; identical to SEQ ID NO: 13002
  Description of Unknown: LeftRegion for integrase B2476 sequence

SEQ ID NO: 15476 - DNA, 260 bp, Unknown; identical to SEQ ID NO: 13552
  Description of Unknown: LeftRegion for integrase B2477 sequence

SEQ ID NO: 15477 - DNA, 260 bp, Unknown; identical to SEQ ID NO: 15448
  Description of Unknown: LeftRegion for integrase B2478 sequence

SEQ ID NO: 15478 - DNA, 260 bp, Unknown; identical to SEQ ID NO: 15271
  Description of Unknown: LeftRegion for integrase B2479 sequence

SEQ ID NO: 15479 - DNA, 260 bp, Unknown; identical to SEQ ID NO: 13548
  Description of Unknown: LeftRegion for integrase B2480 sequence

SEQ ID NO: 15480 - DNA, 260 bp, Unknown
  Description of Unknown: LeftRegion for integrase B2481 sequence
tcattatcagtatctttacaatctttgtctgataaatatgctgctgaattctaaccatccaaatattcgcaagataccaccgaaaataatttatcttgcgaaattcgggtaactatcaacagataagcaaaagaaaggatgaataatctactaaatatctaaataaaaaatcccgtctcctggatcaacaggaaacgggaatgccagcagcattggcgtactgcatggcaagtgtaaatcttgtgtttgcttgggctgat

SEQ ID NO: 15481 - DNA, 260 bp, Unknown
  Description of Unknown: LeftRegion for integrase B2482 sequence
tggaggtcagggatggggagttccgggcagaggagatcaaaaacatccttgcagagaaaaagaaactggaaacatttgatgaaaatttatatagaaaaataatcgcacgcatctgggtgcatggtggaaacatggcagaagtggagcttatcaatgggagccgtgtcacagccgggtacaaggattaggagggagagcagatggcagaaacagcaaaaaagatcagcatgatacctgccaaggtgcagtatgaccggaat

SEQ ID NO: 15482 - DNA, 260 bp, Unknown
  Description of Unknown: LeftRegion for integrase B2483 sequence
tgctttgtagatatggtatctataccgtatctataccgtatccataccgtaccgatacctcgcgtgcgcgcgtgcgtgtgcgcgcgatcgtgcgcgcactgtctctgtacctgtatctgtatctgagactgtatctgtaatctgtttctgattctgaatatctactactgcaaatctatcgttagaagggggtggcgctgttgccgagaaaacctgcaaagcacccggcgaagccgaagcggggcaagaagctggaaatc

SEQ ID NO: 15483 - DNA, 260 bp, Unknown
  Description of Unknown: LeftRegion for integrase B2484 sequence
ttcccctctgttcacattgatagatgcaacaaccatctcttcaatgccatcaatgaaagccccaacgcaactctcaacatcaacggtacagaaggatttacggctcaggagcttgaattgattgacttgtatcggaacttcccgctgagaaagcaaatggaactgctaaactatgctttcagcctgaaagaaggtaagcaatgagagtagttctttacatgaggtatagcagcgaccgtcaaaccgagcaatccatagag

SEQ ID NO: 15484 - DNA, 260 bp, Unknown; identical to SEQ ID NO: 13007
  Description of Unknown: LeftRegion for integrase B2485 sequence

SEQ ID NO: 15485 - DNA, 260 bp, Unknown; identical to SEQ ID NO: 13552
  Description of Unknown: LeftRegion for integrase B2486 sequence

SEQ ID NO: 15486 - DNA, 260 bp, Unknown
  Description of Unknown: LeftRegion for integrase B2487 sequence
ggctactggctgtaaaatgctggtagccctcattttttagttgtatctagtatataaggggtgtataatagataggaactgaaaacagcctcataaagccatctattttatcgagggtaaagaagtctacacctaatatataaaagtgactgtacgaggcacacaggagctcacaggactattacaggagggtaaacaggatggcatacaggaaaataacggatataagagatactattggtatgagagcggtattttat

SEQ ID NO: 15487 - DNA, 260 bp, Unknown; identical to SEQ ID NO: 15384
  Description of Unknown: LeftRegion for integrase B2488 sequence

SEQ ID NO: 15488 - DNA, 260 bp, Unknown
  Description of Unknown: LeftRegion for integrase B2489 sequence
atacggattacacagtagcgcaaaagacaggcccgtctctgccagaggatgtcaccactatgctttctgggcttgacagcgcggacctcgaaaaagttatgatctacgcccgcggtctgctggacggggacaagtatcagaaacgccgtccgcggtaaagcaggaagtgcttctggcaatgaaatagaaaggggcagacaatgagagtatccgtaaacttaaacgcacaaaagccggataccacgacaaacgccgtcatt

SEQ ID NO: 15489 - DNA, 260 bp, Unknown
  Description of Unknown: LeftRegion for integrase B2490 sequence
aggactcttatgaatacaaaaaagacgatggagggacaggcaagatacataaagaaaactcgggaatgtataagattattttgccagacgaacttccatctgcagaaaccataccagagccgctgtatgggtatattgtaaagtggcttgctgccaaagctgaagcttataaatgaaaagcgatttatgaggtctattctatggcacgttccacaaagaaaactgaatgcttgccgcttgagcggattggcgtaatctat

SEQ ID NO: 15490 - DNA, 260 bp, Unknown; identical to SEQ ID NO: 13005
  Description of Unknown: LeftRegion for integrase B2491 sequence

SEQ ID NO: 15491 - DNA, 260 bp, Unknown; identical to SEQ ID NO: 14511
  Description of Unknown: LeftRegion for integrase B2492 sequence

SEQ ID NO: 15492 - DNA, 260 bp, Unknown; identical to SEQ ID NO: 14511
  Description of Unknown: LeftRegion for integrase B2493 sequence

SEQ ID NO: 15493 - DNA, 260 bp, Unknown
  Description of Unknown: LeftRegion for integrase B2494 sequence
taccaattggctataaagttgaactagcaaaggcagctaaaagcaaaatattaaaattaaaagaaaatgatgatgtagaaaaacagaatatttggttagctattttcaatcaaattaatcactaataaaatttgcagctctttcggagctgcaaattttgacctactatatacaaacatacgtttaaggagagatcgccaatgccagtagctgtctattgtcgtgtcagctctgaagaacaagctgaacgtggagcaatc

SEQ ID NO: 15494 - DNA, 260 bp, Unknown
  Description of Unknown: LeftRegion for integrase B2495 sequence
atttcagaggatttaaaaaaagagttccaggaagtgtacaaaagaggaatatacaaagaactccataagagaaacttcttatcagataaacaattaaacgaattacttaaatcaaaataaaaagtaagttgttcagcacaccgtttagtggtataataaatatcattattgcggtgtgctattttttttggaggtagcacatgaagaaattaaaagtagcagcatatgcgagggtatcaacagacaaagatgatcaagcc

SEQ ID NO: 15495 - DNA, 260 bp, Unknown
  Description of Unknown: LeftRegion for integrase B2496 sequence
gattgcgtagaagcaggcattaaagaaataaatgacgaggagagattgcctgcgcagacggtacttagaagacaagcgtcaaatggctgttaggtaaccatgcatttccgtgagcagagagacgagaaaattgaaagtagcgtagcggacatgtagttggcagtctttcagagaatgcataacaagggggaaaagctgttatgaaaagagttatttgtctgtacagagtatcgacgaaaggacaggtcgataaggatgat

SEQ ID NO: 15496 - DNA, 260 bp, Unknown
  Description of Unknown: LeftRegion for integrase B2497 sequence
ccagctttacagagagacaaacgcaaaggagcaaatcgccgcccgcatcgctcagaagcgggtcatgctcatgaaccctcaaacagagttcaactcagtctacttcaccgatcttgttgagaatgtgatcctcgaggctcccgccagagtgtcccttctcacaaagaccgatgttcaaataagcgaaggagaacccgatcatggaagtcaagaaaataccgaagaagacggtgacgctgattgagccgaagcggtcaatc

SEQ ID NO: 15497 - DNA, 260 bp, Unknown
  Description of Unknown: LeftRegion for integrase B2498 sequence
taccaattggctataaagttgaactagcaaaggcagctaaaagcaaaatattaaaattaaaagaaaatgatgatatagaaaaacagaatatttggttagacattttcaatcaaattaatcactaataaaatttgcagctccgaaagagctgcaaattttaacttactctatacaaacatacgtttaaggagagattgccaatgccagtagctgtttattgtcgtgtcagctctgaagaacaagctgaacgtggaacaatc

SEQ ID NO: 15498 - DNA, 260 bp, Unknown
  Description of Unknown: LeftRegion for integrase B2499 sequence
tcagcattcctaatatgcaaatacttcgagttgagtataccacacaaaaactatccagctgagtctttttacagcacgatgaaaaaaacaagtcaagagtccacaccaataagtgtttggaagtaataatttgcagcccttaataggctgcaaattttagcccactctatgcaaacatatgttcaaaaggagtgttatatatgcctgtagccgtatattgccgtgtcagctcagaagaacaagctgaacgtggaacaatc

SEQ ID NO: 15499 - DNA, 260 bp, Unknown; identical to SEQ ID NO: 13018
  Description of Unknown: LeftRegion for integrase B2500 sequence

SEQ ID NO: 15500 - DNA, 260 bp, Unknown
  Description of Unknown: LeftRegion for integrase B2501 sequence
ggatttatatatctattctgttgatggagctaaagcgaaagggtatgaaccatgtagcgtttgtcatccatctaaaagcccctactccgcagcccaacaagatgggtacactgcacaagatatagcagacatactttcgtctaattatcctcaatgaatttctaaattttttcggtaccatacccaaggaggagtaataaatgtctttttcgccccctcgcaaagctgctctttatgcaaggttctctactgagcatcaa

SEQ ID NO: 15501 - DNA, 260 bp, Unknown
  Description of Unknown: LeftRegion for integrase B2502 sequence
attggtgttttggttgcgtgcagcaatccaatgcagaagaaaatcgatcaggccaaagctctaaatattccggtcatttcagaacagcagtggtttgagcttatgccagagctggaagcactcggaatgtggaacggaaagccaattccgtttgcagatgataatggaatttaccatattgatgtgggcggtgatggttgatggcccgaaaaaagaatattgctgctggcctcgatgccgtcatctatgcccgctattcc

SEQ ID NO: 15502 - DNA, 260 bp, Unknown
  Description of Unknown: LeftRegion for integrase B2503 sequence
gcggtaaaattgccggtgatgcacgtaaggcgctggagaaaaaaaccgggcgtacagttatatcaaaaaccaattataaagaacttcaagaaaaagacgttagaaaacaactaaaagaaacagacaaataaaaagcagcccacatgggctgcaaattttagcctgctctatacaaacatacgtttaaggagagattgccaatgccagtagctgtttattgtcgtgtcagttctgaagaacaagctgaacgtggaacaatc

SEQ ID NO: 15503 - DNA, 260 bp, Unknown; identical to SEQ ID NO: 15498
  Description of Unknown: LeftRegion for integrase B2504 sequence

SEQ ID NO: 15504 - DNA, 260 bp, Unknown
  Description of Unknown: LeftRegion for integrase B2505 sequence
cctgcatcccggcaccgaaatcattaagacctatcttggcaggcaatataaggttatcatagctgagattaacgattttatctatgaaaggcagcattataaaaccttatcggccatcgctaaagaaatctgcggcataaaggtctccggttatgacttcttcggattaaataacaaacgggcattaaaggaggcgattcatggctaaagtaaactgcgcgatctatgtccgcaaatctaccgaaaaaggcttggagctt

SEQ ID NO: 15505 - DNA, 260 bp, Unknown; identical to SEQ ID NO: 13821
  Description of Unknown: LeftRegion for integrase B2506 sequence

SEQ ID NO: 15506 - DNA, 260 bp, Unknown
  Description of Unknown: LeftRegion for integrase B2507 sequence
taccaattggctataaagttgaactagcaaaggcagctaaaagcaaaatattaaaattaaaagaaaatgatgatgtagaaaaacagaatatttggttagacattttcaatcaaattaataactaataaaatttgcagctccgaaagagctgtaaattttaacttaatctatgcaaacatatgtttaaggagagattgccaatgccagtagctgtttattgtcgtgtcagctctgaagaacaagctgaacgtggaacaatc

SEQ ID NO: 15507 - DNA, 260 bp, Unknown; identical to SEQ ID NO: 13442
  Description of Unknown: LeftRegion for integrase B2508 sequence

SEQ ID NO: 15508 - DNA, 260 bp, Unknown
  Description of Unknown: LeftRegion for integrase B2509 sequence
gatggcagcgctcatgtacgagcagagcaatgccaagttgaacctcacagtatcgctcgcaagaaagctggcacaaacgatggtcacgcaggatgaattcaatcgagattactttaccgccctcgcctcatacatcacactcggtgaacaaggcaaggtggtacttcatactaagacagaaacggaggttacgctggacgatggaagtagcgaaaattcctaaaaaaatcgtcactgtcatagagccaaaacgctccatg

SEQ ID NO: 15509 - DNA, 260 bp, Unknown
  Description of Unknown: LeftRegion for integrase B2510 sequence
atccgacagttttttgactttggcaaagatgtccgaccattcgctcgtagtcatacggcatggctcctttctcaaatttactgtcggcagcaactgaattatatcaaatacgcacccgcttttcagggattcgtagaattataccgaaaatcggaaaaatattgcgaattttgaagaagataatcgtgaggtgatggttgatggcccgaaaaaagaatattgctgcgggtcagaatgccgtcatttatgcccgctattcc

SEQ ID NO: 15510 - DNA, 260 bp, Unknown
  Description of Unknown: LeftRegion for integrase B2511 sequence
gcggttcgggcgttacccaagaaacgaatctgctgatccttggtaataacgattattgcaaagcgataaaaggcggcaaaagcagtaaacaaaaaaaggcggaagcatataaactcaaggggtatgacattgacataattcccgagagcgttttccgcgacatgataaatatctgaggataaccccgaaaggatcccgccatgagccttgcgtcaagaaccgtcaccgtcccggatgaaaaccggctgaacgccgtgata

SEQ ID NO: 15511 - DNA, 260 bp, Unknown; identical to SEQ ID NO: 13421
  Description of Unknown: LeftRegion for integrase B2512 sequence

SEQ ID NO: 15512 - DNA, 260 bp, Unknown; identical to SEQ ID NO: 13377
  Description of Unknown: LeftRegion for integrase B2513 sequence

SEQ ID NO: 15513 - DNA, 260 bp, Unknown
  Description of Unknown: LeftRegion for integrase B2514 sequence
gcagccaatcatgtaaaacagatacttctgtcctcattcgcggcgaacacgccgaaactccaatcccttggcatccttgcaatacccattgcgcgaagatatgataatggagggaaacccaatgaaccttgaaaacttcatattgacgcatggattcacgctctcaatttttatgaattgagaaaggatggatcgatacaatggaaaatacttttatggattttacggaaatgattcgcgtcgattgcctgtaccgtgtg

SEQ ID NO: 15514 - DNA, 260 bp, Unknown
  Description of Unknown: LeftRegion for integrase B2515 sequence
gatggcagcgctcatgtacgagcagagcaatgccaagttgaacctcacagtatcgctcgcaagaaagctggcacaaacgatggtcacgcaggatgaattcaatcgagattactttaccgccctcgcctcatacatcacactcggtgaacaaggcaaggtggtacttcatactaagacagaaacggaggttacgctggacgatggaagtaacgaaagttcctaaaaaaatcgtcactgtcatagagccaaaacgctccatg

SEQ ID NO: 15515 - DNA, 159 bp, Unknown
  Description of Unknown: LeftRegion for integrase B2516 sequence
tatcaaatatgcacccgcttttcagggattcgtagaattataccgaaaatcggaaaaatattgcgaattttgaagaagataatcgtgaggtgatggttgatggcccgaaaaaagaatattgctgcgggtcagaatgccgtcatttatgcccgctattcc

SEQ ID NO: 15516 - DNA, 260 bp, Unknown
  Description of Unknown: LeftRegion for integrase B2517 sequence
cgtatttgtcaatataaatatacgtgttttacgtaatataaattcaaaaggcgcaataaccacaaaaaaacgcccccggtgctaccaacaccgagagcgtttccgaatcagattgccccataaggtgatatggtaacaaccgaccaacagccatattgtaccaccttgcgggcaggattgcaaacccaaaaggtgataccatgaaaaagaagcaaccaaatacccgccatggccgggctgcgatctatgcgcgctattct

SEQ ID NO: 15517 - DNA, 260 bp, Unknown
  Description of Unknown: LeftRegion for integrase B2518 sequence
gatggcagcgctcatgtacgagcaaaacaacgccaagttgaacctcacagtatcactcgtaagaaaactggcacatacgatggtcacgcaggatgaattcaatcgagattactttaccgcccttgcctcatacatcacgctcggcgaacaaggcaaggtggtacttcatactaagacagaaacggaggtcacgctggacgatggaagtaacgaaagtccctaagaaaatcgtcactgtcatagagccaaaacgctccatg

SEQ ID NO: 15518 - DNA, 260 bp, Unknown; identical to SEQ ID NO: 13421
  Description of Unknown: LeftRegion for integrase B2519 sequence

SEQ ID NO: 15519 - DNA, 260 bp, Unknown
  Description of Unknown: LeftRegion for integrase B2520 sequence
tatcagcattcctaatatgcaaatacttcgaattaagtataccacacaaaaactatccaactgagtcttttttcagcacaatgaaaaagacaagtcaagagtccacccccataagtatttggaagtaataatttgcagcccacatgggctgcaaattttaccccactctatacaaacatacgttttaggagagatgcaaaatgtcagtcgctgtatattgccgtgtcagctctgaagaacaagctgaacgtggaacaatc

SEQ ID NO: 15520 - DNA, 260 bp, Unknown
  Description of Unknown: LeftRegion for integrase B2521 sequence
gatggcagcgctgatgtacgagcaaagcaatgccaagttgaacctcacagtatcgctcgcaaggaaactggcacatacgatggtcacgcaggatgaattcaatcgagattactttaccgccctcgcctcatacatcacgctcggcgaacaaggcagagtggtgcttcatactaagacagaaacggaggtcacgctggacgatggaagtaacgaaagtccctaagaaaattgtcactgtcatagagccgaaacgctccatg

SEQ ID NO: 15521 - DNA, 260 bp, Unknown; identical to SEQ ID NO: 13495
  Description of Unknown: LeftRegion for integrase B2522 sequence

SEQ ID NO: 15522 - DNA, 260 bp, Unknown; identical to SEQ ID NO: 13018
  Description of Unknown: LeftRegion for integrase B2523 sequence

SEQ ID NO: 15523 - DNA, 260 bp, Unknown
  Description of Unknown: LeftRegion for integrase B2524 sequence
gatggcagcgctcatgtacgagcaaaacaacgccaagttgaacctcacagtatcactcgcaagaaaactggcacaaacgatggtcacgcaggatgaattcaatcgagattactttaccgccctcgcctcatacatcacactcggtgaacaaggcaaggtggtacttcatactaagacagaaacggaggttacgctggacgatggaagtaacgaaagttcctaaaaaaatcgtcactgtcatagagccaaaacgctccatg

SEQ ID NO: 15524 - DNA, 260 bp, Unknown
  Description of Unknown: LeftRegion for integrase B2525 sequence
tcagcattcctaatatgcaaatacttcgagttgagtataccacacaaaaactatccagctgagtctttttacagcacgatgaaaaaaacaagtcaagagtccacaccaataagtgtttggaagcaataatttgcagcccttaataggctgcaaattttagcccactctatgcaaacatatgttcaaaaggagtgttatatatgcctgtagccgtatattgccgtgtcagctcagaagaacaagctgaacgtggaacaatc

SEQ ID NO: 15525 - DNA, 260 bp, Unknown
  Description of Unknown: LeftRegion for integrase B2526 sequence
tttttgtaatcgtcaaagaataatttagcttgaataccgacaaaaacagcagaaatgcaaacacaaatattagcaattgaagttatccatttactattatctgataaccaacacaaaatataatccattattacatctccatcttttagaaattccaataaatacataataaattataaataaaaggaggcaattttgcaatgttaaaatatttaaaaaacgataatgaaatagttgccgtatactgtcgtgtatcttct

SEQ ID NO: 15526 - DNA, 260 bp, Unknown
  Description of Unknown: LeftRegion for integrase B2527 sequence
gatggcatcgctcatctatgagcagagcagtgccaaacttgaccttgcagtgtctatcgcaaggaaactggcacaaacgatggttactcaggaggagtttaatcaggattactttaccgccctcgctgcatatgtcacccttggagcacagggcagggtcgtacttcatactaaaacagaaacggaggtcgcgttagacgatggaagtaactaaaattccaaagaaaatcgtcactgtcatcgagccaaaacgctctatg

SEQ ID NO: 15527 - DNA, 260 bp, Unknown
  Description of Unknown: LeftRegion for integrase B2528 sequence
gattgaacacgaaattgctaaagagtatggaattaaagttatagaagaataattcacaattcaaaaatattgtgagcatattaaaataataaaacaggaattttaaaaggattgacggtcacaaaagtgtgattgttagtccttatttttttcaattttatatgatataattatttattatgtaaagtgaggtggttattttgagaaaatgtgcatatgtgagggtttctaccgacaaggatgaacaggcagaatctttg

SEQ ID NO: 15528 - DNA, 260 bp, Unknown
  Description of Unknown: LeftRegion for integrase B2529 sequence
tacttttattaaagatttccttttaattttgaacaaagaagagttttacaaggacatgtattataaatacgcaaaaataacagatatgcctattaatataggagatagattcaatcagttctaccaacagctcttctgtcagtaattcctcattaaaaaagaaattaaaaatcccgtctcctggaccaacaggaaacgggatgccagcagcattggcgtactgcatggccagtgtaaatcttgtgtttgcttgggctgat

SEQ ID NO: 15529 - DNA, 260 bp, Unknown; identical to SEQ ID NO: 15240
  Description of Unknown: LeftRegion for integrase B2530 sequence

SEQ ID NO: 15530 - DNA, 260 bp, Unknown; identical to SEQ ID NO: 13018
  Description of Unknown: LeftRegion for integrase B2531 sequence

SEQ ID NO: 15531 - DNA, 260 bp, Unknown
  Description of Unknown: LeftRegion for integrase B2532 sequence
ccaaagatacaactactcgtccctatcgttataaattaaatcctatattcctaaaaaattaaaaaagccctacatccataggtacaatttgtctctatggatgcttacaattaaaaggaacaaacaaataaaaagcagcccacatgggctgcaaattttaacctactctatacaaacatacgtttaaggagagattgccaatgccagtagctgtttattgtcgtgtcagctctgaagaacaagctgaacgtggaacaatc

SEQ ID NO: 15532 - DNA, 260 bp, Unknown
  Description of Unknown: LeftRegion for integrase B2533 sequence
acggaattccaaaagtagaaaaaacttccgaatcgcttttggattcggaattctatgagtcggcaagccatttaatatatgagattataaaaaattagtatataaggctgtcaatcaaccctgttttttgacagcctttaaatcccaaaaggaaggagaatatttattatggacggaaaaaaataacagccgcttgctatatgagatacagttcacacgcacaggatgacggcttttctattgaagcacaggaaaaggcg

SEQ ID NO: 15533 - DNA, 260 bp, Unknown
  Description of Unknown: LeftRegion for integrase B2534 sequence
tattctgtttatctgattcaccttacccgaaagtagagatttccctaacggaaaaagagaaaatccttattgacgcataccgtgctgctgatgacatgggacagttgaacataatctatgtctgcctggatgaaatgaaaaaagcaaaaggaaacaacgaaagtgccgtgtgattgattttgtagagtggaggaagaaccatgtatgaggatataaaaacagcctgcctatacgttagattctcaagccataaccagact

SEQ ID NO: 15534 - DNA, 260 bp, Unknown
  Description of Unknown: LeftRegion for integrase B2535 sequence
caagccagagcaaacgatatagttggctggaacacagattcaatcgttggggctatccgtacattagtataacaaaaacgccccacagctgcaactgtaaggcgtttccatagatcagcttgcccaaagatggaacaatcgacccgacaatcgtattgtaccaccttgcgggcaggattgcaaacccaaaaggtgataccatgaaaaagaaacaaccaaatgcccgccatggccgggcggcagtttacgcccggtattca

SEQ ID NO: 15535 - DNA, 260 bp, Unknown; identical to SEQ ID NO: 13821
  Description of Unknown: LeftRegion for integrase B2536 sequence

SEQ ID NO: 15536 - DNA, 260 bp, Unknown
  Description of Unknown: LeftRegion for integrase B2537 sequence
tcgtatatgccgctattccagagagaacttgatatatcctccgaatggttggaaaactcatacacatacacgccaagaccatataagccttcaaagcgcgccctccaaatggaagtggacatcaaagaaactgctcacaagtacataacaaacgaaaaagccctcctgctggacgcagaagggcgtaacgggtaacagatatgtcagtagatattaaatggcaggtgccaaaggcacagccggaggccagcgaactggcc

SEQ ID NO: 15537 - DNA, 260 bp, Unknown
  Description of Unknown: LeftRegion for integrase B2538 sequence
atccgacagttttttgattttggcaaagatatccgaccattcgctcgtagtcatacggcatggctcctttctcaaatttactgtcggcagcaactgaattatatcaaatacgcacccgcttttcagggattcgtagaattataccgaaaatcggaaaaatattgcgaattttgaagaagataatcgtgaggtgatggttgatggcccgaaaaaagaatatcgctgcgggtcaagatgccgtcatttacgcccgctactct

SEQ ID NO: 15538 - DNA, 260 bp, Unknown
  Description of Unknown: LeftRegion for integrase B2539 sequence
tctttccatgcgtcgcctgcccttacagcatagcacgctttttggatatgggcaagcaaaaaccccggcactggtacgatgcagcgccggggaaacatggagtgcagcacaaaaccggacaaagagaattttatgcttgcaggggtcagtataccacactccctgcatatgggcaaatcgcccggaaaggaagtgttttcatgccccgcaaaaaagctcctgcggccgaggcgccgcgcctggtggcttactaccgttac

SEQ ID NO: 15539 - DNA, 260 bp, Unknown
  Description of Unknown: LeftRegion for integrase B2540 sequence
tgcgcattgattggtcttgcaatcactgttttaggtgctgcaatcgtcggtgttccaattgctatattgggcgctttgcttgccgtaggtgcaaggggaaggaaatagaaaaccctgcgcggcttcttggcagtcggcgcgcagggcaagtgcaaagaacgaagcgcattagcgcactcgctctaaggggtgattttagcatggtgaagaacagagcagccatatacgcgcgcttcagctcgcacaatcagcgctctgag

SEQ ID NO: 15540 - DNA, 260 bp, Unknown
  Description of Unknown: LeftRegion for integrase B2541 sequence
aacgatagaaatatctatgaatataaattacagtattttgccaataaaacacggaaagaaacagaattacttttttgtagtaacaacactataatccagccatttggaaatgtagaatttcctatataaatatgcagctccaaaagagctgcatatttcaccttactctatacaaacatacgttttaggagagatgagaaatgtcagttgctgtttactgtcgtgtcagttctgaagaacaagctgaacgtggaacaatc

SEQ ID NO: 15541 - DNA, 260 bp, Unknown
  Description of Unknown: LeftRegion for integrase B2542 sequence
tgttctgtttatccgattcaccttacccaaaagtagagatttccctaacagaaaaagagaaaatccttattgacgcataccgtgctgctaatgacatgggacagttgaacataatctatgtctgcctggatgaaatgaaaaaagcaaaaggggacaacgaaagtgccgtgtgattgattttgtagagtggaggaagaaccatgtatgaggatataaaaacagcctgcctatatgtcagattctcaagccataaccagact

SEQ ID NO: 15542 - DNA, 260 bp, Unknown; identical to SEQ ID NO: 14174
  Description of Unknown: LeftRegion for integrase B2543 sequence

SEQ ID NO: 15543 - DNA, 260 bp, Unknown; identical to SEQ ID NO: 13018
  Description of Unknown: LeftRegion for integrase B2544 sequence

SEQ ID NO: 15544 - DNA, 260 bp, Unknown
  Description of Unknown: LeftRegion for integrase B2545 sequence
acaggtcttttgattgtgtgcagcgactcaatgcaaaagaaaatcgacagagcggatgccctgaatattccaatcgtttcggagcagcaatggtttgaactcatgccggaacttgaggccgctggaatgtggaacggaaagccaatttcattcgcggatgacgatggtatctaccgttttgatgtgggtggtgatggataatggcaaaaaagaagaagcccgccgggggcattgccgtcatctatgcccgctactcatcc

SEQ ID NO: 15545 - DNA, 260 bp, Unknown
  Description of Unknown: LeftRegion for integrase B2546 sequence
gatggcatcgctcatgtatgaacaaagcagtgccaaactagaccttgcagtatcaatcgcaaagaaactggcacaatcgatggtcactcaggatgaatttaatccggattacttctctgccctcgttgcgtatatcacccttggggcacagggcagggtcgtactccataccaaaaccgaaacggaggtcacgatggacgatggaagtaactaagattccaaaaaaaattgtcactgtcattgagccaaaacgctctatg

SEQ ID NO: 15546 - DNA, 260 bp, Unknown
  Description of Unknown: LeftRegion for integrase B2547 sequence
tatttcagaggatttaaaaaaagagttccaggaagtatacaaaagaggagtatacaaagaactccataagagaaacttcttatcagataaacaattaaacgaattacttaaatcaaaataaaaagtaagttgttcagcacactgtttagtggtataataaatatcattattgcgctgtgctatttttttggaggtagcacatgaagaaattaaaagtagcagcatatgcgagggtatcaacagacaaggatgatcaaatc

SEQ ID NO: 15547 - DNA, 260 bp, Unknown
  Description of Unknown: LeftRegion for integrase B2548 sequence
gattgcgtagaagcaggcattaaagaaataaatgacgaggagagattgcctgcgcagacgatacttagaagacaagcgtcaaatggctgttaggtaaccatgcatttccgtgagcagagagacgagaaaattgaaagtagcgtagcggacatgtagttggcagtctttcagagaatgcataacaagggggaaaagctgttatgaaaagagttatttgtctgtacagagtatcgacgaaaggacaggtcgataaggatgat

SEQ ID NO: 15548 - DNA, 260 bp, Unknown
  Description of Unknown: LeftRegion for integrase B2549 sequence
aaaatagattcgaatctctaaaggctattctcccctattgtgacgaagctgtcttttttgataacgacaacggctttgcagaaatcgccgagtacaaaaatggagaattaattttaaaaggttctgaacatcctgaatggattaaagagtttcacgaatacattacaaaataaaaaaacgcctaaaacggaggtatatttgtgagcaagcataaattagcggtggtttatgcccgttattcaagtcatagacaaggagaa

SEQ ID NO: 15549 - DNA, 260 bp, Unknown; identical to SEQ ID NO: 15194
  Description of Unknown: LeftRegion for integrase B2550 sequence

SEQ ID NO: 15550 - DNA, 260 bp, Unknown
  Description of Unknown: LeftRegion for integrase B2551 sequence
cctgaccgccaacgtccaaaagcgggaggaggaaatgtccgccgaggctgactcctcatcccctgccccaaagcagcatccgggaaaagaaaaggtaggctgatcttctggcgccgccttttcacctgatgttcacttgaacaccaaaagccccggcaggcacacacccgccggggcttactttataaagggaatttcttatgaagaatgaacgcaccatgctccccgccgtcgcttactatcgctactcgccgggcggc

SEQ ID NO: 15551 - DNA, 260 bp, Unknown
  Description of Unknown: LeftRegion for integrase B2552 sequence
taccaattggctataaagttgaactagcaaaggcagctaaaagcaaaatattaaaattaaaagaaaatgatgatgtagaaaaacagaatatttggttagctattttcaatcaaattaatcactaataaaatttgcagctctttcggagctgcaaattttgacctactatatacaaacatacgtttaaggagagatcgccaatgccagtagctgtctattgtcgtgtcagctctgaagaacaagctgaacgtggaacaatc

SEQ ID NO: 15552 - DNA, 260 bp, Unknown; identical to SEQ ID NO: 15498
  Description of Unknown: LeftRegion for integrase B2553 sequence

SEQ ID NO: 15553 - DNA, 260 bp, Unknown; identical to SEQ ID NO: 14669
  Description of Unknown: LeftRegion for integrase B2554 sequence

SEQ ID NO: 15554 - DNA, 260 bp, Unknown
  Description of Unknown: LeftRegion for integrase B2555 sequence
cattgtacaatctggcgaaaaatctgactgcacaatcgcacgacaataattatgcggtattgccttgcaaaaaaattatccatacagaaaagtacggaaagcgagaatattgtaccttaaaaagacttgcaaagcgcgggcagctgatgtataataaagatgtcgaataatcggttgtccatgtttgaaggaggtttataatggcaggacaacccaagtacaatacagcattatatcttcgtttatcaaaggacgacggc

SEQ ID NO: 15555 - DNA, 260 bp, Unknown; identical to SEQ ID NO: 15540
  Description of Unknown: LeftRegion for integrase B2556 sequence

SEQ ID NO: 15556 - DNA, 260 bp, Unknown; identical to SEQ ID NO: 13967
  Description of Unknown: LeftRegion for integrase B2557 sequence

SEQ ID NO: 15557 - DNA, 260 bp, Unknown
  Description of Unknown: LeftRegion for integrase B2558 sequence
tattctgtttatctgattcaccttacccgaaagtagagatttccctaactgaaaaagagaaaatccttattgacgcataccgtgctgctgatgacatgggacagttgaacataatctatgtctgcctggatgaaatgaaaaaagcaaaaggggacaacgaaagtgccgtgtgattgattttgtagagtggaggaagaaccatgtatgaggatataaaaacagcctgcctatatgtcagattctcaagccataaccagact

SEQ ID NO: 15558 - DNA, 260 bp, Unknown
  Description of Unknown: LeftRegion for integrase B2559 sequence
ccgcatgatgagcctgccgagtcttccgatgccgaaaaactccgcactgagaacgcggcccttcgcgcgcagcttgcccagcagcagaaatccctgcgtatgcaccggcttgtgacgctcatcctcttgggcattctttcgctgtgtgcccttgtgcttgtggccgatgtgctcatcccatcaatcggctggattcgcacatgaaaattaccgccccggcccgatcagccagagcggtatctttggaggcttttgtggat

SEQ ID NO: 15559 - DNA, 260 bp, Unknown
  Description of Unknown: LeftRegion for integrase B2560 sequence
atttatatgcttataggcgtatgcagcattcttttgtgcgccgttgtatggtacgtcatatttgacattcagatagataccgccggtattttccgctcggctgggacaagcatttttgcgggcgtcctcgccctgatactgaacgcctccgtcgcaaccatcatttacgcgttcaaaagcattcacaagtggagaaagaaatgagactgacacacggagcgtacattcttgctcgcttctcaaccgacaatcaagaggtg

SEQ ID NO: 15560 - DNA, 260 bp, Unknown
  Description of Unknown: LeftRegion for integrase B2561 sequence
gagcctgccgagcctgctgatactgccgatgctgaaaaactccgcgccgagaccgcggcgcttcgtgcgcagcttgcccagcagcagaagtccctgcgcatgcaccggcttgtgacgctcatcctcttgggtattcttttgctgtgtgcccttgcgcttgtggccgacgtgctcatcccatcgatcggctggattcgcgcatgaaaattaccgccccggcccgatcagccggagcggtatctttggaggcttttgtggat

SEQ ID NO: 15561 - DNA, 260 bp, Unknown
  Description of Unknown: LeftRegion for integrase B2562 sequence
accttgtaagagatgctactaaaatagtaaagctccgcaggctacattttgaccagaacaaaataaaaaaaaacgcccccggtgttggcgcaccgagagcgttttcatagatcagcttgcccacaaaagtggatacaatcgacccgacaatcgtattgtaacaccttgcgggcaggattgcaaacccaaaaggtgataccatgaaaaagaagcaaccaaatgcccgccatggccgggcggcgatttacgcccggtattcg

SEQ ID NO: 15562 - DNA, 260 bp, Unknown
  Description of Unknown: LeftRegion for integrase B2563 sequence
atttatatgctcataggcgtatgcagtattcttttgtgcgccgttgtatggtacgtcatatttgacatccaggtagagaccgccggtattttccgctcagctgggacaagcatttttgcgggcgttctcgccctgatactgaacgcctccgtcgcaaccatcatttacgcgttcaaaagcatccgcaaagggagaaagaaatgagactgacacacggagcgtacattcttgctcgcttctcaaccgacaatcaagaggtg

SEQ ID NO: 15563 - DNA, 260 bp, Unknown
  Description of Unknown: LeftRegion for integrase B2564 sequence
tggatatactaatgagcggattgtacaacatcctcgacgatcaaaagcgccgcgagctttccgctgccatgaccacacttgtggagaggcagcgagaaagagaggaggcggagagcgcggaaaaggatgcagacaaagaccaagagcccacagagacgaccgacaagcaggcaagtgcatcggcagtgtaaggcgctgtaatgcgcctaaaacaacaggagccccgccgatgtgataccggtggggctcttgaatactat

SEQ ID NO: 15564 - DNA, 260 bp, Unknown; identical to SEQ ID NO: 13442
  Description of Unknown: LeftRegion for integrase B2565 sequence

SEQ ID NO: 15565 - DNA, 260 bp, Unknown
  Description of Unknown: LeftRegion for integrase B2566 sequence
gatatctcaattgcacgcatggaaaaccagatcaatcaggagctatccagaccggtgctggaaccggagcgcctccaggacatgatcttccaactggccataaagaaatatgaagcgatacggagcaataattccatacagagcaatcaagtggacgcggacagcgtccattttgatatttgaaaaaggagcgaacgaaaatggcaaaaccagtacgagtcattcccgccaagcccaaagcggagcttgaaagagagctg

SEQ ID NO: 15566 - DNA, 260 bp, Unknown
  Description of Unknown: LeftRegion for integrase B2567 sequence
ccgcatgacgagcctgccgagccttccgattctgaaaaactcctcgccgagactgcggcgcttcgtgcgcagcttgcccagcagcagaagtccctgcgcatgcaccggcttgtgacgctcatcctcttgggtattcttttgctgtgtgcccttgcgcttgtggccgacgtgctcatcccatcgatcggctggatccgcacatgaaaattaccgccccggcccgatcagccagagcggtatctttggaggcttttgtggat

SEQ ID NO: 15567 - DNA, 260 bp, Unknown
  Description of Unknown: LeftRegion for integrase B2568 sequence
atttatatgcttatcggcgtttgcagtattcttttatgtgccgttgtatggtacgtcatatttgacatccaggtagagaccgccggtattttccgctcggctgggacaagcatttttgcgggcgtcctcgccctgatactgaacgcctccgtcgcaaccatcatttacgcgttcaaaagcatccgcaaagggagaaagaaatgagactgacacacggagcgtacattcttgctcgcttctcaaccgacaatcaagaggtg

SEQ ID NO: 15568 - DNA, 260 bp, Unknown
  Description of Unknown: LeftRegion for integrase B2569 sequence
gagcctgccgagcctgccgagccttccgattctgaaaaactccgcgccgagaacgcggcccttcgtgcgcagcttgcccagcagcagaaatccctgcgtatgcaccggcttgtgacgctcatcctcttgggcattctttcgctgtgtgcccttgtgcttgtggccgatgtgctcatcccatcaatcggctggattcgcacatgaaaattaccgccccggcccgatcagccagagcggtatctttggaggcttttgtggat

SEQ ID NO: 15569 - DNA, 260 bp, Unknown
  Description of Unknown: LeftRegion for integrase B2570 sequence
accagcaaagaagtcaccgaggcagactacacggtgatcagcgaatatgatcccgaaaaagtaaagaaattcgtcacgaaggtcattgtgctaaaaggcacggtgaccttcgtgttctataacggcgtggagatcacgctggaatacagcaacggcgctccgggcaacaagcccggctggaacgtaaaggaggcataaccatggcaccggcattacgaagagtagtacgcaccatgccgcagatcgcggtcgtgcagatc

SEQ ID NO: 15570 - DNA, 260 bp, Unknown
  Description of Unknown: LeftRegion for integrase B2571 sequence
atttatatgctcataggcgtatgcagcattcttttgtgcgccgttgtatggtacgtcatatttgacattcaggtagagaccgccggtattttccgctcggctgggacaagcatttttgcgggcgtcctcgccctgatactgaacgcctccgtcgcaaccatcatttacgcgttcaaaagcatccgcaaagggagaaagaaatgagactgacacacggagcgtacattctcgcgcgcttctcaaccgacaatcaagaggtg

SEQ ID NO: 15571 - DNA, 260 bp, Unknown
  Description of Unknown: LeftRegion for integrase B2572 sequence
cttgtgtaaaaacaaaaattgaaattacaaaacattttcccgataaaggcaaaacgctgctagaggttgttgaagaattagcaattaaaatcgcaatgaaagaaaatgattttacagattcaccgacttgaaagaagcctgcatatatggtaaaattttccataggaaatgcaggcttttctaaaaaaggagggtagaggatggaaaagcctatatctgctttaaatgtcgtaagagcgggcctttatatgcgattgagt

SEQ ID NO: 15572 - DNA, 260 bp, Unknown; identical to SEQ ID NO: 13476
  Description of Unknown: LeftRegion for integrase B2573 sequence

SEQ ID NO: 15573 - DNA, 260 bp, Unknown
  Description of Unknown: LeftRegion for integrase B2574 sequence
atttatatgcttatcggcgtttgcagtattcttttgtgcgccgttgtatggtacgtcatatttgacatccaggtagagaccgccggtattttccgctcggctgggacaagcatttttgcgggcgtcctcgccctgatactgaacgcctccgtcgcaaccatcatttacgccttcaaaagcattcacaaagggagaaagaaatgagactgacacacggagcgtacattcttgctcgcttctcaaccgacaatcaagaagtg

SEQ ID NO: 15574 - DNA, 260 bp, Unknown
  Description of Unknown: LeftRegion for integrase B2575 sequence
ccgcctgccgagcctgccgagccttccgatgctgaaaaactccgcgccgagaacgcggcccttcgcgcgcagcttgcccagcagcagaagtccctgcgcatgcaccggcttgttacgctcatcctcttgggcattctttcgctgtgtgcccttgtgcttgtggccgatgtgctcatcccatcaatcggctggattcgcacatgaaaattaccgccccggcccgatcagccagagcggtatctttggaggcttttgtggat

SEQ ID NO: 15575 - DNA, 260 bp, Unknown; identical to SEQ ID NO: 15317
  Description of Unknown: LeftRegion for integrase B2576 sequence

SEQ ID NO: 15576 - DNA, 260 bp, Unknown; identical to SEQ ID NO: 15317
  Description of Unknown: LeftRegion for integrase B2577 sequence

SEQ ID NO: 15577 - DNA, 260 bp, Unknown
  Description of Unknown: LeftRegion for integrase B2578 sequence
ccgcatgacgagcctgccgagacttccgatgctgaaaaactccgtgccgagaccgcagcgcttcgcgcgcagcttgcccagcagcagaaatccctgcgcatgcaccggcttgtgacgctcatcctcttgggtattcttttgctgtgcgcccttgcgcttgtggccgacgtgctcatcccatcgatcggctggatccgcacatgaaaattaccgccccggcccgatcagccggagcggtatctttggaggcttttgtggat

SEQ ID NO: 15578 - DNA, 260 bp, Unknown; identical to SEQ ID NO: 15566
  Description of Unknown: LeftRegion for integrase B2579 sequence

SEQ ID NO: 15579 - DNA, 260 bp, Unknown; identical to SEQ ID NO: 15577
  Description of Unknown: LeftRegion for integrase B2580 sequence

SEQ ID NO: 15580 - DNA, 260 bp, Unknown
  Description of Unknown: LeftRegion for integrase B2581 sequence
atttatatgctcatcggcgtatgcagtattcttttatgtgccgttgtgtggtacgtcatttttgacattcaggtagagaccgccgggattttccgctcggcggggacaagcgtttttgcgggcgtcctcgccctgatactgaacgcagccgtcgcaactatcatttacgcgttcaaaagcatccgcaaagggagaaagaaatgagactgacacacggagcgtacattcttgcgcgcttctcaaccgacaaccaggaggta

SEQ ID NO: 15581 - DNA, 260 bp, Unknown
  Description of Unknown: LeftRegion for integrase B2582 sequence
gagcctgccgagcctgccgagccttccgatgctgaaaaactccgcgccgagaacgcggcccttcgcgcgcagcttgcccagcagcagaaatccctgcgtatgcaccggcttgtgacgctcatcctcttgggtattctttcgctgtgtgcccttgtgcttgtggccgatgtgctcatcccatcaatcggctggatccgcacatgaaaattaccgccccggcccgatcagccagagcggtatctttggaggcttttgtggat

SEQ ID NO: 15582 - DNA, 260 bp, Unknown
  Description of Unknown: LeftRegion for integrase B2583 sequence
atttatatgctcataggcgtatgcagtattcttttgtgcgccgttgtatggtacatcatatttgacatccagatagagaccgccggtattttccgctcggctgggacaagcatttttgcgggcgtcctcgccctgatactgaacgccgccgtcgcaaccatcatttacgccttcaaaagcattcacaaggggaaaaagaaatgagactgacacacggagcgtacattctcgcgcgattttcaacagacaaccaagaagtg

SEQ ID NO: 15583 - DNA, 260 bp, Unknown
  Description of Unknown: LeftRegion for integrase B2584 sequence
ccgcctgccgagcctgccgagccttccgatgctgaaaaactccgtgccgagaacgcagcccttcgcgcgcagtttgcccagcagcagaagtccctgcacatgcaccggcttgtgacgctcatcctcttgggtattcttttgctgtgtgcccttgcgcttgtggccgatgtgctcatcccatcgatcggctggatccgcacatgaaaattaccgccccggcccgatcagccggagcggtatctttggaggcttttgtggat

SEQ ID NO: 15584 - DNA, 260 bp, Unknown; identical to SEQ ID NO: 13964
  Description of Unknown: LeftRegion for integrase B2585 sequence

SEQ ID NO: 15585 - DNA, 260 bp, Unknown
  Description of Unknown: LeftRegion for integrase B2586 sequence
atttatatgctcataggcgtatgcagtattcttttatgtgccgttgtttggtacgtcatatttgacatccagatagagaccgccggtattttccgctcggctgggacaagcatttttgcgggcgtcctcgccctgatactgaacgcctccgtcgcaaccatcatttacgccttcaaaagcattcacaaggggaaaaagaaatgagactgactcacggggcgtacattctcgcccggttctctacggacaatcaagaggtg

SEQ ID NO: 15586 - DNA, 260 bp, Unknown
  Description of Unknown: LeftRegion for integrase B2587 sequence
atttatatgctcataggcgtatgcagtattcttttgtgcgccgttgtatggtacgtcatatttgacatccaggtagagaccgccggtattttccgctcggctggaacaagcatttttgcgggcgtcctcgccctgatactgaacgcctccgtcgcaaccatcatttacgccttcaaaagcattcacaaggggaaaaagaaatgagactgacacacggagcgtacattctcgcgcgattttcaacagacaaccaagaagtg

SEQ ID NO: 15587 - DNA, 260 bp, Unknown
  Description of Unknown: LeftRegion for integrase B2588 sequence
gagcctgccgagcctgccgagccttccgatgctgaaaaactccgcgccgagaacgcggcccttcgcgcgcagcttgcccagcagcagaaatccctgcgtatgcaccggcttgtgacgctcatcctcttgggcattctttcgctgtgtgcccttgtgcttgtggccgacgtgctcatcccatcaatcggctggattcgcacatgaaaattaccgccccggcccgatcagccagagcggtatctttggaggcttttgtggat

SEQ ID NO: 15588 - DNA, 253 bp, Unknown
  Description of Unknown: LeftRegion for integrase B2589 sequence
cgatccttcgtccgacgcttatctgactaccgaaaaggacggcaccgttatcatggaaggctttggctcattccctgcttatgctcacaacggcatggttcttgtgcagaccgacaaccttccccaggaagtaatcgacctgttcaatgccatgtaaacctccgcattctctttctgcaaaggtggtatctctatgaaaaaacagccgaccggtggaaaccggcttgttgcctactaccgttactccggcggt

SEQ ID NO: 15589 - DNA, 260 bp, Unknown
  Description of Unknown: LeftRegion for integrase B2590 sequence
atttatatgctcataggcgtatgcagcattcttttatgcgcggttgtatggtacgtcatatttgacatccaggtagagaccgccggtattttccgctcagctgggacaagcatttttgcgggcgtcctcgccctgatactgaacgcctccgtcgcaaccatcatttacgccttcaaaagcatccgcaaagggagaaagaaatgagactgacacacggagcgtacattctcgcgcgtttctcaaccgacaatcaagaggtg

SEQ ID NO: 15590 - DNA, 260 bp, Unknown
  Description of Unknown: LeftRegion for integrase B2591 sequence
ccgcatgacgagcctgccgagccttccgatgctgaaaaactccgcgccgagaacgcggcgcttcgtgcgcagcttgcccagcagcagaaatccctgcgtatgcaccggcttgtgacgctcatcctcttgggcattctttcgctgtgtgcccttgtgcttgtggccgatgtgctcatcccatcaatcggctggatccgcacatgaaaattaccgccccggcccgatcagccggagcggtatctttggaggcttttgtggat

SEQ ID NO: 15591 - DNA, 260 bp, Unknown; identical to SEQ ID NO: 15566
  Description of Unknown: LeftRegion for integrase B2592 sequence

SEQ ID NO: 15592 - DNA, 260 bp, Unknown; identical to SEQ ID NO: 13552
  Description of Unknown: LeftRegion for integrase B2593 sequence

SEQ ID NO: 15593 - DNA, 260 bp, Unknown
  Description of Unknown: LeftRegion for integrase B2594 sequence
catcatgtaaagcagattttactatcttcctttgccaacaatacggcaaaaaatagctccggcgacatccttgcaatccctcccgaacagagggataataatagtgggggtagtccctatgtaccttgaaaacttcatattccccgcgtattgattgcgttttttcattgacccatcgacaaatgaaaggacggatcaatatgatgatggaaaacagaatgatgacaggtaatcgagtcgattgcctataccgcgtgtcc

SEQ ID NO: 15594 - DNA, 260 bp, Unknown
  Description of Unknown: LeftRegion for integrase B2595 sequence
accaggcgtcagcggctgcaaatattaccagtatttacagccaattaacaatctccacacaaccacgcatagagagctgttattaaataattataacattatttaaacagctctgctactgcatttgcattacagagctatttttatttttatttttaaaatactacccaaattccatatgaatttcaggaggttattttatgtttaattttaaaaataatgatgaaattattgcagtatactgccgcgtatcctcggat

SEQ ID NO: 15595 - DNA, 260 bp, Unknown
  Description of Unknown: LeftRegion for integrase B2596 sequence
atacttttgatccgtcgtctgacgcttatctgactgccgaaaaggacggcaccgttatcatggaaggctttggctcattccctacttatgctcacaaaggtatggttctcatgcagaccgacaaccttcctcaggaagtaatcgacctgttcaatgccatgtaaacctccgcattctctttctgcaaaggtggtatctctatgaaaaaacagccgaccggtggaaaccggcttgttgcctactaccgctacagcggcggc

SEQ ID NO: 15596 - DNA, 260 bp, Unknown
  Description of Unknown: LeftRegion for integrase B2597 sequence
gatacacctcccgaaacagatactcttatggttgtcattgttgatgacgaagaaggatttgttaagaaaatcagtattgatgaagatactgtgacccttcgttcttttaacccacactatcctccccgtgtttttggcggtgttgaaattggacgattgcgctttgtcggtagagtcatggagctaaaaaggagatttgcatgaaaaaatttccaatcgacctttcctgtctgacagaggaagaaatctctcaatttcag

SEQ ID NO: 15597 - DNA, 260 bp, Unknown
  Description of Unknown: LeftRegion for integrase B2598 sequence
gcgcaaatcctcgataatatattgacagagcaagcggaaaacgatacttctattgatcccgaacgtgcggaaagtttaagaaatgaactgcgcgggataatgtccggttataactctcttaccgacgaagggaaagaatttgtaaaacagtccttaaaaactgcgcttgccgcttattctaaaggcgcggaggaacagtaatgccggaagcattaaacgcggtcatatacgcccgctattcctccgatcgtcagacagaa

SEQ ID NO: 15598 - DNA, 260 bp, Unknown
  Description of Unknown: LeftRegion for integrase B2599 sequence
ttcttttgggtctaagtgaacttagaaaaccgcagacttgtacactctctgaggaagaaatgcttttgctggaagcctaccgttcagccagcacccagggacgttttcatatcattcaggtttgcatgaacgaaaaaacagccgcacccaaaggggaggtagttgccgggtgattgacttagcggaatggaggaagaaccatgtatgaggatataaaaacagcctgcctttacgtcagattttccagccataatcagacg

SEQ ID NO: 15599 - DNA, 260 bp, Unknown; identical to SEQ ID NO: 13129
  Description of Unknown: LeftRegion for integrase B2600 sequence

SEQ ID NO: 15600 - DNA, 260 bp, Unknown; identical to SEQ ID NO: 15566
  Description of Unknown: LeftRegion for integrase B2601 sequence

SEQ ID NO: 15601 - DNA, 260 bp, Unknown; identical to SEQ ID NO: 15593
  Description of Unknown: LeftRegion for integrase B2602 sequence

SEQ ID NO: 15602 - DNA, 260 bp, Unknown
  Description of Unknown: LeftRegion for integrase B2603 sequence
gatacaccccctgaaacagatactcttatggttgttattgttgatgacgaagaaggatttgttaagaaaatcagcattgatgaagatactgtgacccttcgctctttcaatccacactatcctccccgtgtttttggcggtgttgaaattggacgattgcgctttgtcggtagagtcatggagttaaaaaggagatttgcatgaaaaaatttccaatcgacctctcctgtttgacagaggaagaaatctctcaatttcag

SEQ ID NO: 15603 - DNA, 260 bp, Unknown
  Description of Unknown: LeftRegion for integrase B2604 sequence
aatccaaaagggttattttgagagggctatcagtgtaagggctgatagccctattttttttttgtctaaatttcaggagatttctggttattactcaaataataagtaatatgggtttacatagtatcaaaaagatgtataataagtatgagatattatgacaaacctgtacaaattctaatcaacaggaggaaaacaggatggtacaggagaaattaagagcggtattttatgcaagggtatctacagaggaagagaga

SEQ ID NO: 15604 - DNA, 260 bp, Unknown
  Description of Unknown: LeftRegion for integrase B2605 sequence
gagcctgccgagcctgccgagccttccgatgctgaaaaactccgcgccgagaacgcggcccttcgtgcgcagcttgcccagcagcagaaatccctgcgtatgcaccggctcgtgacgctcattctcttgggcattctttcgctgtgtgcccttgtgcttgtggccgatgtgctcatcccatcgatcggctggattcgcacatgaaaattaccgccccggcccgatcagccggagcggtatctttggaggcttttgtggat

SEQ ID NO: 15605 - DNA, 260 bp, Unknown
  Description of Unknown: LeftRegion for integrase B2606 sequence
ataatccaaaagggttattttgagagggctatcagtgtaagggctgatagccctattttttttttgtctaaatttcaggagatttctggttattactcaaataatatgtaatgggtttacatagtatcaaaaagatgtataataagtatgagatattatgacaaacctgtacaaattctaatcaacaggaggaaaacaggatggtacaggagaaattaagagcggtattttatgcaagggtatctacagaggaagagaga

SEQ ID NO: 15606 - DNA, 260 bp, Unknown
  Description of Unknown: LeftRegion for integrase B2607 sequence
gcttcgcaatttggaaaacatctgcaagctaaaatccaagagcaagtgaacagcgaaagcaattcttctcttttacttgaacagatgaacgaattatttaacaatgtttccaaattgtccgaaactgaacaaaaggctttttataccggacttgtaaaagggatagagcgttgggaaaatgaacagaagggggaataataatgccggaagcattaaacgcggtcatatacgcccgctattcctccgatcgtcagacagaa

SEQ ID NO: 15607 - DNA, 260 bp, Unknown
  Description of Unknown: LeftRegion for integrase B2608 sequence
cctccagccgtttccaactggaggggtctgccccgtcgccaaaaggtaaggataaaaacaagaaggtttctttccatgcgttgcctgcccttacagcatagcacgctttttggatatgggcaagcaaaagccccggcgctggtacgatgcagcgccggggaaacatggagtacagcacaaaaccggacaaaggaaattttatgcttgcaggggtcagtataccacactccctgcatatgggcaaccgcccggaaggaagt

SEQ ID NO: 15608 - DNA, 260 bp, Unknown
  Description of Unknown: LeftRegion for integrase B2609 sequence
atttatagactcataggcgtatgcagtattcttttatgtgccgttgtatggtacgtcatcttcgacattcaggtagagaccgccgggattttccgctcggcggggacaagcatttttgcgggcgttctcgccctgatactgaacgccgccgttgcaaccatcatttacgccttcaagagcattcacaaggggaaaaagaaatgagactgacacacggagcgtacattctcgcgcgcttctcaaccgacaatcaagaggtg

SEQ ID NO: 15609 - DNA, 260 bp, Unknown
  Description of Unknown: LeftRegion for integrase B2610 sequence
gacacacctcctgaaacagatactcttatggttgtcattgttgatgacgaagaaggatttgttaagaaaatcagtattgatgaagatactgtgacccttcgctcttttaatccacactatcctccccgtgtttttggtggtgttgaaattggacgattgcgctttgtcggtagagtcatggagttaaaaaggagatttgcatgaaaaaatttccaatcgacctctcctgcctgacagaggaagaaatctctcaatttcag

SEQ ID NO: 15610 - DNA, 260 bp, Unknown
  Description of Unknown: LeftRegion for integrase B2611 sequence
ttataatccaaaagggttattttgagagggctatcagtgtaagggctgatagccctattttttttgtctaaatttcaggagatttctggttattactcaaataataagtaatgggtttacatagtatcaaaaagatgtataataagtatgagatattatgacaaacctgtacaaattctaatcaacaggaggaaaacaggatggtacaggagaaattaagagcggtattttatgcaagggtatctacagaggaagagaga

SEQ ID NO: 15611 - DNA, 260 bp, Unknown; identical to SEQ ID NO: 15585
  Description of Unknown: LeftRegion for integrase B2612 sequence

SEQ ID NO: 15612 - DNA, 260 bp, Unknown
  Description of Unknown: LeftRegion for integrase B2613 sequence
atttatatgctcataggcgtatgcagtattcttttgtgcgccgttgtatggtacgtcatatttgacatccaggtagagaccgccggtattttccgctcggctggaacaagcatttttgcgggtgtcctcgccctgatactgaacgcctccgtcgcaaccatcatttacgccttcaagagcattcacaaggggaaaaagaaatgagactgacacacggagcgtacattctcgcgcgattttcaacagacaaccaagaagtg

SEQ ID NO: 15613 - DNA, 260 bp, Unknown
  Description of Unknown: LeftRegion for integrase B2614 sequence
tgagttcctatgcaatgcttcaaaaatagatcaggttgcaaggcacatttctctccgaaaaccgatgaattccctggcaattctggccgttgtgtgagataatgggtacggcgaaaaaagccaggaaccttgaaaatcgaataggatgaattgagtgttcgccctctcacacaaaacaaaatgagaggacggatatcaaaatggctgaaagagtttattgtttgtacagagtttccaccagtaagcaggtcgatcatgat

SEQ ID NO: 15614 - DNA, 260 bp, Unknown; identical to SEQ ID NO: 13711
  Description of Unknown: LeftRegion for integrase B2615 sequence

SEQ ID NO: 15615 - DNA, 260 bp, Unknown
  Description of Unknown: LeftRegion for integrase B2616 sequence
acccaaccagaaaggaaagccagcatggagccacagctgcatccgaaatatccttaccaaccctgtttaccttggggacaaggagtttcctgctctggtgacacgggaactgtttgcacaggtacagagtaggctggaagaaaccagccggatgaaacgggaaagtcagaccagggaattagccagaaaggagggattacatgccaagggcggaacgaatcgtggaggtcatcccggccacctggaacccggcggatgag

SEQ ID NO: 15616 - DNA, 109 bp, Unknown
  Description of Unknown: LeftRegion for integrase B2617 sequence
cgattgggtgtccgccctctcacacaaaaacatgagaggacggatatcaatggctgaaagagtttattgtttatacagagtttccaccaacaagcaggtcgatcacgat

SEQ ID NO: 15617 - DNA, 260 bp, Unknown; identical to SEQ ID NO: 15377
  Description of Unknown: LeftRegion for integrase B2618 sequence

SEQ ID NO: 15618 - DNA, 260 bp, Unknown; identical to SEQ ID NO: 15566
  Description of Unknown: LeftRegion for integrase B2619 sequence

SEQ ID NO: 15619 - DNA, 260 bp, Unknown; identical to SEQ ID NO: 14974
  Description of Unknown: LeftRegion for integrase B2620 sequence

SEQ ID NO: 15620 - DNA, 260 bp, Unknown; identical to SEQ ID NO: 13013
  Description of Unknown: LeftRegion for integrase B2621 sequence

SEQ ID NO: 15621 - DNA, 260 bp, Unknown
  Description of Unknown: LeftRegion for integrase B2622 sequence
gagcctgccgagcctgccgcgcctcccgatgctgaaaaactccgcgccgagaacgcggcccttcgtgcgcagcttgctcagcatcagaagtccctgcgcatgcaccggcttgtgacgctcatcctcttgggcattcttttgctgtgtgcccttgcgcttgtggccgacgtgctcatcccatcaatcggctggattcgcacatgaaaattaccgccccggcccgatcagccagagcggtatctttggaggcttttgtggat

SEQ ID NO: 15622 - DNA, 260 bp, Unknown
  Description of Unknown: LeftRegion for integrase B2623 sequence
gagcctgccgagcctgccgatccttccgatgctgaaaaactccgcgccgagaccgcggcgcttcgtgcgcagcttgcccagcagcagaagtccctgcgcatgcaccggcttgtgacgctcatcctcttgggtattcttttgctgtgcgcccttgcgcttgtggccgacgtgctcatcccatcgatcggctggattcgcacatgaaaattaccgccccggcccgatcagccggagcggtatctttggaggcttttgtggat

SEQ ID NO: 15623 - DNA, 260 bp, Unknown
  Description of Unknown: LeftRegion for integrase B2624 sequence
aatatcattatacataatccaaacaacatggataaattcaataattattattcatctatcattattaatacaataaaaaaaatagcataaatataaaggtgtccgacaatggcaaatattgtcggacacctttatatttattgacttttttcagaaaatatgctataataaaagactatctacaaaaaggagacatataaatgagaatagcaatatattcaagaaaatcaaaatttacaggcaaaggtgaaagtattgga

SEQ ID NO: 15624 - DNA, 260 bp, Unknown
  Description of Unknown: LeftRegion for integrase B2625 sequence
aatatcattatacataatccaaacaacatggataaattcaatgattattattcatctgttattattgatacgataaaaaaaatagcataaatataaaggtgtccgacaatggcaaatattgtcggacacctttatatttattgacttttttcagaaaatatgctataatgaaagactatctacaaaaaggagacatataaatgagaatagcaatatattcaagaaaatcaaaatttacaggcaaaggtgaaagtattgga

SEQ ID NO: 15625 - DNA, 260 bp, Unknown
  Description of Unknown: LeftRegion for integrase B2626 sequence
caaaatatttaaacggtaaatttgcagtcaagccaacagataggggtatagcaatgatagcatcaatgaattaaaataaaaaattccccgctcgatgttgcagcaccgaacggggagagggatatgtataaaatacacacaccacagtaactgtattttatcatatcctgacgaaaaaatcaataggagtgataaaaaatatgcaaaccgccgtgatatacgcccggtattcgtccgacaagcagacggagcagtccatt

SEQ ID NO: 15626 - DNA, 260 bp, Unknown
  Description of Unknown: LeftRegion for integrase B2627 sequence
aatatcattatacataatccaaacaacatggataaattcaacaattattattcatctgtcattattgacacaataaaaaaaatagcataaatataaaggtgtccgacaatggcaaatattgtcggacacctttatatttattgacttttttcagaaaatatgctacaatgaaaaactatctacaaaaaggagacatataaatgagaatagcaatatattcaagaaaatcaaaatttacaggcaaaggtgaaagtattgga

SEQ ID NO: 15627 - DNA, 260 bp, Unknown
  Description of Unknown: LeftRegion for integrase B2628 sequence
aaggcatggtgcggcaaagccgataaacgagtttgatgaggaacttgtcggcaggttaataaagggagtgacgattaaagactatgtagtgaccttcgagttctataacggagttacaatcagtagggaatataccaacggaccgagcggaaaccaaaaaggatggaaagaaaaaaaacgattaaaggaggcacagacgaatggaagcagcaattgacactgtccaacaaccgagagtagtcagggtggtaagaaacgta

SEQ ID NO: 15628 - DNA, 260 bp, Unknown
  Description of Unknown: LeftRegion for integrase B2629 sequence
ccatgtcatcgctgccgataaaacgcaccatcggatggtgggccgtcaccagcgcatggacggggacttttggcttctttctttgcgcgtcgagcatcgccgggctgcgggcgacggcgctatgaaccggacggctatccaggattacacttttcttatgatacacttcttcaatctcttcataactcatcataaaccccatgccaaaagcaatctcatatatacgattttctacgaaaattcaatcagttggtgactct

SEQ ID NO: 15629 - DNA, 260 bp, Unknown
  Description of Unknown: LeftRegion for integrase B2630 sequence
ctgccatgaaagtcaatttttatgcccttattttatcaaattgttttcgtggtaccttttatctttctaattgtggataacaaaaaaagaacccaccaattgctgtcggtgagttctcataagaggttgtgataaccttaacgcaatcgtattatatcacaacctcttgttttggtataccccaaaaggaggttattattatggcattaacatacgttgtcgcctatgcgcgattttcttccgacaaccaacgcgaagaa

SEQ ID NO: 15630 - DNA, 260 bp, Unknown
  Description of Unknown: LeftRegion for integrase B2631 sequence
atacaaaagaaaaaatctatcatctgccgtttgatcagcagtatgaccgtatcgctattgatgccggaaaaggcgagtgctatacggcgaccgtcaaagaggcggaaaaactcggtttccggcgggctttccgccacagagcggccgagaaggcttgaagaaaaataagcagctttcaagcccacacgagggaataataaatgaaaaaagaaaaggcgaagacgcccgaaaataacagagcagccgtgtatgctcggtac

SEQ ID NO: 15631 - DNA, 260 bp, Unknown
  Description of Unknown: LeftRegion for integrase B2632 sequence
tattcgctgcaatacatcaacggtggcgaggaaaacccagaggttgaagtcgtttacctgatcgctgaatgtaaataaaaaatccgcccaggctgctacctgtgcggatcaaacgcaaggaaaatgcaaacaccactaagcactttccgcagtcagtatatcacaagctgcctgcgttgtaaagtcggaaaggattaagattgaacgctgtaatctatgcccgtttctcgtcgcacagccagcgggagcagtccatcgaa

SEQ ID NO: 15632 - DNA, 260 bp, Unknown
  Description of Unknown: LeftRegion for integrase B2633 sequence
atgaatgattccataatgcacgaaaagacatttaccataggtacggagataataaaaaaatataagggtgaaacttatcggttgcgagcagtttatggaggatatgagatggataatgagttttataaatctttatcagcagtggcctataaaattacgggacgaagaatatcgggtaaagaattttggggaatgtaaagatggaagagataaagtgtgccatatatacaagaaaatctacagacgaaggtttggaaaaa

SEQ ID NO: 15633 - DNA, 260 bp, Unknown
  Description of Unknown: LeftRegion for integrase B2634 sequence
tcgtggaacgccattatatcggcaatgtgccgatgaatacgctttttcagcggcttgtggaagaagaaattcgtaaaactgccgaatcgtatctcgccgctggctaattggacgttttactgcggaaaagggcttgcatcgtcacgcagcatccgctacaatgtgattgatgaggtctcttttccattatggaggtacacatggaaaaggacaaaaaagtaactgctttatactgccgactgtcaaaagatgacggttca

SEQ ID NO: 15634 - DNA, 260 bp, Unknown
  Description of Unknown: LeftRegion for integrase B2635 sequence
gcactggttctttgtgtgctgcttggatatatggggatccaccgcttttatgttggaaagataggcaccggcatcctttggttgttgactcttggatgtttcgggatcggctggatcgtcgacattgtgatgctctgctgcaataagttcgcagacaagagcggcgccatcatcggtttgccagaaacgaggtgatccggatggcaaaaaggataccagcggcagcgtcggattgtgatggaatgatcggcgtcatttat

SEQ ID NO: 15635 - DNA, 260 bp, Unknown
  Description of Unknown: LeftRegion for integrase B2636 sequence
ccatcgcggtcgcgcgcagtctgatccgccgcaaggatcggcaaatctccgtcctcgccgccctcgtcgccgtgctcaccatcgcgatcctgctcatcatcacctacgataagctcaacccggatataggatggttccgcagctccctttccatcactctgtccgctgccttcccgatttttttgtaaaggagatcaaaaatgccatttgtgaaaaccggcaccgttccacccgaaaacgccctaaacgccgttctgtat

SEQ ID NO: 15636 - DNA, 260 bp, Unknown
  Description of Unknown: LeftRegion for integrase B2637 sequence
ggcgtgtaccccattttttttgtttttcagttgctatttttatataagagatatataatagatacaaacggctagaaagcccttagagagcttttaagggttgagggtagagagttatacccctgagcgattaaagcggctcagaggggcaagagcggggctcaggcggggcaaaaaaataaactaaaggagtgtataggatggcttacaggaaagagcaggataccataggattaagagcggcgttttatgccagagta

SEQ ID NO: 15637 - DNA, 260 bp, Unknown
  Description of Unknown: LeftRegion for integrase B2638 sequence
ggctactggctataaaatgctggtagccctcattttttagttgtatctagtatataaggggtgtataatagataggaactgaaaacagcctaataaagccctctattttatcgagggtaaagaagtctacacctaatatataaaagtggctatatgaggcacacaggagctcacaggactattacaggagggtaaacaggatggcatataggaaaataacggatataagagatactattggtatgagagcggtattttat

SEQ ID NO: 15638 - DNA, 260 bp, Unknown
  Description of Unknown: LeftRegion for integrase B2639 sequence
aatatcattatacataatccaaacaacatggataaattcaatgattattattcatctgttattattgatacgataaaaaaaatagcataaatataaaggtgtccgacaatggcaaatattgtcggacacctttatatttattgacttttttcagaaaatatgctataatgaaaaactatctacaaaaaggagacatataaatgagaatagcaatatattcaagaaaatcaaaatttacaggcaaaggtgaaagtattgga

SEQ ID NO: 15639 - DNA, 260 bp, Unknown
  Description of Unknown: LeftRegion for integrase B2640 sequence
atttttatgctgctcggtgtttgcgctcttctgctcgtatcagtaattagctatatcgtcttcgacatacagatcacgaccgctgggcttttccggtcagcaaaaacaagcacgcttgcggtgttcctgggccttgtcgttctcgccgccgtcggcgccatcgggtacgccatttatacgatccacaaagggagaaagaaatgaagctgacacacggggcgtacattctcgcccggttctcgacggacaatcaagaggta

SEQ ID NO: 15640 - DNA, 260 bp, Unknown
  Description of Unknown: LeftRegion for integrase B2641 sequence
gatacacctcccgaatcagatactcttatggttgtcattgttgatgacgaagaaggatttgttaagaaaatcagcattgatgaagatactgtgacccttcgctcttttaacccacactatcctccccgtgtttttggcggtgttgaaattggacgattgcgctttgtcggtagagtcatggagctaaaaaggagatttgcatgaaaaaatttccaatcgacctttcctgtctgacagaggaagaaatctctcaatttcag

SEQ ID NO: 15641 - DNA, 260 bp, Unknown
  Description of Unknown: LeftRegion for integrase B2642 sequence
gtatctgataccctatggatagggtatctataccgtatccatatcatagcgatacctcgcgtgcgcgtgcgcgggtgcgcgcgatcgggcgcgcactgttactgtctctgtatctgtaactggtactgtatctgtaaactgttatctgtttctgtatttctatcttaggaaatctatcgttagaagaaggaggtggcgctgtgcctaaaaaacctacaaagcatccggccaagccgaaacggggcaagaaactggaaacc

SEQ ID NO: 15642 - DNA, 260 bp, Unknown
  Description of Unknown: LeftRegion for integrase B2643 sequence
aatatcattatacataatccaaacaacatggataaattcaataattattattcatctgtcattattgatacaataaaaaaaatagcataaatataaaggtgtccgacaatatttgccattgtcggacacctttatatttattgacttttttcagaaaatatgctatgataaaagactatctacaaaaaggagacatataaatgagaatagcaatatattcaagaaaatcaaaatttacaggcaaaggtgaaagtattgga

SEQ ID NO: 15643 - DNA, 260 bp, Unknown
  Description of Unknown: LeftRegion for integrase B2644 sequence
gtggcgcgcagtctgatccgccgcaaggatcgtcaaatctccgtcctcgccgccctcgtcgccgtgctcaccatcacgatcctgctctttatcacctacgacaggctcaatccgaatataggatggttccgtagctctctctccatcactctgtccaccacgttcccactgtttttgtaaatttgtaaaggagatcaaaaatgccatttgtgaaaaccggcaccgtgccgcccgaaaacgccctaaacgccgtgctgtat

SEQ ID NO: 15644 - DNA, 260 bp, Unknown
  Description of Unknown: LeftRegion for integrase B2645 sequence
atttatatgctcataggcgtatgcagtattcttttgtgcgctgttgtatggtacgtcatatttgacatccaggtagagaccgccggtattttccgctcggctgggacaagcatttttgcgggcgtcctcgccctgatactgaacgcctccgtcacaaccatcatttacgccttcaaaagcattcacaaggggaaaaagaaatgagactgacacacggagcgtacattctcgcgcgcttctcaaccgacaatcaagaggtg

SEQ ID NO: 15645 - DNA, 260 bp, Unknown; identical to SEQ ID NO: 15642
  Description of Unknown: LeftRegion for integrase B2646 sequence

SEQ ID NO: 15646 - DNA, 260 bp, Unknown; identical to SEQ ID NO: 13018
  Description of Unknown: LeftRegion for integrase B2647 sequence

SEQ ID NO: 15647 - DNA, 260 bp, Unknown
  Description of Unknown: LeftRegion for integrase B2648 sequence
aatatcattatacataatccaaacaacatggataaattcaatagttattattcatctgtcattattgatacaataaaaagaatagcataaatataaaggtgtccgacaatggcaaatattgtcggacacctttatatttattgacttttttcagaaaatatgctataataaaagactatctacaaaaaggagacatataaatgagaatagcaatatattcaagaaaatcaaaatttacaggcaaaggcgaaagtattgga

SEQ ID NO: 15648 - DNA, 260 bp, Unknown
  Description of Unknown: LeftRegion for integrase B2649 sequence
aatatcattatacataatccaaacaacatggataaattcaataattattattcatctatcattattgatacaataaaaaaaatagcataaatataaaggtgtctgacaatgacaaatattgtcggacacctttatatttattgacttctttcagaaaatatgctataataaaagactatctacaaaaaggagacatataaatgagaatagcaatatattcaagaaaatcaaaatttacaggcaaaggcgaaagtattgga

SEQ ID NO: 15649 - DNA, 260 bp, Unknown
  Description of Unknown: LeftRegion for integrase B2650 sequence
aatatcattatacataatccaaacaacatggataaattcaatgattattattcatctgttattattgatacgataaaaaaaatagcataaatataaaggtgtccgacaatggcaaatattgtcggacacctttatatttattgacttttttcagaaaatatgctatgataaaagactatctacaaaaaggagacatataaatgagaatagcaatatattcaagaaaatcaaaatttacaggcaaaggtgaaagtattgga

SEQ ID NO: 15650 - DNA, 260 bp, Unknown
  Description of Unknown: LeftRegion for integrase B2651 sequence
cgaacaatagataccctatagatatggtatctataccgtatctatagggtagcgatacatcgcgtgcgcgcgtgcgtgtgcgcgcgatcgtgcgcgcactgtctctgtacctgtatctgtatctgagactgtatctgtaatctgtttctgattctgaatatctactactgcaaatctatcgttagaagggggtggcgctgttgccaagaaaacctgcaaagcacccggcgaaaccgaagcggggcaagaagctggaaatc

SEQ ID NO: 15651 - DNA, 260 bp, Unknown
  Description of Unknown: LeftRegion for integrase B2652 sequence
cgctgacaagatgatgaaagtgctggaagcagaagccgccgccggatatttgacctgtgataagcctgattgaaaaaccgtcatttttaccgaccgtaaagaagcagatttgacgcttttgccgctatacagacagccgccccatgtggtacaatcaaggtacggaatagtggggctggctgtcggaaacggaggaatttatgttaagacagaccacccagcaactcattaccgccctttacccaagactgtcccatgag

SEQ ID NO: 15652 - DNA, 260 bp, Unknown
  Description of Unknown: LeftRegion for integrase B2653 sequence
cataatccaaacaatatgaacaaatttagcaattattattcatctgtcattattgatacaataaaaaaaatagcataaatataaaaggtgtccgacaataacaaatgctgtcggacaccttttatatccttttatatttattgactttttacagaaaatatgttataataataaactatctataaaaaggagatatataaatgagaatagcaatatattcaagaaaatcaaaatttacaggcaaaggcgaaagtattgga

SEQ ID NO: 15653 - DNA, 260 bp, Unknown
  Description of Unknown: LeftRegion for integrase B2654 sequence
aatatcattatacataatccaaacaacatggataaattcaatgattattattcatctgttattattgatacgataaaaaaaatagcataaatataaaggtgtccgacaatatttgccattgtcggacacctttatatttattgacttttttcagaaaatatgctataatgaaagactatctacaaaaaggagacatataaatgagaatagcaatatattcaagaaaatcaaaatttacaggcaaaggtgaaagtattgga

SEQ ID NO: 15654 - DNA, 260 bp, Unknown; identical to SEQ ID NO: 15328
  Description of Unknown: LeftRegion for integrase B2655 sequence

SEQ ID NO: 15655 - DNA, 260 bp, Unknown; identical to SEQ ID NO: 15647
  Description of Unknown: LeftRegion for integrase B2656 sequence

SEQ ID NO: 15656 - DNA, 260 bp, Unknown
  Description of Unknown: LeftRegion for integrase B2657 sequence
ttttaactcttaaacgaacatacattcatcaaaataggggaattaatttaaaataagtaaaataaggtaaaaaaattgccaactaaatatatatttaaagatttgtataaaccaaataaaatattaatagattctaatataaacataagtatttagaataatatatttttttatgataatactattgacgaggtgtagtaatggaaaaagtagctatatatagtagaaaatcagtctttactggtaaaggtgaatctatt

SEQ ID NO: 15657 - DNA, 260 bp, Unknown; identical to SEQ ID NO: 15624
  Description of Unknown: LeftRegion for integrase B2658 sequence

SEQ ID NO: 15658 - DNA, 260 bp, Unknown
  Description of Unknown: LeftRegion for integrase B2659 sequence
aaaatggttttttactgccagaggaatatgaaaaaattgatgctttaaaccgcctgacatttgaaccggaactttccaaagtatatgcttaaagccctggatatcctgcagaaactgtggtattgtgtggtactaacaggagagatgattataagaaaagtatatctgaatcctgaaaaatggaggaaaggagaagaaaaatgaaggcaaaaaaggaaaagaaaatcacgcggatcgagccggttcgtaccacacagtcc

SEQ ID NO: 15659 - DNA, 260 bp, Unknown
  Description of Unknown: LeftRegion for integrase B2660 sequence
cataatccaaacaatatgaacaaatttagcaattattattcatctgtcattattgatacaataaaaaaaatagcgtaaatataaaagatgtccggcaataacaaatgctgtcggacatcttttatatccttttatatttattgactttttacagaaaatatgttataataataaactatctataaaaaggagatatataaatgagaatagcaatatattcaagaaaatcaaaatttacaggcaaaggcgaaagtattgga

SEQ ID NO: 15660 - DNA, 260 bp, Unknown; identical to SEQ ID NO: 13471
  Description of Unknown: LeftRegion for integrase B2661 sequence

SEQ ID NO: 15661 - DNA, 260 bp, Unknown
  Description of Unknown: LeftRegion for integrase B2662 sequence
aatatcattatacataatccaaacaacatggataaattcaatagttattattcatctgtcattattgatacaataaaaaaaatagcataaatataaaggtgtccgacaatggcaaatattgtcggacacctttatatttattgacttttttcagaaaatatgctataataaaagactatctacaaaaaggagacatataaatgagaatagcaatatattcaagaaaatcaaaatttacaggcaaaggcgaaagtattgga

SEQ ID NO: 15662 - DNA, 260 bp, Unknown
  Description of Unknown: LeftRegion for integrase B2663 sequence
aatatcattatacataatcccaacaatatggataaattcaataattattattcatctgtcattattgatacaataaaaaaaatagcataaatataaaggtgtccgacaatgacaaatattgtcggacacctttatatttattgacttttttcagaaaatatgttataatgaaaaactatctacaaaaaggagacatataaatgagaatagcaatatattcaagaaaatcaaaatttacaggcaaaggcgaaagtattgga

SEQ ID NO: 15663 - DNA, 260 bp, Unknown
  Description of Unknown: LeftRegion for integrase B2664 sequence
aatatcattatacataatccaaacaacatggataaattcaatagttattattcatctgtcattattgatacaataaaaagaatagcataaatataaaggtgtccgacaatggcaaatattgtcggacacctttatatttattgacttttttcagaaaatatgctataataaaagactatctacaaaaaggagacatataaatgagaatagcaatatattcaagaaaatcaaaatttacaggcaaaggtgaaagtattgga

SEQ ID NO: 15664 - DNA, 260 bp, Unknown
  Description of Unknown: LeftRegion for integrase B2665 sequence
gaaggagcgtagcatgaataaagcgttattgctggcattgaacgagcacatataccttcagggattaatcagtaaagaaatgaaagagaaaattgacattgaaattctctctgaaaattagcttaaactattgagcggagatgagatagaagttataataatcttatctctgctcttccaaacagaagggagaacggggcatgaacgtttatcgcactagagaaatactgaagacttgcagtattttcgatctaaaatta

SEQ ID NO: 15665 - DNA, 260 bp, Unknown; identical to SEQ ID NO: 15661
  Description of Unknown: LeftRegion for integrase B2666 sequence

SEQ ID NO: 15666 - DNA, 260 bp, Unknown
  Description of Unknown: LeftRegion for integrase B2667 sequence
tcgccggtgacagtgattttgtcccggcctccaagctcgcccggcgtgaaggtgttgatgtcgttctcgacccgctcgaacagtctgtaaaagacgatctgtttgagcacatcgacggcctgcgctcctgtggaaaccctttcctgtccaagtgacccaacaaataaacaccgccccggcctgataagccggagcggtatatgtataaccttttatgcaagggtgagaatcttggtatgaaatttacatcaacatggcgg

SEQ ID NO: 15667 - DNA, 260 bp, Unknown
  Description of Unknown: LeftRegion for integrase B2668 sequence
gcactggttctttgtgtgctgcttgggtatatggggatccaccgcttttatgttggaaagataggcaccggcatcctttggttgttgactcttggatgtttcgggatcggctggatcgtcgacattgtgatgctctgctgcaataagttcgcagacaagagcggcgccatcatcggtttgccagaaacgaggtgatccggatggcaaaaaggataccagcggcagcgtcggattgtgatggaatgatcggcgtcatttat

SEQ ID NO: 15668 - DNA, 260 bp, Unknown
  Description of Unknown: LeftRegion for integrase B2669 sequence
ctattatttttaagaattaaacgaacatatattcgtttaaaagggtatattatttataaatgtaaaataaaacaaataaattgccaccaaaatacagatattaatttttgtataaaactaatagaatattaatagattctattagtaatataattttaagaacactagatttcttataatactatttatgaggtgaaataatggaaaaagtagctatatatagcagaaaatcaatctttacaggcaaaggcgatagtata

SEQ ID NO: 15669 - DNA, 260 bp, Unknown
  Description of Unknown: LeftRegion for integrase B2670 sequence
caatgctttaagctgcaaaatttatattagcaggataaatataaaatactgacccaacataataattgacagaagccgactacataacattccaattatagtcagtgaccatcagcgacaagctgataaagaagctataaaaaatcaagagggataagccgctcagcttatccctcatctgtatatggaaaggaaaaacgatgtcagaaagcactctgaaaaaagctgtattctacggcagatacagttctcatttacag

SEQ ID NO: 15670 - DNA, 260 bp, Unknown
  Description of Unknown: LeftRegion for integrase B2671 sequence
aatatcattatacataatccgaacaacatggataaattcaatagttattattcatctgtcattattgatacaataaaaagaatagcataaatataaaggtgtccgacaatatttgccattgtcggacacctttatatttattgacttttttcagaaaatatgctataataaaagactatctacaaaaaggagacatataaatgagaatagcaatatattcaagaaaatcaaaatttacaggcaaaggcgaaagtattgga

SEQ ID NO: 15671 - DNA, 260 bp, Unknown
  Description of Unknown: LeftRegion for integrase B2672 sequence
aatatcattatacataatccaaacaacatggataaattcaatagttattattcatctgtcattattgatacaataaaaagaatagcataaatataaaggcgtccgacaatggcaaatattgtcggacgcctttatatttattgacttttttcagaaaatatgttataataaaagactatctacaaaaaggagacatataaatgagaatagcaatatattcaagaaaatcaaaatttacaggcaaaggcgaaagtattgga

SEQ ID NO: 15672 - DNA, 260 bp, Unknown
  Description of Unknown: LeftRegion for integrase B2673 sequence
caccatgtgaagcaaattcttatatcctcatttgcggggaaaactactaaacttcaatctcggaacatccttgagatccctgatgtccagaggtataatgataatggtagaagatactatgtaccttgaaaacttcatattccccgcgtattgattgcgttttttcattgacccatcgacaaatgaaaggacggatcaatatgatggaaaacagaatgatgacaggtaatcgagtcgattgcctataccgcgtgtccacc

SEQ ID NO: 15673 - DNA, 260 bp, Unknown
  Description of Unknown: LeftRegion for integrase B2674 sequence
aatgccccggcgttttcgtgtttagctacgaattagaagaggttggcgacatggacacataccagattagcccagtttggcgcgaatatctcaacaggcaccgccgatacttggaatagatagaaaaatgccctgcgacgggtgcaaccattgcagggctgtttgtccgctaccaacgaacaaagcaaggtgattttaacatggaaaagaaacgcgccgctatatacgcccgcttttcgtcgcacaatcaacgttccgaa

SEQ ID NO: 15674 - DNA, 260 bp, Unknown
  Description of Unknown: LeftRegion for integrase B2675 sequence
ccatatcgtcgccgccaataaagcgcaccattggctgccgggcggtcatcactgcatgcaccggcaccttcggtttcttttgttgcgcgtcgatcatcgccggactggtggccgcggcgctgtggaccgggcggctgtcgaggattacacctttcttatgatacacttcttcaatctcttcatagctcatcataaaccctatgccaaaagcaatctcatacatacgattttctacaaagattcaatcagttggtgattct

SEQ ID NO: 15675 - DNA, 260 bp, Unknown
  Description of Unknown: LeftRegion for integrase B2676 sequence
atacttttgatccgtcgtctgacgcttatctgactgccgaaaaggacggcaccgttatcatggaaggctttggctcattccctgcttatgctcacaaaggtatggttctcatgcagaccgacaaccttcctcaggaagtaatcgacctgttcaatgccatgtaaacctccgcattctctttctgcaaaggtggtatctctatgaaaaaacagccgaccggtggaaaccggcttgttgcctactaccgctacagcggcggc

SEQ ID NO: 15676 - DNA, 260 bp, Unknown; identical to SEQ ID NO: 15638
  Description of Unknown: LeftRegion for integrase B2677 sequence

SEQ ID NO: 15677 - DNA, 260 bp, Unknown; identical to SEQ ID NO: 15633
  Description of Unknown: LeftRegion for integrase B2678 sequence

SEQ ID NO: 15678 - DNA, 260 bp, Unknown
  Description of Unknown: LeftRegion for integrase B2679 sequence
aatatcattatacataatccaaacaacatggataaattcaatagttattattcatctgtcattattgatacaataaaaagaatagcataaatataaaggtgtccgacaatatttgccattgtcggacacctttatatttattgacttttttcagaaaatatgctataataaaagactatctacaaaaaggagacatataaatgagaatagcaatatattcaagaaaatcaaaatttacaggcaaaggcgaaagtattgga

SEQ ID NO: 15679 - DNA, 260 bp, Unknown
  Description of Unknown: LeftRegion for integrase B2680 sequence
ctggcacaggaacagtacgatgccatcggcaacgaagaatacgaaaccgagcgcctgcggcggctgttcacgacctttgaatactcggcagagctcaacgcagagctgctgcaaagcaccgtctacgccgtcctggtgacgcgccagacggtgcggttgcagctcaaaaatggacagatcatcggaaaggacgatttggtatgacagacgaaaaaccgcgcgtcattatcattccgccaaagccggaattgcagcagacc

SEQ ID NO: 15680 - DNA, 260 bp, Unknown
  Description of Unknown: LeftRegion for integrase B2681 sequence
aatatcattatacataatccaaacaatatggataaattcaataattattattcatctgtcattattgatacaataaaaaaaataacataaatataaaggtgtctgataatatttaccattgtcggacacctttatatttattgacttttttcagaaaatatgctataataaaaaactatctacaaaaaggagacatataaatgagaatagcaatatattcaagaaaatcaaaatttacaggcaaaggtgaaagtattgga

SEQ ID NO: 15681 - DNA, 260 bp, Unknown
  Description of Unknown: LeftRegion for integrase B2682 sequence
atcgaagtggcgcgcagtctgatccgccgcaaggatcgtcaaatctccgtcctcgccgccctcgtcgccgtgctcaccatcgcgatcctgttcttcatcacctacgacaggctcaacccggatataggatggttccgcagctcactcgccatcactctgtccgccacgctcccactgtttttgtaaaggagatcaaaaaaatgccatttgtgaaaaccggtaccgtgccgcccgaaaacgccctaaacgccgtgctctat

SEQ ID NO: 15682 - DNA, 260 bp, Unknown
  Description of Unknown: LeftRegion for integrase B2683 sequence
cttacaacatccgcaattcagcgcaaatgtaaatgcggaaacaactgtgcatatgcggttcttcaaagcctacaggtctatggactggttcgagagattcggcaattcacatacgaatggacagaaaaagccctcctgctgggtgcagaaggacgtgacgggtaacagatatgtcgatagatattaaatggcaggtgccaatggcaaagccggaggtcagcgaactggccgtcgtatatgctcggtattcaagccacagt

SEQ ID NO: 15683 - DNA, 260 bp, Unknown; identical to SEQ ID NO: 15638
  Description of Unknown: LeftRegion for integrase B2684 sequence

SEQ ID NO: 15684 - DNA, 260 bp, Unknown
  Description of Unknown: LeftRegion for integrase B2685 sequence
atgagcctgttattccagaaaacacggtatacgagaaaaagctattgaagtatttcagtatgtgtgatggagaaggtaagctgagaatcattcagttggcaatgaatgaattcgacagaacacagcaagaaaaaaaggaaaatcaagaaccggctgttgtcggataagattattagttttgatgaatggagacaaatacgatgaaatttccgattgacctctccactttaacaaaagaagaaatctcgcagtttgaggaa

SEQ ID NO: 15685 - DNA, 260 bp, Unknown
  Description of Unknown: LeftRegion for integrase B2686 sequence
aattcgtcgcaagcaaggatagcgacaaattccacaaaccgagttgccgatgggccaaaaagatactgagtgaaaatgaagtctggtttgattcttcggacgacgccatagccgccggatacggcgcgtgcgggacttgcaatccaaaataacctgccgaacaataaacaccgccccggcctgataagccggagcggtatatgtataaccttttatgcaagggtgagaatcttggtatgaaatttacatcaacatggcgg

SEQ ID NO: 15686 - DNA, 260 bp, Unknown; identical to SEQ ID NO: 15647
  Description of Unknown: LeftRegion for integrase B2687 sequence

SEQ ID NO: 15687 - DNA, 260 bp, Unknown
  Description of Unknown: LeftRegion for integrase B2688 sequence
gcaaataatggaagaagaacagataattcagcaattgaaaaccaaaaataccgacaccacaaaatacaagaagtccgacgtgtttacaaaagacatggcggactttcttatatctgcggtcgtggacgaatggaagataacattcgaattcggaaatggctacaaagtaaccaaaacatacaccaatgggagggcaggaaatgtcaacggaaaactacgtaaacaaaaaacctaagattacagtcataccggccaaacct

SEQ ID NO: 15688 - DNA, 260 bp, Unknown
  Description of Unknown: LeftRegion for integrase B2689 sequence
aactcaattcaatatctgatgctgtatgtgatttaaatagcatggttgaggtattggattatattattgatgcactaaaaaatagaattgaataaaacaactatatttataaaataatgcagattacatctttcaatatttgtaacctgtattatttttaagtcaaaaaacaaacaaacgtttgcaaaaggaggattatcatgtttgttacaaatgaattgaaaacttatgcagcatacctaagagtgtctaccgatgac

SEQ ID NO: 15689 - DNA, 260 bp, Unknown
  Description of Unknown: LeftRegion for integrase B2690 sequence
taatttacgtatttttttgccaatagcaatacttttataaataagaaaatcccccggtgctaccaacaccgagggacctgcaagaacgtgctaccaacacgctcaacgtcatcaaccccataccaataagagctgatataatattataacatattatacgcggctcttacaatcatagctattgaaaggagccgtgtattatggctaaacacgctattactataccccaaaacccaaaagctgctctgtatatccgcgtc

SEQ ID NO: 15690 - DNA, 260 bp, Unknown; identical to SEQ ID NO: 15666
  Description of Unknown: LeftRegion for integrase B2691 sequence

SEQ ID NO: 15691 - DNA, 260 bp, Unknown
  Description of Unknown: LeftRegion for integrase B2692 sequence
aatatcattatacataatccaaacaatatggataaattcaataattattattcatctgtcattattgatacaataaaaaaaataacataaatataaaggtgtccgacaatatttgccattgtcggacacctttatatttattgacttttttcagaaaatatgctataataaaaaactatctacaaaaaggagacatataaatgagaatagcaatatattcaagaaaatcaaaatttacaggcaaaggtgaaagtattgga

SEQ ID NO: 15692 - DNA, 260 bp, Unknown; identical to SEQ ID NO: 15678
  Description of Unknown: LeftRegion for integrase B2693 sequence

SEQ ID NO: 15693 - DNA, 260 bp, Unknown
  Description of Unknown: LeftRegion for integrase B2694 sequence
aaagcgcggtgcggcaaagccgataaacgagtttgatgaggaacttgtcggcaggttaataaagggagtgacgattaaagactatgtagtgaccttcgagttctataacggagttacaatcagtagggcatataccaacggaccaagcggaaaccaaaaaggatggaaagagaaaaaacgattaaaggaggcacagacgaatggaagcagcaattgacactgtccaacaaccgagagtagtaagggtggtaagaaacgta

SEQ ID NO: 15694 - DNA, 260 bp, Unknown
  Description of Unknown: LeftRegion for integrase B2695 sequence
atttttatgctcctcggcgtttgcgcactgctgcttgtgtccgtcattggatacgtcattttcgacatccaactcgcgaccgccggtattttccggtcggcaggagcaagcacgctcgccgctcttctcggtctggtcattctcgctgccgtcggctctatcgggtacgccgttcacacgatccacaaagggaggaaaaaatgaagctgacgcacggggcgtacattctcgcccggttctctacggacaatcaagaggta

SEQ ID NO: 15695 - DNA, 260 bp, Unknown
  Description of Unknown: LeftRegion for integrase B2696 sequence
aagcaggaatcgagcctgaagcattcaactacctcatgaagaagctgaagctcaaagtagagtatgtcgaaacacctgactgccccagagatgtcgatgatatactcaaaagctatgacaagctgataaagaagctataaaaaatcaagagggataagccgctcagcttatccctcatctgtatatggaaaggaaaaaagatgtcagaaagcactctgaaaaaagctgtattctatggcagatacagttctcatttacag

SEQ ID NO: 15696 - DNA, 260 bp, Unknown; identical to SEQ ID NO: 13516
  Description of Unknown: LeftRegion for integrase B2697 sequence

SEQ ID NO: 15697 - DNA, 260 bp, Unknown
  Description of Unknown: LeftRegion for integrase B2698 sequence
acaatagcgaaaatctcaatatacctgagtttgaccaagctcttttattcttctttgaaaactgtgatgcacccggtcaacttcgcattattcaatgtgccatgaatgaacatgataggacgcaaagagaaaaaacaaatccgccgcaaggctctgttattggctaaagtcatcgacctgtctgaatggagaaagacgctatgaaaaccatgaaatttcctattgacctctccatgctaaccgaagaggaaatagaccaa

SEQ ID NO: 15698 - DNA, 260 bp, Unknown
  Description of Unknown: LeftRegion for integrase B2699 sequence
catcatgtaaagcagattttactatcttcctttgccaacaatacggcaaaaaatagctccggcgacatccttgcaatccctcccgaacagagggataataatagtgggggtagtccctatgtaccttgaaaacttcatattccccgcgtattgattgcgttttttcattgacccatcgacaaatgaaaggacggatcaatatgatggaaaacagaatgatgacaggtaatcgggttgattgcctataccgcgtgtccacc

SEQ ID NO: 15699 - DNA, 260 bp, Unknown
  Description of Unknown: LeftRegion for integrase B2700 sequence
aaaaatgccccatcttctcaaaagaaaagacagggcattttgaaatgagttgaacctaaatgtgcaactctacttatataaatagctcccagatatgatatttcggaaatgaatttaactttttgactgttgaaagtgtggaaagatttatttttcccagaacttgcaacaaacttaaaactacttgaaaggtggtatttatgcctcgtaaaaagaaactgcaagaggtaggcggactgcggctggtggcgtactaccgc

SEQ ID NO: 15700 - DNA, 260 bp, Unknown
  Description of Unknown: LeftRegion for integrase B2701 sequence
ttacggtaatacgcgcatcaagatcaccgaacattttcccgacgttgggaaaacgctcaatgaacttctcgccgacgtcattcaatacaccgtcaaagccgccgcgtaaaacaactgcttgatttgcacccacgcttatgctatacttgtcctggagcaagtagtaagcgtgggtcgtttctttgaaaggaggcatgaatttgaaacggccttgcaccatgacaaacaacaacgccgctctctatatgcgtttgagccga

SEQ ID NO: 15701 - DNA, 260 bp, Unknown
  Description of Unknown: LeftRegion for integrase B2702 sequence
gcaaaacgtgtgcccgaaagcgagtatgtgccgattagagaattcagcgaagaaaaaacaaaacgatttctatcgaaggtcgtcgtgacaatgttcacggtgaccttcgtgttctataacggagcgaaaattacacgcacctacaataatggtcagcccggaaacaaagtcgggtggaacaaaaagaaggaggagtcataatggcaacggcgacaagaagagtagtacgaactatgccgcagatgtttatcgatgtggcg

SEQ ID NO: 15702 - DNA, 260 bp, Unknown
  Description of Unknown: LeftRegion for integrase B2703 sequence
tttccctctgtccacattgatagatgcaacaaccatctcttcaacgccatcaatgaaagccccaacgcaaccctcaacatcaacggtacagagggatttacggctcaggagcttgaattgattgacttgtatcgaaacttcccgctgagaaaacaaatggagctgctgaattatgctttcaacctgaaagaaggtaagcaatgagagtagttctttatatgagatatagcagcgaccgtcagaccgagcaatccatagag

SEQ ID NO: 15703 - DNA, 260 bp, Unknown
  Description of Unknown: LeftRegion for integrase B2704 sequence
acaggtcttttgattgtgtgtagtgacccggcgcaaaagaaaattgacagagccgatgccttgaatattccaatcatttcagagcagcaatggtatgaactcatgccagaacttgaagccgttggaatgtggaacggaaagcaaattctgtttgcggacaatgatggcatctaccgtgttgaagtgggcggtgaaagctgatggccagaaaaaagaatattgctgctggcctcgatgccgtcatctatgcccggtactca

SEQ ID NO: 15704 - DNA, 260 bp, Unknown
  Description of Unknown: LeftRegion for integrase B2705 sequence
tcaggcactggggcttgcggaatatgatccgcaggagattgccgaccgcatcatccagattgatgccctccccgacaacaggctcgtttttcatcttgctgatggtacggattcggaaatccagtggacattcccgtcccgttcggaaagctggactgaggaaaaaaggcagaaagcggctgagcaagcacggaggcaccatgcaaagacaggtcgttaagcgcgaggtacaggtcatccagccgacgcttcggacaggg

SEQ ID NO: 15705 - DNA, 260 bp, Unknown
  Description of Unknown: LeftRegion for integrase B2706 sequence
acgcttcaaaatccgcaaaaaattgagggaattgaaaaagaagtaagcatctttgattgaaataaaaaacgcccacggtgctaccaacaccgcaggcgttccagatcagcttacccagagggtaataacagctaacctcacagatgttattgtaccacctccgggtaggcttgtcaaagtgtacctcggaggaaattacaatggcaagaaaaaagaaacaggcaagcggcgatgccgtcatctatgcccgctactcgtcc

SEQ ID NO: 15706 - DNA, 260 bp, Unknown
  Description of Unknown: LeftRegion for integrase B2707 sequence
ctcggtacgcaagattattctcgaataaacggaaccaaaagcagcaaacaagtcaaagccgaacaacttatgctttccggttcggatttaatgatcctttccgaaaatgttttttacgatatgctcgaaaattatgccggtgaaatctaaattaaaaaggccctcgccttggcaaaataccaaataaaggtggtgagtatatgaaaaaggccgtcgcgtatgcgcggttcagcagtgatatgcagcgcgaagaatcgatc

SEQ ID NO: 15707 - DNA, 260 bp, Unknown
  Description of Unknown: LeftRegion for integrase B2708 sequence
tataaaaatctccgaacacttcgccgcaggcgggaagcccctcggtgatctgattgtagatgtggtgcggcataccgcagaaaaagccgcttcaacctgatagcccatcattgataacacgcccacgcttatgatataattgccatagagcaaaagtattgtaagcgtgggttgtttctttagaaggaggatttttaacggtgaaacaaccttacaatactacgatttacaacacggcgctttatatgagattaagccgg

SEQ ID NO: 15708 - DNA, 260 bp, Unknown
  Description of Unknown: LeftRegion for integrase B2709 sequence
gcaacaccaaaatcaaaatgaccgaacatttcgcagaaaatggaaaatcagtcggcacactgctggaagatgtgattcagtattcagctaaccgatgcgcctgatgataaaaacgaattgaatccagcccacacttacggtataatggaagcagaagtattgtaagcgtgggctgtttcttttaagaaggaggctctactatgaaacagcctaacaatacgatgatctataacactgcactgtaccttagactaagccgt

SEQ ID NO: 15709 - DNA, 260 bp, Unknown
  Description of Unknown: LeftRegion for integrase B2710 sequence
tgtctgacctaatggctatgcagagccagctcaaaaactccgtggccgctctgctggataagctcatgcaggcagatatggaaatcgcgtttaacgtcaagagagacgaagatgccgcgttcaaaagcgggtcggcaatgtgatctacgtggactttcgcccctcccggtgaggggcgtttcctttggaggtgaatccctatgcaaaattacccacccctgtcctccgccgaggagtactgtatgtacctccgcaagtcc

SEQ ID NO: 15710 - DNA, 260 bp, Unknown
  Description of Unknown: LeftRegion for integrase B2711 sequence
gttatgatattttccgtgacaaagagggcgtattcgttattccatacggagcgcagcaggtaaaacagcccgatgggcaatatgtttatgattttccgaacgatgaagtaaccgatatgctgaataagcatcattgcaatagatgtgctggcggttatgttacaagggcgcgcgagtaagcccgaaaggagcgtgacggcatgaaaaagcgaatcaacactaattccgcagcccgtgccgtcatctacgctcgttattcc

SEQ ID NO: 15711 - DNA, 260 bp, Unknown
  Description of Unknown: LeftRegion for integrase B2712 sequence
catcttctcaaaagaaaagacagggcattttgaaatgagttgaacctaaatgtgcaactctacttatataaatagctcccagatatgatatttcggaaatgaatttaactttttgactgttgaaagtgtggaaagatttattttccccagaacttgcaacggcttgcaacaaacttaaaactacttgaaaggtggtatttatgcctcgtaaaaagaaactgcaagaggtaggcggactgcggctggtggcgtactaccgc

SEQ ID NO: 15712 - DNA, 260 bp, Unknown
  Description of Unknown: LeftRegion for integrase B2713 sequence
tataaaaatctccgaacacttcgccgcaggcgggaagcccctcggtgatctgattgtagatgtggtgcggcataccgcagaaaaagccgcttcaacctgatagcccatcattgataacacgcccacgcttatgatataattgccatagagcaaaagtattgtaagcgtgggttgtttctttagaaggaggatttttaacggtgaaacaaccttacaatactacgatttacaacacggcgctttatatgagattgagccgg

SEQ ID NO: 15713 - DNA, 260 bp, Unknown; identical to SEQ ID NO: 13442
  Description of Unknown: LeftRegion for integrase B2714 sequence

SEQ ID NO: 15714 - DNA, 260 bp, Unknown
  Description of Unknown: LeftRegion for integrase B2715 sequence
ctccgcaatctatcgactatgaagctagaacgggtgttttcaaggggtccggcaaaaagccgtatgaggtcacagaaaccacctgcacctgccgagattattttgtccgcaagctgccgtgcaagcatatctaccggctgcgcatggagcttgccaaggctgacggcgaataattataaccagaaaaggagcgtgacggcatgagaaagaaagcaaatattgcccccgaagcccgtgccgtcatctatgcccgatactcc

SEQ ID NO: 15715 - DNA, 260 bp, Unknown
  Description of Unknown: LeftRegion for integrase B2716 sequence
ctggcacaggagcagtacgacaccatcggcaacgaagaatacgaaaccgagcgcctgcggcggctgttcgcggcgttcgaatgcacagcagagctcaacgcggagctgctgcaaagcgccgtctctgccgtgctggtgacgcgccaggcggtgcgcttgcagctcaaaaacggacagatcattggaaaggaagatctcggatgaacgaagaaaagccgcgtgtcattatcatccccgctaagccggaactggcacaggaa

SEQ ID NO: 15716 - DNA, 260 bp, Unknown; identical to SEQ ID NO: 14596
  Description of Unknown: LeftRegion for integrase B2717 sequence

SEQ ID NO: 15717 - DNA, 260 bp, Unknown
  Description of Unknown: LeftRegion for integrase B2718 sequence
acaggtcttttgattgtgtgtagtgacccggcgcaaaagaaaattgacagagccgatgccttgaatattccaatcgtttcagagcagcaatggtatgaactcatgccagaacttgaagccgttggaatgtggaacggaaagcaaattctgtttgcggacgatgatggcatctaccgtgttaaagtgggcggtgaaagctgatggccagaaaaaagaatactgctgctggcctcgatgccgtcatctatgcccggtactcg

SEQ ID NO: 15718 - DNA, 260 bp, Unknown
  Description of Unknown: LeftRegion for integrase B2719 sequence
caaaactcgagaacaaacgattcaaaccttacaatcaaataaaatggttgaaaaacaatttaccaaatccgctgtgtttacaaaagacatggcggattttcttatacaagcgacagtaaaagattggaaaataacattcgaatttgctaacggcatcaaaataactaaatcatatacaaacgggagggcaggaaacgtaaatggaaaactctgcaagcgtaaagcctaaaatcaggctgataccagcgaaacaaaggcag

SEQ ID NO: 15719 - DNA, 260 bp, Unknown
  Description of Unknown: LeftRegion for integrase B2720 sequence
tgcatactgcctgcaatgcgcactgctcaacgcgactggtacggcagcggcgtaaatcacgacaatctgtcccgctcctctgctggcttgatcatagcagacagccgggcgggatgtaaagttacagttatgttaacctttgcgctgacccacagatacaaaaggatgtgcccaatttggacacacgagaggtgacagctatggcaaaacgcctgcatggggcgctcatctgcgcccgatactccaccgatatccaaaat

SEQ ID NO: 15720 - DNA, 260 bp, Unknown
  Description of Unknown: LeftRegion for integrase B2721 sequence
tcatttaagcgataaggaattagaaaaagcgtatcaaacgacggtaaaaataaccgtgtacggcaaagagttggaaatccctttcgacgcggttgtatataacgccgtttatgatgccgtaacgaaaatacgagaagaactataaggaggaaaaatgcaaataacgaaaacatatacaaacgggagggctggaaatatcaatggaaaactttgcaagcacaaaaccgaaaattagggttatacctgctaaaacaagacaa

SEQ ID NO: 15721 - DNA, 260 bp, Unknown
  Description of Unknown: LeftRegion for integrase B2722 sequence
aaagaaaattcatcataaaaacgtagcatactgtagcgattgcggatttagctttgactttacaacgcaaaaggatatcgatgacaagtgtaaatcattgttaaatggcgaaataggatctattgtaactgcggtcattttggggattgctttgtttgttataaatggatatctgcattgaaaacgaataaaagtgttatgtgttgattaaaaggctgggggggggtgacagtttgagttcagttgacaaaatcgccgtt

SEQ ID NO: 15722 - DNA, 260 bp, Unknown
  Description of Unknown: LeftRegion for integrase B2723 sequence
atatcgccaactggtcggtcgctcaaggtgcagctaccgcaccgcagcccgttcagcaggtagtggagcagaaaccgtctcccgccgatgaaatccgcaaatacaagggcctgctggatgacggtatcatcacgcaggaagaatttgaagctaagaaaaagcaactgctgggcctgtaaatttgaaaggagcgtgacggcatgagaaaaaagtccaacctcaatgcggctactcgtgccgtcatctatgccaggtattcc

SEQ ID NO: 15723 - DNA, 260 bp, Unknown
  Description of Unknown: LeftRegion for integrase B2724 sequence
aattcgtatcaaggtatcggagcattttgcagagaacgggaagccgctgaacagcctgctggaagatgtaatccagcacgccgccgctgcttcctgaaaaaagatagatttgtgactgtcaatcatcccacgcttatgatatacttgtaccagcgagtattgtataagcgtgggttgtttctttttaaggaggatttttgatgaaacaaccatacaatacaacggtttataacaccgcactttatttgagattgagccgt

SEQ ID NO: 15724 - DNA, 260 bp, Unknown
  Description of Unknown: LeftRegion for integrase B2725 sequence
cgtatcaaggtatcggagcatttcgcacaggatgggaagccgcttgacagcctgctggaagatgtgatccagcacgctgccgccgcttcctgaaaaaatacggaataacgactgtcaatcagcccacgcttatgatatacttgtaccagcgagtattgtataagcgtgggttgtttcttttagaaggaggatttttaaccgtgaaacaaccatacaatacaacgatttataacactgcactatatttgagattgagccgt

SEQ ID NO: 15725 - DNA, 260 bp, Unknown
  Description of Unknown: LeftRegion for integrase B2726 sequence
ctccgcaatctatcgactatgaagccaggacgggtgttttcaaggggtccggcaaaaagccgtatgaggtcaccgaaaccacctgcacctgccgagattattttgtccgcaagctgccgtgcaagcatatctaccggctgcgcatggagcttgccaaggctgacggcgaatagttttcaccagaaaaggagcatgacggcatgagaaaaaaatccaacctcaatgcggctacccgtgccgtcatctatgcccgatattca

SEQ ID NO: 15726 - DNA, 260 bp, Unknown
  Description of Unknown: LeftRegion for integrase B2727 sequence
cttggtacgcaagattattctcgcataaacggaaccaaaagcagcaaacaagtcagggcagaacaacttatgcttgccggttcggatttgatgattctttctgaaaacgttttttacgatatgctcgaaaactatgccggtgaaatctaaataaaaaaggccctcgccggggcaaaatatcaaacaaaggtggtgattatatgaaaaaggccgtcgcgtatgcacgattcagcagcgacatgcagcgcgaagaatcgatc

SEQ ID NO: 15727 - DNA, 260 bp, Unknown
  Description of Unknown: LeftRegion for integrase B2728 sequence
atggataaatcactcttgcctgaaaaaacattatccataggcacagaaattgtcagaaaatttaagggcgagacatatcgcttgcgtgtggtcaatggtggttttgaaatggacaacgagttttacaaatctctatctgcggtggcatataaaattacaggacgtaaaatctctggcaaagaattttggggaatatagttatggaagaagttaaatgcgcaatttataccagaaaatcaacagatgaaggcttggaaaaa

SEQ ID NO: 15728 - DNA, 260 bp, Unknown
  Description of Unknown: LeftRegion for integrase B2729 sequence
gatacacctcccgaaacagatactcttatggttgtcattgttgatgacgaagaaggatttgttaagaaaatcagtattgatgaagatactgtgacccttcgttcttttaacccacactatcctccccgtgtttttggcggtgttgaaattggacgattgcgctttgtcggtagagtcatggagttaaaaaggagatttgcatgaaaaaatttcctatcgacctctcctgtctgacagaggaagaaatctctcaatttcag

SEQ ID NO: 15729 - DNA, 260 bp, Unknown
  Description of Unknown: LeftRegion for integrase B2730 sequence
tctccgacctcatggctatgcagggccagcttaaaaacgctgtggccgctctgcttgacaagctcatgcaggccgacatggaaatcgcgttcaacatcaagagagacgaagatgccgcattcaaaagcgggtcggcaatgtgatctacgtggactttcgcccctccccgtgaggggcgtttcctttggaggtgaatccctatgcgaaattatccacccctgtcctccgccgaggaatactgtatgtatctccgaaagtcc

SEQ ID NO: 15730 - DNA, 260 bp, Unknown
  Description of Unknown: LeftRegion for integrase B2731 sequence
gatacacctcccgaaacagatactcttatggttgttattgttgatgacgaagaaggatttgttaagaaaatcagtattgatgaagatactgtgacccttcgttcttttaacccacactatcctcctcgtgtttttggcggtgttgaaattggacgattgcgctttgttggtagagtcatggagctaaaaaggagatttgcatgaaaaaatttccaatcgacctctcctgtctgacagaggaagaaatctctcaatttcaa

SEQ ID NO: 15731 - DNA, 260 bp, Unknown
  Description of Unknown: LeftRegion for integrase B2732 sequence
tcgagcaaccgacgagacaagaggttatatagagcgcaacgaagacctatttagaaacgcaaggaagagagacgaaggcgatttgatacgtaggatgttctgaaacagaaaaagccccacgcggcttaacttggcggttgcgcgcggggcgtggtcgaattgagcactttgcggtgctcgcttcaagaggtgattttagcatggtcaagaaccgagctgccatatatgcgcgctttagctcgcacaatcagcgctcagag

SEQ ID NO: 15732 - DNA, 260 bp, Unknown; identical to SEQ ID NO: 13390
  Description of Unknown: LeftRegion for integrase B2733 sequence

SEQ ID NO: 15733 - DNA, 260 bp, Unknown; identical to SEQ ID NO: 15702
  Description of Unknown: LeftRegion for integrase B2734 sequence

SEQ ID NO: 15734 - DNA, 260 bp, Unknown
  Description of Unknown: LeftRegion for integrase B2735 sequence
aagacaggtcttttgattgtgtgtagtgacccggcgcaaaagaaaattgacagagccgatgccatgaatattccgattgtttcggagcagcaatggtttgagctcatgccagaacttgaagccgttggaatgtggaacggaaagtgaatcctgttttcagacgacggcatctaccgtgttgaagtgggcggtgaaagctgatggccagaaaaaagaatattgctgctggcctcgatgccgtcatctatgcccggtactca

SEQ ID NO: 15735 - DNA, 260 bp, Unknown
  Description of Unknown: LeftRegion for integrase B2736 sequence
cgtaaaaatatggcatactgcgaagattgcggattcacttttgatttcaccacgcaaaaagacctcgacaacgagtataaaaagctcaataacggggagattggttctgtagtagcgacagttatattcggtgccttatttattgcagttttaggtttcctgaaatagtaatcgttttacagccattaaatgcaaatttgatgctattttcgttaaataaggggggtgacagtttgagttcagttgacaaaatcgccgtt

SEQ ID NO: 15736 - DNA, 260 bp, Unknown
  Description of Unknown: LeftRegion for integrase B2737 sequence
aacatatgtgttaaataaaagcacgatgaaattccacctgccgagctgctcgtcctgctccaaaatcaaggccgagaataaaggcagctacaccggcagccgtgacgatctcatcggtcagggttattcgccctgtggcaactgccatccgtaataaattcgccccggataagctccggggcttgtcataggtgataatcatggacaatgtcgtcatatatgcccgctactcctccgacaagcagacggagcagagcata

SEQ ID NO: 15737 - DNA, 260 bp, Unknown
  Description of Unknown: LeftRegion for integrase B2738 sequence
cgctcagacgcttgccggtatgactaagctgagcgcagcggaagtgcaaaggtcctgcgtgtgtagcttctccgccgcgtcccaaatcatggaccgcctgaagctctacggcctcgcagcagaaaagcagaccagcatttatgaatggaccgacaaggcctattctctgggcgcagaaggggtgaacgggtgacaggggtatgtcagtagatattaagtggaacgtgcctcagaagggcaaggaaggcgatctggccgcc

SEQ ID NO: 15738 - DNA, 260 bp, Unknown
  Description of Unknown: LeftRegion for integrase B2739 sequence
acaggtcttttgattgtgtgtagtgacccggcgcaaaagaaaattgacagagccgatgccttgaatattccaatcatttcagagcagcaatggtatgaactcatgccagaacttgaagccgttggaatgtggaacggaaagcaaattctgtttgcggacaatgatggcatctaccgtgttgaagcggacggtgaaagctgatggccagaaaaaagaatattgctgctggcctcgatgccgtcatctatgcccggtactcg

SEQ ID NO: 15739 - DNA, 260 bp, Unknown
  Description of Unknown: LeftRegion for integrase B2740 sequence
gcattttgccaaagagggtaagccatttacttccctcttggaagatgtaatcctacacgctgtagccgcttcctgacaacggatgcggaaaagtttgataattgtagatttgtgactgtcaattagcccacgtttatgctatactcttaaatacgagtattgtataagcgtgggttgtttctttttaaggaggatttgacttgaaacaaccttacaatacaacgacttatctcacagcgttatatctgagattgagcaga

SEQ ID NO: 15740 - DNA, 260 bp, Unknown
  Description of Unknown: LeftRegion for integrase B2741 sequence
tcgcgtcacggatgaaaccgggcatctcataagtaacaacgaagacctttttaggaacgccagagaaaaaagcgaagccgatttgatatgtaggctgttttgaaaaaagaaaaccccgcgcgggaacttggcggaacgcgcgcggggctggtcaagaagcagagcgctttaccgcgctcgctctaaggggtgattttagcatggtcaagaaccgcgccgccatatatgcgcgcttcagctcgcataatcagcgctcagag

SEQ ID NO: 15741 - DNA, 260 bp, Unknown
  Description of Unknown: LeftRegion for integrase B2742 sequence
gaagacttggtagagataaaggaattcgatgacagcaaagtcgagatattccttgaaaaggcggtcgtgctaaaccacacgataacattcaccttcataaacggaatgtcaatcagtagggagtataccaacggacacggcggcaatacggcggggtggttagaccgccgattggatagattaagtaaggagggcaaacaatgagcatacctcaaaggatagtgcaagaaagaccagtcatatacagaccgacaaatacg

SEQ ID NO: 15742 - DNA, 260 bp, Unknown
  Description of Unknown: LeftRegion for integrase B2743 sequence
taccattatcgagaaaaggcgcaaggccatgtccaccacggcgctttttgaaacggaagacggcaataggatactgctggaaataccaagagcggcggcggagtatatgaccgttggcgacgtcgggatgctggattattacaaaaaaatattcagatcgtttgtcaggttgagggattaagggcgtgaaggagcctgccatgcaaaagagaagaacgaaatacgcaaacagccaaggggataacgccgtcatatacgca

SEQ ID NO: 15743 - DNA, 260 bp, Unknown
  Description of Unknown: LeftRegion for integrase B2744 sequence
cctttgcaaaacctcagtatttagggctaccagaaaattggttttcgatatttgaggcaatgaactaaaataaaaaacgccctgcggcggcaaccgcagggcgtttggatagaccggcttgcccaaagggcaattaccagaccaagtatctgtaattgtagcaccaccgggcaggctttgcaagctgaacaggtgatattatgaaaaagaaacaaaccggtgcccgccatggccgggcggcgatttacgcccggtattcg

SEQ ID NO: 15744 - DNA, 260 bp, Unknown
  Description of Unknown: LeftRegion for integrase B2745 sequence
ctggatcattgacatggttatgatctgttgcaacaaattcaccgacagcaccggcgcggtggttggtctgaaggttgctgagtataccagacagccggatcctgatcttgcagaggcttctctggaggagcagcgggaggcagcggccgagactgccagagcttacggctataccgtaatagagtcaggcactcaggataatgccgacaagtaaaaatacggctcgaaaatatgccgcaggaggtagctcggataattcc

SEQ ID NO: 15745 - DNA, 260 bp, Unknown
  Description of Unknown: LeftRegion for integrase B2746 sequence
tttgcttatgaaattgaagacatcgccagaagcgttctgaacgataaatgataaacacttttttattcggattttttctgatatgaatatgataacgcgcatagacaaagaggaacggtcgccgcagattgcgggcaatgacgcttttcgtcttgtgcgcggttatcttgacgctttgtgcgaattatacgaggaagtccgtgaaaaaggccgttatcctgacacgcgtttcaacgaaagagcaagaagaggggcactct

SEQ ID NO: 15746 - DNA, 260 bp, Unknown
  Description of Unknown: LeftRegion for integrase B2747 sequence
caaaaatatcagatggtgaagaagaggccgtatattcgtcagtaaacgaaacctatgtaaggcatgtagaagcatggcataaagcgttcggcatggacccgtttactgatgaggagcacgagaagcttatggagtatggtagattcttaatttcacagagacaaaaataaaagggagttgaaaataacgcgaaggaggtgatgccaactttatcccttggcaagcacattatagatataggaagtgactccatgacaaca

SEQ ID NO: 15747 - DNA, 260 bp, Unknown
  Description of Unknown: LeftRegion for integrase B2748 sequence
ttacaaagaaaacaaattatctcgttgtcggctcattcgatttcataaaatcagtaaaaggcggcaaatcttcaaagatagtaaaagctgagcaaatgcgccttgacggtttcgacattaacgttattacagagaacacatttttagatatgctagcaggaaaataaaaagcctgctccgagtggataggagggcggacaatggcaagagccgcaaagcaagacagcaattcggaaataattaacggcgtgatatatgcc

SEQ ID NO: 15748 - DNA, 260 bp, Unknown
  Description of Unknown: LeftRegion for integrase B2749 sequence
gaagacttggtagagataaaggaattcgatgacagcaaagtcgagatattccttgaaaaggcggtcgtactaaaccacaagataacattcaccttcataaacggaatgtcaatcagtagggagtataccaacggacacggcggcaatacggcggggtggttagaccgccgattggatagattaagtaaggagggcaaacaatgagcatacctcaaaggatagtgcaagaaagaccagtcatatacagaccgacaaacacg

SEQ ID NO: 15749 - DNA, 260 bp, Unknown
  Description of Unknown: LeftRegion for integrase B2750 sequence
caaaaatatcagatggtgaagaagaggctgtatattcgtccgtaaacgagacttatgtgagacatgtagaagcatggcataaagcgttcggcatggacccgttcaccgatgaagagcatgagaagttaatggagtatggtagattcttaatttcacagagacaaaaataaaagggagttgaaaataacgcgaaggaggtgatgccaactttatcccttggcaagtacattatagatataggaagtgactccatgacaaca

SEQ ID NO: 15750 - DNA, 260 bp, Unknown
  Description of Unknown: LeftRegion for integrase B2751 sequence
tccagaagccaatgacagttcggcatgggatatttcgtgggacgatgattatttctatgtaagctcctatgtggattctcaaaattctttcggggctctcattcgcacgcaattcaccgcgacatacacttgggatggtggcgaatatacgcttccaactctctgtgacgtttccttttctgaataacaggaggcaaagcatggcaagaaaaaacaaatctgccggttccgaccaacgcctggtggcctactaccggtac

SEQ ID NO: 15751 - DNA, 260 bp, Unknown
  Description of Unknown: LeftRegion for integrase B2752 sequence
aaaggaatttataaaaaaatattccttgcttgtagtagaaaccataaaacatattttaagtaaaaacaaataatatattactgacaaggggtgtatgttctatggatatacactccttgtttaatgtctcttaaattcacttgacattataaatatattatggtatattgaaatactattccaaagaaaggatgttataattgaatatagcaatttattctcgtaagtcaaaatttacaggaaaaggcgaatctattggc

SEQ ID NO: 15752 - DNA, 260 bp, Unknown
  Description of Unknown: LeftRegion for integrase B2753 sequence
gctaatgtaagtagctcatcacttttcttttacttttcaaaagcaaattagttgtaaatgaagtatattattaaaaacaaaaaaatccccgactgctaccaatagtcggggaaatagtgtagtgttatggtacaccaattaaaaacatatatattgtaccataacaccgattaaaaatcaagttaagaggtgttatttttatgaaaaaaactaaaaattcagtgcaaagggctgttatatatgcccgttattcgtgtagt

SEQ ID NO: 15753 - DNA, 260 bp, Unknown
  Description of Unknown: LeftRegion for integrase B2754 sequence
caaaaatatcagatggtgaagaagaggccatatattcgtcagtaaacgaaacctatgtaaggcatgtagaagcatggcataaagcgttcagcatggacccgtttactgatgaggagcacgagaagcttatggagtatggtagattcttaatttcacagagacaaaaataaaagggagttgaaaataacgcgaaggaggtgatgccaactttattccttggcaagtacattatagatataggaagtgactccatgacaaca

SEQ ID NO: 15754 - DNA, 260 bp, Unknown
  Description of Unknown: LeftRegion for integrase B2755 sequence
acaaaccatagatatggtcaaagacaaatataaaaaagatttatattcttccgattcacaaaaaataggttgaaaataaaaaaaatccccgactgctactaacagtcgggaaaatagtgtagtgttatggtacaccaattaaaaacatatatattgtaccataacaccgattaaaaatcaagttaagaggtgttatttttatgaaaaaaactaaaaatccagtgcaaagggctgttatatatgcacgttattcgtgtagt

SEQ ID NO: 15755 - DNA, 260 bp, Unknown
  Description of Unknown: LeftRegion for integrase B2756 sequence
ttctgacctcatggctatgcaggcccagctcaaaaatgctgttgccgctctgctcgataagctcatgcaggccgatatggaaattgcgtttaacgtcaagaaagacgaaaaagcagggttcttaaacgggtcggcaatgtgatttatgtggatttccgcccctccaagtgaggggcgtttcctttggaggtgattaccctatgcgaaactacccgccgctttccagcgcggaagaatactgcatttacctgcgcaaatcc

SEQ ID NO: 15756 - DNA, 260 bp, Unknown
  Description of Unknown: LeftRegion for integrase B2757 sequence
ccttgcggtctgcgtcgtgtcgttcccggtcggcttgatcattgtggccattggagcgtaccgggtggcaaaggccggggatatttatgacgctgcggtcgctcggtacgagcagcaaatctcggactatgttgactggctggatgaagtcaacgcaaaataaaaagccgccctcggtgggcggcgggaggttgctctgaatgtgtgcaaaaaagaaaccggccatgcttgagccggatatgcaggatgccgtgatctac

SEQ ID NO: 15757 - DNA, 260 bp, Unknown
  Description of Unknown: LeftRegion for integrase B2758 sequence
cccgaggctatcggcgtatttaccaccaaaggaaagcagctcggaaacgtaaatgcagagttagcaagcgatttgatacataaatatcctaacaacaaaatgaaagttacaatttcagatataacaggcggtggagacaagaattacggttgtaatcttcacgtcgttatctacaaggcataattaaggaggcgggcaaaatggcaagagccgcaaagcaagccagcaattcagaaataattgacggcgtgatatatgcc

SEQ ID NO: 15758 - DNA, 260 bp, Unknown
  Description of Unknown: LeftRegion for integrase B2759 sequence
cagtacattttatgttaagtcaatcttttcctccgacaaaccaaaagaagttgcagagaagatagaaaagcttattaaagcggaaattgatactattgcaataaaaatttaacttttgtccgcagccaacaaaaaagagtttgtgctataatttacttgtacaattttcttttgtttgactgcataggaggaattttatcatgtatcagtcaaacaaccattcgacttacgcagcactgtacactcgcttctctcgtgat

SEQ ID NO: 15759 - DNA, 260 bp, Unknown
  Description of Unknown: LeftRegion for integrase B2760 sequence
ccgcaagcagtgaccctgcggcagcacgcgctgtgcaaaatagcctgtttaacttccaaagctcgccgcagccgattttttgcaatgacggcgaaagtgtgagataataatggtgtaaggtgtaccttgaaaaataaatagagaacaaaaagttcaagactacacgccattttccggtggggaaatgaggtgtatgtaacatggaaaacgtaaagcgagtatattgcctgtaccgcgtttcgaccgtgggacaggtggaa

SEQ ID NO: 15760 - DNA, 260 bp, Unknown
  Description of Unknown: LeftRegion for integrase B2761 sequence
cctttgcaaaacctcagtatttagggctaccagaaaattggttttcgatatttgaggcaatgaactaaaataaaaaacgccctgcggcggcaaccgcagggcgtttggatagaccggcttgcccaaagggcaattaccagaccaagtatctgtaattgtagcaccaccgggcaggctttgcaagctgaacaggtgatattatgaaaaagaaacaaaccggtgcccgccatggccgggctgcgatctatgcgcgctattct

SEQ ID NO: 15761 - DNA, 260 bp, Unknown
  Description of Unknown: LeftRegion for integrase B2762 sequence
ttcaacgtgaacatattttactatattttagcacaatgttgctcatagaagaagatttcaaacaaaataaaaagcgttcacagtgctaccaacaccgtgaacgctccagatcagtttaccctatatggtaatagccgacctcacagaagctattgtatcatatcaaggggagcttatcaagttttaccttggaggatttcatggcaaaaaagaagaagcccgccgggggcaacgccatcatctatgcccgctactcgtcc

SEQ ID NO: 15762 - DNA, 260 bp, Unknown; identical to SEQ ID NO: 14849
  Description of Unknown: LeftRegion for integrase B2763 sequence

SEQ ID NO: 15763 - DNA, 260 bp, Unknown
  Description of Unknown: LeftRegion for integrase B2764 sequence
taagaaaaatcataatgcagtagttagatttaccaagttagcaaaagcagaagaatataggcaaactttaaaattagaacaatctgaagaagtagaatctgcataaaagctcatattttatgggcttttattttataccttattttgcatatttaccttttaagttaataaatataaaattgtatatgaggtgattacttatgaaagcagcaatatatagcagaaaatcaatgtttacaggtaaaggtgactctgtagaa

SEQ ID NO: 15764 - DNA, 260 bp, Unknown
  Description of Unknown: LeftRegion for integrase B2765 sequence
gaacttggaattgaaaccgataactgagtttaatgaagaattagtcggtagagtattaaagcaagtgacgatacaagattggataataacgttcgagttttataacggtgtaaaaataagtcggcaatatacaaacggaccgaacggaaaccaaaaaggttggaaagaaaagaaacgattaaaggaggctcaagagcaaaatggaaacgataatcaataatcaacccaaagtggtgagagttgtaaggaaggtatcgtcc

SEQ ID NO: 15765 - DNA, 260 bp, Unknown
  Description of Unknown: LeftRegion for integrase B2766 sequence
tgaaaaacaccaataatgtggccatagcgatgcagaatgtcagcgacactgaaatattagatttggttgcaaaccttgtcggctgtattgcaatcaaaaaaggcgtatcggcaaaaagcatttatgacgaattaactataacaacaccggacgctactatgcgcaccgacaacggcatgaattaaccggaggtaaatactatggctgttgcagtttattgccgcgtatcatccgaggaccaggcagagcgcggaacaatt

SEQ ID NO: 15766 - DNA, 260 bp, Unknown
  Description of Unknown: LeftRegion for integrase B2767 sequence
gaagacttggtagagataaaggaattcgatgacagcaaagtcgagatattccttgaaaaggcggtcgtactaaaccacacgataacattcaccttcataaacggaatgtcaatcagtagggagtataccaacggacacggtggcaatacggcggggtggttagaccgccgattggatagattaagtaaggagggcaaacaatgagcatacctcaaaggatagtgcaagagagaccagttatatacagaccgacaaacacg

SEQ ID NO: 15767 - DNA, 260 bp, Unknown; identical to SEQ ID NO: 13188
  Description of Unknown: LeftRegion for integrase B2768 sequence

SEQ ID NO: 15768 - DNA, 260 bp, Unknown
  Description of Unknown: LeftRegion for integrase B2769 sequence
ctgcaagcagtgatcctgcggcagcacacgctgtgcaaaacagtctgtttaactttcaaagttcgccgcagccgattttttgcaataacggcgaaagtatgagataataatggtgtaaggtgtaccttgaaaaataaatagagaacaaaaagttcaagactacacaccattttccggtggggaaatgaggtgtatgtaacatggaaaacgtaaagcgagtatattgcctgtaccgcgtttcgaccgtgggacaggtggaa

SEQ ID NO: 15769 - DNA, 260 bp, Unknown; identical to SEQ ID NO: 15752
  Description of Unknown: LeftRegion for integrase B2770 sequence

SEQ ID NO: 15770 - DNA, 260 bp, Unknown
  Description of Unknown: LeftRegion for integrase B2771 sequence
atcaagaacttggaattgaaaccgataactgaatttaatgaagaattagtcggtagagtattaaaacaagtgacgatacaagattggataataacgttcgagttttataacggtgtaaaaataagtcggcaatatacaaacggaccgagcggaaaccaaaaaggttggaaagaaaagattaaaggaggcttaagagcaaaatggaaacgataatcaataatcaacccaaagtggtgagggttgtaaggaaggtatcgtcc

SEQ ID NO: 15771 - DNA, 260 bp, Unknown
  Description of Unknown: LeftRegion for integrase B2772 sequence
tcccgatttaataggcgcattcaccaaaagcggaaagcaaatcggctctgttccttacgatgttgtaaacataataagggataattatgcgggttatcctatgtcagcagaggttaaagaagtaacttattacggcgatcattatttgtgctatgtaacaatcaacgtttataatagataatttgcaaggagggcggacaatggcaagagccgcaaagcaagacggcaattcggaaataattgacggcgtgatctatgcc

SEQ ID NO: 15772 - DNA, 260 bp, Unknown
  Description of Unknown: LeftRegion for integrase B2773 sequence
ctggatcattgacatggttatgatctgttgcaacaaattcaccgacagcaccggcgcggtggttggtctgaaggttgctgagtataccagacagccggatcctgatcttgcagaggcttctctggaggagcagcgggaggcagcggccgagactgccagagcttacggctataccgtaatagagtcaggcgctcaggataatgccgacaggtaaaaacacggctcgaaaatatgccgcaggaggtagctcggataattcc

SEQ ID NO: 15773 - DNA, 260 bp, Unknown
  Description of Unknown: LeftRegion for integrase B2774 sequence
ttcatctttcgataccctatggatagggtatctataccgtatccataccatagcgatacctcgcgtgcgcgcgtgcgtgtgcgcgcgatcgcgcgcgcactgtctctgtttctgtatctgtaactgagactgtatctgtaatctgttaactgtttctgtaatcctactaaagcaatctatcagtagaaggaggtggcgctgtgccgaagaaagcgacaaagcatccggcaaagccgaagcggggcaaaaagctggaagtc

SEQ ID NO: 15774 - DNA, 260 bp, Unknown; identical to SEQ ID NO: 13129
  Description of Unknown: LeftRegion for integrase B2775 sequence

SEQ ID NO: 15775 - DNA, 260 bp, Unknown
  Description of Unknown: LeftRegion for integrase B2776 sequence
tttccttttccgtgaaatgcacccaagaagagacattcaagaaggaaaacaaggaggggaaagcgtataagtttcacaatattaacgaactcacatatcgttttaccgcccctagtgatataccagatgccgaaacaatccctgatccattatatagcacaatagtaaaatggctcaacaaaaagtgaggtgattcggttttggctaagtataagcaagtcgtgcaggaacaaatcggcgtaatctatgcccggtattcc

SEQ ID NO: 15776 - DNA, 260 bp, Unknown
  Description of Unknown: LeftRegion for integrase B2777 sequence
accgggcttttaatcgtgtgcagtgacccgatgcaaaagaaaatcgacagagctgccgccctaaatattccaatcatttcagagcagcaatggtttgaacttatgccggaactagaagccctcggaatgtggaatggaaagccacttccgtttgcggatgacaatggcatctaccgttttgatgtgggtggtgatggataatggcaaaaaataagaagcccgccgggggcaatgccatcatctatgcccgctactcatcc

SEQ ID NO: 15777 - DNA, 260 bp, Unknown
  Description of Unknown: LeftRegion for integrase B2778 sequence
taccattatcgagaaaaggcgcaaagccatgtccaccacggcgctttttgaaacggaagacggcaataggatactgctggaaatacccagagcggcggcggagtatatgaccgttggcgacgtcgggatgctggattattacaaaaaaatattcagatcgtttgtcaggttgagggattaagggcgtgaaggagcctgccatgcaaaagagaagaacgaaatacgcaaacagccaaggggataacgccgtcatatacgca

SEQ ID NO: 15778 - DNA, 260 bp, Unknown
  Description of Unknown: LeftRegion for integrase B2779 sequence
cgatattaagtatttggaaataaaaaatccctcggtgcttccaacaccgagggaactgcaagaacgtgttaccagcacgctcaattcatcaaccctagacctatcaagagtttcaagagctgattacatctataattataacagattttaatcagctctgccactgcatatccgtttttagcaaaggagctgatttttttatgtttaacaataacactaatactaaaatagctatttactgccgtgtgtcgtctgacgag

SEQ ID NO: 15779 - DNA, 260 bp, Unknown
  Description of Unknown: LeftRegion for integrase B2780 sequence
gaataaaagtagagggaatcattcaaggtctacttttacaagataaataccaaacaaaacaaaagttagggtaattagagaaggaaaaattatacgtataaagtttaaggaggaatagatatggcagattgtatatgccagaactgcggacacacctggaaagcctgagtgtgtagccgtatgcagagaggaggcactgcatggcaaaagcaaaacaaaaagcagctacaaatgatataagcaaactcgctgttatatat

SEQ ID NO: 15780 - DNA, 260 bp, Unknown; identical to SEQ ID NO: 15766
  Description of Unknown: LeftRegion for integrase B2781 sequence

SEQ ID NO: 15781 - DNA, 260 bp, Unknown
  Description of Unknown: LeftRegion for integrase B2782 sequence
ttacaaagaaaacaaattatctcgttgtcggctcattcgatttcataaaatcagtaaaaggcggcaaatcttcaaagatagtaaaagctgaacaaatgcgccttgacggtttcgacattaacgttattacagagaacacatttttagatatgctagcaggaaaataaaaagcctgctccgagtggataggagggcggacaatggcaagagccgcaaagcaagacagcaattcggaaataattgacggtgtgatatatgcc

SEQ ID NO: 15782 - DNA, 260 bp, Unknown
  Description of Unknown: LeftRegion for integrase B2783 sequence
ctgaccgccaacgtccaaaagcgggaggaggaaatgtccgccgaggctgacgcctcatcccccgtcccaaagcagcatccgggaaaagaaaaggtcggctaattttctggcgtcgccttctcacctgatgttcacttgaacaccaaaagccccggcaggcacacacccgccggggcttactttataaagggagatttattatggagaatgaacgcaccatgcttcccgccgtcgcttactatcgctactcgccgggcggc

SEQ ID NO: 15783 - DNA, 260 bp, Unknown
  Description of Unknown: LeftRegion for integrase B2784 sequence
agaatgcgaaaggtcaatcattaccaacgttaaacgttacctgtccgcattgcaagactgaattaacaatcaaaaaataaaaaaagccccgcaactgtttggagcagtcacggggtcagtagtgttatggaacaccaattaaaaacatatatattgtaccataacattacttgaaaatcaagttaagaggtgttatttttatgaaaaaaattaaaaatcaagtacaaagagcggttatatatgcacgttattcgtgtagt

SEQ ID NO: 15784 - DNA, 260 bp, Unknown
  Description of Unknown: LeftRegion for integrase B2785 sequence
aaaggaatttataaaaaaatattccttacttgttgtagaaaccataaaacatattttaagtaaaaacaaataatatattactgacaaggggtgtatgttctatggatatacaccccttgtttaatgtctcttaaattcacttgacattataaatatattatggtatattgaaatactattccaaagaaaggatgttataattgaatatagcaatttattctcgtaagtcaaaatttacaggaaaaggcgaatctattggc

SEQ ID NO: 15785 - DNA, 260 bp, Unknown
  Description of Unknown: LeftRegion for integrase B2786 sequence
atggctgaatattttgacgtcacaaatgaactattagaatataaaattttatccatagttcatgatgaaaataagtacaagtctataaaagaagattttatgagtaaagaaatacaatataaccagtgtactgtgtagttctaataaattaattaacctttatagtttaacctacatcaatttaatttttaagagttttagtgaatattatatacaaaggggtgattaaaattagagctgcaatatatgttagaaaatct

SEQ ID NO: 15786 - DNA, 260 bp, Unknown
  Description of Unknown: LeftRegion for integrase B2787 sequence
tcttttccttgcggtgagactctttgtccttcttcatgattgccttactcctttcatagagtttggcaccggtgcagttatgattatatcattttatttacggtttgtcatcaaaaagatatagtataacatgtgagcgatttcgacaaaaatctgttatataattatcttatgttcgaaaaaatcagggttagaaaggtatgcaacggaatatgcgcgacactaaaacgggcaatgaattacaagctactcgcggcgtt

SEQ ID NO: 15787 - DNA, 260 bp, Unknown
  Description of Unknown: LeftRegion for integrase B2788 sequence
ctatattgtcaattcctgctttgaaattaagccacaaaacacggttgacaacggtatccgataccttctcggaatggaaatgcaggacggtaaggtttcttaaaaaatcgtctggacttttcaaccgattgagagtatattgaggttgcgggaactttccgcagctctcaatcggtttggctgaaaacaaggaggtaaacatgatacagtcgagccaaaaaataaccgctctgtactgccgactgtcccaagaggatatg

SEQ ID NO: 15788 - DNA, 260 bp, Unknown
  Description of Unknown: LeftRegion for integrase B2789 sequence
ggttaggttctaattttaaatttacgatcacaaataattaataaaaagccgccccagtgctggtaacactggaacggcatcacaggccggggcctgtataatatatcacgcaaacatattataccattgttaccccggtttttcaactggggtatttctatacccttttcttcgtatactcaaaaaagggagtgattacaatggtcaaaaacattgatgaatattatgtctatttaagaaaaagccggaaagacagggat

SEQ ID NO: 15789 - DNA, 260 bp, Unknown; identical to SEQ ID NO: 15699
  Description of Unknown: LeftRegion for integrase B2790 sequence

SEQ ID NO: 15790 - DNA, 260 bp, Unknown; identical to SEQ ID NO: 13134
  Description of Unknown: LeftRegion for integrase B2791 sequence

SEQ ID NO: 15791 - DNA, 260 bp, Unknown
  Description of Unknown: LeftRegion for integrase B2792 sequence
aatagagatacaaaaatcctttcgtaaaatcttaaagtgcggaatatataaagaattacgtagacgctcccttttgtcagatgagcaactaaattctctgataaatgaaaaataacgcaaatcaaattgcacatcacaagagattttgatacaatatagttgtcttgtggtgtgctattttcatttatggaggtagcacaatgaaagaaaatattttaagggttgcggcatatgccagagtatctacagataaagaagac

SEQ ID NO: 15792 - DNA, 260 bp, Unknown
  Description of Unknown: LeftRegion for integrase B2793 sequence
ggaaacaaattatataaaacaaaacaatattggattgataaatggaaaataatgcatgataaagaatgtatggaaaatgaaatagataatttatcggtgaagtctttataggaattgtaataaaattcatataatattttttaataaatattagttgcaaaaagttttaatgagcgttacaatgcgggtgaggtgatgatatgaacggtgtaatttatgcaagatattcaagcgaaaatcagcgagaagagtctattgac

SEQ ID NO: 15793 - DNA, 260 bp, Unknown
  Description of Unknown: LeftRegion for integrase B2794 sequence
aatagagatacaaaaatcctttcgtaaaatcttaaagtgcggaatatataaagaattacatagacgctcccttttgtcagatgagcaactaaattctctgataaatgaaaaataacgcaaattaaattgcacatcacaagagattttgatacaatatggttgtcttgtggtgtgctattttcatttatggaggtagcacaatgaaagaaaatattttaagggttgcggcgtatgccagagtatctacagataaagaagac

SEQ ID NO: 15794 - DNA, 260 bp, Unknown
  Description of Unknown: LeftRegion for integrase B2795 sequence
gactactttgacgtgtcgctggactacattttcggcaggacggacgacccccacggcatgatctataacaactgcgtgaagctcggcctgaacaatcccgaaatggcgcggttcgtggaaatgtgcttcgaccccggctcggctatgaacgaacgattgaaggcaacgcttgtgcagatgctctcggaggtggatacgaaatgaaagccgtgatctacgcccgctattcctctgacagccagcgagaagaatccatcgaa

SEQ ID NO: 15795 - DNA, 260 bp, Unknown
  Description of Unknown: LeftRegion for integrase B2796 sequence
ccttgcggtctgcgtcgtgtcgttcccggtcggcttgatcattgcgtccgttggagtgtaccgggcggtaaaggccggggatatttatgacgctgcggttgctcggtacgagcagcaaatctcggactatgttgactggctggatgaagtcaacgcaaaataaaaagccgccctcggtgggcggcgggaggttgctctgaatgtgtgcaaaaaagaagccggccatgcttgagccggatatgcaggatgctgtgatctac

SEQ ID NO: 15796 - DNA, 260 bp, Unknown
  Description of Unknown: LeftRegion for integrase B2797 sequence
cttggaatgctggaggactggccgaaggtcagccgcagtggaagcaaggctgcgctggaagatgcacaggctgaaattgagcggtggagacaagagttcctcgccgggaacatctcggcaaagaaatacgtcaaaattgcggacgctctcatgtccaaataaaaaagccgccctcggtgggcggcgggaggttgctctgaatgtgcgcaaaaaagaaaccggccatgcttgagccggatatgcaggatgccgtgatctac

SEQ ID NO: 15797 - DNA, 260 bp, Unknown
  Description of Unknown: LeftRegion for integrase B2798 sequence
tttgttaaatcagagtataccacggagttatgaacttttctactgcaaatatgggacgacaacccataccataaaaatcggaaaattgaaaagctgtaaagaagcaaatttaacgcttttgccgctgtacagcccccgccgttccgtggtacaatgaaaccacggaatagtggggctggctgtcggaaacggaggattttatgttaagacaagccacccaaaacctcattaccgccctttatccgagattgtcccacgag

SEQ ID NO: 15798 - DNA, 260 bp, Unknown
  Description of Unknown: LeftRegion for integrase B2799 sequence
ctgcttcgccaattttccttccgataccgccagatacttggggggaaggattgctaaatttaatgattgaattttggaattatcaaaataaaggtcaatcaatttagtttcacaatacaaaaaagccgcccacatagggcggcaatatttaaacctcgttaactaaacgtatgtttgttatgtagtagaaaggagcaactatgcgggcagcattatacgcaaggtattcaagcgataaccaacgctacgaaagtattacg

SEQ ID NO: 15799 - DNA, 260 bp, Unknown
  Description of Unknown: LeftRegion for integrase B2800 sequence
acttggaatgctggaggactggccgaaggtcagccgtagcggaagcaaggctgcgctggaagacgcacaggctgaaattgagcggtggaggcaagagttccttgctgggaatatctcagcgaagaaatacgttaaaattgcggatgctctcatgtccaaataaaaagccgcccttagtgggcggcgggaggttgctctgaatgcgcgcaaaaaagaaaccggccatgcttgagccggatatgcaggatgccgtgatctac

SEQ ID NO: 15800 - DNA, 260 bp, Unknown
  Description of Unknown: LeftRegion for integrase B2801 sequence
gatacacctcccgaaacagatactcttatggttgtcattgttgatgacgaagaaggatttgttaagaaaatcagcattgatgaagatactgtgacccttcgctcttttaacccacactatcctccccgtgtttttggcggtgttgaaattggacgattgcgctttgtcggtagagtcatggagttaaaaaggagatttgcatgaaaaaatttccaatcgacctctcctgtctgacagaggaagaaatctctcaatttcaa

SEQ ID NO: 15801 - DNA, 260 bp, Unknown
  Description of Unknown: LeftRegion for integrase B2802 sequence
aacagagattcaaaaatcttttcgtaaaaccttaaaatgcggaatatataaagaattacatagacgctcccttttatcagatgagcaactgaattctttgataagtgaaaaataacgcaaaataaattgcgcatcacaagatattttgatacaatatagttgtcttgtggtgtgctattttcatttatggaggtagcacaatgaaagaaaatattttaagggttgcggcgtatgccagagtatctacagataaagaagac

SEQ ID NO: 15802 - DNA, 260 bp, Unknown; identical to SEQ ID NO: 15705
  Description of Unknown: LeftRegion for integrase B2803 sequence

SEQ ID NO: 15803 - DNA, 260 bp, Unknown
  Description of Unknown: LeftRegion for integrase B2804 sequence
gactgtgtatcgtgtacgcagcttctttgtcgcagagcagcagatgggggacatgctggatgccctctctctcgaaaaagtcaatcgggagaactgaatcccggcacattgcccagtggaatccatagccgtgctgtggtataatcattgcagatttctgattgtatcacgcactgcatttcgggaggttaaataagaaaatgcaggaaaattatatcgttggtatttacgcacggctgagccgggacgatgagcgtgcc

SEQ ID NO: 15804 - DNA, 260 bp, Unknown
  Description of Unknown: LeftRegion for integrase B2805 sequence
gacacacctcctgaaacagatactcttatggttgtcattgttgatgacgaagaaggatttgttaagaaaattagtattgatgaagatactgtgacccttcgctcttttaatccacactatcctccccgtgtttttggtggtgttgaaattggacgattgcgctttgtcggtagagtcatggagttaaaaaggagatttgcatgaaaaaatttccaatcgacctctcctgtctgacagaggaagaaatctctcaatttcag

SEQ ID NO: 15805 - DNA, 260 bp, Unknown
  Description of Unknown: LeftRegion for integrase B2806 sequence
agcagagattcaaaaatcttttcgtaagacattaaagtgcggaatatataaagaattacataggcgctcccttttgtcagatgagcaactaaattctctgataaatgaaaaataacgcaaaataaattgcacatcacaagaggttttgatacaatatagttgtcttgtggtgtgctattttcatttatggaggtagtacaatgaaagaaaatattttaagggttgcggcgtatgccagagtatccacagataaagaagac

SEQ ID NO: 15806 - DNA, 260 bp, Unknown
  Description of Unknown: LeftRegion for integrase B2807 sequence
attatatatttttataataaataatacttaattattctatatattattcaattccttgtgccccaaaaatgttacgatttttacgtaacacgcccctccaaaatcgtaacattcgtaacacccggatgttatccacaatttcaccttgacttacccacaggaaaaccgaattcaaattcggttttgaggaggtgcttgttttgaaaaccgctgtcacctatgcccgcttttcatccgcgcgccagcatgagacgtctatc

SEQ ID NO: 15807 - DNA, 260 bp, Unknown
  Description of Unknown: LeftRegion for integrase B2808 sequence
tgactgctgtacttatgatgacagtcagcagaacacggaacttttaaaatcaaggcttggctgcgaacaactgaatacacttgatattggcttattcaaatcctgcgtgagcaagatcttgataagccatttttgtaccatagaggttgaattcatcaacggagtacacatcaaaaatatcacagaaaggaatgacaaaaatgtccacagctccgaatgtaacagtgatacctgcgaaagtgcagacagcggaaaaccgt

SEQ ID NO: 15808 - DNA, 260 bp, Unknown
  Description of Unknown: LeftRegion for integrase B2809 sequence
ttgctgtacttacaatgacagtccgcagaaaacagcggaaatcaaggctctgcttgaaaatcacgaacaattaaatacgctcgatattggcttatttaagtcctgcgtaaacaggattttgataagccatttttgtaccatagaggttgaattaatcaacggcacacgcatccaaaacatatcagaaaggaatgagaattgtgtcaaccgcatcgaatgtaacgataattcctgcgaaagttcagacggaaataaaccgt

SEQ ID NO: 15809 - DNA, 260 bp, Unknown; identical to SEQ ID NO: 15396
  Description of Unknown: LeftRegion for integrase B2810 sequence

SEQ ID NO: 15810 - DNA, 260 bp, Unknown
  Description of Unknown: LeftRegion for integrase B2811 sequence
atttcttctataatttcggacgagcttaaatatattaatattagaaataattttatgactagagaaataccatataattcatgtgcaatttagtactattcatacttattttcaatataaatatgtactcatactcgattaacttatatgatattaaaacttacaattaataatatacataatattcggaggtaatataaatgaaagctgctatctattcaagaaaatcaaaatttactggtaaaggtgaaagtatagaa

SEQ ID NO: 15811 - DNA, 260 bp, Unknown; identical to SEQ ID NO: 13307
  Description of Unknown: LeftRegion for integrase B2812 sequence

SEQ ID NO: 15812 - DNA, 260 bp, Unknown; identical to SEQ ID NO: 13133
  Description of Unknown: LeftRegion for integrase B2813 sequence

SEQ ID NO: 15813 - DNA, 260 bp, Unknown
  Description of Unknown: LeftRegion for integrase B2814 sequence
gactgtgtatcgtgtacgcagcttctttgtcgcagagcagcagatgggggacgtgctggatgccctctccctcgaaaaagtcaatcgggagaactggatcccggcacattgcccagtggaatccatagccgtgctgtggtataatccttgtagatttctgattgtatcacgcactgcatttcgggaggttaaataagaaaatgcaggaaaactatatcgttggtatttacgcacggctgagccgggacgatgagcgtgcc

SEQ ID NO: 15814 - DNA, 260 bp, Unknown
  Description of Unknown: LeftRegion for integrase B2815 sequence
tcttaaaaaggatgcatgaagataagctgttaaccgaggaagaatgggaaaaaatccgggttttgaatgtcaagactttctccccggaattagcaaaagtatatctgtaataacactggatatataaaggactatgtggtagtgtatgttgctgacagggagtgcaaacccttgaaaatactgggaaaggagaaaaaagcatggcaaaaaaagtgactgtcataaaggcagcaaaagcgcagaaacatacacaggaagaa

SEQ ID NO: 15815 - DNA, 260 bp, Unknown
  Description of Unknown: LeftRegion for integrase B2816 sequence
caaaaatccgacttaaaaattaagtcggatttttttatataaatattcttcttcatatcttcgttcataagcttgttaatataactgttaacatttaagccccttggttctgtgcatgtcttggtttaatcctattgcattgactatttacataatatatgatataataaaaaactacataaaagaaggtgagttgtcaaatgaatatagctatctattcaagaaaatctaaattcactggaaaaggtgaaagtatagaa

SEQ ID NO: 15816 - DNA, 260 bp, Unknown
  Description of Unknown: LeftRegion for integrase B2817 sequence
tcaaaaggatgctctgtcatgggatagaacatcctttttgaataccgttcagccgaaatttgtacaggagtccatcataaaaatgacattctataaacctattgcaataggatgaaaagtatggtatatacattatacgaaacattgctttgaaatgaacactctaccgtccattgatgcataaaagagaggtgcttgccatgaccgccgtgatctatgcccgctattcatcggataaccagcgcgaagaatccattgaa

SEQ ID NO: 15817 - DNA, 260 bp, Unknown; identical to SEQ ID NO: 13224
  Description of Unknown: LeftRegion for integrase B2818 sequence

SEQ ID NO: 15818 - DNA, 260 bp, Unknown
  Description of Unknown: LeftRegion for integrase B2819 sequence
aacaatagatgattccaaatatctagattaagtatcaattttagtctatttactttatgatggtaaagaatttgttaatgatttaagatagaatacaattaaaaaattaatgtcggtaaaatatggcaaaaaaacctcgtattgcgagtacgaggcatgaaaaacacgaaaaagtcaacgaaacttaattacaaaaatagatgtctataattgtatgtgttttcatatacaattatagcacactttacacggaaaggaaa

SEQ ID NO: 15819 - DNA, 260 bp, Unknown
  Description of Unknown: LeftRegion for integrase B2820 sequence
tagcaatctaaaaaagtgcaacaaggttctgcgagagacaggtaaaattgctgattttaatgatgagttgtttgagatttttattcagagaatattggttattaaccgtaataacctggtttacgaattgacgagtggtcataaaatcaatgtcgaggtactcgataattataaggtcagggatgagataaggagggtttatgttagcgagtaatgtaaaagtaattcaaccaagaaaattattcaatatagaagagagc

SEQ ID NO: 15820 - DNA, 260 bp, Unknown
  Description of Unknown: LeftRegion for integrase B2821 sequence
aatagagatacaaaaatcctttcgtaaaatcttaaagtgcggaatatataaagaattacatagacgctcccttttgtcagatgagcaactaaattctctgataaatgaaaaataacgcaaattaaattgcatatcacaagagattttgatacaatatggttgtcttgtggtgtgctattttcatttatggaggtagcacaatgaaagaaaatattttaagggttgcggcgtatgccagagtatctacagataaagaagac

SEQ ID NO: 15821 - DNA, 260 bp, Unknown
  Description of Unknown: LeftRegion for integrase B2822 sequence
ctgctgcacttacaatgacagtccgcagaaaacagacaagatcaaggaattgctcaaaaatcatgaacaattaaacagcttagatatcggcttattcaaagcgtgtgtttcacgaatttggataagccatttttgtaccatagaggttgagtttatcaatggtgtgaaaatcaaaaatactacagagaggatgaatgaaaatgagtacagcgccgaatgtaacgataattcctgcaaaaatccagactgcggaaaaccgt

SEQ ID NO: 15822 - DNA, 260 bp, Unknown
  Description of Unknown: LeftRegion for integrase B2823 sequence
acaggtcttttgattgtgtgtagtgacccggcgcaaaagaaaattgatagagccgatgccctgaatattccgattgtttcggagcagcaatggtttgaacttatgcctgaacttgaggccgttggaatgtggaacggaaagcaaattctgtttgcggacaatgatggcatctaccgtgttgaagtgggcggtgaaagctgatggccagaaaaaagaatattgctgctggcctcgatgccgtcatctatgcccggtactcg

SEQ ID NO: 15823 - DNA, 260 bp, Unknown
  Description of Unknown: LeftRegion for integrase B2824 sequence
acttggaatgctggaggactggccgaaggtcagccgtagtggaagcaaggctgcgctggaagatgcacaggctgaaattgagcggtggaggcaagagttccttgctgggaatatctcggcgaagaaatacgttaaaattgcggatgctctcatatccaaataaaaagccgccctcgatgggcggcgggaggttgctctgaatgtgtgcaaaaaagaaaccggccatgcttgagccggatatgcaggatgccgtgatttac

SEQ ID NO: 15824 - DNA, 260 bp, Unknown
  Description of Unknown: LeftRegion for integrase B2825 sequence
tttccttttccgtgaaatgcacccaggaagagacattcgagaaggaaagcaaggaggggaaagcgtataagcttcacaatattaacgaactcacatatcgttttaccgctcctagtgatataccagatgccgaaacaatcccagacccattatatagcacaatagtaaaatggctcaacaaaaagtgaggtgattcggttttggctaagtataagcaagtcgtgcaggaacaaatcggcgtaatctatgcccggtattct

SEQ ID NO: 15825 - DNA, 260 bp, Unknown
  Description of Unknown: LeftRegion for integrase B2826 sequence
ctgctgcacttacaatgacagccctcagaaaacagataaaatcaaggctctgcttgaaaatcacgaacaattaaatacgttggatattggcttattcaaagcgtgtgtttcacgaatttgtataagccatttttgtaccgtagaggttgagcttatcaacggagtgagaattaaaaatataacggaaaggaagatcgaaaatgagcacagcgccgaatgtaacagtaattcctgcgaaagtgcagacagcggaaagtcgt

SEQ ID NO: 15826 - DNA, 260 bp, Unknown
  Description of Unknown: LeftRegion for integrase B2827 sequence
agcagaaattcaaaaatcctttcgtaaaatcttaaagtgcggaatatataaagaattacatagacgctcccttttgtcagatgagcaactaaattctctgataaatgaaaaataacgcaaatcaaattgcacatcacaagagattttgatacaatatagttgtcttgtggtgtgctattttcatttatggaggtagcacaatgaaagaaaatattttaagggttgcggcatatgccagagtatctacagataaagaagac

SEQ ID NO: 15827 - DNA, 260 bp, Unknown
  Description of Unknown: LeftRegion for integrase B2828 sequence
tcttgcggtctgcgtcgtgtcgctcccggtcggcttgatcgttgtggccattggagcgtaccgggtagcaaaggccggggatatttatgacgctgcggtcgctcggtacgagcagcaaatctcggactatgttgactggctggatgaagtcaacgcaaaataaaaagccgccctcggtgggcggcgggaggttgctctgaatgtgtgcaaaaaagaaaccggccatgcttgagccggatatgcaggatgccgtgatctac

SEQ ID NO: 15828 - DNA, 260 bp, Unknown
  Description of Unknown: LeftRegion for integrase B2829 sequence
tttttcaagcagagtgccacggaaaccgcagccgacaaaatggctaaggtgctggaagcggaagctgctacacaaaaatcggcaatatgacgggcggtaaagaagcatttttcacattttgccgctatacacgccgccccgccatgtggtacaatcgaagtacggaatagtggggctggctgtcagaaacggaggaaaccatgttaagacagacaacccaaaaccttattaccgccctttatccgagattatcccatgaa

SEQ ID NO: 15829 - DNA, 260 bp, Unknown; identical to SEQ ID NO: 13821
  Description of Unknown: LeftRegion for integrase B2830 sequence

SEQ ID NO: 15830 - DNA, 260 bp, Unknown
  Description of Unknown: LeftRegion for integrase B2831 sequence
ttattccgttttgcttcatttattctttattttcgtaaaatttgcaaaaagaaaaagcccgccgggccgaagcctgacgggctataaatgaaactgtatttatatgatcctgcagtgatttatgatttttcgtctcacgccttgcgctttcgtctaatccgcaggccaatgagacgattacctgaaaggacactcaaggtatggcaaaaagaaaattcaacaagggcggcgaagtgcggctggtcgcctattacagatac

SEQ ID NO: 15831 - DNA, 260 bp, Unknown
  Description of Unknown: LeftRegion for integrase B2832 sequence
ctgcgtcatatggggtttaaatatacacaccgcaaaagatatacaagatgtatttgatgtaagttacacagccgccaaaatacgtgctgaacgaatgcaaatattgtacgaaagaaatagatttttgacgagcccgttggaaaaacgggtatatgatatgtttgaaccatatatacaagcaaacaggagggtataaggcaatgaatgttgttctatatatgagatacagtagtgacaggcaaacggagcagtctatagag

SEQ ID NO: 15832 - DNA, 260 bp, Unknown
  Description of Unknown: LeftRegion for integrase B2833 sequence
ttttacgttgattatcttttattcttcattttcgtaaaatttgcaaaaagaaaaagcccgccgggccgaagcctgacgggctatagatgaaactgtatttatataattcagcagcgatttatgatttttcgtctcacacgttgcgctttcgtctaatctgcgggttaaatgagacgattactcgaaaggacgctcaaggtatggcaaaaagaaaattcaacaagggcggcgaggttcggctggtcgcctattacagatac

SEQ ID NO: 15833 - DNA, 260 bp, Unknown
  Description of Unknown: LeftRegion for integrase B2834 sequence
acaggtcttttgattgtgtgcagcgactcaatgcaaaagaaaatcgacagagcggatgccctgaatattccaatcgtttcggagcagcaatggtttgaactcatgccggaacttgaggccgctggaatgtggaacggaaagccaatttcattcgcggatgacgatggtatctaccgttttgatgtgggtggtgatggataatggcaaaaaagaagaagcccgccgggggcattgccatcatctatgcccgctactcgtcc

SEQ ID NO: 15834 - DNA, 260 bp, Unknown
  Description of Unknown: LeftRegion for integrase B2835 sequence
aggcaaggcagatttcaccggtgaacagctgcgaagccgcatacagaaaatcgtggtttgcaacgaaaatgttctgattttccgctttcgggatggttcggaagttacacgaaaatggaaagaccgctcacgcagcgaaagctggacagaagaaatgaaagcagccgccaatcaaaaagcattagagaggaataagcacaatgcctaaagttaccatgattcctgcaaccataaatccgctgacgcacttgccaaaagaa

SEQ ID NO: 15835 - DNA, 260 bp, Unknown; identical to SEQ ID NO: 13468
  Description of Unknown: LeftRegion for integrase B2836 sequence

SEQ ID NO: 15836 - DNA, 260 bp, Unknown
  Description of Unknown: LeftRegion for integrase B2837 sequence
gtctttgagcgtgtccgtgacatcctgctcgccaccagctataccaaaaagaccagctgacatcgtggacgaggacaaaagaacgcgctatactgaggatggcagtggtattcggagcaatccatgaaccacgaccaaccgttctttgataaccgaatatcgttcatcctcgcttttatagcgaaagtgaggaaccccctatgactgaaaataaaaaccgtgtctgctgcctgtaccgtgtttccaccgataagcaggtg

SEQ ID NO: 15837 - DNA, 260 bp, Unknown
  Description of Unknown: LeftRegion for integrase B2838 sequence
tacaatatcaactcggtgtttgatatgacctcaaaatccacagcggaggacaagctgaaatatttgctgaagtccgccgctgaaaaattatcataaacttatagattattgctggactttcagaaccggttgtgatatactttctgtaatctcaatcggtttgacatagtccgcagcacagacggaaagagaggttaatcatgtcagacacgaataagataacggctttgtattgcaggctcagccacgaggacgagctt

SEQ ID NO: 15838 - DNA, 260 bp, Unknown
  Description of Unknown: LeftRegion for integrase B2839 sequence
actccgttagagggcatgagtaaagagcaagcctctctttatatgctcacggaatttctaagcctcatagataaagaatatcctaaaataccgccccagcagaaagccgctttaattagcgaattttataagcatgaccctataaaattgttattatctgcacttaataacgaactatccaaacaaggaagtgataaaaaatgatgcagcaggcattaaacgccgtaatatacgcccgttattcttcccacaatcaaaca

SEQ ID NO: 15839 - DNA, 260 bp, Unknown
  Description of Unknown: LeftRegion for integrase B2840 sequence
ttttacgttgattatcttttattcttcattttcgtaaaatttgcaaaaagaaaaagcccgccgggccgaagcctgacgggctatagatgaaactgtatttatataattcagcagcgatttatgatttttcgtctcacacgttgcgctttcgtctaatctgcgggttaaatgagacgattacttgaaaggacgctcaaggtatggcaaaaagaaaattcaacaagggcggcgaggttcggctggtcgcctattacagatac

SEQ ID NO: 15840 - DNA, 260 bp, Unknown
  Description of Unknown: LeftRegion for integrase B2841 sequence
aggaaatcgtcgccgcctccggcctctcccaggctgcctttgccgagcgttactgcatcccaaagcgcactgtcgaggactggtgccgcggtgtcgcaaaatgcccgctgtacacccggctgctgttgcagcgagccgaaggactgctgcaggtatgaccgattgtgtccaatttggacacgatcaggaaggagcaagtaatgccaaacgctgtgatctatgcccgctactcatctcacgcccagcgggatgcctccatc

SEQ ID NO: 15841 - DNA, 260 bp, Unknown; identical to SEQ ID NO: 15832
  Description of Unknown: LeftRegion for integrase B2842 sequence

SEQ ID NO: 15842 - DNA, 260 bp, Unknown
  Description of Unknown: LeftRegion for integrase B2843 sequence
ctctgaacttggttttccctctaactggcatgagcttatcaaataatcatcatctataaagaatccccggcagctctgtacgatagagccgccggggccagatggggaatctgtctgtcggagaataatcataggataagaaaacacctgctgagcaatttcattgtaccatgatcctgctcagcgcacaaggagtaatcatggcaagaaaaaagaaagtatctcccgggaaccgtctggttgcctactatcgttacagc

SEQ ID NO: 15843 - DNA, 260 bp, Unknown
  Description of Unknown: LeftRegion for integrase B2844 sequence
tacaacatcaactcggtgtttgatatgacctcaaaatccacagctgaggacaagctgaaatatttgctgagatccgccgctgaaaaattatcataaatttatagattatcgctggactttcagaatcgattgtgatatactatctgtaatctcaatcggtttgacagagtccgcataatggacggaaagagaggttaataatgtcagacacgaataagataacggctttgtattgcaggctcagtcacgaggatgagctt

SEQ ID NO: 15844 - DNA, 260 bp, Unknown
  Description of Unknown: LeftRegion for integrase B2845 sequence
ctactagaactgtaattgaacaaattaaagagcttaaactggttaatgacctagattctttatttaaggattatgagcctaaaaatgttgctgaaactttatttatagcagcaatcaaagcagatttaagttacataattcaaccaaatgaggaagatgagtaatctcatctttcttttatatatgggaggtatttaaaaatgaaagtagcaatttacactagagtttcaactcatcatcaaattgataaggattcttta

SEQ ID NO: 15845 - DNA, 260 bp, Unknown
  Description of Unknown: LeftRegion for integrase B2846 sequence
atcgactctggggatgtggctgtcgtactggtcaatgatggtatcagtgcagaagggtttgtgaagaagatcgagctggatgagacaggtgtggtgctgcactcctacaatccatactacccgcccatggtcttctccggcacgaacgctcaacaggtctccttcgttggtaaggtgattgagctgaaaaggaagttctgatgagaaagaagaacaaatttccaatcgacctctctatgctaacagacttggagatccag

SEQ ID NO: 15846 - DNA, 260 bp, Unknown
  Description of Unknown: LeftRegion for integrase B2847 sequence
cgtttccggctatttcaagcaggacaccaccgccaccgccgccgataaaatgctgaaagtgctggaagcggaagctgctacacaaaaatcggcaatttgacgggacgtaaagaagcagaaaggactgtacagccagccccggcgtgtggtatgatagtcatacggaatagtggggctggctgtcggaaatggaggacactatgttaagacagaccacccgaaaccttattaccgccctttatccgagattatcccacgag

SEQ ID NO: 15847 - DNA, 260 bp, Unknown
  Description of Unknown: LeftRegion for integrase B2848 sequence
agcatttgaacgtatccgggatattctgcttgccacaagctacacaaagaaagcgggttgacatcgtggacgaaaacctaagcactcgttatactgaggatggctgtggtgttttggtcagacaaagaaccacgaccacccgttctttggcaaccgaatagtacccattctcacttctattataaagtgaggaatcgaaaatgaatgaaatgaacaatcgcgtctgctgcctgtaccgtgtttccaccgacaaacaggtg

SEQ ID NO: 15848 - DNA, 260 bp, Unknown; identical to SEQ ID NO: 15837
  Description of Unknown: LeftRegion for integrase B2849 sequence

SEQ ID NO: 15849 - DNA, 260 bp, Unknown
  Description of Unknown: LeftRegion for integrase B2850 sequence
accgtcattttcctgttcattgacatgtctatcttccttgccggtcttctcgtctctgcggctgagtgggcggtggtctacttctgctgctatcttcctgcaaaggcgaaggctcggcagtatgaaattgaaaagcaaatccggaacgaccgcatcctgaatgatgacgtggaagaactggacgaaacggaggacgaagaatgagagtcgtggcttactgtcgttattcctccgaggctcaaagggacggctactctatc

SEQ ID NO: 15850 - DNA, 260 bp, Unknown; identical to SEQ ID NO: 15832
  Description of Unknown: LeftRegion for integrase B2851 sequence

SEQ ID NO: 15851 - DNA, 260 bp, Unknown
  Description of Unknown: LeftRegion for integrase B2852 sequence
cagaccccgccgcgcctctcaacgatgcgtaccatggtggggtcgtttttattgcaaaaagaatccccggcagctctgtacgatagagccgccggggccagatggggaatctgtctgtcggagaataatcataggataagaaaacacctgctgagcaatttcattgtaccatgatcctgctcagcgcacaaggagcaatcatggcaagaaaaaagaaagtatctcccgggaaccgtctggttgcctactaccgttacagc

SEQ ID NO: 15852 - DNA, 260 bp, Unknown
  Description of Unknown: LeftRegion for integrase B2853 sequence
attttacgttgattgtcttttattcttcattttcgtaaaatttgcaaaaagaaaaacccgccgggccgaagcctgacgggctatagatgaaactgtatttatataattcagcagcgatttatgatttttcgtctcacacgttgtgctttcgtctaatctgctggtcaaatgagacgattacttgaaaggacgctcaaggtatggcaaaaagaaaattcaacaagggcggcgaggttcggcttgtcgcctattacagatac

SEQ ID NO: 15853 - DNA, 260 bp, Unknown
  Description of Unknown: LeftRegion for integrase B2854 sequence
ctctctccgacctcatggctatgcaaagccagctcaaaaacgctgtggacgctctgctcgacaagctcgttcaggccgatatggaaatcgcctttaacgtgcaaaaagacgcagccgagttatcaaaagggtcggtcggataatctatgtggacttccgcccctccaagtgaggggcgtttcttttggaggtgaatccctatgcggaacaatccgttatccagtgccgacgaatactgtatgtacctgcgcaaatcccgt

SEQ ID NO: 15854 - DNA, 260 bp, Unknown; identical to SEQ ID NO: 15836
  Description of Unknown: LeftRegion for integrase B2855 sequence

SEQ ID NO: 15855 - DNA, 260 bp, Unknown
  Description of Unknown: LeftRegion for integrase B2856 sequence
aggagatcgtcgccgcctccggcctctcccaggccgcctttgcggaacgctattgcatccctaagcgcaccgtcgaggattggtgccgcggggtcgcaaaatgcccattgtacacccgcctgctgctgcagcgagccgagggactgctgcaggtatgaccgccggtgtccaatttggacaccggaaggaaggagcaaactatgccaaacgctgtgatctatgcccgctactcttcccatgcccagcgggatgcctctatt

SEQ ID NO: 15856 - DNA, 260 bp, Unknown
  Description of Unknown: LeftRegion for integrase B2857 sequence
gtctttgatcgtatccgtgacattctgctcgccaccagctataccaagacaactagctgacatcgtggacgaggacaaaagaacgcgctatactgaggatggcagtggtattcgggacaatccatgaaccactaccaatcgttctttgataaccgaatatcgtttatcctcgcttttatagcgaaagtgaggaaccccctatgactgaaaataaaaaccgtgtctgctgcctgtaccgtgtgtccactgacaagcaggtg

SEQ ID NO: 15857 - DNA, 260 bp, Unknown; identical to SEQ ID NO: 15830
  Description of Unknown: LeftRegion for integrase B2858 sequence

SEQ ID NO: 15858 - DNA, 260 bp, Unknown; identical to SEQ ID NO: 14174
  Description of Unknown: LeftRegion for integrase B2859 sequence

SEQ ID NO: 15859 - DNA, 260 bp, Unknown
  Description of Unknown: LeftRegion for integrase B2860 sequence
ttgggatttcccgaggattgggccaatattttgaagcgtccataattccagtcataaagaatccccggcagctctgtacgatagagccgccggggccagatggggaatctgtctgtcggagaataatcatagaataagaaaacacgcctgctgagcaatttcattgtaccatgatcctgctcagcgcacaaggagcaatcatggcaagaaaaaagaaagtatctcccgggaaccgtctggttgcctactaccgttacagc

SEQ ID NO: 15860 - DNA, 260 bp, Unknown; identical to SEQ ID NO: 13007
  Description of Unknown: LeftRegion for integrase B2861 sequence

SEQ ID NO: 15861 - DNA, 260 bp, Unknown
  Description of Unknown: LeftRegion for integrase B2862 sequence
taaaagaacatttttctgaaaaaggaaagacaatggaagaacttttgactgatgtcatgctggaaaaggcaaaacagacaatcgcataaaatcggtgcagttgtgagaaatagattgaatgagaaaaaagacccgtgttatactttacttgcaagcaggtattgtaaacacgggttagttataaaggaggataactgacaatgaaacaacagatttacaatactgcactttatcttaggctgagccgagatgatgaatta

SEQ ID NO: 15862 - DNA, 260 bp, Unknown; identical to SEQ ID NO: 15847
  Description of Unknown: LeftRegion for integrase B2863 sequence

SEQ ID NO: 15863 - DNA, 260 bp, Unknown
  Description of Unknown: LeftRegion for integrase B2864 sequence
tacggattacacagtagcgcaaaagacaggcccgtctctgccagaggatgttactatcatgctttctgggcttgacagcacagatcttgaaaaagtcatgatatacgcccgcggtctgctggacggggacaagtatcagaaccgccgtccgcggtaaagctgaaaacgcttccggctatgaacatagaaaggggcagacgatgagcgtatccgtaaccttaaatacacaaaagccggataccacgacgaacgccgtcatt

SEQ ID NO: 15864 - DNA, 260 bp, Unknown
  Description of Unknown: LeftRegion for integrase B2865 sequence
tgtgatcgttgccttggcacctcgttcggggtcagtggtggtgccattccaatcccggaaagcgaggcagttcgccgtgggcttcaccgctgcaaaaggtgtgagtggggtagaagcccagtcccggcaccaagccgcaagcctctttcggaggcgaggccggtctctcgctgcaaggttgttttagggcgcggtggccgatgatggagcgcgatttgtctcttgaccgctgccagggcgactgtgtcatctatgcccgc

SEQ ID NO: 15865 - DNA, 260 bp, Unknown
  Description of Unknown: LeftRegion for integrase B2866 sequence
aacgaattacggttattgtgtgatttctttggttgttcacttgactacttcggcgtatcaacggaagatgaaacttttgaattgttgagccgtgctaaaaatgtttttcttaacaaagatatcccaaaagaggaacgagaacggttgtataaggaaataatgcgtatgtatctcgacgcagaataacagggggaaacaacatggcaagtcagacaagaaaagtaaaaaggaacggagcgcaaataaagcgagctatcgcc

SEQ ID NO: 15866 - DNA, 260 bp, Unknown
  Description of Unknown: LeftRegion for integrase B2867 sequence
tttttcaagcagagtgccacagaaaccgcagccgacaaaatggctaaggtgctggaagcggaagctgctacacaaaaatcggcaatatgacgggctgtaaagaagcgctttttacactttgccgctatacacgccgccccgctgtatggtacaatcgaagtacggaatagtggggctggctgtcagaaacggaggaaaccatgttaagacagacaacccaaaaccttattaccgccctttatccgagattatcccatgaa

SEQ ID NO: 15867 - DNA, 260 bp, Unknown
  Description of Unknown: LeftRegion for integrase B2868 sequence
agcatttgaacgtatccgggatattctgcttgccacaagctacacaaagaaagcgggttgacatcgtggacgaaaacctaagcactcgttatactgaggatggctgtggtgttttggtcagacagagaaccacgaccacccgttctttggcaaccgaatagtacccattctcacttctattataaagtgaggaatcgaaaatgaatgaaatgaacaatcgcgtctgctgcctgtaccgtgtttccaccgacaaacaggtg

SEQ ID NO: 15868 - DNA, 260 bp, Unknown; identical to SEQ ID NO: 13129
  Description of Unknown: LeftRegion for integrase B2869 sequence

SEQ ID NO: 15869 - DNA, 260 bp, Unknown
  Description of Unknown: LeftRegion for integrase B2870 sequence
agatgatgaaggtgctggaagcggaggccgccgccaatacccgcaccgcttccgcttcgtgataagcccggctgtaaaaatcgtcgttttgacgggcgataaagcagcaaattttgcttttacccgctatacagacagccgccccctgtggtatgatgttcatacggaatagcggggcggctgtcggaaatggaggatttatgttaagacaagccacccaaaagacccctatcacagccctttacgcaagattgagcaag

SEQ ID NO: 15870 - DNA, 260 bp, Unknown
  Description of Unknown: LeftRegion for integrase B2871 sequence
gtgacatcgtcaccgcttctggcctctcccaggcggcctttgccgagcggtactgcatcccgcgtcggaccgtggaaaactggtgcagcggagtcaatgagtgccccctgtacaccagactgctgctgcagcgagctgagggactgctgcaggtatgaccgccggtgtccaaattggacaccggcaggaaggagcaagctatgccaaacgctgtgatctatgcccgctactcgtcccatgcccagcgggacgcatccatt

SEQ ID NO: 15871 - DNA, 260 bp, Unknown
  Description of Unknown: LeftRegion for integrase B2872 sequence
acccggtctgcacttttattgtagcatgatccccctcagaacacaatccggcaaaaaagaatccccggcagctctgtacgatagagccgccggggccagatggggaatctgtctgtcggagaataatcataggataagaaaacacgcctgctgagcaatttcattgtaccatgatcctgctcagcgcacaaggagcaatcatggcaagaagaaagaaagtgtctcccgggaaccgtctggttgcctactaccgttacagc

SEQ ID NO: 15872 - DNA, 260 bp, Unknown; identical to SEQ ID NO: 15412
  Description of Unknown: LeftRegion for integrase B2873 sequence

SEQ ID NO: 15873 - DNA, 260 bp, Unknown; identical to SEQ ID NO: 15667
  Description of Unknown: LeftRegion for integrase B2874 sequence

SEQ ID NO: 15874 - DNA, 260 bp, Unknown; identical to SEQ ID NO: 15847
  Description of Unknown: LeftRegion for integrase B2875 sequence

SEQ ID NO: 15875 - DNA, 260 bp, Unknown; identical to SEQ ID NO: 14174
  Description of Unknown: LeftRegion for integrase B2876 sequence

SEQ ID NO: 15876 - DNA, 260 bp, Unknown
  Description of Unknown: LeftRegion for integrase B2877 sequence
ttatcttatttctagtaaaaactataaaatgaaatttttcaattattctgttgggtaatattaagcattctaaaattcaatagggaacttacttcccagtaaatattattgggaagtcgtatgtcaagcctactttactttttgccaaaatgagtaaaaataaaaacatacaagttcagaaattttaaggagttcagattatgcaaaacaaacaagcggttatttatgcacgtgtatctagcagagaacaagaacgtgag

SEQ ID NO: 15877 - DNA, 260 bp, Unknown; identical to SEQ ID NO: 15832
  Description of Unknown: LeftRegion for integrase B2878 sequence

SEQ ID NO: 15878 - DNA, 260 bp, Unknown
  Description of Unknown: LeftRegion for integrase B2879 sequence
gaccccgccgcgcctctcaacgatgcgtaccatggtggggtcgtttttattgcaaaaagaatccccggcagctctgtacgatagagccgccggggccagatggggaatctgtctgtcggagaataatcataggataagaaaacacgcctgctgagcaatttcattgtaccatgatcctgctcagcgcacaaggagcaatcatggcaagaaaaaagaaagtatctcccgggaaccgtctggttgcctactaccgttacagc

SEQ ID NO: 15879 - DNA, 260 bp, Unknown; identical to SEQ ID NO: 15836
  Description of Unknown: LeftRegion for integrase B2880 sequence

SEQ ID NO: 15880 - DNA, 260 bp, Unknown
  Description of Unknown: LeftRegion for integrase B2881 sequence
taaaagagcatttttccgaaaagggcaaaacaatggaagaacttctaactgatgtcatgctggaaaaagcaaagcagacaatcgcataaaatcagtgcagttgtaagaaatagattgaatgacaaaaagtacccgtgttatactttacttgcaagcaggtattgtaaacacgggttagttataaaggaggataactgacaatgaaacaacagatttacaatactgcactttatcttaggttaagccgagatgatgaatta

SEQ ID NO: 15881 - DNA, 260 bp, Unknown
  Description of Unknown: LeftRegion for integrase B2882 sequence
agcatttgaacgtatccgggatattctgcttgccacaagctacacaaagaaagcgggttgacatcgtggacgaaaacctaagcactcgttatactgaggatggctgtggtgttttggtcagacaaagaaccacgactacccgttctttggcaaccgaatagtacccattctcacttctattataaagtgaggaatcgaaaatgaatgaaatgaacaatcgcgtctgctgcctgtaccgtgtttccaccgacaaacaggtg

SEQ ID NO: 15882 - DNA, 260 bp, Unknown
  Description of Unknown: LeftRegion for integrase B2883 sequence
tttgacgaggcggccttcgcagccaaggtggaagaaattcaggtgccagagaatggcgtgctggtctttgttttctatgacgggcataccgtaacaaagacttgggacaacccttcccgccgccatagctggaaccctgagaaccgccagcgggcgcgtgaactggcgctccggcaggccgcagaaaggaggcttgccaaatgccagcagtaacagcgacgcgggtaacgattatccctgcaaagaaagaccggcttccc

SEQ ID NO: 15883 - DNA, 260 bp, Unknown; identical to SEQ ID NO: 14965
  Description of Unknown: LeftRegion for integrase B2884 sequence

SEQ ID NO: 15884 - DNA, 260 bp, Unknown
  Description of Unknown: LeftRegion for integrase B2885 sequence
ttggcaatacgaaaatccgtgtaacagagcattttaatagcaagggtaaacacatcaaagatctcgtagaaaatgccgtacaatacgccgcaaatgcggcttaataacggtgacaacagctcgttcttgtgatataattacgcggtaagcttatcataagtgcgagttgtttcactactaaaggaggttgctaaacaacggtgaaacaactgatttatcgcgtcgcgctctatatgcgattgagccgagacgatgaggat

SEQ ID NO: 15885 - DNA, 260 bp, Unknown
  Description of Unknown: LeftRegion for integrase B2886 sequence
tgcttgcttctttagagccagagcagatcgctttatgattacaactgcacgattaaacgaaatacgggcagttatacatgaaatgcttttgcacgtttgcattgatagcatggttgccatacaatagctgtagcaccttgacagccgaatactctatcagcgtaatctcgtgcagaaaaaagcacgggaggtaatgacaaatgaaacgagtatacacactatacagagtgtccacaaaacagcaggtagacaaagcgaaa

SEQ ID NO: 15886 - DNA, 260 bp, Unknown
  Description of Unknown: LeftRegion for integrase B2887 sequence
gctcgctcgcctacgatatcactacaatatgctcttccgcacctacacccggtggatggttgtgctttttgccgccaatatgggtctggtgctgctgctctgcggggtaattgcccacaaggagcggggctggctccggcattgataaaaatagcttccggtgtcaatattgacaccggaagggaagagggggtaatattatgcagcggcagcacggggcgtatatctacgcccggtacagcacggaaaaccaggacgcg

SEQ ID NO: 15887 - DNA, 260 bp, Unknown
  Description of Unknown: LeftRegion for integrase B2888 sequence
atatgccctccatccgtcaggcgcgtgtcaaccgctcagtcaaccgcaccgtcacgctccccgcatggctcaacgctgccgcgctggagcataatatgaacttctcgcaggtgcttcaggacgcgctcaagcagcagctcggcctttgataaagaaaaagcccccggctatatgccgagggctttgaaagaaggtgctatatgaagttgacgcatggggcatatatccttgcccgtttctccaccgacaggcaggaggcc

SEQ ID NO: 15888 - DNA, 260 bp, Unknown
  Description of Unknown: LeftRegion for integrase B2889 sequence
atatgccctccatccgtcaggcgcgtgtcaaccgctcagtcaaccgcaccgtcacgctccccgcatggctcaacgctgccgcgctggagcataatatgaacttctcgcaggtgcttcaggacgcgctcaagcagcagctcggcctttgataaagaaaaagcccccggctatatgccgagggctttgaaagagggtatcatatgaagttaacacacggggcttatatccttgcccggttctctactgaccggcaggaggcc

SEQ ID NO: 15889 - DNA, 260 bp, Unknown
  Description of Unknown: LeftRegion for integrase B2890 sequence
catcttctccgcagaaaagacagggcgttttggaacgagttgaacctaaacgtgcaactctacttatataaatgactcccagatatgatatttcggaaatgaatttaactttttgactgttgaaagtgtggaaagatttattttccccataacttgcaacggcttgcaacaaacttaaaactacttgaaaggtggtatttatgcctcgcaaaaagaaactgcaagaggttggcggcctgcgcctggtggcgtactatcgc

SEQ ID NO: 15890 - DNA, 260 bp, Unknown
  Description of Unknown: LeftRegion for integrase B2891 sequence
catcttctccgcagaaaagacagggcgttttggaacgagttgaacctaaacgtacaactctacttatataaatggctccccgatatgatatttcggaaatgaatttaactttttgactgttgaaagtgtggaaagatttattttccccagaacttgcaacggcttgcaacaaacttaaaactacttgaaaggtggtatttatgcctcgcaaaaagaaactgcaagaggtaggcggactgcggctggtggcgtactatcgc

SEQ ID NO: 15891 - DNA, 260 bp, Unknown
  Description of Unknown: LeftRegion for integrase B2892 sequence
gccagtaaatgaccggcaaatgaccagcaaataaaaatagcacccggcgctaccaacaccggatgctacatccaagagttaccactcccagagccatcaacccagacaccacatcaagagctgattgcatctataattataacagattttaatcagctctgccactgcatacccattttagcaaaaggagctgattttttatgcttaaaaatacaaaaatcgccgtatactgccgcgtatcgtcagacgagcaggcagag

SEQ ID NO: 15892 - DNA, 260 bp, Unknown
  Description of Unknown: LeftRegion for integrase B2893 sequence
catcttctccgcagaaaagacagggcgttttggaacgagttgaacctaaacgtacaactctacttatataaatggctcccagatatgatatttcggaaatgaatttaactttttgactgttgaaagtgtggaaagatttattttccccagaacttgcaacggcttgcaacaaacttaaaactacttgaaaggtggtatttatgcctcgcaaaaagaaactgcaagaggtaggcggactgcggctggtggcgtactatcgc

SEQ ID NO: 15893 - DNA, 260 bp, Unknown
  Description of Unknown: LeftRegion for integrase B2894 sequence
catcttctccgcagaaaaggcagggcgttttggaacgagttgaacctaaacgtgcaactctacttatataaatggctcccagatatgatatttcggaaatgaatttaactttttgactgttgaaagtgtggaaagatttattttccccagaacttgcaacggcttgcaacaaacttaaaactacttgaaaggtggtatttatgcctcgcaaaaagaaactgcaagaggtaggcggcctgcgcctggtggcgtactatcgc

SEQ ID NO: 15894 - DNA, 260 bp, Unknown
  Description of Unknown: LeftRegion for integrase B2895 sequence
aaaaacgccccatcttctcaaaagaaaagacagggcgttttggaacgagttgaacctaaacgtgcaacttcacttatataaatggctccaagatatgatatttcggaaatgaatttaactttttgactgttgaaagtgtggaaagatttatttttcccagaacttgcaacaaacttaaaactacttgaaaggtggtatttatgcctcgcaaaaagaaactgcaagaggtaggcggcctgcgcctggtggcatactatcgc

SEQ ID NO: 15895 - DNA, 260 bp, Unknown
  Description of Unknown: LeftRegion for integrase B2896 sequence
actggctctcaaaaagcggcacaccatccgcccgactgccccctttctgctggccggatataaccgcatcccgaacctggatgacctgaacatggaccagatcagcgcagcctatcatctcggtaagcaactggccgacaatcactaaccgtttcccggtgtccagcctggacaccggccccacccaaaggagggagaccatgtccaccgccgttgtatatgcccgctactcctcccactcccagcgggatgcctctatc

SEQ ID NO: 15896 - DNA, 260 bp, Unknown
  Description of Unknown: LeftRegion for integrase B2897 sequence
ccagcaaatgaccggcaaatagccagtaaataaaaaaatccctcggtgttggtagcaccgagggacctgcaagaacgtgttaccagcacgctcattgtaaccgcctttcgccacaaaagagctgattacatctatattatatcagattttaatcagctctgccactgcatacccattttgcaaaaaggagctgattttttatgtttaaaaatacaaaaatagcggtatattgccgcgtatcgtccgacgagcaggcagag

SEQ ID NO: 15897 - DNA, 260 bp, Unknown
  Description of Unknown: LeftRegion for integrase B2898 sequence
atatgccctccatccgtcaggcgcgtgtcaaccgctcagtcaaccgcaccgtcacgctccccgcatggctcaacgctgccgcgctggagcataatatgaacttctcgcaggtgcttcaggacgcgctcaagcagcagctcggcctttgataaagaaaaagcccccggctatatgccgagggctttgaaagagggtgtcatatgaagttaacgcacggggcttatatccttgcccggttctctactgaccggcaggaggcc

SEQ ID NO: 15898 - DNA, 260 bp, Unknown
  Description of Unknown: LeftRegion for integrase B2899 sequence
ttggcaatacgaaaatccgtgtaacagagcattttaatagcaagggtaaacatatcaaagatctcgtagaaaatgccgtacaatacgccgcaaatgcggcttaataccggtgacaacagctcgtacttgtgatataattacgcggtaagcttatcataagtgcgagttgtttcactactaaaggaggttgctaaacaacggtgaaacaactgatttatcgcgtcgcgctctatatgcgattgagccgagacgatgaggat

SEQ ID NO: 15899 - DNA, 260 bp, Unknown
  Description of Unknown: LeftRegion for integrase B2900 sequence
cggtatcactataacatgcttttccggacttacgcccggtggatgcttgtgcttttcgccgccaacatggggctggtgctgctgatctgcggggtgacggcctacgaccttgcccacaaagaccggggatggttccgggactgacaaaaaaataaattccggtgtcaatattgacaccggaggggaagaggggaaatattatgcagcggcagcacggggcgtatatctacgcacggtacagcacggaaaaccaggacgcg

SEQ ID NO: 15900 - DNA, 260 bp, Unknown
  Description of Unknown: LeftRegion for integrase B2901 sequence
accgaagaagcaaaaagttctttccgtaaaatgtataaagctggaatatataaagaattatataaacggcagcttttaacagatgcgcaactgaatttgcttttaaacaagaaataagtaatgattagttgcgcatcacaagacgatatggtataatataattgtttcgtggtgtgctattttaccggaggtagcacacaatgcaaaaattaaaagttgcagcatatgccagagtatctacggacaaagatgaccagaca

SEQ ID NO: 15901 - DNA, 260 bp, Unknown; identical to SEQ ID NO: 15898
  Description of Unknown: LeftRegion for integrase B2902 sequence

SEQ ID NO: 15902 - DNA, 260 bp, Unknown
  Description of Unknown: LeftRegion for integrase B2903 sequence
ttcctcgtccctgaaattcggaagttttatcagagtgaggaaggcaaggcgtactatgaagcgtggctgaaaaagcaccccgagtacgccgcctaaattctaaagaaagcaatcgataaccctatcggctgctttccgtacatatgactttcacaatacaaggaagtataatttagaaagaactaatggaggtataaaaaatgaatgttgtaatatatgctcggttttcgagccacagccaaacagaacaatctatcgaa

SEQ ID NO: 15903 - DNA, 260 bp, Unknown
  Description of Unknown: LeftRegion for integrase B2904 sequence
ataccccttagcgtctcacacaaaaaacaaataaaaaatccctcggtgctaccaacaccgagggacctgcaagaacgtgttaccggcacgttcattgtaaccgcctttcgccacaaaagagctgattacatctatattatatcagattttaatcagctctgccactgcatacccattttgcaaaaaggagctgattttttatgcttaaaaataccaaaatagccgtttactgtcgcgtatcgtccgacgagcaggcagag

SEQ ID NO: 15904 - DNA, 260 bp, Unknown
  Description of Unknown: LeftRegion for integrase B2905 sequence
catcttctccgcagaaaagacagggcgttttggaacgagttgaacctaaacgtacaactctacttatataaatggctcccagatatgatatttcggaaatgaatttaactttttgactgttgaaagtgtggaaagatttattttccccagaacttgcaacggcttgcaacaaacttaaaactacttgaaaggtggtatttatgcctcgcaaaaagaaactgcaagaggtgggcggcctgcgcctggtggcgtactatcgc

SEQ ID NO: 15905 - DNA, 260 bp, Unknown
  Description of Unknown: LeftRegion for integrase B2906 sequence
ttggtaatacgaaaatccgtgtaacagagcattttaatagcaagggtaaacatatcaaagatctcgtagaaaacgcagtacaatatgctgcaaatgcagcttaataccggtgacaacagctcgtacttgtgatataattatgcggtaagcttatcataagtgcgagttgtttcactactaaaggaggttgctaaacaacggtgaaacaactgatttatcgcgtcgcgctctatatgcgattgagccgagacgatgaagat

SEQ ID NO: 15906 - DNA, 260 bp, Unknown
  Description of Unknown: LeftRegion for integrase B2907 sequence
catcttctccgcagaaaagacagggcgttttggaacgagttgaacctaaacgtgcaactctacttatataaatggttcccagatatgatatttcggaaatgaatttaactttttgactgttgaaagtgtggaaagatttattttccccagaacttgcaacggcttgcaacaaacttaaaactacttgaaaggtggtatttatgcctcgcaaaaagaaactgcaagaggtgggcggcctgcgcctggtggcgtactatcgc

SEQ ID NO: 15907 - DNA, 260 bp, Unknown
  Description of Unknown: LeftRegion for integrase B2908 sequence
catcttctccgcagaaaagacagggcgttttggaacgagttgaacctaaacgtgcaactctacttatataaatggctcccatatatgatatttcggaaatgaatttaactttttgactgttgaaagtgtggaaagatttattttccccagaacttgcaacggcttgcaacaaacttaaaactacttgaaaggtggtatttatgcctcgcaaaaagaaactgcaagaggtaggcggactgcggctggtggcgtactatcgc

SEQ ID NO: 15908 - DNA, 260 bp, Unknown; identical to SEQ ID NO: 14687
  Description of Unknown: LeftRegion for integrase B2909 sequence

SEQ ID NO: 15909 - DNA, 260 bp, Unknown
  Description of Unknown: LeftRegion for integrase B2910 sequence
gataaacatttccacaaaaaccaaccctgctatcaacagcagggttggtttgcaataatgaaatttgtcgatttttcttgacacgcttcaaagtgtaatttatcataaaattacaatatttatgatgtgtttcattatgagtaaagagtccaaaaatgcacttctttaaagatattataagaataaaggagcgtggaaaaatgaatgccgtaatatatgcaagatactcttctgatcgtcagacagagcaaagcattgag

SEQ ID NO: 15910 - DNA, 260 bp, Unknown
  Description of Unknown: LeftRegion for integrase B2911 sequence
atacttttgatccgtcgtccgacgcttatctgactaccgaaaaggacggcaccgttatcatggaaggctttggctcattccctgcttatgctcacaacggcatggttcttgtgcagaccgacaaccttcctcaggaagtaatcgacctgttcaatgccatgtaaacctccgcattctctttctgcaaaggtggtatctctatgaaaaaacagccgaccggtggaaaccggcttgttgcctactaccgctacagcggcggc

SEQ ID NO: 15911 - DNA, 260 bp, Unknown
  Description of Unknown: LeftRegion for integrase B2912 sequence
tcggtctgcacttttattgtagcatgatccccctcagaacacaatccgacaaaaaagaatccccggcagctctgtacgatagagccgccggggccagatggggaatctgtctgtcggagaataatcataggttaagaaaacacctgctgagcaagttcattgtaccatgatcctgctcagcgcacaagctgaggaaaaccatgaaaaagaaattttcttctgtacccgatccggatattcaggacgcggtgatctatgca

SEQ ID NO: 15912 - DNA, 260 bp, Unknown; identical to SEQ ID NO: 15906
  Description of Unknown: LeftRegion for integrase B2913 sequence

SEQ ID NO: 15913 - DNA, 260 bp, Unknown
  Description of Unknown: LeftRegion for integrase B2914 sequence
gcttatgaggaactggacagaagtatcttgaaaactgaatatggagaacgcattttatctgattgctgcaattgagttacaaacagcgacgattgggcgacaatcaggcgacaatttgaggtttatcgttgccctgaaattctttctgtgatataatgaaagcagcaattttaagcctgtcggtataggaggaaatacttatgcagacaggaaaaatcactgctttatacgtcagattttcttatgatgacggaattgac

SEQ ID NO: 15914 - DNA, 260 bp, Unknown
  Description of Unknown: LeftRegion for integrase B2915 sequence
catcttctccgcagaaaagacagggcgttttggaacgagttgaacctaaacgtgcaactctacttatataaatggctcccagatatgatatttcggaaatgaatttaactttttgactgttgaaagtgtggaaagatttatttttcccagaacttgcaacggcttgcaacaaacttaaaactacttgaaaggtggtatttatgcctcgcaaaaagaaactgcaagaggttggcggtctgcgcctggtggcgtactatcgc

SEQ ID NO: 15915 - DNA, 260 bp, Unknown
  Description of Unknown: LeftRegion for integrase B2916 sequence
catcttctccgcagaaaagacagggcgttttggaacgagttgaacctaaacgtgcaactctacttatataaatggctcccagatattatatttcggaaatgaatttaacttttcgactgttgaaagtgtggaaagatttatttttcccagaacttgcaacgacttgcaacaaacttaaaactacttgaaaggtggtatttatgcctcgcaaaaagaaactgcaagaggtaggcggactgcggctggtggcgtactatcgc

SEQ ID NO: 15916 - DNA, 260 bp, Unknown
  Description of Unknown: LeftRegion for integrase B2917 sequence
ttggcaatacgaaaatccgtgtaacagagcattttaataacaagggtaaacatatcaaagaactcgtagaaaacgcagtacaatatgctgcaaatgcagcttaatacaggtgacaacagctcgtacttgtgatataattatgcagtaagcttatcataagtgcgagttgtttcactactaaaggaggttgctaaacaacggtgaaacaactgatttatcgcgtcgcgctctatatgcgattgagccgagacgatgaagat

SEQ ID NO: 15917 - DNA, 260 bp, Unknown
  Description of Unknown: LeftRegion for integrase B2918 sequence
catcttctccgcagaaaagacagggcgttttggaacgagttgaacctaaacgtgcaactctacttatataaatggctcccagatatgatatttcggaaatgaatttaactttttgactgttgaaagtgtggaaagatttattttcctcagaacttgcaacggcttgcaacaaacttaaaactacttgaaaggtggtatttatgcctcgcaaaaagaaactgcaagaggttggcggcctgcgcctggtggcgtactatcgc

SEQ ID NO: 15918 - DNA, 260 bp, Unknown
  Description of Unknown: LeftRegion for integrase B2919 sequence
ttttaatcagccccaccgaaaactctatttcaaagcaggtacaaaactcatacgttcctataaagggacaaaatatgaggttttagtagttgatgcggggttcctttacaaaggggatatatacaagagtctttcagctatagcccaactaattaccggagttcattggaacggtaaagtgttctttggaggcagtaaatatggccgaggaacataagatattgcgttgtgcgatctatacccgcaaatccacagaagag

SEQ ID NO: 15919 - DNA, 260 bp, Unknown; identical to SEQ ID NO: 15898
  Description of Unknown: LeftRegion for integrase B2920 sequence

SEQ ID NO: 15920 - DNA, 260 bp, Unknown; identical to SEQ ID NO: 15898
  Description of Unknown: LeftRegion for integrase B2921 sequence

SEQ ID NO: 15921 - DNA, 260 bp, Unknown
  Description of Unknown: LeftRegion for integrase B2922 sequence
catcttctccgcagaaaagacagggcgttttggaacgagttgaacctaaacgtgcaactctacttatataaatggctcccagatatgatatttcggaaatgaatttaactttttgactgttgaaagtgtggaaagatttattttcctcagaacttgcaacggcttgcaacaaacttaaaactacttgaaaggtggtatttatgcctcgcaaaaagaaactgcaagaggtgggcggcctgcgcctggtggcgtactatcgc

SEQ ID NO: 15922 - DNA, 260 bp, Unknown
  Description of Unknown: LeftRegion for integrase B2923 sequence
atatgccctccatccgtcaggcgcgtgtcaaccgctcagtcaaccgcaccgtcacgctccccgcatggctcaacgctgccgcgctggagcataatatgaacttctcgcaggtgcttcaggacgcgctcaagcagcagctcggcctttgataaagaaaaagcccccggctatatgccgagggctttgaaagagggtgtcatatgaagttaactcacggggcttatatccttgcccgtttctccaccgacaggcaggaggcc

SEQ ID NO: 15923 - DNA, 260 bp, Unknown; identical to SEQ ID NO: 14687
  Description of Unknown: LeftRegion for integrase B2924 sequence

SEQ ID NO: 15924 - DNA, 260 bp, Unknown
  Description of Unknown: LeftRegion for integrase B2925 sequence
caaaccatagatatggtcaaagacaaatataaaaaagatttatattcttccgattcacaaaaaataggttgaaaataaaaaaaaatccccgactgctactaacagtcggggaaatagtgtagtgttatggtacaccaattaaaaacatatatattgtaccataacaccgattaaaaatcaagttaagaggtgttatttttatgaaaaaaactaaaaatccagtgcaaagggctgttatatatgcacgttattcgtgtagt

SEQ ID NO: 15925 - DNA, 260 bp, Unknown
  Description of Unknown: LeftRegion for integrase B2926 sequence
accgaagaagcaaaaagttctttccgtaaaatgtataaagctggaatatataaagaattatataaacggcagcttttaacagatgcgcaactgaatttgcttttaaacaagaaataagtaatgattagttgcgcatcacaagacgatatggtataatataattgtttcgtggtgtgctattttatcggaggtagcacacaatgcaaaaattaaaagttgcagcatatgccagagtatctacggacaaagatgaccagaca

SEQ ID NO: 15926 - DNA, 260 bp, Unknown; identical to SEQ ID NO: 15905
  Description of Unknown: LeftRegion for integrase B2927 sequence

SEQ ID NO: 15927 - DNA, 260 bp, Unknown
  Description of Unknown: LeftRegion for integrase B2928 sequence
ttacaaacaatagatatggtcaaagacaaatataaaaaagatttatattcttccgattcacaaaaaataggttgaaaataaaaaatccccgactgctactaacagtcggggaaatagtgtagtgttatggtacaccaattaaaaacatatatattgtaccataacaccgattaaaaatcaagttgagaggtgttatttttatgaaaaaaactaaaaattcagtgcaaagggctgttatatatgcacgttattcgtgtagt

SEQ ID NO: 15928 - DNA, 260 bp, Unknown
  Description of Unknown: LeftRegion for integrase B2929 sequence
ttggcaatacgaaaatccgtgtaacagagcattttaatagcaagggtaaacatatcaaagatctcgtagaaaatgccgtacaatacgccgcaaatgcggcttaataacggtgacaacagctcgtacttgtgatataattatgtggtaagcttatcataagtgcgagttgtttcactactaaaggaggttgctaaacaacggtgaaacaactgatttatcgcgtcgcgctctatatgcgattgagccgagacgatgaggat

SEQ ID NO: 15929 - DNA, 260 bp, Unknown
  Description of Unknown: LeftRegion for integrase B2930 sequence
catcttctccgcggaaaagacagggcgttttggaacgagttgaacttaaacgtgcaactctacttatataaatggctcccagatatgatatttcggaaatgaatttaactttttgactgttgaaagtgtggaaagatttattttccccagaacttgcaacggcttgcaacaaacttaaaactacttgaaaggtggtatttatgcctcgcaaaaagaaactgcaagaggtgggcggcctgcgcctggtggcatactatcgc

SEQ ID NO: 15930 - DNA, 260 bp, Unknown
  Description of Unknown: LeftRegion for integrase B2931 sequence
catcttctccgcagaaaagacagggcgttttggaacgagttgaacctaaacgtgcaactctacttatataaatggctcccagatatgatatttcggaaatgaatttaactttttgactgttgaaagtgtggaaagatttatttttcccagaacttgcaacggcttgcaacaaacttaaaactacttgaaaggtggtatttatgcctcgcaaaaagaaactgcaagaggttggcggcctgcggctggtggcgtactatcgc

SEQ ID NO: 15931 - DNA, 260 bp, Unknown
  Description of Unknown: LeftRegion for integrase B2932 sequence
atttattctataatttcggacgagcttaaatatattagtattagaaataattttatgactagagaaataccctataattcatgtgcaatttagtactattcatacttatttttaatataaatatgtactaattctcaattaacttatatgatatttaaacttacaattattaatatacataatattcggaggtaatataaatgaaagctgctatctattcgagaaaatctaaatttactggtaaaggtgaaagcatagaa

SEQ ID NO: 15932 - DNA, 260 bp, Unknown
  Description of Unknown: LeftRegion for integrase B2933 sequence
aaaaacgccccatcttctccgcagaaaagacagggcgttttggaacgagttgaacctaaacgtgcaactctacttatataaatggctcccagatatgatatttcggaaatgaatttaactttttgactgttgaaagtgtggaaagatttatttttcccagaacttgcaacaaacttaaaactacttgaaaggtggtatttatgcctcgcaaaaagaaactgcaagaggtaggcggcctgcggctggtggcgtactatcgc

SEQ ID NO: 15933 - DNA, 260 bp, Unknown
  Description of Unknown: LeftRegion for integrase B2934 sequence
tgcggtatcactacaacatgcttttccggacttacgcccggtggatgcttgtgcttttcgccgccaacatggggctggtgctgctgatctgcggggtgacggcctacgaccttgcccacaaagaccggggctggttccggggctgataaaaataaattccggtgtcaatgttgacaccggaagaaaagaggggaaatattatgcagcggcagcacggggcgtatatctatgcccggtacagcacggaaaaccaggacgcg

SEQ ID NO: 15934 - DNA, 260 bp, Unknown; identical to SEQ ID NO: 15898
  Description of Unknown: LeftRegion for integrase B2935 sequence

SEQ ID NO: 15935 - DNA, 260 bp, Unknown; identical to SEQ ID NO: 14687
  Description of Unknown: LeftRegion for integrase B2936 sequence

SEQ ID NO: 15936 - DNA, 260 bp, Unknown; identical to SEQ ID NO: 15028
  Description of Unknown: LeftRegion for integrase B2937 sequence

SEQ ID NO: 15937 - DNA, 260 bp, Unknown
  Description of Unknown: LeftRegion for integrase B2938 sequence
atgtgttttttcttataacaatacagtcagttttaaaagacggccagcaaatgaccggcaaatagccagcaaataaaaattcccccggtgcgaccaacaccgagggaacagcctgatcaacccacaaatccaactgcaagggctgacatcttaattatatcagctcttgccatacattaaaagcaaggagctgattttttatgcttaaaaatactaaaatagccgtctattgccgcgtatcgtccgacgagcaggcagag

SEQ ID NO: 15938 - DNA, 260 bp, Unknown
  Description of Unknown: LeftRegion for integrase B2939 sequence
ttggcaatacaaaaatccgtgtaacagagcattttaatagcaagggtaaacacatcaaagatctcgtagaaaatgccgtacaatacgccgcaaatgcggcttaataacggtgacaacagctcgtacttgtgatataattacgcggtaagcttatcataagtgcgagttgtttcactactaaaggaggttactaaacaacggtgaaacaactgatttatcgcgtcgcgctctatatgcgattgagccgagacgatgaggat

SEQ ID NO: 15939 - DNA, 260 bp, Unknown
  Description of Unknown: LeftRegion for integrase B2940 sequence
cccagtgcgccaacaccgaacggtcgtgtaatttgccccttttgtttggaaaggttttataggccaactacgttattattataacataacgaagttgaccttgctatcccctacctattttcaagggatacaaggtcaaattttttgcccttttttactatttctgtcaaataaattaacacaaaataaggagaattaccatggaaagagctgtaatttatgcacgttattcaagcgatcatcaacgcgaggaaagtatc

SEQ ID NO: 15940 - DNA, 260 bp, Unknown
  Description of Unknown: LeftRegion for integrase B2941 sequence
catcttctccgcggaaaagacagggcgttttggaacgagttgaacctaaacgtgcaactctacttatataaatggctcccagatatgatatttcggaaatgaatttaactttttgactgttgaaagtgtggaaagatttattttccccagaacttgcaacggcttgcaacaaacttaaaactacttgaaaggtggtatttatgcctcgcaaaaagaaactgcaagaggttggcggcctgcgcctggtggcgtactatcgc

SEQ ID NO: 15941 - DNA, 260 bp, Unknown; identical to SEQ ID NO: 15895
  Description of Unknown: LeftRegion for integrase B2942 sequence

SEQ ID NO: 15942 - DNA, 260 bp, Unknown; identical to SEQ ID NO: 15846
  Description of Unknown: LeftRegion for integrase B2943 sequence

SEQ ID NO: 15943 - DNA, 260 bp, Unknown
  Description of Unknown: LeftRegion for integrase B2944 sequence
catcttctccgcagaaaagacagggcgttttggaacgagttgaacttaaacgtgcgactctacttatataaatggcttccagatatgatatttcggaaatgaatttaactttttgactgttgaaagtgtggaaagatttattttccccagaacttgcaacggcttgcaacaaacttaaaactacttgaaaggtggtatttatgcctcgcaaaaagaagctgcaagaggtaggcggcctgcgcctggtggcatactatcgc

SEQ ID NO: 15944 - DNA, 260 bp, Unknown; identical to SEQ ID NO: 14687
  Description of Unknown: LeftRegion for integrase B2945 sequence

SEQ ID NO: 15945 - DNA, 260 bp, Unknown; identical to SEQ ID NO: 15916
  Description of Unknown: LeftRegion for integrase B2946 sequence

SEQ ID NO: 15946 - DNA, 260 bp, Unknown
  Description of Unknown: LeftRegion for integrase B2947 sequence
tggagccgcagggcttgcggttctgttcggcatcttccttatggtatatgtctttctggatatgcaaaacccgaatcttggcctgttccagtccggccacgcctcgccgatcgtttatgtcgcggccttttccattatcggaacatgcctgtatatcgtccgaactgtgataaagcgaaacgcaaaaaggagtaaacacgatgcaaacaatcccaattgatctatcggctcttacgccggaggaaagacagcagtttgca

SEQ ID NO: 15947 - DNA, 260 bp, Unknown
  Description of Unknown: LeftRegion for integrase B2948 sequence
atatgccctccatccgtcaggcgcgtgtcaaccgctccgtcaaccgcactgtcacgctccccgcatggctcaacgctgccgcgctggagcataatatgaacttctcgcaggtgcttcaggacgcgctcaagcagcagctcggcctttgataaagaaaaagcccccggctatatgccgagggctttgaaagagggtgtcatatgaagttaactcacggggcatatatccttgcccggttctcgaccgaccggcaggatgcc

SEQ ID NO: 15948 - DNA, 260 bp, Unknown; identical to SEQ ID NO: 15898
  Description of Unknown: LeftRegion for integrase B2949 sequence

SEQ ID NO: 15949 - DNA, 260 bp, Unknown
  Description of Unknown: LeftRegion for integrase B2950 sequence
ttggcaatacgaaaatccgtgtaacagagcattttaatagcaagggtaaacatatcaaagatctcgtagaaaacgcagtacaatatgctgcaaatgcagcttaataccggtgacaacagctcgtacttgtgatataattatgcggtaagcttatcataagtgcgagttgtttcactactaaaggaggttgctaaacaacggtgaaacaactgatttatcgcgtcgcgctctatatgcgattgagccgagacgatgaagat

SEQ ID NO: 15950 - DNA, 260 bp, Unknown
  Description of Unknown: LeftRegion for integrase B2951 sequence
ttggcaatacgaaaatccgtgtaacagagcattttaatagcaagggtaaacatatcaaagatctcgtagaaaatgccgtacaatacgtcgcaaatgcggcttaataccggtgacaacagctcgtacttgtgatataattacgcggtaagcttatcataagtgcgagttgtttcactactaaaggaggttgctaaacaacggtgaaacaactgatttatcgcgtcgcgctctatatgcgattgagccgagacgatgaggat

SEQ ID NO: 15951 - DNA, 260 bp, Unknown
  Description of Unknown: LeftRegion for integrase B2952 sequence
actaaaattgataaataattgtatattagttttaatttagattccttttaatatatttaaattagaggtgtttcatttgaaatataatgtaattgaaatatatgataagagtttaaatgacgataaaattaggaaaataattaataaaaaaatatataatattatagaaaaattagagtttagctatccttataaaaagggtgataatcatattgaatgattttaatacaagtttaagagttgggatttacttaagacta

SEQ ID NO: 15952 - DNA, 260 bp, Unknown; identical to SEQ ID NO: 13967
  Description of Unknown: LeftRegion for integrase B2953 sequence

SEQ ID NO: 15953 - DNA, 260 bp, Unknown
  Description of Unknown: LeftRegion for integrase B2954 sequence
catcttctccgcagaaaagacagggcgttttggaatgagttgaacctaaacgtgcaactctgcttatataaatggctcccagatatgatatttcggaaatgaatttaactttttgactgttgaaagtgtggaaagatttatttttcccagaacttacaacggcttgcaacaagcttaaaactacttgaaaggtggtatttatgcctcgtaaaaagaaactgcaagaggtgggcggcctgcgcctggtggcgtactatcgc

SEQ ID NO: 15954 - DNA, 260 bp, Unknown
  Description of Unknown: LeftRegion for integrase B2955 sequence
aaaaacgccccatcttctccgcagaaaagacagggcgttttggaacgagttgaatctaaacgtgcaactctacttatataaatatctcccagatatgatatttcggaaatgaatttaactttttgactgttgaaagtgtggaaagatttattttccccagaacttgcaacaaacttaaaactacttgaaaggtggtatttatgcctcgcaaaaagaaactgcaagaggttggcggcctgcgccttgtggcgtactatcgc

SEQ ID NO: 15955 - DNA, 260 bp, Unknown; identical to SEQ ID NO: 14628
  Description of Unknown: LeftRegion for integrase B2956 sequence

SEQ ID NO: 15956 - DNA, 260 bp, Unknown
  Description of Unknown: LeftRegion for integrase B2957 sequence
catcttctccgcagaaaagacagggcgttttggaacgagttgaacctaaacgtgcaactctacttatataaatggctcccagatatgatatttcggaaatgaatttaactttttgactgttgaaagtgtggaaagatttatttaccccagaacttgcaacggcttgcaacaaacttaaaactacttgaaaggtggtatttatgcctcgcaaaaagaaactgcaagaggtgggcggcctgcgcctggtggcgtactatcgc

SEQ ID NO: 15957 - DNA, 260 bp, Unknown
  Description of Unknown: LeftRegion for integrase B2958 sequence
ctttttcgtgtatggcaaataaaaacgccccatcttctccgcagaaaagacagggcgttttggaacgagttgaacctaaacgtgcaactctacttatataaattgctcccagataggatatttcggagtggaaagatttatttttcccagaacttgcaacggcttgcaacaaacttaaaactacttgaaaggtggtatttatgcctcgcaaaaagaaactgcaagaggtaggcggcctgcgcctggtggcatactatcgc

SEQ ID NO: 15958 - DNA, 260 bp, Unknown
  Description of Unknown: LeftRegion for integrase B2959 sequence
accgaagaagcaaaaagttctttccgtaaaatgtataaagctggaatatataaagaattatataaacggcagcttttaacagatgcgcaactgaatttgcttttaagcaagaaataagtaatgattagttgcgcatcacaagacaatatggtataatataattgtttcgtggtgtgctattttatcggaggtagcacacaatgcaaaaattaaaagttgcagcatatgccagagtatctacggacaaagatgaccagaca

SEQ ID NO: 15959 - DNA, 260 bp, Unknown
  Description of Unknown: LeftRegion for integrase B2960 sequence
ttggcaatacgaaaatccgtgtaacagaacattttaatagcaagggtaaacatatcaaagatctcgtagaaaatgccgtacaatacgccgcaaatgcggcttaataccggtgacaacagctcgtacttgtgatataattacgcggtaagcttatcataagtgcgagttgtttcactactaaaggaggttgctaaacaacggtgaaacaactgatttatcgcgtcgcgctctatatgcgattgagccgagacgatgaggat

SEQ ID NO: 15960 - DNA, 260 bp, Unknown
  Description of Unknown: LeftRegion for integrase B2961 sequence
ccagcaaatgaccggcaaatagccagcaaataaaaaaatccctcggtgctaccaacaccgagggacctgcaagaacgtgttaccggcacgctcattgtaaccgcctttcgccacaaaagagctgattacatctatattatatcagattttaatcagctctgccactgcatacccattttgcaaaaaggagctgattttttatgtttaaaaatacaaaaatagcggtatattgccgcgtatcgtccgacgagcaggcagag

SEQ ID NO: 15961 - DNA, 260 bp, Unknown
  Description of Unknown: LeftRegion for integrase B2962 sequence
gctcgcccgcctacgatatcactacaatatgctcttccgcacctacacccggtggatggttgtgctttttgccgccaatatgggtctggtgctgctgctctgcggggtaattgcccacaaggagcggggctggctccggcattgataaaaatagcttccggtgtcaatattgacaccggaagggaagagggggtaatattatgcagcggcagcacggggcgtatatctacgcccggtacagcacggaaaaccaggacgcg

SEQ ID NO: 15962 - DNA, 260 bp, Unknown
  Description of Unknown: LeftRegion for integrase B2963 sequence
ggattgcccggctgaggtatcactacaacatgctcttccgcacctacacccgttggatggttgtgctttttgccgccaatatgggtctggtgctgctgctttacggggtgatcgcccacaaggagcggggccggttccggggctgacaaaaaataaattccggtgtcaatattgacaccggaaggaaagaggggaatattatgcagcggcagcacggtgcgtatatctatgccaggtacagcacggaaaaccaggacgcg

SEQ ID NO: 15963 - DNA, 260 bp, Unknown
  Description of Unknown: LeftRegion for integrase B2964 sequence
aaaaacgccccatcttctccgcagaaaagacagggcgttttggaacgagttgaacctaaacgtgcaactttacttatataaatggctcccagatatgatatttcggaaatgaatttaactttttgactgttgaaagtgtggaaagatttattttccccagaacttgcaataaacttaaaactacttgaaaggtggtatttatgcctcgcaaaaagaaactgcaagaggtaggcggactgcggctggtggcgtactatcgc

SEQ ID NO: 15964 - DNA, 260 bp, Unknown
  Description of Unknown: LeftRegion for integrase B2965 sequence
gctattattataccataaagcgattggccttgctatcccctacctttttacagggacagcaaggcttttttatgtccatttttaataaattattgtgataaacatataacagcaaagcattattataataatttatcataaaatctgcattattcttttaaaaaattataactatactttaaaaaggagcgtaaagaattatgaaaagggctgccttatatgcaaggtattctagcgataaccaacggcatgaaagtatt

SEQ ID NO: 15965 - DNA, 260 bp, Unknown
  Description of Unknown: LeftRegion for integrase B2966 sequence
catcttctccgcagaaaagacagggcgttttggaacgagttgaacctaaacgtgcaactctacttatataaatggctcccagatatgatatttcggaaatgaatttaactttttgactgttgaaagtgtggaaagatttattttccccagaacttgcaacggcttgcaacaaacttaaaactacttgaaaggtggtatttatgcctcgcaaaaagaaactgcaagaggttggcggcctgcgcctggtggcgtactatcgc

SEQ ID NO: 15966 - DNA, 260 bp, Unknown
  Description of Unknown: LeftRegion for integrase B2967 sequence
ccgtatatgccgctgtttcagaaagaacttgatatatcctccgaatggttggaaaactcatacacatacacgccaagaccatataagccctcaaagcgcgccctccaaatggaggcggacatcaaagaaactgctcacaagtacataacaaacgaaaaagcccttctgctgggcgcagaagggcgtaacgggtaacagatatgtcagtagatattaaatggcaggtgccaaaggcacagccggaggcaaacgaactggcc

SEQ ID NO: 15967 - DNA, 260 bp, Unknown
  Description of Unknown: LeftRegion for integrase B2968 sequence
tgttctgtttatccgattcaccttacccaaaagtagagatttccctaacagaaaaagagaaaatccttattgacgcataccgtgctgctgatgacatgggacagttgaacataatctatgtctgcctggatgaaatgaaaaaagcaaaaggggacaacgaaagtgccgtgtgattgattttgtagagtggaggaagaaccatgtatgaggatataaaaacagcctgcctatatgtcagattctcaagccataaccagact

SEQ ID NO: 15968 - DNA, 260 bp, Unknown
  Description of Unknown: LeftRegion for integrase B2969 sequence
atatgccctccatccgtcaggcgcgtgtcaaccgctccgttaaccgcactgtcacgctccccgcatggctcaacgctgccgcgctggagcataatatgaacttctcgcaggtgcttcaggacgcgctcaagcagcagctcggcctttgataaagaaaaagcccccggctatatgccgagggctttgaaagaaggtgctatatgaagttaactcacggggcttatattcttgcccgtttctccaccgacaggcaggaggcc

SEQ ID NO: 15969 - DNA, 260 bp, Unknown; identical to SEQ ID NO: 14687
  Description of Unknown: LeftRegion for integrase B2970 sequence

SEQ ID NO: 15970 - DNA, 260 bp, Unknown
  Description of Unknown: LeftRegion for integrase B2971 sequence
ttggcaatacgaaaatccgtgtaacagagcattttaatagcaagggtaaacatatcaaagatctcgtagaaaatgccgtacaatacgccgcaaatgcggcttaataacggtgacaacagctcgtacttgtgatataattacgtggtaagcttatcataagtgcgagttgtttcactactaaaggaggttgctaaacaacggtgaaacaactgatttatcgcgtcgcgctctatatgcgattgagccgagacgatgaggat

SEQ ID NO: 15971 - DNA, 260 bp, Unknown
  Description of Unknown: LeftRegion for integrase B2972 sequence
aatctcctcaataatttctgatgaaataaaatacatgaatatacgaactgcatttatgcttaaggacatcccctataattcatgtgtaatttagtacatttagtactgatttttttaatatatatgtactaaagctcaattaacttagagtacatttatatctacaattatttatatataaaacattggaggtattattaatgaaggctgccatctattcaagaaaatcaaaattcactggcaaaggtgaaagtatagaa

SEQ ID NO: 15972 - DNA, 260 bp, Unknown
  Description of Unknown: LeftRegion for integrase B2973 sequence
ttggcaatacgaaaatccgtgtaacagagcattttaatagtaagggtaaacatatcaaagatctcgtagaaaatgccgtacaatacgccgcaaatgcggcttaataccggtgacaacagctcgtacttgtgatataattacgcggtaagcttatcataagtgcgagttgtttcactactaaaggaggttgctaaacaacggtgaaacaactgatttatcgcgtcgcgctctacatgcgattgagccgagacgatgaagat

SEQ ID NO: 15973 - DNA, 260 bp, Unknown
  Description of Unknown: LeftRegion for integrase B2974 sequence
ctttccatgcgtcgcctgcccttacagcatagcacgctttttcgatatgggcaaataaaagccccggcgctggtacgatgcagcgccggggataacatggagtgcagcacaaaaccggacaaagaaaattttatgcttgcaggggtcagtatatcacactccctgcatatgggcaaaccgcccggaaaggaagtgttatcatgccccgcaaaaaagctcctgcggccgaagcgccgcgcctggtggcttactaccgctac

SEQ ID NO: 15974 - DNA, 260 bp, Unknown
  Description of Unknown: LeftRegion for integrase B2975 sequence
aatctattcaataattcgagatgaacaaaaatataatacaataagaactaattttatgaaaagagaaatacaatataatgcatgtcaaatctagtacataatgtacagatttttatagaaatatgtactataagtaaattaacttaactatatcaaaaatatataattataattatatattttatttggaggtataaataatgaaggctgccatctattcaagaaaatcaaaatttactggtaaaggtgaaagtatagaa

SEQ ID NO: 15975 - DNA, 260 bp, Unknown
  Description of Unknown: LeftRegion for integrase B2976 sequence
tacttgataattcaaagaatcggaaaagagaagtattataagcttaatttggatcggctaaaataaaaaacgcccccggtgctaccaacaccgagagcgtttccgaatcagattgccccataaggtgatatggtaacaaccgaccaacagccatattgtaccaccttgcgggcaggattgcaaacccaaaaggtgataccatgaaaaagaagcaaccaaatacccgccatggccgtgcggcgatttacgcccggtattcg

SEQ ID NO: 15976 - DNA, 260 bp, Unknown; identical to SEQ ID NO: 14687
  Description of Unknown: LeftRegion for integrase B2977 sequence

SEQ ID NO: 15977 - DNA, 260 bp, Unknown
  Description of Unknown: LeftRegion for integrase B2978 sequence
aatacgctaacgaagcgcccattggcgccacttgcaatgctcagagctgtgtaggtgttgacactgccgggacgtttaagatcaacgtggttcagtacgatggaaacggaaataaacagaccgccactttcattgtcaacgttcctgagaactaaaaaagccctcctgctggacgcagaagggcgtaatgggtaacagatatgtcgatagatattaaatggcaggtgccaaaggcacagccggaggccagcgaactggcc

SEQ ID NO: 15978 - DNA, 260 bp, Unknown
  Description of Unknown: LeftRegion for integrase B2979 sequence
atgaagccacaaagaaatatttgaaataaaaaagccgccctactctaccaaagcaaggcggccaagctctcgatgatacgaaagccctaagcaagcatattgtatcatcctgagcagccaaacgcaagcggaactgcagttctttgctggctgttattttttatacccttttttcatacttttaagaaggaggatgcaatatgaacagttatgatatctcattcaggccggaagaagttatacagtatcttcgcaagtcc

SEQ ID NO: 15979 - DNA, 260 bp, Unknown
  Description of Unknown: LeftRegion for integrase B2980 sequence
gatgtctatatgccatcaatccggcaggcacaggttaatcgttctgtaaaccgcactgtcacacttcctgcatggcttaatgctgcagctattgagcgaaatatcaatttctctcaggtactgcaagatgctcttaaaactcaatttcacctttctcaaaaagaagcttagtctttacaatgcaggagggttatcatgccatgttgacagtgttcctgtctaatggaaaaggagattctatgattgctatctacacccga

SEQ ID NO: 15980 - DNA, 260 bp, Unknown
  Description of Unknown: LeftRegion for integrase B2981 sequence
gatgtctatatgccatcaatccgacaggcacaggttaatcgctctgtaaaccgcactgtcacacttcctgcatggctaaacgctgcagctattgagcgaaatatcaatttctctcaggtactgcaagatgctcttaaaactcaatttcacctttctcaaaaagaagcttagtctttacaatgcaggagggttatcatgccatgttgacagtgttcctgtctaatggaaaaggaggctctatgattgctatctacacccga

SEQ ID NO: 15981 - DNA, 260 bp, Unknown
  Description of Unknown: LeftRegion for integrase B2982 sequence
ggacaatctgcagacgctttgttggcgatgcaaccggagtaagagtaataaaacggtataaataaaaaaacgcccccggtgctaccaacaccgagagcgtttccgaatcagattgccccataaggtgatatggtaacaaccgaccaacagccatattgtaccaccttgcgggcaggattgcaaacccaaaaggtgataccatgaaaaagaagcaaccaaatacccgccatggccgggcggcgatttacgcccggtattcg

SEQ ID NO: 15982 - DNA, 260 bp, Unknown
  Description of Unknown: LeftRegion for integrase B2983 sequence
cgcaaacctcggcggcattttgggcgacggcgtaacaaagaaaacaaacttcctcgttttaggtaatttcgactattgctccacgataaaagagggcaagtcaaacaagcataaaaaggcggagcaacttatcctcaaaggacaagaccttcaaattatccccgagagcgtatttttgagtatggttgcggaggattgatatgcaaaacgcggtaatatacgcccgttattcctcccacgggcaaaacgagcaaactatc

SEQ ID NO: 15983 - DNA, 260 bp, Unknown
  Description of Unknown: LeftRegion for integrase B2984 sequence
catatgtagaacattagcaaatagggtaatataataaaagcccctgtgctaccaacacaagagctttaccgatatctaccaagccggagcctgatacaatacccaaacacattgcatattgtatcatataatgcgcccggcttgcaagtaggcgtattttttatacccttttttcatacttttaagaaggaggatgcaatatgaacagttatgatatctcattcaggccggaagaggttatacagtatcttcgtaagtcc

SEQ ID NO: 15984 - DNA, 260 bp, Unknown
  Description of Unknown: LeftRegion for integrase B2985 sequence
atacaaaagaaaaaatctatcatctgccgtttgatcagcagtatgaccgtatcgctattgatgccggaaaaggcgagtgctatacggcgaccgtcaaagaggcggaaaaactcggcttccgacgggctttccgccacagagcgtccgagaaggcttgaagaaaaacaagcatctttcaagcccacacgagggaataagaaatgaaaaaagaaaaggcgaagacgcccgaaaataacagagcagccgtgtatgctcggtac

SEQ ID NO: 15985 - DNA, 260 bp, Unknown
  Description of Unknown: LeftRegion for integrase B2986 sequence
atacaaaagaaaaaatctatcatctgccgtttgatcagcagtatgaccgtatcgctattgatgccggaaaaggcgagtgctatacggcgaccgtcaaagaggcggaaaaactcggcttccggcgggctttccgctacagagcggccgagaaggcttgaagaaaaataagcagctttcaagcccacacgagggaataagaaatgaaaaaagaaaaggcgaagacgcccgagaataacagagcagccgtgtatgctcggtac

SEQ ID NO: 15986 - DNA, 260 bp, Unknown
  Description of Unknown: LeftRegion for integrase B2987 sequence
tttgcaaacgcactggccgggctgcccgtgcttacgacctctgcgatccaacgtaactgcaagtgcggaatcaaccgcgcgtactcgatactacgcaatcttcaggtctacgggcttattcatgaggccggaaaagacacctatgaatggacagaaaaagccctcctgctgggcgcagaagggcgtaacgggtaacagatatgtcgatagatattaaatggcaagtgccaatagcaaagccggaggtcagcgaactggcc

SEQ ID NO: 15987 - DNA, 260 bp, Unknown
  Description of Unknown: LeftRegion for integrase B2988 sequence
ccgcgcatctctgcccttttatggtagcacgggcggtatagcgggtcaagcgctcaaaacgcattacgcaaaataaaatgtccgggtgctggtacgaacagcccccggacggaatgcaacacattaaaaccgataatgcgcctgccgtggatagtataccacactcccggcagccgcgcaaccgaaaggagtgtgatctcatgccccgcaaaaaatccgcaaccggcgctcctgtgtgtctggtggcctattaccgttat

SEQ ID NO: 15988 - DNA, 260 bp, Unknown
  Description of Unknown: LeftRegion for integrase B2989 sequence
gatgtctatatgccatcaatccgacaggcacaggttaatcgttctgtaaaccgcactgtcacacttcctgcatggcttaatgctgcagctattgagcgaaatatcaatttctctcaggtactgcaagatgctcttaaaactcaatttcacctttctcaaaaagaagcttagtctttacaatgcaggagggttatcatgccatgttgacagtgttcctgtctaatggaaaaggagattctatgattgctatctacacccga

SEQ ID NO: 15989 - DNA, 260 bp, Unknown
  Description of Unknown: LeftRegion for integrase B2990 sequence
tttgcaaacgcactggccgggctgcccgtgcttacgacctctgcgatccaacgtaactgcaagtgcggaatcgaccgcgcgtactcgatactacgcaatcttcaggtctacgggcttatccatggggccggaaaagacacctatgaatggacagaaaaagcccttctgctgggcgcagaagggcgtaacgggtaacagatatgtcagtagatattaaatggcaggtgccaaaggcacagccggaggcaaacgaactggcc

SEQ ID NO: 15990 - DNA, 260 bp, Unknown
  Description of Unknown: LeftRegion for integrase B2991 sequence
tttgtagatggaatggtctccatcatcgcgttcaagcttaaagccagcttgcgacagcattttcactaaatcgcgtcttttcacatgatcacctcgcttatctttattttcgtttctgattatattataatacgtaatttacgtaatgtaaagcgaaaaaataagtaatttacgtaatttttttcaaaggagatgactctatgcaaagagcagttatctacgcgcgcttttcctcggacatgcagcgcgaagagtctatt

SEQ ID NO: 15991 - DNA, 260 bp, Unknown
  Description of Unknown: LeftRegion for integrase B2992 sequence
cctttgcaaaacctcagtatttagggctaccagaaaattggttttcgatatttgaggcaatgaactaaaataaaaaacgccctgcggcggcaaccgcagggcgtttggatagaccggcttgcccaaagggcaattaccagaccaagtatctgtaattgtagcaccaccgggcaggctttgcaagctgaacaggtgatattgtgaaaaagaaacaacccaatacccgccatggccgggcggcgatttacgcccggtattcg

SEQ ID NO: 15992 - DNA, 260 bp, Unknown; identical to SEQ ID NO: 13019
  Description of Unknown: LeftRegion for integrase B2993 sequence

SEQ ID NO: 15993 - DNA, 260 bp, Unknown; identical to SEQ ID NO: 13434
  Description of Unknown: LeftRegion for integrase B2994 sequence

SEQ ID NO: 15994 - DNA, 260 bp, Unknown; identical to SEQ ID NO: 14683
  Description of Unknown: LeftRegion for integrase B2995 sequence

SEQ ID NO: 15995 - DNA, 260 bp, Unknown
  Description of Unknown: LeftRegion for integrase B2996 sequence
gtacagacaaaaaataaaacaaatgaggatttgaaatttatttttaaaaaactattagaaaaaaatcttatatcacatcaagaatacttagattgtttaaaacatttaaaatatggggcttaaatagccccataaattttttatatataacaaaatatggtataataaatgtgtgtatgattttgtagaaaggagtattaatggttaaagccgttatatattgtagagtcagcacagatgatgaaatacaaattaatgca

SEQ ID NO: 15996 - DNA, 260 bp, Unknown
  Description of Unknown: LeftRegion for integrase B2997 sequence
ttgcaacgctcagagctgtgtaggcgttgacaacgccgggacgtttaagatcaacgtggttcagtacgatggaaacggaaataaacagaccgccactttcattgtcaacgttcctgagaactaaaaaagccctcctgctgggcgcagaatggcgtaacgggtaaacagatatgtcgatagatattaaatggcaagtgccaatggcaaagccggaggtcagcgaactggccgtcgtatatgcccggtattcaagccacagt

SEQ ID NO: 15997 - DNA, 260 bp, Unknown
  Description of Unknown: LeftRegion for integrase B2998 sequence
gctttacaaagaaacaaacgccaaaacgcagatcgccgcacagatcgctagaaagcgtgtctctttgatgaagccgcaggatgcgttcaatgctgcatatttttccgaactgatcgacgccgtctcccttcatgtgggaggcggcgtcgttctgcatacaaaaacagaaaccgatatttgcgaaagcgaggataaaccgaatggaagtccagagaattccgaaacggacagtttccgtaattgaaccccaaacgtccatc

SEQ ID NO: 15998 - DNA, 260 bp, Unknown
  Description of Unknown: LeftRegion for integrase B2999 sequence
ctagcgcaaagactgaggcagatcgtgacctacaggcggattgtgacacaatcatcgacactcttgagatttgggattgatttaattgcaaaacctccccggcgcgtccaacaccggggaggttaaagggtagtacatttgtcaccagatactacccttttattttagcataaattttggcaaaatgaaaggaaaaaatcatggcgaagcgaaaaaagaagtccatagacagctcagttggcgtatgctatgcccgatac

SEQ ID NO: 15999 - DNA, 260 bp, Unknown
  Description of Unknown: LeftRegion for integrase B3000 sequence
gataagatgatgaaagtgctggaggcggaagccgccgcaggacacaaagcccagctttcgccctaacgctacaagccgcacagaaaaatcgtcattttaccgggcggtaaagaagcagaagccgctatacagacagccgccccatgtggtataatcgaaatacggaatagtggggctggctgtcggaaacggaggattttatgttaagacagaccacccagaaaatcactgccctttatccaagactatcccatgaggac

SEQ ID NO: 16000 - DNA, 260 bp, Unknown; identical to SEQ ID NO: 13421
  Description of Unknown: LeftRegion for integrase B3001 sequence

SEQ ID NO: 16001 - DNA, 260 bp, Unknown
  Description of Unknown: LeftRegion for integrase B3002 sequence
ttgcgcaagaattccagcctttgacagattggggatgatagcggaaaggcgtgaagatttcgagtgcgccgccctgacctatcttgaggccatccactggtacaaaaagtgggggatggctacggaaccttacgagaaaaagctcgaaagagtgaaaaaaaacgcgaggaagaaagctcaaccggaaggggagtgattggttgacagcaccgtttccgaaatacaacaatgaggcagcggttatttatgccagatattca

SEQ ID NO: 16002 - DNA, 260 bp, Unknown
  Description of Unknown: LeftRegion for integrase B3003 sequence
taagatgatgaaagtgctggaggcggaagccgccgcaggacacaaagcccagctttcgccctaacgctacaagccgcacagtaaaaaatcgtcattttgacaggcggtaaagaagcagaagccgctatacagacagccgccccatgtggtataatcgaaatacggaatagtggggctggctgtcggaaacggaggattttatgttaagacagaccacccagaaaatcactgccctttatccaagactatcccatgaggac

SEQ ID NO: 16003 - DNA, 260 bp, Unknown
  Description of Unknown: LeftRegion for integrase B3004 sequence
ctggatcattgacatggttatgatctgttgcaacaaattcaccgacagcaccggcgcggtggtcggtttgaaggttgccgagtataccagacagccggatcctgatcttgcagaggcttctctggaggagcagcgggaggcagcggccgagactgccagagcttacggctataccgtaatagagtcaggcgctcaggataatgtcaacaagtaaaaacacggctcgaaaatatgccgcaggaggtggctcggataattcc

SEQ ID NO: 16004 - DNA, 260 bp, Unknown; identical to SEQ ID NO: 14583
  Description of Unknown: LeftRegion for integrase B3005 sequence

SEQ ID NO: 16005 - DNA, 260 bp, Unknown
  Description of Unknown: LeftRegion for integrase B3006 sequence
aatttaaaagtgatagcacattgataagatttgatgatagagacattgaaactaaagaaaataatgaagatatacttaatatattagtaggattaattataaaaaagatttcagaatattcttaaatagatttgtagttttatctaacttatgctaaactcacaaccagtagataaaattaacaaaagaaagggggtattttggaaaaagcatataatgcttatttaagtgaaaaaattaataatagttttggcggttat

SEQ ID NO: 16006 - DNA, 260 bp, Unknown; identical to SEQ ID NO: 14174
  Description of Unknown: LeftRegion for integrase B3007 sequence

SEQ ID NO: 16007 - DNA, 260 bp, Unknown
  Description of Unknown: LeftRegion for integrase B3008 sequence
ctggatcattgacatggttatgatctgttgcaacaaattcaccgatagcaccggtgcggtggtcggcctgaaggttgccgagtataccagacagccggatcccgatcttgcagaggcttctctggaggagcagcgggaggcagcggccgagactgccagagcttacggctataccgtaatagagtcaggcgctcaggataatgccgacaagtaaaaccgcggctcgaaaatatgccgcaggaggtggctcggataattcc

SEQ ID NO: 16008 - DNA, 260 bp, Unknown; identical to SEQ ID NO: 15989
  Description of Unknown: LeftRegion for integrase B3009 sequence

SEQ ID NO: 16009 - DNA, 260 bp, Unknown
  Description of Unknown: LeftRegion for integrase B3010 sequence
tcaagggagcgacttccacccgataaagaagttcgatgaggataagttatataagtttataaaaagggtagtcgtgaaagattggacggttacgttcgaattctttaacggagtatgcatcactcgctcctataccaatggacagccaggaaacatcaaagattggaagttaaaacaaaaacaacggagggaggaacagaatggacagtaatcagagaatcgtgcggacaatccccgcatcgtttacgaggacaacctcg

SEQ ID NO: 16010 - DNA, 260 bp, Unknown
  Description of Unknown: LeftRegion for integrase B3011 sequence
ccgtatatgccgctgtttcagaaagaacttgatatatcctccgaatggttggaaaactcatacatatacacgccaagaccatataagccctcaaagcgcgccctccaaatggaggcggacatcaaagaaactgctcacaagtacataacaaacgaaaaagcccttctgctgggcgcagaagggcgtaacgggtaacagatatgtcagtagatattaaatggcaggtgccaaaggcacagccggaggcaaacgaactggcc

SEQ ID NO: 16011 - DNA, 260 bp, Unknown; identical to SEQ ID NO: 13002
  Description of Unknown: LeftRegion for integrase B3012 sequence

SEQ ID NO: 16012 - DNA, 260 bp, Unknown
  Description of Unknown: LeftRegion for integrase B3013 sequence
tcagaacctcaaaaaattccaaaagatattgaaaacggcaaaaccgatgaccacgatggatgcggaaatgtgcgatcttttcgtcaagcgcattttagtgatggataggaataaccttatctttgaactgacgagcggacataaggtcaaggtcgaggtgctggatttttataaaacgagagacgaaataaggagggtctatgttaccgagtaatgtgaaaataattaaaccgcgcgctcaagtggtgattgatgagcaa

SEQ ID NO: 16013 - DNA, 260 bp, Unknown
  Description of Unknown: LeftRegion for integrase B3014 sequence
gatgtctatatgccatcaatccgacaggcacaggttaatcgctctgtaaaccgcactgtcacacttcctgcatggctaaacgctgcagctattgagcgaaatatcaatttctctcaggtactgcaagatgctcttaaaactcaatttcacctttctcaaaaagaagcttagtctttacaatgcaggagggttatcatgccatgttgacagtgttcctgtctaatggaaaaggaggctctatgattgctatctatacccga

SEQ ID NO: 16014 - DNA, 260 bp, Unknown
  Description of Unknown: LeftRegion for integrase B3015 sequence
cttacaacgtccgcaattcagcgcaaatgtaaatgcggaaacaactgtgcgtatgcagttcttcaaagcctacaggtctacggaatgattcgagagattcggcaattcacatacgaatggacagaaaaagccctcctgctgggcgcagaagggcgtaacgggtaacagatatgtcgatagatattaaatggcaagtgccaatggcaaggccggaagtcagcgaactggccgtcgtatatgcccggtattcaagccacagt

SEQ ID NO: 16015 - DNA, 260 bp, Unknown
  Description of Unknown: LeftRegion for integrase B3016 sequence
ggacaaattgtggctgccatcgtcggaggagaaactggctctttaaaaaggatgaaatggtcagaaggatctccttatattaaactcattcctgaaaatagtgactttgaaacaaaagaagtcctaccacacgaaattattgtttgtggcgtttattctggtcatttcagacctgattataatatataggagtgtcataaatgtttgataatattttagatgaatactgcatttatctcaggaagtctagaaccgattta

SEQ ID NO: 16016 - DNA, 260 bp, Unknown
  Description of Unknown: LeftRegion for integrase B3017 sequence
gatgtatatatgccatcaatccgacaggcacaggttaatcgttctgtaaaccgcactgtcacacttcctgcatggcttaatgctgcagctattgagcgaaatatcaatttctctcaggtactgcaagatgctcttaaaactcaatttcacctttctcaaaaagaagcttagtctttacaatgcaggagggttatcatgccatgttgacagtgttcctgtctaatggaaaaggagattctatgattgctatctacacccga

SEQ ID NO: 16017 - DNA, 260 bp, Unknown
  Description of Unknown: LeftRegion for integrase B3018 sequence
aggacaatctgcagacgctttgttggcgatgcaaccggagtaagagtaataaaacggtataaataaaaaaaacgcccccagtgcgccaacaccgagagcgtttccatagatcagcttgcccacaaaagtggatacaatcgacccgacaatcgtattgtaccaccttgcgggcaggattgcaaacccaaaaggtgataccaatgaaaaagaaacaacccaatacccgccatggccgggcggcgatttacgcccggtattcg

SEQ ID NO: 16018 - DNA, 260 bp, Unknown
  Description of Unknown: LeftRegion for integrase B3019 sequence
ggaatagaattattgtcatcgagggcatatgcaaaggtgggaaaccgctcggagagctgcttctcgaaatagcaacagacagaatcaataagaagttctattgatggtgcagactggacacatatcattcgcccatgtatattgatggcgtgagtgaatagttgttctggatgtgctgttttcaatttggagagataacaatgagaatacagaacattcacagagtcggaatttacctccggctttctcgggacgatgga

SEQ ID NO: 16019 - DNA, 260 bp, Unknown
  Description of Unknown: LeftRegion for integrase B3020 sequence
agaactggcgtgctgattgtttgcgaacagccaaatgaaagaaagctacgtcaagcggagatagttggcgttcccattctgaacgaaagccagtggtttgaattgattcctgaacttgaagcgcagggaatgtggactggcaaaaccgtctgcgctgacgaaaacggaatttatagggtagtcgtggatggtgatggttgatggccagaaaaaagaatactgccgctggtctggatgccgtcatatatgcccggtattcg

SEQ ID NO: 16020 - DNA, 260 bp, Unknown
  Description of Unknown: LeftRegion for integrase B3021 sequence
acaggtcttttgattgtgtgtagtgacccggcgcaaaagaaaattgacagagccgatgccctgaatattccgattgtttcggagcagcaatggtttgaacttatgctggaacttgaggccattggaatgtggaacggaaagcaaattctgtttgcggacaatgatggcatctaccgtgttgaagtgggcggtgaaagctgatggccagaaaaaagaatattgctgccggcctcgatgccgtcatctatgcccggtactca

SEQ ID NO: 16021 - DNA, 260 bp, Unknown; identical to SEQ ID NO: 13709
  Description of Unknown: LeftRegion for integrase B3022 sequence

SEQ ID NO: 16022 - DNA, 260 bp, Unknown
  Description of Unknown: LeftRegion for integrase B3023 sequence
attggtgttttggttgcgtgtagtaatccaaagcagaagaaaatcgatcaggccaaagctctaaatattccggtcatttcagagcagcagtggtttgagcttatgccagaactggaagcactcggaatgtggaacggaaagccaattccgtttgcagatgataatggaatttaccatattgatgtgggcggtgatggttgatggcccgaaaaaagaatattgctgctggcctcgatgccgtcatctatgcccggtactcg

SEQ ID NO: 16023 - DNA, 260 bp, Unknown; identical to SEQ ID NO: 13506
  Description of Unknown: LeftRegion for integrase B3024 sequence

SEQ ID NO: 16024 - DNA, 260 bp, Unknown
  Description of Unknown: LeftRegion for integrase B3025 sequence
aacggaacgtggtaagcgtttttgggaagaatatcttcgtaaaaaggagaaagaggctcaaaaaacagcctgaattctatcctctattaatttaaataaaaaatgcggtttagcgctttaaagcgttgacaaaatcttttgaaagtgatatactattaaataaagaaaaccaacaacgcaacgacaataaggaggtagcaatgaaggcagtaatttatgctcgttactcatgtgataaccaacgtgaagagagtatcgaa

SEQ ID NO: 16025 - DNA, 260 bp, Unknown; identical to SEQ ID NO: 15097
  Description of Unknown: LeftRegion for integrase B3026 sequence

SEQ ID NO: 16026 - DNA, 260 bp, Unknown
  Description of Unknown: LeftRegion for integrase B3027 sequence
gttatgatatttttcgtgacaaagagggtatatttgtaattccatacggagcgcagcaggtaaaacagcctgatgggcaatatgtttatgattttccgaacgatgaagtaaccgatatgctgaacaagtataactgtaatagatgtgctggcggttatgttacaaaagcacgtgagtgaaattgaaaggagcgtgacggcatgaaaaagcgaatcaacaccaattcagcggctcgtgccgtcatctatgcccggtattca

SEQ ID NO: 16027 - DNA, 260 bp, Unknown; identical to SEQ ID NO: 13711
  Description of Unknown: LeftRegion for integrase B3028 sequence

SEQ ID NO: 16028 - DNA, 260 bp, Unknown; identical to SEQ ID NO: 13018
  Description of Unknown: LeftRegion for integrase B3029 sequence

SEQ ID NO: 16029 - DNA, 260 bp, Unknown; identical to SEQ ID NO: 13158
  Description of Unknown: LeftRegion for integrase B3030 sequence

SEQ ID NO: 16030 - DNA, 260 bp, Unknown
  Description of Unknown: LeftRegion for integrase B3031 sequence
tctggtgatagcgattttgttccagccgcgaaattggctcggagagaaggaatcgattttattctcgatccaatgtgggcagatatcaaggctgatttgtttgaacacatcgacggccttaatagtcaatggaaaaagaaagaaagccaataagggatatttcggtataaggtgccgggttttttaggagggctgaaagagtggaaaaacttgatacgcgcccggtagccgatattctggcccggtactcaacagacaat

SEQ ID NO: 16031 - DNA, 260 bp, Unknown; identical to SEQ ID NO: 15509
  Description of Unknown: LeftRegion for integrase B3032 sequence

SEQ ID NO: 16032 - DNA, 260 bp, Unknown
  Description of Unknown: LeftRegion for integrase B3033 sequence
aagacgggtcttttgattgtgtgtagtgacccggcgcaaaagaaaatcgacagagcggatgccctgaatattccgatcgtttcggagcagcaatggtttgagatcatgccagaacttgaagccgttggaatgtggaacggaaagcgaatcctgttttcagacgacggcatctaccgtgttgaagtgggcggtgaaagctgatggccagaaaaaagaatattgctgctggcctcgatgccgtcatctatgcccggtactca

SEQ ID NO: 16033 - DNA, 260 bp, Unknown
  Description of Unknown: LeftRegion for integrase B3034 sequence
cctaaaggttataaggtatggcgctgctcaaaacctaaagagaaatgtcagatgaagtatctgcgggaaacggagctgtttgaagcatcgaaggaaatcttaggccaaaactatcagggcgaggtagtagagaatatagctaaaattgtaatcaacgatgataccatagactttgtattcaaagatgggagggagcagatatggcaacggcagtaagaacgattccggctacattaaacaagttcaattctaagccagtt

SEQ ID NO: 16034 - DNA, 260 bp, Unknown; identical to SEQ ID NO: 13136
  Description of Unknown: LeftRegion for integrase B3035 sequence

SEQ ID NO: 16035 - DNA, 260 bp, Unknown; identical to SEQ ID NO: 13709
  Description of Unknown: LeftRegion for integrase B3036 sequence

SEQ ID NO: 16036 - DNA, 260 bp, Unknown; identical to SEQ ID NO: 13018
  Description of Unknown: LeftRegion for integrase B3037 sequence

SEQ ID NO: 16037 - DNA, 260 bp, Unknown
  Description of Unknown: LeftRegion for integrase B3038 sequence
gtggaatgacattatcgaaatttcacatatatacagataatggagatatagaaaaaatacaataagtaaaaaatcccccttgctacgccaatagcaaaagggatttaagagtgttatgatataacctcaattccaaatataattatatcataacactccgataaatacaagaaaaatcaaataaaaggagtgtttttttaatgcaaaaaaataataatataggtaacagatgtgtaatttatgcaagatattcttgcagc

SEQ ID NO: 16038 - DNA, 260 bp, Unknown
  Description of Unknown: LeftRegion for integrase B3039 sequence
tataatccaaaagggttattttgagagggctatcagtgtaagggctgatagccctatttttttttgtctaaaaatgaggagtatctctggttattactcaaataacaagtaatgggtttacatagtatcaaaaaggtgtataataactatgagatattatgacaaacctgtacaaattctatcaaacaggaggaaacaggatggtacaggaaagattaagagcggtattttatgcaagagtttctacagaggaggagaaa

SEQ ID NO: 16039 - DNA, 260 bp, Unknown; identical to SEQ ID NO: 15097
  Description of Unknown: LeftRegion for integrase B3040 sequence

SEQ ID NO: 16040 - DNA, 260 bp, Unknown
  Description of Unknown: LeftRegion for integrase B3041 sequence
agaacaggctgcggctgctgaacaggaaaggattgcacaagagcaagctgcagcgcaagcagcacaagagcaggctgcacagcaaagccaagatgaccccatcgtgtatataacaaacactggggcaaagtatcatagcgctggatgcagaactttgaaatctaagatagaaaaacatctgtctgaggtacgcggagtttatgaaccgtgcggcatttgccatccaccacaataaaataaaaaccgcccctgcgccaaca

SEQ ID NO: 16041 - DNA, 260 bp, Unknown
  Description of Unknown: LeftRegion for integrase B3042 sequence
acaggtcttttgattgtgtgtagtgacccggcgcaaaagaaaattgacagagccgatgccttgaatattccaatcatttcagagcagcaatggtatgaactcatgccagaacttgaagccgttggaatgtggaacggaaagcaaattctgtttgcggacaatgatggcatctaccgtgttgaagtgggcggtgaaagctgatggccagaaaaaagaatattgctgctggcctcgatgccgtcatctatgcccggtactcg

SEQ ID NO: 16042 - DNA, 260 bp, Unknown
  Description of Unknown: LeftRegion for integrase B3043 sequence
ctccgcaatctatcgactatgaagccaggacgggtgttttcaaggggtccggcaaaaagccgtatgaggtcaccgaaaccacctgcacctgccgagattattttgtccgcaagctgccgtgcaagcatatctaccggctgcgcatggagcttgccaaggctgacggcgaatagttttcaccagaaaaggagcatgacggcatgagaaaaaagtccaacctcaatgcggctactcgtgccgtcatctatgcccgatattca

SEQ ID NO: 16043 - DNA, 260 bp, Unknown
  Description of Unknown: LeftRegion for integrase B3044 sequence
gacgctcccgtagaaagcggctcaatcatggtcatcatcgtggacgatgacgatgggttcataaagcaagtcagtgttgcagacgatacgatcacgcttcactcctttaaccctgcatatcctcctatggtgttcggcggctctgaattgtccagacttcgtttcattggtcgtgttgttgaacagaaaaggaagttttaatgaaaagaaagaaattcccaatagacctctcaatgctgacagaggaagaaatagaccag

SEQ ID NO: 16044 - DNA, 260 bp, Unknown
  Description of Unknown: LeftRegion for integrase B3045 sequence
ttctttcagcggcacaagaagataaactacaatgcattttacatcaatatgaataaataatacagtatgactaacatccgcacctttgcaaatctaaatctgttaaattaccatagggatgcagaagtgatctgcacccgcacattgacaaccgcatactcaatcagtgcaatcctgtgtaaagcatgaaaggaaaacacatgaaaagaatacatacgttatacagggtgtccaccaagaagcaagtggataaggagaag

SEQ ID NO: 16045 - DNA, 260 bp, Unknown
  Description of Unknown: LeftRegion for integrase B3046 sequence
atctgtgtggaaattttccacacctgtgtccacaccatagtataattcttactcttattcttttcttattcttttcttattctatatgcgtgacgtcacgtgacatgcttgaaaatcgttattattcgggagttgcaacttttttgtttttctctattagagtgttgcaacaatcaaagttacaaacggagcggatgaaagtgaaaacaccagaatacagggatggcgtaatatacgccaggtacagccccggccccaac

SEQ ID NO: 16046 - DNA, 260 bp, Unknown; identical to SEQ ID NO: 13717
  Description of Unknown: LeftRegion for integrase B3047 sequence

SEQ ID NO: 16047 - DNA, 260 bp, Unknown; identical to SEQ ID NO: 13711
  Description of Unknown: LeftRegion for integrase B3048 sequence

SEQ ID NO: 16048 - DNA, 260 bp, Unknown; identical to SEQ ID NO: 13307
  Description of Unknown: LeftRegion for integrase B3049 sequence

SEQ ID NO: 16049 - DNA, 260 bp, Unknown
  Description of Unknown: LeftRegion for integrase B3050 sequence
ttctccaatacaagttgaaattggcaaaggaaatcgaaaatttataacgtacaagattggagatattgatgatataaaaagctactctgacaaaatacaaagcaatttaataaggttgcttgactagaatttcgctattgagtgcgaaccttgactctgctccctgcgtttgcggggagcttttttaggaggatttctgtatgcaacaatactgcttatatctgcgtaaatcccgtgcagacgcagaagccgaagcgcgg

SEQ ID NO: 16050 - DNA, 260 bp, Unknown
  Description of Unknown: LeftRegion for integrase B3051 sequence
cgtcagataatcctacactctctgacatggaacaattattagtaactacattccgtaatacggatacattaggacaggctaatatcatacacgcttgtttggctgagcgtgatagagttgaaaaaggtaaagtcgaacatactgaaaaagaaaagagcattgctgccgtataataaatttgtcagaatggaggaaacgccatgtatgaggatataaaaacagcctgcctatatgtcagattttcaagccataaccagact

SEQ ID NO: 16051 - DNA, 260 bp, Unknown
  Description of Unknown: LeftRegion for integrase B3052 sequence
atgaatagtagttctcatttatatactattcactcttttaaattgtgttcttcatctacaattaaagtaaattaatttagttcagttaatcattatttcttacatatatataaagtagaaattaatatggatagttcttcaattaacgcatcttattatgcttaatcaagaatgtaatttgttaataaggagctgacacaatgataaaaatagctatatattcacgtaaatctgtttttacaggcaaaggagaatctatt

SEQ ID NO: 16052 - DNA, 260 bp, Unknown
  Description of Unknown: LeftRegion for integrase B3053 sequence
cgtcagataatcctactctctctgacatggaacaattattagtaaccacattccgtaatacggatacattaggacaggctaatatcatacacgcttgtttggctgagcgtgatagagttgaaaaaggtaaagtcgaacatactgaaaaagaaaagagcattgctgccgtataataaatttgtcagaatggaggaaacgccatgtatgaggatataaaaacagcctgcctatatgtcagattctcaagccataaccagact

SEQ ID NO: 16053 - DNA, 260 bp, Unknown
  Description of Unknown: LeftRegion for integrase B3054 sequence
ttgcaatgctcagagctgtgtaggtgttgacaatgccgggacgtttaagatcaacgtgattcagtacgatggaaacggaaataagcagactgccactttcgttgtcaacgttcctgagaactaaaaaaagccctcctgctgggcgcagaaggacgtaacgggtaacagatatgtcgatagatattaaatggcaagtgccaatggcaaagccggaggtcagcgaactggccgtcgtatatgcccggtattcaagccacagt

SEQ ID NO: 16054 - DNA, 260 bp, Unknown
  Description of Unknown: LeftRegion for integrase B3055 sequence
caagtgctctaatatctcgcgccaacgacggagatcctggtgatgattatatttccgaaacggaatggatcgttgcctgtaaatctggtgctgttgtctccgcattatgcggtcacactctgtatagatcggttatggagcacattaatcccggcattgtagagtgaataaaggggcacccgtaaaaatggaggggttttatggcggtgtttgcgcaggctgttcagccggattttaacgacgatgtggccgacgttgtg

SEQ ID NO: 16055 - DNA, 260 bp, Unknown; identical to SEQ ID NO: 13018
  Description of Unknown: LeftRegion for integrase B3056 sequence

SEQ ID NO: 16056 - DNA, 260 bp, Unknown; identical to SEQ ID NO: 13821
  Description of Unknown: LeftRegion for integrase B3057 sequence

SEQ ID NO: 16057 - DNA, 260 bp, Unknown
  Description of Unknown: LeftRegion for integrase B3058 sequence
aaaattcaagtatcactacctattgtaattgattcgcctagcgggaaagaagtcgtaaaaggaaatgtggagcgaatgttacagatattaaaaagagattttactaataatcaagttataatcgcatcaatttatagttatgatatagagggaatatccgtccatccaatagaaaagtcgcttatgggtgaggaatttctatgaaagcaatcatttacgctcggtattcgagtgacaatcaaagagaggagagtatcgag

SEQ ID NO: 16058 - DNA, 260 bp, Unknown
  Description of Unknown: LeftRegion for integrase B3059 sequence
cagctcaagcagcgcgcggatttctttcaaaagtttttctttttgcattttttacaccctcctgtattgatttttgccccccataatgatacaatggtctcgtactatttttatttgattatattatgccaaatattggcaacgttgtcaacccattcgacaaacgttgtcaaaacaggtgtgctttcgaggtttttcacatggcttttcaaaaaattaaatcagtcccgccggaaaatgcgctcaacgcagttatatac

SEQ ID NO: 16059 - DNA, 260 bp, Unknown
  Description of Unknown: LeftRegion for integrase B3060 sequence
tgttctgtttatctgattcaccttacccaaaagtagagatttccctaacagaaaaagagaaaatccttattgacgcataccgtgctgctaatgacatgggacagttgaacataatctatgtctgcctggatgaaatgaaaaaagcaaaaggggacaacgaaagtgccgtgtgattgattttgtagagtggaggaagaaccatgtatgaggatataaaaacagcctgcctatacgttagattttcaagccataaccagact

SEQ ID NO: 16060 - DNA, 260 bp, Unknown
  Description of Unknown: LeftRegion for integrase B3061 sequence
tgttctgtttatccgattcaccttatccaaaagtagagatttccctaacagaaaaagagaaaatccttattgacgcataccgtgctgctaatgacatgggacagttgaacataatctatgtctgcctggatgaaatgaaaaaagcaaaaggggacaacgaaagtgccgtgtgattgattttgtagagtggaggaagaaccatgtatgaggatataaaaacagcctgcctatacgttagattctcaagccataaccagact

SEQ ID NO: 16061 - DNA, 260 bp, Unknown
  Description of Unknown: LeftRegion for integrase B3062 sequence
attttatttttgacggtcacactaaatacgccgaatacaatgtatcgcaagttacggctttaagaaaggcgtttggtgaagaagcggcaaatatactactgccgttagcaaagttaaatgatacagggttggcaaaagttcgtaattacatttccgatatgctaaaaatagaggaatatcgcaaatagggggaatattacttgaaatcgaaaaacaagccatttgtacggaaagccgttgcttatgcacggttttcatca

SEQ ID NO: 16062 - DNA, 260 bp, Unknown
  Description of Unknown: LeftRegion for integrase B3063 sequence
gatacacctcccgaaacagatactcttatggttgtcattgttgatgacgaagaaggatttgttaagaaaatcagtattgatgaagatactgtgacccttcgttcttttaacccacactatcctccccgtgtttttggcggtgctgaaattggacgattgcgctttgtcggtagagtcatggagctaaaaaggagatttgcatgaaaaaatttccaatcgacctctcctgtctgacagaggaagaaatctctcaatttcag

SEQ ID NO: 16063 - DNA, 260 bp, Unknown
  Description of Unknown: LeftRegion for integrase B3064 sequence
taattttcgtagaaattagcctcgacacaatttgtgtcgaggctttcttcttttgtacgctatgtattttttcttttgcatgagcatattttatcatatagagtcgactttcacaatcaaaattcctcgcaaaattcgacatgcgttgacaattttcttctaatcatctatgatacaaaaaaaaacaaaggaggtatcttatggaactaaacagaaccggcagatatgtaatgtatctgcgtaagtcccgaaaggacgat

SEQ ID NO: 16064 - DNA, 260 bp, Unknown
  Description of Unknown: LeftRegion for integrase B3065 sequence
tatatcgcttctgaaagcggaataaatacatagggtatcacgacagacacaaaatggtgaggtacgtcctcaccatttttaatgtttggtgatactttatctaatattatttacaaatttacattgtactattgtatttcaaataattctatgatatacttcttttaagatattttagaattaacagagagggtgtttaaatggacgcagtggcatacatcagggtttctacaaacaaggaagaacaagagctaagtctt

SEQ ID NO: 16065 - DNA, 260 bp, Unknown
  Description of Unknown: LeftRegion for integrase B3066 sequence
acagctcaagcagcgcgcggacctctttcaaaagtttttctttttgcatttttacgtcctcccgtattgactttttgcccccttaatgatacaattgtcacgtactattttcatttgattatattatgccaaatattggtaacgatgtcaacccattcgacaaacgttgtcaaaactggtgttcttccgaggtttttcttatggcttttcaaaaaataaaatcagtcccgccggaaaatgcgctcaacgcagttatatac

SEQ ID NO: 16066 - DNA, 260 bp, Unknown; identical to SEQ ID NO: 14662
  Description of Unknown: LeftRegion for integrase B3067 sequence

SEQ ID NO: 16067 - DNA, 260 bp, Unknown
  Description of Unknown: LeftRegion for integrase B3068 sequence
atgaatagtagttctcatttatatactattcactcttttaaattgtgttcttcatctacaattaaagtaaattaatttagttcagttaatcattatttcttacatatatataaagtagaaattaatatgaaaagttcttcaattaacgcatcttattatgcttaatcaagaatgtaaattgttaataaggagctgacacaatgataaaaatagctatatattcacgtaaatctgtttttacaggcaaaggagaatctatt

SEQ ID NO: 16068 - DNA, 260 bp, Unknown; identical to SEQ ID NO: 15329
  Description of Unknown: LeftRegion for integrase B3069 sequence

SEQ ID NO: 16069 - DNA, 260 bp, Unknown
  Description of Unknown: LeftRegion for integrase B3070 sequence
acaggtctcttgattgtgtgcagcgactcaatgcaaaagaaaatcgacagagcggatgccctgaatattccaatcgtttcggagcagcaatggtttgaactcatgccggaacttgaggccgctggaatgtggaacggaaagccaatttcattcgcggatgacgatggtatctaccgttttgatgtgggtggtgatggataatggcaaaaaagaagaagcccgccgggggcattgccgtcatctatgcccgctactcgtcc

SEQ ID NO: 16070 - DNA, 260 bp, Unknown
  Description of Unknown: LeftRegion for integrase B3071 sequence
taactctcaaagatcgcttgttttctcaatcctcattaaatgaacaagaaacggagttagttaatttattccgttcttgtgaaccatctgtgcaatttcaggtaattcatataatgatgacggaaaaagaaaaaacagactctacgaaaaagtctgctatcggataaaatcattgacctgtctaaatggagaaagacattatgaagaaattcaaatttccaatcgacctatccatgctgaccgaagatgaaatagaccaa

SEQ ID NO: 16071 - DNA, 260 bp, Unknown
  Description of Unknown: LeftRegion for integrase B3072 sequence
tgaatttatacaaaagaaaaaccggcccggtgttggcgcaccggaccggccagaatatctccagaagaagatacccctaatccaatcatattggatcttcttccgaacagccttgcaagcggaacttatgttccggtggctgttatttttatactcttttttgcgaggcgcctcgcatacactgtacaggaggataccatatgtaccgagaactacctacattctgtccggaagaaatccttgtctatctgcgaaaatcc

SEQ ID NO: 16072 - DNA, 260 bp, Unknown
  Description of Unknown: LeftRegion for integrase B3073 sequence
aaaagggctttatggtcttagttgattatattataaaaaccgccccaggcggcaacccggaacggttttaagtggattctgtataggcctaagccaatacaatataccctaagcaagtatattgtatcacaaacttttggcacctgtacaggtgtattttttatacctatttttacatatagtagaaaaggagtggtacaatggaatattatatttatctcagaaaaagtcgtaaagacagggaagctgagatgcaaggc

SEQ ID NO: 16073 - DNA, 260 bp, Unknown
  Description of Unknown: LeftRegion for integrase B3074 sequence
cgcagaaattgagagtggctgtattgctgtggtcgtggtagacggtacagaagggtttttaaaacaagtcgagttcggtgagaactccacctcgcttcactcgttcaatccgtattatcccgacatggagtttgtagatgccgaccagaaacgtttgcactttgtcggtcgcgtccgggaaatgaagcggaggttctgatatgcgtaaaaagtttaatatcgacctctccatgctgaccccggaagaacagcagcagttt

SEQ ID NO: 16074 - DNA, 260 bp, Unknown
  Description of Unknown: LeftRegion for integrase B3075 sequence
tcagccgaaacccgctgttgattcggacgaaatgcgcaagtttgttgagatgtgtttcgacccgaaatcccccatgaacgagcgactaaagcaggtccttgtggacctgctacaacaatcaaaaaatgacagccgggtctgatttgatttagcacatactatatgcagtgctgctctggcaacccggcggaaggagtagtatgaaagcagtaatttacgcaagatattcaagcgacaatcagcgcgaggaatccatcgag

SEQ ID NO: 16075 - DNA, 260 bp, Unknown
  Description of Unknown: LeftRegion for integrase B3076 sequence
tgttctgtttatccgattcaccttacccaaaagtagagatttccctaacagaaaaagagaaaatccttattgacgcataccgtgctgctaatgacatgggacagttgaacataatctatgtctgcctggatgaaatgaaaaaagcaaaaggggacaacgaaagtgccgtgtgattgattttgtagagtggaggaagaaccatgtatgaggatataaaaacagcctgcctatacgttagattctcaagccataaccagact

SEQ ID NO: 16076 - DNA, 260 bp, Unknown
  Description of Unknown: LeftRegion for integrase B3077 sequence
attatctattctgtttatccgattcgccttacccgaaagtagagatttccctaacggaagaagagcaattactgcttgacgcattccgttccgctaccacacaaggtagattcaacattattactacctgtatgtgtgagaagcgaaaaggggacaacgaaagtgccgggtaattgatttcatagaatggaggaagaaccatgtatgaggatataaaaacagcctgcctatacgttagattctcaagccataaccagact

SEQ ID NO: 16077 - DNA, 260 bp, Unknown
  Description of Unknown: LeftRegion for integrase B3078 sequence
tataatccaaaagggttattttgagagggctatcagtgtaagggctgatagccctatttttttttgtctaaatttcaggagatttctggttattactcaaataataagtaatgggtttacatagtatcaaaaagatgtataataagtatgagatattatgacaaacctgtacaaattctaatcaacaggaggaaaacaggatggtacaggagaaattaagagcggtattttatgcaagggtatctacagaggaagagaaa

SEQ ID NO: 16078 - DNA, 260 bp, Unknown; identical to SEQ ID NO: 15966
  Description of Unknown: LeftRegion for integrase B3079 sequence

SEQ ID NO: 16079 - DNA, 260 bp, Unknown
  Description of Unknown: LeftRegion for integrase B3080 sequence
aatctgcttttgttgatctacgctgagtgcttcaaacatggtcaaagcttccttgtcagaaaccttaccttctttgttagtgatatgacatattctactccaatcttaggaagttcttcctatgtattagcgccaagtgatattatagcactttatctttcgtttgccattggtaaatagaggaaaggataacggacattatgacagttaaaaaatttccaatcgacctctcctgtctgacagaggaagaaatctctcaa

SEQ ID NO: 16080 - DNA, 260 bp, Unknown
  Description of Unknown: LeftRegion for integrase B3081 sequence
gcagaactttaaggagcatctgaaccggatttcttaaatttaaaataaaaagcccctgtgctaccaacacagaagcttttcattgatttctcttactggacaatccagaaagatacaatcagaatcatcacctgaattatatcattcctgggacgtcctggcaagagggcgtattttttatacttataaggagtgatattatgttggtttttggaatctatgcaagaaaatccctacacagcgaccagtcagatagtgtg

SEQ ID NO: 16081 - DNA, 260 bp, Unknown
  Description of Unknown: LeftRegion for integrase B3082 sequence
tatgccaaaatactgtcagcactaccggcatttacgcctactgaaatacagcagaaatgtgattgcagtttcgctggtgcattagctattttgcagcgattgctcgcctgcgggctgatctcacagtgccgagtaggaacttacacatggacagaaaaagctctcctgctaggcgcagaagagcttaaaggatgataattatgtcaatggatattaagtggcagaagccaaaagcaaataacggcgaactggccgtcgta

SEQ ID NO: 16082 - DNA, 260 bp, Unknown
  Description of Unknown: LeftRegion for integrase B3083 sequence
atatcgcttctgaaagcggaataaatacataatggtatcgcaataaacacaaaatggtgaggtacgtcctcaccatttttaatgtttggtgatactttatctaatattatttacaaatttacattgtactattgtatttcaaataattctatgatatacttcttttaagatattttagaattaacagagagggtgtttaaatggacgcagtggcatacatcagggtttctacaaacaaggaagaacaagagctaagtctt

SEQ ID NO: 16083 - DNA, 260 bp, Unknown
  Description of Unknown: LeftRegion for integrase B3084 sequence
tgttctgtttatccgattcaccttacccaaaagtagagatttccctaacagaaaaagagaaaatccttattgacgcataccgtgctgctaatgacatgggacagttgaacataatctatgtctgcctggatgaaatgaaaaaagcaaaaggggacaacgcaagtgccgtgtgattgattttgtagagtggaggaagaaccatgtatgaggatataaaaacagcctgcctatacgttagattctcaagccataaccagact

SEQ ID NO: 16084 - DNA, 260 bp, Unknown; identical to SEQ ID NO: 16075
  Description of Unknown: LeftRegion for integrase B3085 sequence

SEQ ID NO: 16085 - DNA, 260 bp, Unknown
  Description of Unknown: LeftRegion for integrase B3086 sequence
cagacttgcgcagacttgcagaattttacggcgttggtcttgattatttcggtgtgaatacaacagatgaaagttttgagttgttgagccgtgcaaaaagtgtttttctgaatgaaaatatcccaaaagaagaaaaagaaagactttacaaaagcattatgaaaatttatttgcaaatggactaacaggaggggttttgcttgaaatcgaagaacaaacagtatatacggaaagccgttgcttatgcacggttttcatca

SEQ ID NO: 16086 - DNA, 260 bp, Unknown
  Description of Unknown: LeftRegion for integrase B3087 sequence
attatctattttgtttatctgattcaccttgcccgaaagtagagatttccctaacggaagaagagcaattactgcttgacgcatttcgttccgctaccccacaaggcagattcaacattattaccacctgtatgtgtgagaagcgaaaaggggacaacgaaagtgtcgggtaattgatttcatagaatggaggaagaaccatgtatgaggatataaaaacagcctgcctatacgttagattctcaagccataaccagact

SEQ ID NO: 16087 - DNA, 260 bp, Unknown
  Description of Unknown: LeftRegion for integrase B3088 sequence
catcgaataatcctacactttctgacatggaacaattattagtaactacattccgtaatacggatacattaggacaggctaatatcatacacgcttgtttaactgagcgtgatagagttgaaaaaggtaaagtcgaacatactgaaaaagaaatgagcattgctgccgtataatcaatttatcagaatggaggaagaaccatgtatgaggatataaaaacagcctgcctatacgttagattctcaagccataaccagact

SEQ ID NO: 16088 - DNA, 260 bp, Unknown
  Description of Unknown: LeftRegion for integrase B3089 sequence
gtgtaagaaacttggcggaaatgctgttatagactgccagtttgagtacagaaacgccgttgaagccaaactcatcggtaaagacaatcaggcaattgagattttcgcatacggtactgctgttaagtatgaagattaaccgttttgggatttgttctgctccccgcgattgcggggagcttttttaggaggatttctgtatgcaacaatactgcttatatctgcgtaaatcccgtgcagacgcagaagccgaagcgcgg

SEQ ID NO: 16089 - DNA, 260 bp, Unknown
  Description of Unknown: LeftRegion for integrase B3090 sequence
cttacgacctctgcgatccaacgtaactgcaagtgcggaatcaaccgcgcgtactcgatactacgcaatcttcaggtctacgggcttattcatgaggccggaaaagacacctatgaatggacagaaaaagccctcctgctgggcgcagaagggcgtaacgggtaacagatatgtcgatagatattaaatggcaagtgccaatggcaaagccggaggtcagcgaactggccgtcgtatatgcccggtattcaagccacagt

SEQ ID NO: 16090 - DNA, 260 bp, Unknown; identical to SEQ ID NO: 14900
  Description of Unknown: LeftRegion for integrase B3091 sequence

SEQ ID NO: 16091 - DNA, 260 bp, Unknown
  Description of Unknown: LeftRegion for integrase B3092 sequence
tagttatgatattttccgtgacaaagagggcgtattcgttattccatacggagcgcagcaggtaaaacagcccggtgggcaatatgtttatgattttccgaacgatgaagtaaccgatatgctgaataagcatcattgcaatagatgtgctggcggttatgttacaaaggcgcgcgagtaagcccgaggagcgtgacggcatgaaaaagcgaatcaacactaattccgcagcccgtgccgtcatctatgcccggtattcc

SEQ ID NO: 16092 - DNA, 260 bp, Unknown
  Description of Unknown: LeftRegion for integrase B3093 sequence
gatatatcctctgaatggttggaaaactcatacacatacacgccaaagccgtataagccttcaaagcgcgccctccaaatggaggcggacatcaaagaaactgctcacaaatacataacaagcgaaaaagccctcctgctgggcgcagaagggcgtaacgggtaacagatatgtcgatagatattaaatggcaattgccaatggcaaagccagaggtcagcgaactggccgtcgtatatgcccggtattcaagccacagt

SEQ ID NO: 16093 - DNA, 260 bp, Unknown
  Description of Unknown: LeftRegion for integrase B3094 sequence
tatatggtatcgcacgcaaactttttgggaaaatcatcatggtataccgtagtgatacctcgcgtgcgcgcgtgcgtgtgcgcgcgatcgtgcgcgcactgtctctgtacctgtatctgtatctgagactgtatctgtattctgtttctgattctgaatatctactactgcaaatctatcgttagaagggggtggcgctgttgccgagaaaacctgcaaagcacccggcgaagccgaagcggggcaagaagctggaagtc

SEQ ID NO: 16094 - DNA, 260 bp, Unknown; identical to SEQ ID NO: 16074
  Description of Unknown: LeftRegion for integrase B3095 sequence

SEQ ID NO: 16095 - DNA, 260 bp, Unknown
  Description of Unknown: LeftRegion for integrase B3096 sequence
cttctaatgcaaccaagatatggctaacaagctctggaaactgtctgctttgtcacaatcgctctcaaataccaaatcatgtacttcgtaacatcatgcgaatgattgaagcgcggcacaatgatgttgttcgtgcatggctaaagtattttggagaaattcgatactatatttaataactcttatgaaaggaattttctatggaactaaacagaaccggcagatatgtaatgtatctgcgtaagtcccgaaaagacgat

SEQ ID NO: 16096 - DNA, 260 bp, Unknown; identical to SEQ ID NO: 13007
  Description of Unknown: LeftRegion for integrase B3097 sequence

SEQ ID NO: 16097 - DNA, 260 bp, Unknown
  Description of Unknown: LeftRegion for integrase B3098 sequence
cagctggctgaggccaaggcccgcattaagcaccttaccattgccctggcggcttgtgttattttttttgtactcatttgggtggtcgatctcctgaaccgtgacgttggctggttccgcgacgccctcggcttcggcttggacgccgcccgtcccgctggcgcggcgtacctggcccccctggcctggaggtggcgctgatgcagaggccccacggcgcgtatatcctcgcgcgctactccacggacagccaaaacccg

SEQ ID NO: 16098 - DNA, 260 bp, Unknown
  Description of Unknown: LeftRegion for integrase B3099 sequence
cgcagaaattgagagcggctgtattgccgtggtcgtggtggacggtacagaagggtttttaaaacaagtcgagttcggtgagaattccacctcgcttcactcgttcaatccgtattatcccgacatggagtttgtagatgccgaccagaaacgtttgcattttatcggtcgcgtccgggaaatgaagcggaggttctgatatgcctcagaagtttaaaatcgacctctctatgctgaccccagaagaacagcagcagttt

SEQ ID NO: 16099 - DNA, 260 bp, Unknown
  Description of Unknown: LeftRegion for integrase B3100 sequence
aagcgtttgagcgcattcggaacatcctgcttgccaccagctatacgaagaaggtaggttgacatcatggacgaatgcagaatcaaacgctatactgagtgcggtaacgggcgatattacaaaccgagccattgccggacgttctttgacaacgaaataaagcctatccccacttttatgatgaaagtgaggaatttacaatgacaagaaataacaatcgcgtgtgctgcttgtaccgcgtttccaccgataagcaggtg

SEQ ID NO: 16100 - DNA, 260 bp, Unknown
  Description of Unknown: LeftRegion for integrase B3101 sequence
tccgatcttggtatatctcttacggaagcattgcgaaaagaaaaaagctatgaacaaaatcaagccgcaaaaaatgcttgttctgctatacacacttttcttgaaagtattagacagcttcccgaacgtgaacgctccacaataataaaagagctttattatttctgctctgaatacttgaaaatgaagggggaatagcaatgcagcaagcattaaacgcggtcatatacgcccgctattcttcccatagccagcaggaa

SEQ ID NO: 16101 - DNA, 260 bp, Unknown
  Description of Unknown: LeftRegion for integrase B3102 sequence
tgcagccattataagccttgtcggcatcggaatcatcgccattccgacgggcattatttccgctggattcacgtctttgattggaaaggatagagaagaaaccgacaaaaagaactattgcccatattgcggccacaggctcgacgaataacaaagcgtttttgcattttctgaaaaaaagtttacgagtaggtgattgcatgaaagcggccatatacgcccgtttttcgagccataatcaacgtgaggaatccattgaa

SEQ ID NO: 16102 - DNA, 260 bp, Unknown; identical to SEQ ID NO: 15220
  Description of Unknown: LeftRegion for integrase B3103 sequence

SEQ ID NO: 16103 - DNA, 260 bp, Unknown
  Description of Unknown: LeftRegion for integrase B3104 sequence
ttgccgaatatgcaaaaacccattttgaaaaatccgtaaaaaagactttgacaattcccgcatggcttaatcaagccgcgttggagcacaatattaatttttcacaggttttacaagatgcgttgaaagcacaattacatttaaactaactctcccctactctctcctatccttttatgtctcaagaaagaaggtgtaacatgaaaggggtaatctatgcccggtacagttccgacaagcaaacagagcaatccatagaa

SEQ ID NO: 16104 - DNA, 260 bp, Unknown
  Description of Unknown: LeftRegion for integrase B3105 sequence
acttactgggtcttagtgaagtcagaaaaccagaagtcttagttttgtcagaaaaagagaaaatcctcattgacgcataccgtactgctaatgacatgggacaattaaacataatctatgtctgcatggatgaaatgaaaaaagcaaaaggggaaggcgtacttgtagggtaattgatttcatagaatggaggaagaaccatgtatgaggatataaaaacagcctgcctatacgttagattctcaagccataaccagact

SEQ ID NO: 16105 - DNA, 260 bp, Unknown
  Description of Unknown: LeftRegion for integrase B3106 sequence
atgcacgggttgtgctgtttgcttacaacgccaccgagtacatggtgcttgcacagctgacaatacacgatcagccctctgacgtttcccgtgaattggattcaattttaaatagtatccaattttcggcaattgatagcgaatgattacgaaaaaaacgccctgcggtttcccgcggggtgttgatatatcggaaaggaatggtacttttggacacatactgtatatatctacggaaatcgcgtgcagacgcagaagcc

SEQ ID NO: 16106 - DNA, 260 bp, Unknown
  Description of Unknown: LeftRegion for integrase B3107 sequence
aaaaaaccaatacgcaaaagataataattggacattaataagaataccatttactgaatacgataacatagaacaaatattagctgaatatatagaacaggaacaagttatataaattatatagcttgtttttttattgtataaattaacacatatttccacataattaaagtataatcaatatgtggaggtgaaatacaatggagcagaaggtagcaatttactgtagagtctcaactcaaagcaacgaccaagcgaat

SEQ ID NO: 16107 - DNA, 260 bp, Unknown
  Description of Unknown: LeftRegion for integrase B3108 sequence
aagcatttgagcgcattcggaacatcctgcttgccaccagctacacgaagaaggtaggttgacatcatggacgaatgcagaatcaaacgctatactgagtgcggtgatgggcggtgccacaaaccgagccattgccggacgttctttgacaacgaaataagtcctgtccccgcttttgttatgaaagtgaggaatttacaatgacagaaaacaacaaccgtgtctgctgcttgtaccgcgtttccaccgataagcaggtg

SEQ ID NO: 16108 - DNA, 260 bp, Unknown
  Description of Unknown: LeftRegion for integrase B3109 sequence
gcgcaggcttgcggaatgttacggcgtcgggcttgattatttcggcattgcaaccgctgacgaagtgcttgaactgttagcacgggcaaaagaagtttttgaaagtgatcagataagcaaagagcgtaaaaacgaattgtttgacgcaattatgcggttaaaactcaatataaaataaaagcatatacgggggatttattttgactaacaactacacacaacagaaaaaagaattattatatgatatggtgtcgggcgtt

SEQ ID NO: 16109 - DNA, 260 bp, Unknown
  Description of Unknown: LeftRegion for integrase B3110 sequence
ttgccgaatatgcaaaaacccattttgaaaaatccgtaaaaaagactttgacaattcccgcatggcttaatcaagccgcgttggagcacaatattaatttttcacaggtcttacaagatgcgttgaaagcacaattacatttaaactaactctcccctactctctcctatccttttatgtctcaagaaagaaggtgtaacatgaaaggggtaatctatgcccggtacagttccgacaagcaaacagagcaatccatagaa

SEQ ID NO: 16110 - DNA, 260 bp, Unknown
  Description of Unknown: LeftRegion for integrase B3111 sequence
gaaagatctcggcaaggatcgctgctcaaatcggcgccaacatcattatggcagacatcaggagtacagcttaagaacatgtaaattgagggtaatatgcccttgttccgccaaaaactttgttagatattctttagcttttaagatagctattaaggaaagggtgtggtattgtttgttgcgataggaggtgaacaagcatgggaaaaactatgaccgagggcagttctgctctgaaagaaaagcgggtcatcgtcatt

SEQ ID NO: 16111 - DNA, 260 bp, Unknown
  Description of Unknown: LeftRegion for integrase B3112 sequence
cctgacgaaaggagctgtcaaagctgaatatcaagatcgattataacggcattgacaagtccggaaaaatcgccgttgtttatgccagatattcttcccatagtcaaggcgaacagtccattgaaggacagcttgccgctgcgaaagcgtatgccgatgcgcggggatatacaatcgttcatgagtatatcgaccgcgccatgaccggcaggaacgacaaccgcgatgaatttcagcaaatgctttctgactgtgcaaag

SEQ ID NO: 16112 - DNA, 260 bp, Unknown
  Description of Unknown: LeftRegion for integrase B3113 sequence
aagcatttgagcgcattcggaacatcctgcttgccaccagctatacgaagaaggtaggttgacatcatggacgaatgcagaaccaaacgctatactgagtgcggtaacgggcggtgctacaagccgaaccattgccggacgttctttgacaacgaaataaagcctgtccccacttttgttatgaaagtgaggaatttacaatgacagaaaacaacaaccgcgtctgctgcttgtaccgcgtttccaccgataagcaggtg

SEQ ID NO: 16113 - DNA, 260 bp, Unknown
  Description of Unknown: LeftRegion for integrase B3114 sequence
aagcgtttgagcgcattcggaacatcctgcttgccaccagctatacgaagaaggtaggttgacatcatggacgaatgcagaaccaaacgctatactgagtgcggtaacgggcggtgctacaagccgaaccattgccggacgttctttgacaacggaataaagtctgtccccacttttgttatgaaagtgaggaatttgtaatgacagaaaacaacaaccgtgtctgttgcttgtaccgcgtttccaccgataagcaggtg

SEQ ID NO: 16114 - DNA, 260 bp, Unknown; identical to SEQ ID NO: 16113
  Description of Unknown: LeftRegion for integrase B3115 sequence

SEQ ID NO: 16115 - DNA, 260 bp, Unknown
  Description of Unknown: LeftRegion for integrase B3116 sequence
agagtgtgcaaaggatttgtttcataataaaatatcagccttgtgagtataaaaacttgcaaggcttttttcgcaaaatatcttcgcattttaccgacattggtctggatattacattatataatggtataatgtaatcagagagaaatctcaactcagactaagaatagtgtcggtgcaaatgagaaagagaggttaaaatgattgttacaaaaccgacgcaagaaaaaacattaaaaacagtttactgcttatacaga

SEQ ID NO: 16116 - DNA, 260 bp, Unknown
  Description of Unknown: LeftRegion for integrase B3117 sequence
cgcagaaattgagagcggctgtattgccgtggccgttgtagacggtacagaagggtttttaaaacaagtcgagttcggtgagaactccacctcgcttcactcgttcaatccgtattatcccgacatggagtttgtagatgccgaccagaaacgtttgcactttatcggtcgcgtccgagaaatgaagcggaggttctgatatgcctcagaagtttaaaatcgacctctctatgctgaccccggaagaacagcagcagttt

SEQ ID NO: 16117 - DNA, 260 bp, Unknown
  Description of Unknown: LeftRegion for integrase B3118 sequence
atggacggcggcttgaaacactcttttgaagtaaaaaacagagtaaccgctataattggaaaatggacggtttatcaagcgcaaaagcgccttccccttttagaactctgtcaagacttatccgaagaagaattgcttgaagtaattaactatatcaagtttgttcaatctaagcggcaagcggagaaggaggaatagcaatgcagcaagcattgaacgcggttatatatgcccgctattcctcccatagccagcaggaa

SEQ ID NO: 16118 - DNA, 260 bp, Unknown
  Description of Unknown: LeftRegion for integrase B3119 sequence
attatctattctgtttatctgattcaccttacccgaaagtagagatttccctaaccgaagaagagcaattactgcttgacgcattccgttccgctaccccacaaggtagatttaacattattactacctgtatgtgcgagaagcgaaaaggggacaacgaaagtgccgggtgattgattttgtagagtggaggaataaccatgtatgaggatataaaaacagcctgcctatacgttagattctcaagccataaccagact

SEQ ID NO: 16119 - DNA, 260 bp, Unknown; identical to SEQ ID NO: 13002
  Description of Unknown: LeftRegion for integrase B3120 sequence

SEQ ID NO: 16120 - DNA, 260 bp, Unknown; identical to SEQ ID NO: 13073
  Description of Unknown: LeftRegion for integrase B3121 sequence

SEQ ID NO: 16121 - DNA, 260 bp, Unknown
  Description of Unknown: LeftRegion for integrase B3122 sequence
cagctggctgaggccaaggcccgcattaagcacctgaccattgccctggcggcttgtgttattttttttgtactcattttggtggtcgatctcctaaaccgtgacgtcggctggttccgcgatgccctcggcctcggcctggacgccgcccgtcccgctggcgcggcgtatctggcccccctggcctggaggtgtcgctgatgcagaggccccacggcgcgtatatcctcgcgcgctactccacagacaaccaaaacccg

SEQ ID NO: 16122 - DNA, 260 bp, Unknown; identical to SEQ ID NO: 16019
  Description of Unknown: LeftRegion for integrase B3123 sequence

SEQ ID NO: 16123 - DNA, 260 bp, Unknown
  Description of Unknown: LeftRegion for integrase B3124 sequence
gaataaaagtagagggaatcattcaaggtctacttttacaagataaataccaaacaaaacaaaagttagggtaattagagaaggaaaaattatacgtataaagtttaagaaggaatagatacggcagattgtgtatgccagaactgcgtatacacctggaaagcctgagtgtgtagccgtatacagagaggaggcactgcatggcaaaagcaaaacaaaaagcagctacaaatgatataagcaaactcgctgttatatat

SEQ ID NO: 16124 - DNA, 260 bp, Unknown
  Description of Unknown: LeftRegion for integrase B3125 sequence
gatgaaaaagtattcaaaagtgaaatctttaaaatcatttctaagcccaatcatttattaacttttatttttaaagatggtagcgaaagagacatcacttggagtaatccttctagaagtaaatcatggactccggaaatgaaagaagtagccagacaaaggtcactaaaactttataaaaagagaggagaggatggaagatggctaaaagaaaaataacggttattccttcaacaataaatcctttaacgcagaccccg

SEQ ID NO: 16125 - DNA, 260 bp, Unknown; identical to SEQ ID NO: 15537
  Description of Unknown: LeftRegion for integrase B3126 sequence

SEQ ID NO: 16126 - DNA, 260 bp, Unknown
  Description of Unknown: LeftRegion for integrase B3127 sequence
aaggtggaggacggcgtcaccaaaaagacaaactttctcgtcctcggcagcaccgattactgctcctccctcaacggcgccaagagcagcaagcaactcaaggccgaaaagctcatcgcggaagggcaggaccttgtcattataaccgaggcggaatttttggaaatgacgctctattttaatccggaaaacgaagacttatgaacgccgtcatatatgcgcgctactcctcctacaaccagaccgagcgcagcattgag

SEQ ID NO: 16127 - DNA, 260 bp, Unknown
  Description of Unknown: LeftRegion for integrase B3128 sequence
catattagaaaataagattaagtccattttaaaagatgaagaaaaatatataaaaattaaatctatatttaaaatttatgaagttcaatataatgcttgtaatatataattatccctttaaatgtgctttttatttattctaaatcaatttaacaatttaaaatattaacttatattaatgaatagtatgtattaaaggggtgattaaaattagagcagcaatatatgttagaaaatctagattatcagaaaaaggtgaa

SEQ ID NO: 16128 - DNA, 260 bp, Unknown
  Description of Unknown: LeftRegion for integrase B3129 sequence
aagcatttgaacgcattcggaacatcctgcttgccaccagctacacgaagaaggtaggttgacatcatggacgaatgcagaatcaaacgctatactgagtgcggtgatgggcggtgccacaaaccgagccattgccggacgttctttgacaacgaaataaagcctgtccccacttttgttatgaaagtgaggaatttacaatgacagaaaacaacaaccgcgtctgctgcttgtaccgcgtttccaccgataagcaggtg

SEQ ID NO: 16129 - DNA, 260 bp, Unknown
  Description of Unknown: LeftRegion for integrase B3130 sequence
gctttttatcaattagctaatatgttatacttaccagaggaacaaatagcaatatgtccgatatgccatagattttttatacggaaaaatgccaatcaaaaatattgtcataatactaaagttgttaatggaatagaaaggcgaacttgttatgctcaaaaaatgtataagagaaatcaaagcagaaaggaatcagaataatgaatgttgtaatatatgctcgtttcagttcaagtggacagagagaagaaagtattgaa

SEQ ID NO: 16130 - DNA, 260 bp, Unknown
  Description of Unknown: LeftRegion for integrase B3131 sequence
aagatttcttattaagtaaatgaacactgatttaagccttgtaagtgtaaaaaacttgcaaggctttttttcgcaaattatcttcgcatttcaccgccattggtctggatattacattatataatggtataatgtaatcagagagaaatctcaactcagactaagaatagtgtcggtacaaatgagaaagagaggttaaaatgattgctacaaaaccgacgcaagaaaaaacagtgaaaacagtttactgcttatacaga

SEQ ID NO: 16131 - DNA, 260 bp, Unknown
  Description of Unknown: LeftRegion for integrase B3132 sequence
taatttataaaattgaatcaatagtaagagatgaagaaaggtatattagaataaaagaaaaaattaaactttatgaagttcaatttaacacctgcaatatatgatgcatcttaaacttacttacactttaaatttatctataatctatttaagtattttaaataatatcttaaagtaatgaataagtatgtatcaaaggggtgattaaaattagagctgcaatatatgttagaaaatctagattatcagaaaaaggtgaa

SEQ ID NO: 16132 - DNA, 260 bp, Unknown
  Description of Unknown: LeftRegion for integrase B3133 sequence
cgccgcacgggatcggcatttggaatccgtaaatcgtgataaaatgatttggcgcgttgtggccctttcgttgattgggctgctttgtgtgtggtttatctgggatgttaccggcggcaatcgcgggcttatccgctatggccaatcgtccttcctccccgtcagccgcctttttcatcttggaaaaggaggcgttttccatgtctgaaaaatacgccatctatttgagaaaaagccgggccgatatggaggcagaggcc

SEQ ID NO: 16133 - DNA, 260 bp, Unknown; identical to SEQ ID NO: 13129
  Description of Unknown: LeftRegion for integrase B3134 sequence

SEQ ID NO: 16134 - DNA, 260 bp, Unknown
  Description of Unknown: LeftRegion for integrase B3135 sequence
atttactaaaatagccgctgctgaagattatagaaaaactcttgtaattgaaaaatcaattaatattaaaaatacaactaaaattgcttaaatatatttaaaccctacaattaaatttgtagggttggttatctattagaataattttctacttaaaatgtataatattaaattatatactaatgtatgaggtgaaataaatgaaagttgcaatatactcaagaaaaagcgtttttactggaaaaggtgaatctattgag

SEQ ID NO: 16135 - DNA, 260 bp, Unknown
  Description of Unknown: LeftRegion for integrase B3136 sequence
atctttaacaactgttggctatggcgatatatacccggtatcaaccgccgggcgtgttttcactatgctgtcgtcgctggttggtattgccgttgtagccttgcctgccggtatcataacggcggggtacatggacgcactgcgcgaagattccgacaaaaagaaatagcccgccgatcggcgggcaggggggtgcttatatgcgagcgtttatctattgccgattttccagccataagcagcaagagcttagcatagag

SEQ ID NO: 16136 - DNA, 260 bp, Unknown; identical to SEQ ID NO: 13018
  Description of Unknown: LeftRegion for integrase B3137 sequence

SEQ ID NO: 16137 - DNA, 260 bp, Unknown
  Description of Unknown: LeftRegion for integrase B3138 sequence
ccagcactaataacatcgcaaaaaagctcacgaactccatcttgcaaagccttgccgattactacgactctgccccaaagcattatgagcctccatacgcagaggacgacgagggcgcgtgctgtgaggacggtgacggtgacggcgacgatgactgtaccaatacccctttttgtgtgtgatgctccgtggataaggctgtgatctacgcccgctactccagcggtgcccaaaaggatgtgtcaatcgaccagcaagtc

SEQ ID NO: 16138 - DNA, 260 bp, Unknown
  Description of Unknown: LeftRegion for integrase B3139 sequence
cgccgcgcgggatcggcatttggaatccgtaaatcgtgataaaatgatttggcgcgttgtggccctttcgttgattgggctgctttgtgtgtggttcatttgggatgttaccggcggcaatcgcgggcttatccgctatggccaatcgtccttccaccccgtcagccgcctttttcatcttggaaaaggaggcgctttccatgcctgaaaaatacgccatctatttgagaaaaagccgggccgatatggaggcagaggcc

SEQ ID NO: 16139 - DNA, 260 bp, Unknown; identical to SEQ ID NO: 13377
  Description of Unknown: LeftRegion for integrase B3140 sequence

SEQ ID NO: 16140 - DNA, 260 bp, Unknown
  Description of Unknown: LeftRegion for integrase B3141 sequence
catcttctccgcagaaaagacagggcgttttggaacgagttgaacctaaacgtgcaactctacttatataaatggctcccagatatgatatttcggaaatgaatttaactttttgactgttgaaagtgtggaaagatttatttttcccagaacttgcaacggcttgcaacaaacttaaaactacttgaaaggtggtatttatgcctcgcaaaaagaaactgcaagaggtgggcggcctgcgcctggtggcatactatcgc

SEQ ID NO: 16141 - DNA, 260 bp, Unknown
  Description of Unknown: LeftRegion for integrase B3142 sequence
ctcattcccgttcccgattgatgaggtaagggattcagacacgtaccagctaacgacgaggtggagagcttacttggagagacataggaagctgctcaaataaaaaaagaaaccccgtgcggcttcttggcggttggcgcacggggcaaaggtgaagaacagagcgcttaaccgcgcccgtcctgagaggtgattttagcatggtgaagaaccgagccgccatatatgcgcgcttcagctcgcacaaccagcgttcggaa

SEQ ID NO: 16142 - DNA, 260 bp, Unknown; identical to SEQ ID NO: 16137
  Description of Unknown: LeftRegion for integrase B3143 sequence

SEQ ID NO: 16143 - DNA, 260 bp, Unknown
  Description of Unknown: LeftRegion for integrase B3144 sequence
aacacacctcctgaaacagatactcttatggttgtcattgttgatgacgaagaaggatttgttaagaaaatcagtattgatgaagatactgtgacccttcgctcttttaatccacactatcctccccgtgtttttggtggtgttgaaattggacgattgcgctttgtcggtagagtcatggagttaaaaaggagatttgcatgaaaaaatttccaatcgacctctcctgtctgacagaggaagaaatctctcaatttcag

SEQ ID NO: 16144 - DNA, 260 bp, Unknown
  Description of Unknown: LeftRegion for integrase B3145 sequence
agcgccgtgaagaggctcctcagtgataaccccggagaccttgccactatcttccctcagctcatggagcgtcaaaacagcctaaaggcggaaaccgccgccatcatcgacaacctgctccaagcggatattgcggctgaaaataagaaataagaaaaggccctgcgggtgcggggtcttttgctttggaggtgatagttttggatgagtattttatttacctgagaaaatcccgcgccgatatggaggccgaggcccac

SEQ ID NO: 16145 - DNA, 260 bp, Unknown
  Description of Unknown: LeftRegion for integrase B3146 sequence
ttcaagtctaatattaacatagaacttgaaaaataggtgcattttgttattttatatcgaaatgcgttatatcggagtgattaaatgtacaacaagaaaacggaaaaatctttgttctgcggttcgcttgccgctgaacagcagaaagtacaacataaaattttgacttccgaatatacctattttaatcggaggaaaaaatggaacagtattgcttatatctgcgaaaatcaagatcagatgtcgaagccgaaaatcac

SEQ ID NO: 16146 - DNA, 260 bp, Unknown
  Description of Unknown: LeftRegion for integrase B3147 sequence
ttcaagtttgatattaacacaaaacttgaaaaataggagcattttgttattttatatcgaaatgcgttatatcggagtgattaaatgtacaacaaaaaaacggaaaaaactttgttctgcggtacgcttgctgctgaacagcagaaagtacaacataaaattttgacttccgaatatacctattttaatcggaggaaaaaatggaacagtattgcttatatctgcgaaaatcaagatcagatgtcgaagccgaaaatcac

SEQ ID NO: 16147 - DNA, 260 bp, Unknown
  Description of Unknown: LeftRegion for integrase B3148 sequence
ttcaagtttgatattaacataaaacttgaagaataggagcattttgttattttatatcgaaatgcgttatatcggagtgattaaatgtacaacgagaaaacagaaaaatctttgttctgcggtacatttgccgctaaacagcagaaagtacaacataaaattttgacttccgaatatacctattttagtcggagggaaaaatggaacagtattgcttatatctgcgaaaatccagatcggacattgaagccgaaaatcac

SEQ ID NO: 16148 - DNA, 260 bp, Unknown; identical to SEQ ID NO: 16147
  Description of Unknown: LeftRegion for integrase B3149 sequence

SEQ ID NO: 16149 - DNA, 260 bp, Unknown
  Description of Unknown: LeftRegion for integrase B3150 sequence
agcgccgtgaagaggctcctcagtgataaccccggcgaccttgccactatcttccctcagctcatggagcgccaaaacagcctaaaggcggaaaccgccgccatcatcgacaacctgctccaagcggatattgcggctgaaaataagaaataagaaaaggccctgcgggtgcggggccttttgctttggaggtgatagttttggatgagtattttatttacctgagaaaatcccgcgccgatatggaggccgaggcccac

SEQ ID NO: 16150 - DNA, 260 bp, Unknown; identical to SEQ ID NO: 16147
  Description of Unknown: LeftRegion for integrase B3151 sequence

SEQ ID NO: 16151 - DNA, 260 bp, Unknown
  Description of Unknown: LeftRegion for integrase B3152 sequence
taagtgaagttaggaaccctcacacccttccgactctgactgaacaggagagggtactactgtctgctttccgtgcagcaaccgtagaagggcagtttcacatcatccaggtctgtatgaacgaacgagacgcagcagtagcggaaaaaggggaaagcgtcagtgtagggtaatcaacctggaagaatggaggaaacatcatgtatgaagaaataaaaaccgtatgtctatacgtgcgttattccagttcaaaccaaacc

SEQ ID NO: 16152 - DNA, 260 bp, Unknown
  Description of Unknown: LeftRegion for integrase B3153 sequence
tcttcgaaagaacaagaaaaaaccactgcccaaagattacaattatgaaaaagtacaggatgctgtacagcgtgcaaaagaattggattgcgatggagaagaatatccgaaagatcatctcggaagcaccgtatataaaatcattgaaaaactcattgaaatgaaaaatcaaatcgaataaccagtaaaggaagtgtaagatgaacgttgtcatctatgcccgttattcttgtgaacggcagacggaacaatccattgaa

SEQ ID NO: 16153 - DNA, 260 bp, Unknown; identical to SEQ ID NO: 13421
  Description of Unknown: LeftRegion for integrase B3154 sequence

SEQ ID NO: 16154 - DNA, 260 bp, Unknown
  Description of Unknown: LeftRegion for integrase B3155 sequence
aattaaagcatatactgttctttgtcctgatggaacatataccatcgttctaaattcaagactttcgcacgaacagcagcttgaagcgtataagcatgagttaaaacatattatggataatgattttgatattgaaaacggtgatgctgatgcgattgaacaatatgctcataatgaataggaaaattaggtgattacatatgttatacgatataaaaagtgttgacttagaaaacataattatatatttgagaaaatca

SEQ ID NO: 16155 - DNA, 260 bp, Unknown
  Description of Unknown: LeftRegion for integrase B3156 sequence
tatcggcggggagagttttcgacacacccgctggagccgcaagtcctccggcagtttgagggctttttagaagcacatggaaagtaaaaagccgcacctgctccaccaggtacggcttgaaaagagagtatatgctatgatagcacaagaccgtgtctattatagcatacttctgcattttttgcaagggggaaatttttatggacacatactgtatatatctacggaaatcgcgtgcggacgcagaagccgaagcacgc

SEQ ID NO: 16156 - DNA, 260 bp, Unknown
  Description of Unknown: LeftRegion for integrase B3157 sequence
ttcaagtttgatattaacataaaacttgaagaataggagcattttgttattttatatcgaaatgcgttatatcggagtgattaaatgtacaacgagaaaacagaaaaatctttgttctgcggtacatttgccgctaaacagcagaaagtacaacataaaattttgacttccgaatatacctattttagtcggagggaaaaatggaacagtattgcttatatctgcgaaaatcaagatcagacatcgaagctgaaaatcac

SEQ ID NO: 16157 - DNA, 260 bp, Unknown
  Description of Unknown: LeftRegion for integrase B3158 sequence
ttcaagtttgatattaacataaaacttgaagaataggagcattttgttattttatatcgaaatgcgttatatcggagtgattaaatgtacaacgagaaaacagaaaaatctttgttctgcggtacatttgccgctaaacagcagaaagtacaacataaaattttgacttccgaatatacctattttagtcggagggaaaaatggaacagtattgcttatatctgcgaaaatcaagatcagatgtcgaagccgaaaatcac

SEQ ID NO: 16158 - DNA, 260 bp, Unknown
  Description of Unknown: LeftRegion for integrase B3159 sequence
attggactggccctctacggtgcgattgtagcgagcattctggatgcggagttacacgccgccattcttcccggcatcctcatgctgctggcgttcaacgtgcctgacctgatccggctgaagctgggcaagttccgggataacgtgggcgattatctgcggcaataaaaaagcccgcacactggcgggcgggtgatggtatgaaaaaagagaacgaaatccgggcagttgtctatgcccggtactcatcccattcgcaa

SEQ ID NO: 16159 - DNA, 260 bp, Unknown
  Description of Unknown: LeftRegion for integrase B3160 sequence
ttcaagtttgatattaacacaaaacttgaaaaataggagcattttgttattttatatcgaaatgcgttatattggagtgattaaatgtacaacgagaaaacggaaaaatctttgttctgcggttcgcttgccgctgaacagcagaaagtacaacataaaattttgacttccgaatatacctattttaatcggaggaaaaaatggaacagtattgcttatatctgcgaaaatcaagatcagatgtcgaagccgaaaatcac

SEQ ID NO: 16160 - DNA, 260 bp, Unknown
  Description of Unknown: LeftRegion for integrase B3161 sequence
tatatcggcggggtgagttttcgacacacccgctggagccgcaagtcctccggcagtttgagggctttttagaagcccatggaaagtaaaaagccgcacctgctccaacaggtacggcttgaaaagagagtatatgctatgatagcactagaccgtgtctattatagcatacttctgcattttttgcaagggggaaatttatggacacatactgtatatatctacggaaatcgcgtgcggacgcagaagccgaagcacgt

SEQ ID NO: 16161 - DNA, 260 bp, Unknown
  Description of Unknown: LeftRegion for integrase B3162 sequence
ttcaagtttgatattaacacaaaacttgaaaaataggagcattttgttattttatatcgaaatgcgttatatcggagtgattaaatgtacaacaaaaaaacggaaaaaactttgttctgcggtacgcttgctgctgaacagcagaaagtacaacataaaattttgacttccgaatatacctattttagtcggaggaaaaaatggaacagtattgcttatatctgcgaaaatcaagatcagacatcgaagctgaaaatcac

SEQ ID NO: 16162 - DNA, 260 bp, Unknown; identical to SEQ ID NO: 16147
  Description of Unknown: LeftRegion for integrase B3163 sequence

SEQ ID NO: 16163 - DNA, 260 bp, Unknown
  Description of Unknown: LeftRegion for integrase B3164 sequence
tatcggcggggagatttttcgacacacccgctggagccgcaagtcctccggcagtttgagggctttttagaagcacacggaaagtaaaaagccgcacctgctccaccaggtacggcttgaaaagagagtatatgctatgatagcacaagaccgtgtctattatagcatacttctgcattttttgcaagggggaaatttttatggacacatactgtatatatctacgaaaatcgcgtgcggacgcagaagccgaagcacgc

SEQ ID NO: 16164 - DNA, 260 bp, Unknown
  Description of Unknown: LeftRegion for integrase B3165 sequence
gtcagcgttttggcggatttttccgtttttgatatgtaagaagtaagcatctttgattgaaataaaaaacgcccacggtgctaccaacaccgcaggcgttccagatcagcttacccagagggtaataacagccaacctcacagatgttattgtaccacctccgggtaggcttgtcaaagtgtacctcggaggaaattacaatggcaagaaaaaagaaacaggcaagcggcgatgccgtcatctatgcccgctactcgtcc

SEQ ID NO: 16165 - DNA, 260 bp, Unknown
  Description of Unknown: LeftRegion for integrase B3166 sequence
aaaaagataaatacctcgtttcttctggagctgatattggctatctacctgcaagcgctgcaaaacgtatagaggaagatggcgaggacgcatacaatatttttgtggctgatacggattatgatgaccgaggaaaaaatacaattagtgtatatcttttcccgaccggcaaataataacgccttaaagtaggtgattgcatgaaagcggccatatacgcccgtttttcgagccataatcaacgtgaggaatccattgaa

SEQ ID NO: 16166 - DNA, 260 bp, Unknown
  Description of Unknown: LeftRegion for integrase B3167 sequence
taattctgtcatggaaatgtgccgttcccttctcaccttccagattaatattttcatgaattaataatatcactctattcattgaattgtctgccggtaatgtttaccagtggcaagctgaccatccgtccggcttgacctttatttgaattttaactataatttgaaccactaaaaatgaatgaaagcaggtgtgcgtcatgctatatgaaatcaaccgggaagattttgaaaatgtaataatctatttgaggaaatca

SEQ ID NO: 16167 - DNA, 260 bp, Unknown; identical to SEQ ID NO: 13018
  Description of Unknown: LeftRegion for integrase B3168 sequence

SEQ ID NO: 16168 - DNA, 260 bp, Unknown; identical to SEQ ID NO: 13549
  Description of Unknown: LeftRegion for integrase B3169 sequence

SEQ ID NO: 16169 - DNA, 260 bp, Unknown
  Description of Unknown: LeftRegion for integrase B3170 sequence
tatcggcggggagagttttcgacacacccgctggagccgcaagtcctccggcagtttgagggttttttagaagcccatggaaagtaaaaagccgcacctgctccaacaggtgcggcttgaaaagagagtatatgctatgatagcactagaccgtgtctattatagcatacttctgcattttttgcaagggggaaatttttatggacacatactgtatatatctaagaaagtcgcgtgcggacgcagaagccgaagcacgc

SEQ ID NO: 16170 - DNA, 260 bp, Unknown; identical to SEQ ID NO: 16161
  Description of Unknown: LeftRegion for integrase B3171 sequence

SEQ ID NO: 16171 - DNA, 260 bp, Unknown; identical to SEQ ID NO: 16147
  Description of Unknown: LeftRegion for integrase B3172 sequence

SEQ ID NO: 16172 - DNA, 260 bp, Unknown
  Description of Unknown: LeftRegion for integrase B3173 sequence
ttcaagtttgatgttaacacaaaacttgaaaaataggtgcattttgttattttatatcgaaatgcgttatattggagtgattaaatgtacaacaagaaaacggaaaaatctttgttctgcggtacatttgccgctaaacagcagaaagtacaacataaaattttgacttccgaatatacctattttagtcggagggaaaaatggaacagtattgcttatatctgcgaaaatcaagatcagatgtcgaagccgaaaatcac

SEQ ID NO: 16173 - DNA, 260 bp, Unknown; identical to SEQ ID NO: 16164
  Description of Unknown: LeftRegion for integrase B3174 sequence

SEQ ID NO: 16174 - DNA, 260 bp, Unknown
  Description of Unknown: LeftRegion for integrase B3175 sequence
cttgtattttggatgggcgtactggctgcacttttcgagggcgtaggtagtgaaaaactcatttctttgtgggtattgtttctgctggcctgcatcaacgtacctgacctgatccggctgaaactgggcaagtttcgggataacgtgggcgcctatctgcggcaataaaaaagcccgcacactggcgggcgggtgatggtatgaaaaaagagaacgaaatccgggcagttgtctatgcccggtactcatcccattcgcaa

SEQ ID NO: 16175 - DNA, 260 bp, Unknown
  Description of Unknown: LeftRegion for integrase B3176 sequence
gtcagcgttttggcggatttttccgtttttgatatgtaagaagtaagcatctttgattgaaataaaaaacgcccacggtgctaccaacaccgcaggcgttccagatcagcttacccagagggtaataacagctaacctcacagatgttattgtaccacctccgggtaggcttgtcaaagtgtacctcggaggaaattacaatggcaagaaaaaagaaacaggcaagcggcgatgccgtcatctatgcccgctactcgtcc

SEQ ID NO: 16176 - DNA, 260 bp, Unknown
  Description of Unknown: LeftRegion for integrase B3177 sequence
ttcaagtttgatgttaacacaaaacttgaaaaataggagcattttgttattttatatcgaaatgcgttatattggagtgattaaatgtacaacgagaaaacggaaaaatctttgttctgcggtacatttgccgctaaacagcagaaagtacaacataaaattttgacttccgaatatacctattttaatcggaggaaaaaatggaacagtattgcttatatctgcgaaaatcaagatcagatgtcgaagccgaaaatcac

SEQ ID NO: 16177 - DNA, 260 bp, Unknown
  Description of Unknown: LeftRegion for integrase B3178 sequence
gatattctggctaaaatgtcatgctattttaatgcgccgattgaatgcctgttaggactacccgaaaagaaagaccaccagaacaccgtattagctctgtttaacgctctggatagtgaaaatcaaaaagccgtgttactatacatggaatttgttctgtccaaacaaaaaagcccgcacaacggcgggcaggtgatggtatgaaaaaagagaatgaaatccgggcagttgtctatgcccggtattcttcccactctcag

SEQ ID NO: 16178 - DNA, 260 bp, Unknown; identical to SEQ ID NO: 16161
  Description of Unknown: LeftRegion for integrase B3179 sequence

SEQ ID NO: 16179 - DNA, 260 bp, Unknown
  Description of Unknown: LeftRegion for integrase B3180 sequence
acacccgccgacgcactttctgccgcatcttccccctgcactggctacacccgcgacgacgtctccctgctcctggatcgtatcgagcgccaacacctccgccacaccgaggatctgcgcgcaaaccaggccgtcatgcacgagctcatcaaaacccttgtctccaccctcaaccgatccgataaggagtgactccctccatgccccgcgtaccatctcacaaacagcagtcctttgccgtcatctacgcccgctactcc

SEQ ID NO: 16180 - DNA, 260 bp, Unknown
  Description of Unknown: LeftRegion for integrase B3181 sequence
ttcaagtttgatattaacacaaaacttgaaaaataggagcattttgttattttatatcgaaatgcgttatatcggagtgattaaatgtacaacgagaaaacggaaaaatctttgttctgcggttcgcttgccgctgaacagcagaaagtacaacataaaattttgacttccgaatatacctattttaatcggaggaaaaaatggaacagtattgcttatatctgcgaaaatcaagatcagatgtcgaagccgaaaatcac

SEQ ID NO: 16181 - DNA, 260 bp, Unknown
  Description of Unknown: LeftRegion for integrase B3182 sequence
ttcaagtttgatattaacataaaacttgaagaataggagcattttgttattttatatcgaaatgcgttatatcggagtgattaaatgtacaacgagaaaacagaaaaatctttgttcggcggtacatttgccgctaaacagcagaaagtacaacataaaattttgacttccgaatatacctattttagtcggagggaaaaatggaacagtattgcttatatctgcgaaaatccagatcggacattgaagccgaaaatcac

SEQ ID NO: 16182 - DNA, 260 bp, Unknown
  Description of Unknown: LeftRegion for integrase B3183 sequence
ttgcagccattataagccttgtcggcatcggaatcatcgccattccgacgggcattatttccgctggattcacgtctttgattggaaaggatagagaagaaaccgacaaaaagaactattgcccatattgcggccacaggctcgacgaataacaaagcgtttttgcattttctgaaaaaagtttgcgagtaggtgattgcatgaaagcggccatatacgcccgtttttcgagccataatcaacgtgaggaatccattgaa

SEQ ID NO: 16183 - DNA, 260 bp, Unknown
  Description of Unknown: LeftRegion for integrase B3184 sequence
ttcaagtttgatattaacataaaacttgaagaataggagcattttgttattttatatcgaaatgcgttatatcggagtgattaaatgtacaacgagaaaacagaaaaatctttgttctgcggtacatttgccgctaaacagcagaaagtacaacataaaattttgacttccgaatatacctattttaatcggaggaaaaaatggaacagtattgcttatatctgcgaaaatcaagatcagatgtcgaagccgaaaatcac

SEQ ID NO: 16184 - DNA, 260 bp, Unknown; identical to SEQ ID NO: 16166
  Description of Unknown: LeftRegion for integrase B3185 sequence

SEQ ID NO: 16185 - DNA, 260 bp, Unknown
  Description of Unknown: LeftRegion for integrase B3186 sequence
gtcagcgttttggcggatttttccgtttttgatatgtaagaagtaagcatctttgattgaaataaaaaacgcccacggtgctaccaacaccgcaggcgttccagatcagcttacccagagggcaataacagctaacctcgcagatgttattgtaccacctccgggtaggcttgtcaaagtgtacctcggaggaaattacaatggcaagaaaaaagaaacaggcaagcggcgatgccgtcatctatgcccgctactcgtcc

SEQ ID NO: 16186 - DNA, 260 bp, Unknown; identical to SEQ ID NO: 16147
  Description of Unknown: LeftRegion for integrase B3187 sequence

SEQ ID NO: 16187 - DNA, 260 bp, Unknown
  Description of Unknown: LeftRegion for integrase B3188 sequence
ttacaacgtccgcaattcagcgcaaatgtaaatgcggaaacaactgtgcgtatgcagttcttcaaaacctacaggtctacggaatgattcgagagattcggcaattcacatacgaatggacagaaaaagccctcctgctgggcgcagaagggcgtaacgggtaaacagatatgtcgatagatattaaatggcaggtgccaatggcaaagccggaggttagcgaactggccgtcgtatatgcccggtattcaagccacagt

SEQ ID NO: 16188 - DNA, 260 bp, Unknown
  Description of Unknown: LeftRegion for integrase B3189 sequence
taattctgtcatggaaatgtgccggtcccttctcaccttccagattaatattttcatgaattaataatatcactctattcattgaattgtctgcaggtaatgtttaccagtggcaagctgaccatccgtccggcttgacctttatttgaattttaactataatttgaaccactaaaaatgaatgaaagcaggtgtgcgtcatgctatatgaaatcaaccgggaagattttgaaaatgtaataatctatttgagaaaatca

SEQ ID NO: 16189 - DNA, 260 bp, Unknown; identical to SEQ ID NO: 16164
  Description of Unknown: LeftRegion for integrase B3190 sequence

SEQ ID NO: 16190 - DNA, 260 bp, Unknown; identical to SEQ ID NO: 16175
  Description of Unknown: LeftRegion for integrase B3191 sequence

SEQ ID NO: 16191 - DNA, 260 bp, Unknown; identical to SEQ ID NO: 16154
  Description of Unknown: LeftRegion for integrase B3192 sequence

SEQ ID NO: 16192 - DNA, 260 bp, Unknown
  Description of Unknown: LeftRegion for integrase B3193 sequence
atcgccattccgacgggcattatttccgccggattcacgtctttgatcggaaaagataaagaagaacccgacaaaaagaactattgtccatattgcggccataagctcgacgaataatagcgcaatctcacattcaaaatagctgaaatgcgctcattttgcatttgcaatattaaagtatttaacgagtaggtgattgcatgaaagcggccatatacgcccgtttttcgagccataatcagcgcgaggaatccattgaa

SEQ ID NO: 16193 - DNA, 260 bp, Unknown
  Description of Unknown: LeftRegion for integrase B3194 sequence
ctgttcctccggttttacccaatgattacaaaaaactgcttactctttatagagaggcagacgatgacggaaaaaccgtcattatgagtcacgccattcaggaatgtagacgatcaatgaaagagaaagaaaaaacaggctcttcggaagagtctgctgtcggttaaagtaattgacctaaatgaatggagaaagaccctatgaagaagttcaaattccctattgacctgtccatgttgacagaagaagagatcaatcaa

SEQ ID NO: 16194 - DNA, 260 bp, Unknown
  Description of Unknown: LeftRegion for integrase B3195 sequence
attggactggccctctacggtacgattgtggcgagcattctggatgcggagttacacgccgccattcttcccggtatcttcatgctgctggcgttcaacgtgcctgacctgatccggctgaaactgggcaagttccgggataacgtgggcgattatctgcggcaataaaaaagcccgcacactggcgggcgggtgatggtatgaaaaaagataacgaaatccgggcagttgtctacgcccggtactcatcccattcgcaa

SEQ ID NO: 16195 - DNA, 260 bp, Unknown; identical to SEQ ID NO: 16176
  Description of Unknown: LeftRegion for integrase B3196 sequence

SEQ ID NO: 16196 - DNA, 260 bp, Unknown
  Description of Unknown: LeftRegion for integrase B3197 sequence
aacgggtaagacgcaggtcggactcgaccttgtcgatgatgtttcgagcgcgataaaagatttaagctaaataaaaaagaacccccggtgcgggaacaccgagggttaagacatcaaaacacaccacgcgaatagagtgaattgatatacatattatatcagctcgctctcttaaatgcaagaaagcgaggcttttttatatggaaaacgcagtaatttacgcgagatattcatcggacaagcagacggagcagagcatc

SEQ ID NO: 16197 - DNA, 260 bp, Unknown
  Description of Unknown: LeftRegion for integrase B3198 sequence
agagccgttccaacagacaggagttgcagggggataaaggccagactgcgagttgagaaggtcattcccattgatctgctcagacgaaagagagccttggaggtgatattacgaaagcggtaatctatgccagatacagctcccacagccagcgggaggagtccatagaaggtcagctccgtgagtgtcacgagttcgccttgaagaatggatttacgatcataaacgaatattgtgaccgggcgctctccggcaagacc

SEQ ID NO: 16198 - DNA, 260 bp, Unknown; identical to SEQ ID NO: 16157
  Description of Unknown: LeftRegion for integrase B3199 sequence

SEQ ID NO: 16199 - DNA, 260 bp, Unknown
  Description of Unknown: LeftRegion for integrase B3200 sequence
cttgtattttggatgggcgtactggctgcacttttcgagggcgtaggtagtgaaaaactcatttctttgtgggtattgtttctgctggcctgcatcaacgtacctgacctgatccggctgaaactgggcaagtttcgggataacgtgggcgactatctgcggcaataaaaaagctcgcacaacggcgggcgggtgatggtatgaaaaaagagaacgaaatccgggcagttgtgtatgcccggtactcatctcattcgcaa

SEQ ID NO: 16200 - DNA, 260 bp, Unknown
  Description of Unknown: LeftRegion for integrase B3201 sequence
attattatgtggctcggtgcaatcggaatgatttttgagggcgttggtagtgaaaaactgttttccctctgggtgattttcttgctggcctgcttcaacgtgcctgacctgatccggctgaaactgggcaagttccgggataacgtgggcgattatctgcggcaataaaaaagcccgcacactggcgggcgggtgatgatatgaaaaaagagaacgaaatccgggcagttgtctacgcccggtactcatcccattcgcaa

SEQ ID NO: 16201 - DNA, 260 bp, Unknown
  Description of Unknown: LeftRegion for integrase B3202 sequence
gggtgatggtggtggtgatcaccgtgataaccgccacaatttatatgtatcgatctaaaagcctctctggatatagtgtctctctttttcatctaaaatgtattgcaaatccttatagaatatggtatatacattatacgaaacattgctttaggatgaacgttccaccgttcaatgatgtgtaaagtgaggtgcctgccatgactgccgtgatatacgcccgctattccagtgacaaccagcgtgaagaatccatcgag

SEQ ID NO: 16202 - DNA, 260 bp, Unknown; identical to SEQ ID NO: 15132
  Description of Unknown: LeftRegion for integrase B3203 sequence

SEQ ID NO: 16203 - DNA, 260 bp, Unknown; identical to SEQ ID NO: 15077
  Description of Unknown: LeftRegion for integrase B3204 sequence

SEQ ID NO: 16204 - DNA, 260 bp, Unknown; identical to SEQ ID NO: 16164
  Description of Unknown: LeftRegion for integrase B3205 sequence

SEQ ID NO: 16205 - DNA, 260 bp, Unknown
  Description of Unknown: LeftRegion for integrase B3206 sequence
ttcaagtttgatattaacataaaacttgaagaataggagcattttgttattttatatcgaaatgcgttatatcggagtgattaaatgtacaacgagaaaacagaaaaatatttgttctgcggtacatttgccgctaaacagcagaaagtacaacataaaattttgacttccgaatatacctattttagtcggagggaaaaatggaacagtattgcttatatctgcgaaaatccagatcggacattgaagccgaaaatcac

SEQ ID NO: 16206 - DNA, 260 bp, Unknown
  Description of Unknown: LeftRegion for integrase B3207 sequence
cttgtattttggatgggcgtactggctgcacttttcgagggcgtaggtagtgaaaaactcatttctttgtgggtattgtttctgctgacctgcatcaacgtacctgacctgatccggctgaaactgggcaagtttcgggataacgtgggcgactatctgcggcaataaaaaagcccgcacactggcgggcgggtgatggtatgaaaaaagagaacgaaatccgggcagttgtctatgcccggtactcatcccattcgcaa

SEQ ID NO: 16207 - DNA, 260 bp, Unknown
  Description of Unknown: LeftRegion for integrase B3208 sequence
taaagagcatcctcgctgattgcgggggagacctggcagatgctttcccgcagattatggagaagcagaacacgctcaaggccaaaaccgcctctatccttgacagccttttgcaggctgacgttgcggccttaaaggatagcaacaagtaacctttcggcctgcgctccggcgcgggcctttttgttttggaggtcatcatggagcagtatctcatatacctgcgcaagtctcgttccgacctcgaggccgaagcgcac

SEQ ID NO: 16208 - DNA, 260 bp, Unknown; identical to SEQ ID NO: 14989
  Description of Unknown: LeftRegion for integrase B3209 sequence

SEQ ID NO: 16209 - DNA, 260 bp, Unknown
  Description of Unknown: LeftRegion for integrase B3210 sequence
ataaagagcatcctcgcagattgcgggggagacctggcaggtgctttcccgcagattatggagaagcagaacacgctcaaggctagaaccgcctctaccctcgacagtctcttgcaggccgacgttgcggccttaaaggatagcaacaagtaacctttcggcctgcgctccggcgcgggcctttttgtttggaggccatcatggagcagtatctcatatacctgcgcaagtctcgttccgacctcgaggccgaagcacac

SEQ ID NO: 16210 - DNA, 260 bp, Unknown
  Description of Unknown: LeftRegion for integrase B3211 sequence
taaagagcatcctcgctgattgcgggggagacctggcagacgctttcccgcagattatggagaagcagaacacgctcaaggccaagaccgcctctattctggatagcctcttgcaggccgatgttgcggccttaaaagacagcaacaagtaacctattggcctgcgctccggcgcgggccttttttgtttggaggtcatcatggagcagtatctcatatacctgcgcaagtctcgttccgacctcgaggccgaagcgcac

SEQ ID NO: 16211 - DNA, 260 bp, Unknown
  Description of Unknown: LeftRegion for integrase B3212 sequence
ataaagagcatcctcgctgattgcgggggagacctggcagatgctttcccgcagattatggagaagcagaacacgctcaaggccaaaaccgcctctatccttgacagcctcttgcaggctgacgttgcggccttaaaggatagcaacaagtaacctttcggcctgcgctccggcgctggcctttttgtttggaggtcatcatggagcagtatctcatatacctgcgcaagtctcgttccgacctcgaggccgaagcgcac

SEQ ID NO: 16212 - DNA, 260 bp, Unknown
  Description of Unknown: LeftRegion for integrase B3213 sequence
taaagagcatcctcgctgattgcgggggagacctggcagatgctttcccgcagattatggagaagcagaacacgctcaaggccaagaccgcctctattctggatagcctcttgcaggccgatgttgcggccttaaaagacagcaacaagtaacctattggcctgcgctccggcgcgggccttttttgtttggaggtcatcatggagcagtatctcatatacctgcgcaagtctcgttccgacctcgaggccgaagcgcac

SEQ ID NO: 16213 - DNA, 260 bp, Unknown
  Description of Unknown: LeftRegion for integrase B3214 sequence
aaagagcatcctcgcggattgcgggggagacctggcaggtgctttcccgcagattatggagaagcagaacacgctcaaggccaaaaccgcttctatcctcgacagcctcttgcaggcagacgttgcggccttaaaggatagcaacaagtagcctttcggcctgcgctccggcgcgggcctttttttgtttggaggtcatcatggagcagtatctcatatacctgcgcaagtctcgttccgacctcgaggccgaagcgcac

SEQ ID NO: 16214 - DNA, 260 bp, Unknown
  Description of Unknown: LeftRegion for integrase B3215 sequence
ataaagagcatcctcgctgattgcgggggagacctggcagatgctttcccgcagattatggagaagcagaacacgctcaaggccaaaaccgcctctatccttgacagcctcttgcaggctgacgttgcggccttaaaggacagcagcaaataacctttcagcctgcgctcctgcgcgggcctttttgtttggaggtcatcatggagcagtatctcatatacctgcgcaagtcccgttccgacatcgaggcagaggcgcac

SEQ ID NO: 16215 - DNA, 260 bp, Unknown
  Description of Unknown: LeftRegion for integrase B3216 sequence
ataaagagcatcctcgctgattgcgggggagacctggcagatgctttcccgcagattatggagaagcagaacacgctcaaggccaaaaccgcctctattctggatagcctcttgcaggctgacgttgcggccttaaaagacagcaacaagtaacctattggcctgcgctccggcgcgggtctttttgtttggaggtcatcatggagcagtatctcatatacctgcgcaagtctcgttccgacctcgaggccgaagcgcac

SEQ ID NO: 16216 - DNA, 260 bp, Unknown; identical to SEQ ID NO: 16213
  Description of Unknown: LeftRegion for integrase B3217 sequence

SEQ ID NO: 16217 - DNA, 260 bp, Unknown
  Description of Unknown: LeftRegion for integrase B3218 sequence
ataaagagcatcctcgctgattgcgggggagacctggcagatgctttcccgcagattatggagaagcagaacacgctcaaggccaagaccgcctctattctggatagcctcttgcaggccgatgttgcggccttaaaagacagcaacaagtaacctattggcctgcgctccggcgcgggcctttttgtttggaggtcatcatggagcagtatctcatatacctgcgcaagtctcgttccgacctcgaggcagaggcacac

SEQ ID NO: 16218 - DNA, 260 bp, Unknown
  Description of Unknown: LeftRegion for integrase B3219 sequence
ataaagagcatcctcgctgattgcgggggagacctggcagatgctttcccgcagattatggagaagcagaacacgctcaaggccaagaccgcctctattctggacagcctcttgcaggctgacgttgcggccttaaaggatagcaacaagtaacctttcggcctgcgctccggcgcgggtctttttgtttggaggtcatcatggaacagtatctcatatatctgcgcaagtctcgttccgacctcgaggccgaagcgcac

SEQ ID NO: 16219 - DNA, 260 bp, Unknown; identical to SEQ ID NO: 16213
  Description of Unknown: LeftRegion for integrase B3220 sequence

SEQ ID NO: 16220 - DNA, 260 bp, Unknown
  Description of Unknown: LeftRegion for integrase B3221 sequence
ataaagagcatcctcgctgattgcgggggagacctggcagatgctttcccgcagattatggagaagcagaacacgctcaaggccaagaccgcctctattctggatagtctcttgcaggccgatgttgcggccttaaaagacagcaacaagtaacctattggcctgcgctccggcgcgggcctttttgtttggaggtcatcatggagcagtatctcatatacctgcgcaagtctcgttccgacctcgaggccgaagcgcac

SEQ ID NO: 16221 - DNA, 260 bp, Unknown; identical to SEQ ID NO: 13018
  Description of Unknown: LeftRegion for integrase B3222 sequence

SEQ ID NO: 16222 - DNA, 260 bp, Unknown
  Description of Unknown: LeftRegion for integrase B3223 sequence
ataaagagcatcctcgcggattgcgggggagacctggcaggtgctttcccgcagattatggagaagcagaacacgctcaaggccaaaaccgcctctatccttgacagccttttgcaggctgacgttgcggccttaaaggatagcaacaagtaacctttcggcctgcgctccggcgcgggtctttttgtttggaggccatcatggagcagtatctcatatacctgcgcaagtctcgttccgacctcgaggccgaagcgcac

SEQ ID NO: 16223 - DNA, 260 bp, Unknown; identical to SEQ ID NO: 14982
  Description of Unknown: LeftRegion for integrase B3224 sequence

SEQ ID NO: 16224 - DNA, 260 bp, Unknown; identical to SEQ ID NO: 13019
  Description of Unknown: LeftRegion for integrase B3225 sequence

SEQ ID NO: 16225 - DNA, 260 bp, Unknown; identical to SEQ ID NO: 16212
  Description of Unknown: LeftRegion for integrase B3226 sequence

SEQ ID NO: 16226 - DNA, 260 bp, Unknown
  Description of Unknown: LeftRegion for integrase B3227 sequence
ataaagagcatcctcgctgattgcgggggagacctggcagatgctttcccgcagattatggagaagcagaacacgctcaaggccaagaccgcctctattctggatggcctcttgcaggccgatgttgcggccttaaaagacagcaacaagtaacctattggcctgcgctccggcgcgggcctttttgtttggaggtcatcatggagcagtatctcatatacctgcgcaagtctcgttccgacctcgaggccgaagcgcac

SEQ ID NO: 16227 - DNA, 260 bp, Unknown
  Description of Unknown: LeftRegion for integrase B3228 sequence
aacagcctcaaaaacgaggtatgcgccgtccttgataaacttatgcaagccgacattgacaccgcctttgaagtcaaaaaagaagacctcgaatactccgaacggaaggcaacataatctatgtggattggagcaactatcgtaaaaaagattaaccgctgccgcctctccggggcggcttctcttttggaggtgtaattatgccgtactgcttatatgtccgtaaatcaagagcggacgcagaggcggaggctcgcggt

SEQ ID NO: 16228 - DNA, 260 bp, Unknown
  Description of Unknown: LeftRegion for integrase B3229 sequence
ctgctgttacaggatattgatcgcaatggcaataccggattaggtaaaccggagcctttgaaaggcgatttacatggttattggagccgtcgcattgacgaaacaaaccggcttgtataccgcatagtcagcgaccgggttgagatattacaatgccgtacgcattacaaacatattcaataaaaaagccggaggcagtcatggcgcaagaaaactatatcatctatctgcgcaaatcccgggcggacgccgaggctgag

SEQ ID NO: 16229 - DNA, 260 bp, Unknown; identical to SEQ ID NO: 16222
  Description of Unknown: LeftRegion for integrase B3230 sequence

SEQ ID NO: 16230 - DNA, 260 bp, Unknown; identical to SEQ ID NO: 16217
  Description of Unknown: LeftRegion for integrase B3231 sequence

SEQ ID NO: 16231 - DNA, 260 bp, Unknown
  Description of Unknown: LeftRegion for integrase B3232 sequence
taaagagcatcctcgctgattgcgggggagacctggcagatgctttcccgcagattatggagaagcagaacacactcaaggccaaaaccgcctctatccttgacagcctcttgcaggctgacgttgcggccttaaaggatagcaacaagtaacctttcggcctgcgctccggcgcgggcctttttgttttggaggtcatcatggagcagtatctcatatacctgcgcaagtctcgttccgacctcgaggccgaagcgcac

SEQ ID NO: 16232 - DNA, 260 bp, Unknown; identical to SEQ ID NO: 16215
  Description of Unknown: LeftRegion for integrase B3233 sequence

SEQ ID NO: 16233 - DNA, 260 bp, Unknown
  Description of Unknown: LeftRegion for integrase B3234 sequence
taaagagcatcctcgctgattgcgggggagacctggcagatgctttcccgcagattatggagaagcagaacacgctcaaggccaagaccgcctctattctggatagcctcttgcaggccgatgttgcggccttaaaagacagcaacaagtaacctattggcctgcgctccggcgcgggccttttttgtttggaggtcatcatggagcagtatctcatatacctgcgcaagtctcgctctgacatcgaggcagaggcgcac

SEQ ID NO: 16234 - DNA, 260 bp, Unknown; identical to SEQ ID NO: 16212
  Description of Unknown: LeftRegion for integrase B3235 sequence

SEQ ID NO: 16235 - DNA, 260 bp, Unknown
  Description of Unknown: LeftRegion for integrase B3236 sequence
aaagagcatcctcgcggattgcgggggagacctggcagatgctttcccgcagattatggagaagcagaacacgctcaaggccaagaccgcctctattctggatagcctcttgcaggccgatgttgcggccttaaaagacagcaacaagtaacctattggcctgcgctccggcgcgggcctttttttgtttggaggtcatcatggagcagtatctcatatacctgcgcaagtctcgttccgacctcgaggccgaagcgcac

SEQ ID NO: 16236 - DNA, 260 bp, Unknown; identical to SEQ ID NO: 16207
  Description of Unknown: LeftRegion for integrase B3237 sequence

SEQ ID NO: 16237 - DNA, 260 bp, Unknown
  Description of Unknown: LeftRegion for integrase B3238 sequence
tcgatgaagagtataaaaagttcaataacggagaaattgggtctatagcggcaacagtaatattcggcattttgtttattgcggttttgggtttcctaaaatagcaatcatttttcaattctgacttggctttttaagcacaaaatcaaagccttaattgcaaatttaagcctattttcgttaaatgggggtgtggtattttgagctcagtagataaaacagccgtaatttatgcgcggtattcgtcccatggacagacc

SEQ ID NO: 16238 - DNA, 260 bp, Unknown
  Description of Unknown: LeftRegion for integrase B3239 sequence
ataaagagcatcctcgcagattgcgggggagacctggcaggtgctttcccgcagattatggagaagcagaacacgctcaaggctagaaccgcctctaccctcgacagtctcttgcaggccgacgttgcggccttaaaggatagcaacaagtaacctttcggcctgcgctccggcgcgggcctttttgtttggaggtcatcatggagcagtatctcatatacctgcgcaagtctcgttccgacctcgaggccgaagcacac

SEQ ID NO: 16239 - DNA, 260 bp, Unknown
  Description of Unknown: LeftRegion for integrase B3240 sequence
ataaagagcatcctcgctgattgcgggggagacctggcagatgctttcccgcagattatggagaagcagaacacgctcaaggccaaaaccgcctctattctggatagcctcttgcaggctgacgttgcggccttaaaagacagcaacaagtaacctattggcctgcgctccggcgcgggcctttttgtttggaggtcatcatggagcagtatctcatatacctgcgcaagtctcgttccgacctcgaggccgaagcgcac

SEQ ID NO: 16240 - DNA, 260 bp, Unknown
  Description of Unknown: LeftRegion for integrase B3241 sequence
tggagccgcagggcttgcggctctgttcggtattttccttatgatctatgtctttctggatatgcggaacccgaaccttggtctgttccagtccggccgcgctgcgccgatcgtttatgtcgcggccttttccattatcggaacatgtctgtatatcgtctgcactgtgataaagcgaaacgcaaaaaggaggaaacacgatgcaaacaataccaattgatctatcggctttgacgccggaggagagacagcagtttgcg

SEQ ID NO: 16241 - DNA, 260 bp, Unknown; identical to SEQ ID NO: 16212
  Description of Unknown: LeftRegion for integrase B3242 sequence

SEQ ID NO: 16242 - DNA, 260 bp, Unknown
  Description of Unknown: LeftRegion for integrase B3243 sequence
taaagagcatcctcgcagattgcgggggagacctggcagatgcttttcctcagattatggagaagcagaacacgctcaaggccaagaccgcctctattctggatagcctcttgcaggccgatgttgcggccttaaaagacagcaacaagtaacctattggcctgcgctccggcgcgggcctttttgttttggaggtcatcatggagcagtatctcatatacctgcgcaagtctcgttccgacctcgaggccgaagcgcac

SEQ ID NO: 16243 - DNA, 260 bp, Unknown
  Description of Unknown: LeftRegion for integrase B3244 sequence
taaagagcatcctcgcggattgcgggggagacctggcaggtgctttcccgcagattatggagaagcagaacacgctcaaggccaaaaccgcttctatcctcgacagcctcttgcaggcagacgttgcggccttaaaggatagcaacaagtagcctttcggcctgcgctccggcgcgggccttttttgtttggaggtcatcatggagcagtatctcatatacctgcgcaagtctcgttccgacctcgaggccgaagcgcac

SEQ ID NO: 16244 - DNA, 260 bp, Unknown
  Description of Unknown: LeftRegion for integrase B3245 sequence
ataaagagcatcctcgctgattgcgggggagacctggcagatgctttcccgcagattatggagaagcagaacacgctcaaggccaagaccgcctctattctggatagcctcttgcaggccgatgttgcggccttaaaagacagcaacaagtaacctattggcctgcgctctggcgcgggcctttttgtttggaggtcatcatggagcagtatctcatatacctgcgcaagtctcgttccgacctcgaggccgaagcgcac

SEQ ID NO: 16245 - DNA, 260 bp, Unknown; identical to SEQ ID NO: 16238
  Description of Unknown: LeftRegion for integrase B3246 sequence

SEQ ID NO: 16246 - DNA, 260 bp, Unknown
  Description of Unknown: LeftRegion for integrase B3247 sequence
taaagagcatcctcgctgattgcgggggagacctggcagatgctttcccgcagattatggagaagcagaacacgctcaaggccaaaaccgcctctattctggatagcctcttgcaggccgatgttgcggccttaaaagacagcaacaagtaacctattggcctgcgctccggcgcgggccttttttgtttggaggtcatcatggagcagtatctcatatacctgcgcaagtctcgttccgacctcgaggccgaagcgcac

SEQ ID NO: 16247 - DNA, 260 bp, Unknown; identical to SEQ ID NO: 15063
  Description of Unknown: LeftRegion for integrase B3248 sequence

SEQ ID NO: 16248 - DNA, 260 bp, Unknown; identical to SEQ ID NO: 16233
  Description of Unknown: LeftRegion for integrase B3249 sequence

SEQ ID NO: 16249 - DNA, 260 bp, Unknown
  Description of Unknown: LeftRegion for integrase B3250 sequence
ataaagagcatcctcgctgattgcgggggagacctagcagatgctttcccgcagattatggagaagcagaacacgctcaaggccaaaaccgcctctatccttgacagcctcttgcaggctgacgttgcggccttaaaggatagcaacaagtaacctttcggcctgcgctccggcgcgggcctttttgtttggaggtcatcatggagcagtatctcatatacctgcgcaagtctcgttccgacctcgaggccgaagcgcac

SEQ ID NO: 16250 - DNA, 260 bp, Unknown
  Description of Unknown: LeftRegion for integrase B3251 sequence
aacagcctcaaaaacgaggtatgcgccgtcctcgataaacttatgcaagccgacattgacaccgcctttgaagtcaaaaaagaagacctcgaatactccgaacggaaggcaacataatctatgtggattggagcaactatcataaaaaagattaaccgctgccgcctctccggggcggcttctcttttggaggtgtaattatgccgtattgcttatatgtccgtaaatcaagagcggacgcagaggcggaggctcgcggt

SEQ ID NO: 16251 - DNA, 260 bp, Unknown
  Description of Unknown: LeftRegion for integrase B3252 sequence
ataaagagcatcctcgcggattgcgggggagacctggcagatgctttcccgcagattatggagaaacagaacacgctcaaggccaaaaccgcctctattctggatagcctcttgcaggccgatgttgcggccttaaaagacagcaacaagtaacctattggcctgcgctccggcgcgggccttttcgtttggaggttatcatggagcagtatctcatatacctgcgcaagtctcgttccgacctcgaggccgaagcgcac

SEQ ID NO: 16252 - DNA, 260 bp, Unknown
  Description of Unknown: LeftRegion for integrase B3253 sequence
taaagagcatcctcgctgattgtgggggagacctggcagatgctttcccgcagattatggagaagcagaacacgctcaaggccaagaccgcctctattctggatagcctcttgcaggccgatgttgcggccttaaaagacagcaacaagtaacctattggcctgcgctccggcgcgggccttttttgtttggaggtcatcatggagcagtatctcatatacctgcgcaagtctcgttccgacctcgaggccgaagcgcac

SEQ ID NO: 16253 - DNA, 260 bp, Unknown; identical to SEQ ID NO: 14352
  Description of Unknown: LeftRegion for integrase B3254 sequence

SEQ ID NO: 16254 - DNA, 260 bp, Unknown
  Description of Unknown: LeftRegion for integrase B3255 sequence
ataaagagcatcctcgctgattgcgggggagacctggcagatgctttcccgcagattatggagaagcagaacacgctcaaggccaagaccgcctctattctggatagcctcttgcaggccgatgttgcggccttaaaagacagcaacaagtaacctattggcctgcgctccggcgcgggcctttttgtttggaggtcatcatggagcagtatctcatatacctgcgcaagtctcgttccgacctcgaggctgaagcgcac

SEQ ID NO: 16255 - DNA, 260 bp, Unknown
  Description of Unknown: LeftRegion for integrase B3256 sequence
ataaagagcatcctcgctgattgcgggggagacctggcagatgctttcccgcagattatggagaagcagaacacgctcaaggccaaaaccgcctctattctggatagcctcttgcaggccgatgttgcggccttaaaaggcagcaacaagtaacctattggcctgcgctccggcgcgggccttttcgtttggaggtcatcatggagcagtatctcatatacctgcgcaagtctcgttccgacctcgaggccgaagcgcac

SEQ ID NO: 16256 - DNA, 260 bp, Unknown
  Description of Unknown: LeftRegion for integrase B3257 sequence
atcgtaacgagttagagggggataaagataaaactgcggcagtctaaggtcattccgatagaattgctcagacgtaagaagctattggaggtgagattacgaaagcagtaatttatgctcgatattcgagccacagtcaaagagaggagtccatcgaaggtcagcttcgtgagtgccatgagttcgctcttaaaaacggaatgacggtcataaacgaatactgtgaccgagcaatctccggcaaaacagataatcgtccg

SEQ ID NO: 16257 - DNA, 260 bp, Unknown
  Description of Unknown: LeftRegion for integrase B3258 sequence
gggcgctacatatgacttaaaagttggctaccacttgcaggatgattctccggttgatattgaaatcaccgatctgttcggcaaggaaacatttttaaagcagactgtacagccgtaacgaaagccaaaacaaaagatataaaaatacgccccactaaaaataaagtggggcgtattccataaggaaaggagtgcatcgcatggagcaatattgcatttatctccgaaagtcacgtgccgatgcggaagcagaagcaaga

SEQ ID NO: 16258 - DNA, 260 bp, Unknown; identical to SEQ ID NO: 16212
  Description of Unknown: LeftRegion for integrase B3259 sequence

SEQ ID NO: 16259 - DNA, 260 bp, Unknown; identical to SEQ ID NO: 16212
  Description of Unknown: LeftRegion for integrase B3260 sequence

SEQ ID NO: 16260 - DNA, 260 bp, Unknown
  Description of Unknown: LeftRegion for integrase B3261 sequence
taaagagcatcctcgctgattgcgggggagacctggcagatgctttcccgcagattatggagaagcagaacacgctcaaggccaagaccgcctctattctggatagtctcttgcaggccgatgttgcggccttaaaagacagcaacaagtaacctattggcctgcgctccggcgcgggccttttttgtttggaggtcatcatggagcagtatctcatatacctgcgcaagtctcgttccgacctcgaggccgaagcgcac

SEQ ID NO: 16261 - DNA, 260 bp, Unknown; identical to SEQ ID NO: 16215
  Description of Unknown: LeftRegion for integrase B3262 sequence

SEQ ID NO: 16262 - DNA, 260 bp, Unknown
  Description of Unknown: LeftRegion for integrase B3263 sequence
ataaagagcatcctcgctgattgcggaggagacctggcagatgctttcccgcagattatggagaagcagaacacgctcaaggccaaaaccgcctctatccttgacagcctcttgcaggctgacgttgcggccttaaaggatagcaacaagtaacctttcggcctgcgctccggcgcgggtctttttgtttggaggtcatcatggagcagtatctcatatacctgcgcaagtctcgttccgacctcgaggccgaagcgcac

SEQ ID NO: 16263 - DNA, 260 bp, Unknown
  Description of Unknown: LeftRegion for integrase B3264 sequence
ataaagagcatcctcgctgattgcgggggagacctggcagatgctttcccgcagattatggagaagcagaacacgctcaaggccaaaaccgcctctatccttgacagcctcttgcaggctgacgttgcggccttaaaggatagcaacaagtaacctttcggcctgcgctccggcgcgggtctttttgtttggaggtcatcatggagcagtatctcatatacctgcgcaagtctcgttccgacctcgaggccgaagcgcac

SEQ ID NO: 16264 - DNA, 260 bp, Unknown
  Description of Unknown: LeftRegion for integrase B3265 sequence
ataaagagcatcctcgcggattgtgggggagacctagcagatgctttcccgcagattatggagaagcagaacacgctcaaggccaagaccgcctctattctggatagcctcttgcaggccgatgttgcggccttaaaagacagcaacaagtaacctattggcctgcgctccggcgcgggcctttttgtttggaggtcatcatggagcagtatctcatatacctgcgcaagtctcgttccgacctcgaggccgaagcgcac

SEQ ID NO: 16265 - DNA, 260 bp, Unknown
  Description of Unknown: LeftRegion for integrase B3266 sequence
gcctttctgatgtaaaagaaattcaaaaattagagcaatccctaacagaggaagaagtactgctccttaaagcgttccatgcagcaagcgcaagtggccgtttccgtatcatccaggtctgcatgaatgaattggataatactgaaaaaggggtaaccgtaagtgccggataattgacttcacagaatggaggaagaaccatgtatgaggaaataaaacaggtagttttgtatgtgcgctattccagtgcaaaccagaca

SEQ ID NO: 16266 - DNA, 260 bp, Unknown
  Description of Unknown: LeftRegion for integrase B3267 sequence
taaagagcatcctcgctgattgcgggggagacctggcaggtgctttcccgcagattatggagaagcagaacacgctcaaggccaaaaccgcctctatccttgacagcctcttgcaggctgacgttgcagccttaaaggatagcaacaagtaacctttcggcctgcgctccggcgcgggccttttttgtttggaggtcatcatggagcagtatctcatatacctgcgcaagtctcgttccgacctcgaggccgaagcgcac

SEQ ID NO: 16267 - DNA, 260 bp, Unknown
  Description of Unknown: LeftRegion for integrase B3268 sequence
gaaaatgaaggtatgccccactacttgatgattcaaataaataaaaaccgccccggagccaaccgggacggaaacttaatactgtacagaccgaagtcggtaagtatttcctgaacaaaaatattttaccatgaaacttcaacatctgtataggtgttatttttatactcttttttcataaactgtacaggaggattgctatgaagaaacaactaaacctttatggtcattattgtgcctatctccgtaaatcacgagca

SEQ ID NO: 16268 - DNA, 260 bp, Unknown
  Description of Unknown: LeftRegion for integrase B3269 sequence
ataaagagcatccttgctgattgcgggggagacctggcagatgctttcccgcagattatggagaagcagaacacgctcaaggccaagaccgcctctattctggatagcctcttgcaggccgatgttgcggccttaaaagacagcaacaagtaacctattggcctgcgctccggcgcgggcctttttgtttggaggtcatcatggagcagtatctcatatacctgcgcaagtctcgttccgacctcgaggccgaagcgcac

SEQ ID NO: 16269 - DNA, 260 bp, Unknown; identical to SEQ ID NO: 16212
  Description of Unknown: LeftRegion for integrase B3270 sequence

SEQ ID NO: 16270 - DNA, 260 bp, Unknown
  Description of Unknown: LeftRegion for integrase B3271 sequence
atccgacagttttttgattttggcaaagatatccgaccattcgctcgtagtcatacggcatggctcctttctcaaatttactgtcggcagcaactgaattatatcaaatacgcacccgctttttagggattcgtagaattataccgaaaatcggaaaaatattgcgaattttgaagaagataatcgtgaggtgatggttgatggcccgaaaaaagaatatcgctgcgggtcaagatgccgtcatttacgcccgctactct

SEQ ID NO: 16271 - DNA, 260 bp, Unknown
  Description of Unknown: LeftRegion for integrase B3272 sequence
taaagagcatcctcgctgattgcgggggagacctggcagatgctttcccgcagattatggagaagcagaacacgctcaaggccaagaccgcctctattctggatagcctcttgcaggccgatgttgcggccttaaaagtcagcaacaagtaacctattggcctgcgctccggcgcgggccttttttgtttggaggtcatcatggagcagtatctcatatacctgcgcaagtctcgttccgacctcgaggccgaagcgcac

SEQ ID NO: 16272 - DNA, 260 bp, Unknown; identical to SEQ ID NO: 16222
  Description of Unknown: LeftRegion for integrase B3273 sequence

SEQ ID NO: 16273 - DNA, 260 bp, Unknown
  Description of Unknown: LeftRegion for integrase B3274 sequence
aaaggaaaaaacagatgcccaacaagaggactggtttattagtcaccatcttctgatggccgcacttgctgtcgatatggacagctataagggcaacgcagatacatatgacgatattatcaaacaacgaaatgagcttgctgcccttgtcggaataaagaaaagataaccacgcttatcaacaagaaggtggtgctaaaatgaacgatcaatctacaaaaggcgtcctctactgccggtacagctcccacgcccaacgc

SEQ ID NO: 16274 - DNA, 260 bp, Unknown
  Description of Unknown: LeftRegion for integrase B3275 sequence
ataaagagcatcctcgctgattgcgggggagacctggcagatgctttcccgcagattatggagaagcagaacacgctcaaggccaaaaccgcctctattctggatagcctcttgcaggccgatgttgcggccttaaaagacagcaacaagtaacctttcggcctgcgctccggcgcgggcctttttgtttggaggtcatcatggagcagtatctcatatacctgcgcaagtctcgttccgacctcgaggcagaggcacac

SEQ ID NO: 16275 - DNA, 260 bp, Unknown
  Description of Unknown: LeftRegion for integrase B3276 sequence
acactacaatagaatattttctaacaggaaaacgccctatatctaatctgactgatatggaaaatcttctattagaagcatacagatcggcagacgtaaaaggacaagctgcaatcatccaagtctgtatgaatgaaaaagatgcaaaaggggaaactatcattgcaggataataagcattgaagaatggaggaagaaccatgtacgaagagattaagactgcttgtctatatctacgatattcaagcagcagccaaact

SEQ ID NO: 16276 - DNA, 260 bp, Unknown
  Description of Unknown: LeftRegion for integrase B3277 sequence
ataaagagcatcctcgctgattgcgggggagacctggcagatgctttcccgcagattatggagaagcagaacacgctcaaggccaaaaccgcctctattctggatagcctcttgcaggccgatgttgcggccttaaaagacagcaacaagtaacctattggcctgcgctccggcgcgggccttttcgtttggaggttatcatggagcagtatctcatatacctgcgcaagtctcgttctgacctcgaggccgaagcgcac

SEQ ID NO: 16277 - DNA, 260 bp, Unknown; identical to SEQ ID NO: 16212
  Description of Unknown: LeftRegion for integrase B3278 sequence

SEQ ID NO: 16278 - DNA, 260 bp, Unknown; identical to SEQ ID NO: 15411
  Description of Unknown: LeftRegion for integrase B3279 sequence

SEQ ID NO: 16279 - DNA, 260 bp, Unknown
  Description of Unknown: LeftRegion for integrase B3280 sequence
ataaagagcatcctcgctgattgcgggggagacctggcagatgctttcccgcagattatggagaagcagaacacgctcaaggccaaaaccacctctattctggatagcctcttgcaggccgatgttgcggccttaaaagacagcaacaagtaacctattggcctgcgctccggcgcgggccttttcgtttggaggtcatcatggagcagtatctcatatacctgcgcaagtctcgttccgacctcgaggccgaagcgcac

SEQ ID NO: 16280 - DNA, 260 bp, Unknown; identical to SEQ ID NO: 16217
  Description of Unknown: LeftRegion for integrase B3281 sequence

SEQ ID NO: 16281 - DNA, 260 bp, Unknown; identical to SEQ ID NO: 16238
  Description of Unknown: LeftRegion for integrase B3282 sequence

SEQ ID NO: 16282 - DNA, 260 bp, Unknown
  Description of Unknown: LeftRegion for integrase B3283 sequence
ataaagagcatcctcgcagattgcggcggagaccttgcagatgcttttcctcagattatggagaagcagaacacgctcaaggccaagaccgcctctattctggatagcctcttgcaggccgatgttgcggccttaaaagacagcaacaagtaacctattggcctgcgctccggcgcgggcctttttgtttggaggtcatcatggagcagtatctcatatacctgcgcaagtctcgttccgacctcgaggccgaagcgcac

SEQ ID NO: 16283 - DNA, 260 bp, Unknown
  Description of Unknown: LeftRegion for integrase B3284 sequence
aaaaatacgtaattttcgtaacattatatatttttataataaataatacttaattattctatatattattcaattccttgtgccccaaaagtgttacgatttttgcgtaacatgcccctccaaaatcgtaacattcgtaacaaccaaacgttatccacaggaaaaccgaatgcgaattcggttttgaggaggtgcttattttgaaaaccgccgtcacctatgcccgcttttcctctgcgcgccagcatgagacgtctatc

SEQ ID NO: 16284 - DNA, 260 bp, Unknown; identical to SEQ ID NO: 16217
  Description of Unknown: LeftRegion for integrase B3285 sequence

SEQ ID NO: 16285 - DNA, 260 bp, Unknown; identical to SEQ ID NO: 16217
  Description of Unknown: LeftRegion for integrase B3286 sequence

SEQ ID NO: 16286 - DNA, 260 bp, Unknown
  Description of Unknown: LeftRegion for integrase B3287 sequence
ataaagagcatcctcgctgattgcgggggagacctggcagatgctttcccgcagattatggagaagcagaacacgctcaaggccaagaccgcctctattctggatagcctcttgcaggccgatgttgcggccttaaaggatagcaacaagtaacctttcggcctgcgctccggcgcgggtctttttgtttggaggtcatcatggagcagtatctcatatacctgcgcaagtctcgctctgacatcgaggcagaggcacac

SEQ ID NO: 16287 - DNA, 260 bp, Unknown
  Description of Unknown: LeftRegion for integrase B3288 sequence
cacgaaggcttaacgtattgggaaaataataaagatttaattggcagaacttcaagagttattattgctgcctttgatgatactaaaaataataatgatgaacttttatatgctagaaatgtattagcacatcaacttaagagaaaagagataagtgaatactctttaccataataatatcttaagggaagggataaccaatgaacgctgtaatatatgctaggttctctagccataaccaacaggaacaaagcattgaa

SEQ ID NO: 16288 - DNA, 260 bp, Unknown; identical to SEQ ID NO: 16217
  Description of Unknown: LeftRegion for integrase B3289 sequence

SEQ ID NO: 16289 - DNA, 260 bp, Unknown
  Description of Unknown: LeftRegion for integrase B3290 sequence
ggtaaaaaatttaataagacttttagtaatataacttctctatctgatatagaatcagcattgttagacttatctgcatatgcttgtgtatttttttctgaaaatgatattaacctaagcacttatattattcaagaatatacaatagaatttatatcaaaattagagcatttattggattaaaatagaaaggtaattctatgaacgctgtaatatatgctaggttctctagccataaccaacaggaacagagcattgaa

SEQ ID NO: 16290 - DNA, 260 bp, Unknown
  Description of Unknown: LeftRegion for integrase B3291 sequence
ataaagagcatcctcgctgattgcgggggagacctggcagatgctttcccgcagattatggagaagcagaacacgctcaaggccaaaaccgcctctattctggatagcctcttgcaggccgatgttgcggccttaaaagacagcaacaagtaacctattggcctgcgctccggcgcgggccttttcgtttggaggtcatcatggagcagtatctcatatacctgcgcaagtctcgttccgacctcgaggccgaagcgcac

SEQ ID NO: 16291 - DNA, 260 bp, Unknown
  Description of Unknown: LeftRegion for integrase B3292 sequence
taaagagcatcctcgctgattgcgggggagacctggcagatgctttcccgcagattatggagaagcagaacacgctcaaggccaagaccgccactatccttgacagcctcttgcaggctgacgttgcggccttaaaggatagcaacaagtaacctttcggcctgcgctccggcgcgggcctttttgttttggaggtcatcatggagcagtatctcatatacctgcgcaagtctcgttccgacctcgaggccgaagcgcac

SEQ ID NO: 16292 - DNA, 260 bp, Unknown; identical to SEQ ID NO: 16266
  Description of Unknown: LeftRegion for integrase B3293 sequence

SEQ ID NO: 16293 - DNA, 260 bp, Unknown
  Description of Unknown: LeftRegion for integrase B3294 sequence
ataaagagcatcctcgctgattgcgggggagacctggcagatgctttcccgcagattatggagaagcagaacacgctcaaggccaaaaccgcctctatccttgacagcctcttgcaggctgacgttgcggccttaaaggatagcaacaagtaacctttcggcctgcgctccggcgcgggtctttttgttcggaggtcatcatggagcagtatctcatatatctgcgcaagtctcgttccgacctcgaggccgaagcgcac

SEQ ID NO: 16294 - DNA, 260 bp, Unknown
  Description of Unknown: LeftRegion for integrase B3295 sequence
ctggatcattgacatggttatgatctgctgcaacaaattcaccgacagcaccggtgcggtggtcggtctgaaggttgccgagtataccagacagccggatcccaatcttgcagaggcttctctggaggagcagcgggaggcagcggccgagactgccagagcttacggctataccgtaatagagtcaggcgctcaggataatgccgacaaataaaaacatggctcgaaaatatgccgcaggaggtggctcggataattcc

SEQ ID NO: 16295 - DNA, 260 bp, Unknown; identical to SEQ ID NO: 16266
  Description of Unknown: LeftRegion for integrase B3296 sequence

SEQ ID NO: 16296 - DNA, 260 bp, Unknown
  Description of Unknown: LeftRegion for integrase B3297 sequence
cggcgtgaccggcatcgcgcggagctgtacgggcgtatcattgccgggcttgttacctttgttttctttgtgctcatcttttttattattgacctgctgaaccccaatgtgggatggatccgccgctccatcattgagcagacgcactacggcgtgagcactcgcgccgccatcatgtgcgcgctcccgtggtggctgggatgaccacgcttcatcatggcgcgtacatactcgcgcgttatagtaccgaccggcaggat

SEQ ID NO: 16297 - DNA, 260 bp, Unknown; identical to SEQ ID NO: 16212
  Description of Unknown: LeftRegion for integrase B3298 sequence

SEQ ID NO: 16298 - DNA, 260 bp, Unknown
  Description of Unknown: LeftRegion for integrase B3299 sequence
ataaagagcatcctcgctgattgcgggggagacctggcagatgctttcccgcagattatggagaagcagaacacgctcaaggccaagaccgcctctattctggatagcctcttgcaggccgatgttgcggccttaaaagacagcaacaagtaacctattggcctgcgctccggcgcgggcctttttgtttggaggtcatcatggagcagtatctcatatacctgcgcaagtctcgctctgacatcgaggcagaggcgcac

SEQ ID NO: 16299 - DNA, 260 bp, Unknown; identical to SEQ ID NO: 16242
  Description of Unknown: LeftRegion for integrase B3300 sequence

SEQ ID NO: 16300 - DNA, 260 bp, Unknown
  Description of Unknown: LeftRegion for integrase B3301 sequence
aacagcctcaaaaacgaggtatgcgccgtcctcgataaacttatgcaagccgacattgacaccgcctttgaagtcaaaaaagaagacctcgaatactccgaacggaaggcaacataatctatgtggattggagcaactatcgtaaaaaagattaaccgctgccgcctctccggggcggcttctcttttggaggtgtaattatgccgtattgcttatatgtccgtaaatcaagagcggacgcagaggcggaggctcgcggt

SEQ ID NO: 16301 - DNA, 260 bp, Unknown
  Description of Unknown: LeftRegion for integrase B3302 sequence
taaagagcatcctcgcggattgcggaggagacctggcaggtgctttcccgcagattatggagaagcagaacacgctcaaggccagaaccgcctctatcctcgacagcctcttgcaggccgacgttgcggccttaaaggatagtaacaagtaacctttcggcctgcgctccggcgcgggccttttttgtttggaggccatcatggagcagtatctcatatacctgcgcaagtctcgttccgacctcgaggccgaagcacac

SEQ ID NO: 16302 - DNA, 260 bp, Unknown; identical to SEQ ID NO: 16227
  Description of Unknown: LeftRegion for integrase B3303 sequence

SEQ ID NO: 16303 - DNA, 260 bp, Unknown; identical to SEQ ID NO: 13821
  Description of Unknown: LeftRegion for integrase B3304 sequence

SEQ ID NO: 16304 - DNA, 260 bp, Unknown
  Description of Unknown: LeftRegion for integrase B3305 sequence
cgcgctctcaacaccaaaaagatgaaattggtttcttgtgacttgcagaaaaaggaatatgaggtgctgggtgaacacgatgaagtctacaccatccggcacggagaatgttcttgcatggacttccagatgcgcggtcttccgtgtaagcacatgtacttcgttagtatgcacctcgattaaaaggacggtgatggataatggcaaaaaagaagaagcctgccggaggcgttgccatcatctatgcccgttactcgtcc

SEQ ID NO: 16305 - DNA, 260 bp, Unknown; identical to SEQ ID NO: 16212
  Description of Unknown: LeftRegion for integrase B3306 sequence

SEQ ID NO: 16306 - DNA, 260 bp, Unknown
  Description of Unknown: LeftRegion for integrase B3307 sequence
cggtttgtgcattctgctggcggcagccctggcggcttacgtgatcctggatgcgctcaaccccgccatgggcctgatccggcagaccgggaccaatattggcgtgtatctcatggctatggccatcatcggagtctgcctgtacattggtcacagcatggtcaagcgccgaaataaaagattgagagaggagcaaaaccatgagcaaagctgacatcctcgcccgatactccacggataatcaaaatgcagacagcatc

SEQ ID NO: 16307 - DNA, 260 bp, Unknown
  Description of Unknown: LeftRegion for integrase B3308 sequence
ataaagagcatcctcgctgattgcgggggagacctggcagatgctttcccgcagattatggagaagcagaacacgctcaaggccaaaaccgcctctatccttgacagcctcttgcaggctgacgttgcggccttaaaggatagcaacaagtaacctttcggcctgcgctccggcgcgggtctttttgtttggaggtcatcatggagcagtatctcatatacctgcgcaagtctcgctctgacatcgaggcagaggcacac

SEQ ID NO: 16308 - DNA, 260 bp, Unknown; identical to SEQ ID NO: 16242
  Description of Unknown: LeftRegion for integrase B3309 sequence

SEQ ID NO: 16309 - DNA, 260 bp, Unknown
  Description of Unknown: LeftRegion for integrase B3310 sequence
ataaagagcatcctcgcggattgcgggggagacctggcagatgctttcccgcagattatggagaagcagaacacgctcaaggccaaaaccgcctctatccttgacagcctcttgcaggctgacgttgcggccttaaaggatagcaacaagtaacctttcggcctgcgctccggcgcgggtctttttgtttggaggtcatcatggagcagtatctcatatacctgcgcaagtctcgttccgacctcgaggccgaagcgcac

SEQ ID NO: 16310 - DNA, 260 bp, Unknown
  Description of Unknown: LeftRegion for integrase B3311 sequence
ataaagagcatcctcgctgattgcgggggagacctggcagatgctttcccgcagattatggagaagcagaacacgctcaaggccaagaccgcctctattctggatagcctcttgcaggccgatgttgcggccttaaaagacagcaacaagtaacctattggcctgcgctccggcgcgggcctttttgtttggaggtcatcatggagcagtatctcatatacctgcgcaagtctcgttccgacctcgaggccgaagcgcac

SEQ ID NO: 16311 - DNA, 260 bp, Unknown
  Description of Unknown: LeftRegion for integrase B3312 sequence
tacagcggagttattgatagatgataatatgcttatcgatattatggaggtaaataatctaattacaattgatgaattaagtaaatacttcggtgttcctaacgagtttatttcttataagtttacccacttaaattttaattaataacctaccatatgtttactatattgttgtactatatataagaagggggaatcttatgattgcagcaatttattcaagaaagtcaaaatttactggaaaaggtgaatctatagaa

SEQ ID NO: 16312 - DNA, 260 bp, Unknown; identical to SEQ ID NO: 16293
  Description of Unknown: LeftRegion for integrase B3313 sequence

SEQ ID NO: 16313 - DNA, 260 bp, Unknown
  Description of Unknown: LeftRegion for integrase B3314 sequence
taaagagcatcctcgctgattgcgggggagacctggcagatgctttcccgcagattatggagaagcagaacacgctcaaggccaaaaccgcctctatccttgacagcctcttgcaggctgacgttgcggccttaaaggatagcaacaagtaacctttcggcctgtgctccggcgcgggcctttttgttttggaggtcatcatggagcagtatctcatatacctgcgcaagtctcgttccgacctcgaggccgaagcgcac

SEQ ID NO: 16314 - DNA, 260 bp, Unknown; identical to SEQ ID NO: 16213
  Description of Unknown: LeftRegion for integrase B3315 sequence

SEQ ID NO: 16315 - DNA, 260 bp, Unknown
  Description of Unknown: LeftRegion for integrase B3316 sequence
aacggctccctgctgcaacagagaaccgtctcacatagatcacactcccgaaggatgatgcaatctgtaggccaaaaacattgtatcatcttccggacagccacgcaagcggaactcctgttccccgctggctgttatttttataccctttttgcgatttgcgacgtcgcaaatcatacactgtactggaggatgatattatgtacgaagatctatcttatacttacggatccggcgcttatgccatctacttgcggaag

SEQ ID NO: 16316 - DNA, 260 bp, Unknown; identical to SEQ ID NO: 16222
  Description of Unknown: LeftRegion for integrase B3317 sequence

SEQ ID NO: 16317 - DNA, 260 bp, Unknown
  Description of Unknown: LeftRegion for integrase B3318 sequence
taaagagcatcctcgctgattgcgggggagacctggcaggtgctttcccgcagattatggataagcagaacacgctcaaggccaaaaccgcctctatccttgacagcctcttgcaggctgacgttgcagccttaaaggatagcaacaagtaacctttcggcctgcgctccggcgcgggccttttttgtttggaggtcatcatggagcagtatctcatatacctgcgcaagtctcgttccgacctcgaggccgaagcgcac

SEQ ID NO: 16318 - DNA, 260 bp, Unknown; identical to SEQ ID NO: 16207
  Description of Unknown: LeftRegion for integrase B3319 sequence

SEQ ID NO: 16319 - DNA, 260 bp, Unknown; identical to SEQ ID NO: 16217
  Description of Unknown: LeftRegion for integrase B3320 sequence

SEQ ID NO: 16320 - DNA, 260 bp, Unknown
  Description of Unknown: LeftRegion for integrase B3321 sequence
ataaagagcatcctcgctgattgcggaggagacctagcagatgctttcccgcagattatggagaagcagaacacgctcaaggccaaaaccgcctctattctggatagcctcttgcaggccgatgttgcggccttaaaagacagcaacaagtaacctattggcctgcgctccggcgcgggccttttcgtttggaggtcattatggagcagtatctcatatacctgcgcaagtctcgttccgacctcgaggccgaagcgcac

SEQ ID NO: 16321 - DNA, 260 bp, Unknown; identical to SEQ ID NO: 16266
  Description of Unknown: LeftRegion for integrase B3322 sequence

SEQ ID NO: 16322 - DNA, 260 bp, Unknown; identical to SEQ ID NO: 16220
  Description of Unknown: LeftRegion for integrase B3323 sequence

SEQ ID NO: 16323 - DNA, 260 bp, Unknown
  Description of Unknown: LeftRegion for integrase B3324 sequence
attggttggcaagcgtttaaaacgataaagtatgtatatcgtggtgtagaccaaattttggatgaggttacacaaaataatttaaaagaattgcaggatatggcgcaaagtttgtcagatatcccacaataaaatcgacaaaaatacgccccaccttattttttagtggggcgtatttcataaggaaaggagtgtatcacatggagcaatattgcatttatctccgaaaatcacgtgccgatgcagaagcagaagcaaga

SEQ ID NO: 16324 - DNA, 260 bp, Unknown
  Description of Unknown: LeftRegion for integrase B3325 sequence
ataaagagcatcctcgctgattgcgggggagacctggcagatgctttcccgcagattatggagaagcagaacacgctcaaggccaagaccgcctctattctggatagcctcttgcaggctgacgttgcggccttaaaggacagcagcaaataacctttcagcctgcgctcctgcgcgggcctttttgtttggaggtcatcatggagcagtatctcatatacctgcgcaagtcccgttccgacatcgaggcagaggcgcac

SEQ ID NO: 16325 - DNA, 260 bp, Unknown; identical to SEQ ID NO: 16212
  Description of Unknown: LeftRegion for integrase B3326 sequence

SEQ ID NO: 16326 - DNA, 260 bp, Unknown; identical to SEQ ID NO: 16263
  Description of Unknown: LeftRegion for integrase B3327 sequence

SEQ ID NO: 16327 - DNA, 260 bp, Unknown; identical to SEQ ID NO: 16233
  Description of Unknown: LeftRegion for integrase B3328 sequence

SEQ ID NO: 16328 - DNA, 260 bp, Unknown; identical to SEQ ID NO: 13289
  Description of Unknown: LeftRegion for integrase B3329 sequence

SEQ ID NO: 16329 - DNA, 260 bp, Unknown
  Description of Unknown: LeftRegion for integrase B3330 sequence
taaagagcatcctcgctgattgcgggggagacctggcagatgctttcccgcagattatggagaaacagaacacgctcaaggccaagaccgcctctattctggatagcctcttgcaggccgatgttgcggccttaaaagacagcaacaagtaacctattggcctgcgctccggcgcgggccttttttgtttggaggtcatcatggagcagtatctcatatacctgcgcaagtctcgttccgacctcgaggccgaagcgcac

SEQ ID NO: 16330 - DNA, 260 bp, Unknown
  Description of Unknown: LeftRegion for integrase B3331 sequence
gtttgtccgataataggtcttgtgcgccaatagatacttctctaacagaggaagaagcactactccttaaagcgttccatgcagcaagcgcaagtggccgtttccgtatcatccagatctgcatgaatgaattggataatactgaaaaaggggtaaccgtcagtgccggataattgacttcacagaatggaggaagaaccatgtatgaggaaataaaacaggtagttttgtatgtgcgctattccagtgcaaaccagaca

SEQ ID NO: 16331 - DNA, 260 bp, Unknown
  Description of Unknown: LeftRegion for integrase B3332 sequence
atagtgtatcctaatatggtaaaaaattcttgtattacgtaaaatttttaaaataaaagtccactacccacaatagtgaacttttgaggtaccactaatacctcgtttcaaataaatgaactaagtacaagtccttttacgtgcctaattataacaaattagcacgtctaaggcaaattaaagaaaggacgtgttttaatatgcaaataagaaatgcagttgcatactgtagattcagtagtgataatcaaagaagtgaa

SEQ ID NO: 16332 - DNA, 260 bp, Unknown
  Description of Unknown: LeftRegion for integrase B3333 sequence
ataaagagcatcctcgcggattgcgggggagacctggcagatgctttcccgcagattatggagaagcagaacacgctcaaggccaagaccgcctctatccttgacagccttttgcaggctgacgttgcggccttaaaggatggcagcaagtaacctttcggcctgcgctccggcgcgggcctttttgtttggaggtcatcatggagcagtatctcatatacctgcgcaagtctcgttccgacctcgaggccgaagcgcac

SEQ ID NO: 16333 - DNA, 260 bp, Unknown; identical to SEQ ID NO: 13821
  Description of Unknown: LeftRegion for integrase B3334 sequence

SEQ ID NO: 16334 - DNA, 260 bp, Unknown; identical to SEQ ID NO: 16293
  Description of Unknown: LeftRegion for integrase B3335 sequence

SEQ ID NO: 16335 - DNA, 260 bp, Unknown; identical to SEQ ID NO: 13344
  Description of Unknown: LeftRegion for integrase B3336 sequence

SEQ ID NO: 16336 - DNA, 260 bp, Unknown; identical to SEQ ID NO: 13289
  Description of Unknown: LeftRegion for integrase B3337 sequence

SEQ ID NO: 16337 - DNA, 260 bp, Unknown
  Description of Unknown: LeftRegion for integrase B3338 sequence
taaagagcatcctcgctgattgcgggggagacctggcagatgctttcccgcagattatggagaagcagaacacgctcaaggccaagaccgcctctattctggatagtctcttgcaggccgatgttgcggccttaaaagacagcaacaagtaacctattggcctgcgctccggcgcgggccttttttgtttggaggccatcatggagcagtatctcatatacctgcgcaagtctcgttccgacctcgaggccgaagcgcac

SEQ ID NO: 16338 - DNA, 260 bp, Unknown
  Description of Unknown: LeftRegion for integrase B3339 sequence
ataaagagcatcctcgctgattgcgggggagacctggcagatgctttcccgcagattatggagaagcagaacacgctcaaggccaaaaccgcctctatccttgacagcctcttgcaggctgacgttgcggccttaaaggatagcaacaagtaacctttcggcctgcgctccggcgcgggcctttttgtttggaggtcatcatggagcagtatctcatatacctgcgcaagtctcgttccgacctcgaggccgaagcgcac

SEQ ID NO: 16339 - DNA, 260 bp, Unknown
  Description of Unknown: LeftRegion for integrase B3340 sequence
atctcggcatcgtcaccatgcttcgcagcctgcgggagcagggtctcgtcagcggcagcgaagccaaaaaaatcgccgcgcggctgagggtacagcttggcgcagacatcattatttctctttgatttcttcgcttttaggatagctattgcggatgttatatggtattgtgtgttactgacgaaggaggtggcagaggaatgagtgataaggagaaaaccaacggttctctggcgatggctccgcgggtcattacgatc

SEQ ID NO: 16340 - DNA, 260 bp, Unknown; identical to SEQ ID NO: 13821
  Description of Unknown: LeftRegion for integrase B3341 sequence

SEQ ID NO: 16341 - DNA, 260 bp, Unknown
  Description of Unknown: LeftRegion for integrase B3342 sequence
ataaagagcatcctcgcagattgcgggggagacctggcaggtgctttcccgcagattatggagaagcagaacacgctcaaggccaaaaccgcctctgttttggacagcctcttacaggccgatgttgcggccttaaaagacagcaacaagtaacctttcggcctgcgctccggcgcgggcctttttgtttggaggtcatcatggagcagtatctcatatacctgcgcaagtctcgttccgacctcgaggccgaagcacac

SEQ ID NO: 16342 - DNA, 260 bp, Unknown; identical to SEQ ID NO: 16266
  Description of Unknown: LeftRegion for integrase B3343 sequence

SEQ ID NO: 16343 - DNA, 260 bp, Unknown; identical to SEQ ID NO: 16313
  Description of Unknown: LeftRegion for integrase B3344 sequence

SEQ ID NO: 16344 - DNA, 260 bp, Unknown
  Description of Unknown: LeftRegion for integrase B3345 sequence
cacagcggagttattgatagatgataatatgcttatcgatattatggaggtaaataatctaattacaattgatgaattaagtaaatactttggtgttcctagcgagtttatttcttataagtttacccacttaaattttaattaataacctaccatatgtttactatattgttgtactatatataagaagggggaatcttatgattgcagcaatttattcaagaaaatcaaaatttactggaaaaggtgaatctatagaa

SEQ ID NO: 16345 - DNA, 260 bp, Unknown
  Description of Unknown: LeftRegion for integrase B3346 sequence
taaagagcatcctcgcagattgcgggggaggcctggcagatgcttttcctcagattatggagaagcagaacacgctcaaggccaagaccgcctctattctggatagcctcttgcaggccgatgttgcggccttaaaagacagcaacaagtaacctattggcctgcgctccggcgcgggcctttttgttttggaggtcatcatggagcagtatctcatatacctgcgcaagtctcgttccgacctcgaggccgaagcgcac

SEQ ID NO: 16346 - DNA, 260 bp, Unknown
  Description of Unknown: LeftRegion for integrase B3347 sequence
taaagagcatcctcgcagattgcgggggagacctggcagatgcttttcctcagattatggagaaacagaacacgctcaaggccaagactgcctctattctggatagtctcttgcaggccgatgttgcggccttaaaagacagcaacaagtaacctattggcctgcgctccggcgcgggcctttttgttttggaggtcatcatggagcagtatctcatatacctgcgcaagtctcgttccgacctcgaggccgaagcgcac

SEQ ID NO: 16347 - DNA, 260 bp, Unknown
  Description of Unknown: LeftRegion for integrase B3348 sequence
aacagcctcaaaaacgaggtttgtgccgtcctcgataaacttatgcaagccgacattgacaccgcctttgaagtcaaaaaagaagacctcgaatactccgaacggaaggcaacataatctatgtggattggagcaactatcataaaaaagattaaccgctgccgcctctccggggcggcttctcttttggaggtgtaattatgccgtattgcttatatgtccgtaaatcaagagcggacgcagaggcggaggctcgcggc

SEQ ID NO: 16348 - DNA, 260 bp, Unknown
  Description of Unknown: LeftRegion for integrase B3349 sequence
ataaagagcatcctcgctgattgcgggggagacctggcagatgctttcccgcagattatggagaagcagaacacgctcaaggccaagaccgcctctattctggatagcctcttgcaggccgatgttgcggccttaaaagacagcaacaagtaacctattggcctgcgctccggcgcgggtctttttgtttggaggtcatcatggagcagtatctcatatatctgcgcaagtctcgttccgacctcgaggccgaagcgcac

SEQ ID NO: 16349 - DNA, 260 bp, Unknown; identical to SEQ ID NO: 16212
  Description of Unknown: LeftRegion for integrase B3350 sequence

SEQ ID NO: 16350 - DNA, 260 bp, Unknown
  Description of Unknown: LeftRegion for integrase B3351 sequence
tgtaacatctggtctttctgtgctgtttggtttgctcctgatggtatatgtaaccttggacgctaggaatccaaatcttggcctaattagaggcaccacaacagccccaattgtgtacgttgcggctttttccattatcggaatgtgcttgtatatcgtccgaacagtggcaaggcgaaacgcaaaagggaggaaacgggatgcaaacaatgcccattgacctgtcggcgctgactccggaggaaaggcagcagtttgcg

SEQ ID NO: 16351 - DNA, 260 bp, Unknown
  Description of Unknown: LeftRegion for integrase B3352 sequence
aattgccacaacaagatctgaatggaagaataaaacggaatatttgaaagatctgattagagatcaaaagcacgaaatcatcttgttaagaattttacttacagttgccatcattttaatcatcggcgcactggtcattgaccgactgaatggcaacataggctttatctggcgctactaaaaattaaggtgggatcaaagtggagaaaacaatagaaaaagtgtgtgggaaatgggaacaagatcaatatgccatgtat

SEQ ID NO: 16352 - DNA, 260 bp, Unknown; identical to SEQ ID NO: 16238
  Description of Unknown: LeftRegion for integrase B3353 sequence

SEQ ID NO: 16353 - DNA, 260 bp, Unknown
  Description of Unknown: LeftRegion for integrase B3354 sequence
ataaagagcatcctcgctgattgcgggggagacctggcaggtgctttcccgcagattatggagaagcagaacacgctcaaggccaaaaccgcctctatccttgacagcctcttgcaggctgacgttgcagccttaaaggatagcaacaagtaacctttcggcctgcgctccggcgcgggcttttttgtttggaggtcatcatggagcagtatctcatatacctgcgcaagtctcgttccgacctcgaggccgaagcgcac

SEQ ID NO: 16354 - DNA, 260 bp, Unknown
  Description of Unknown: LeftRegion for integrase B3355 sequence
taaagaacatcctcgctgattgcgggggagacctggcaggtgctttcccgcagattatggagaagcagaacacgctcaaggccaaaaccgcctctatccttgacagcctcttgcaggctgacgttgcagccttaaaggatagcaacaagtaacctttcagcctgcgctccggcgcgggccttttttgtttggaggtcatcatggagcagtatctcatatacctgcgcaagtctcgttccgacctcgaggccgaagcgcac

SEQ ID NO: 16355 - DNA, 260 bp, Unknown
  Description of Unknown: LeftRegion for integrase B3356 sequence
ctgctgttacaggatatcgatcgcaatggctattccggtttaggcaagccggagcctttaaaaggcgatttacatggttattggagccgacgcattgacgaaacaaaccggcttgtataccgcatagtcagcgaccgggttgagatattacaatgccgtacgcattacaaacatattcaataaaaaagccggaggcagtcatggcgcaagaaaactatatcatctatctgcgcaaatcccgggcggacgccgaggctgag

SEQ ID NO: 16356 - DNA, 260 bp, Unknown
  Description of Unknown: LeftRegion for integrase B3357 sequence
taaagaacatcctcgcggattgcgggggagacctggcagatgctttcccgcagattatggagaagcagaacacgctcaaggccaagaccgcctctattctggatagtctcttgcaggccgatgttgcggccttaaaagacagcaacaagtaacctattggcctgcgctccggcgcgggccttttttgtttggaggtcatcatggagcagtatctcatatacctgcgcaagtctcgttccgacctcgaggccgaagcgcac

SEQ ID NO: 16357 - DNA, 260 bp, Unknown
  Description of Unknown: LeftRegion for integrase B3358 sequence
gtgcgtcgcttttgcgttttagcggtgatggcggtgcaggcaaagatgctttgactggaacgatggttgatacgagatctggggaaactgtttcaacaaagatcgaaagcctagaagatctttgcaagctgtttcctgcggtgaagttatacgtggcaggataatattcgtatttgtgaacagaaagagggcgggcagcattgtcgaagcgcgaatcgaaaagcagccagaagtgtttggcagcggagcagatcggcgtg

SEQ ID NO: 16358 - DNA, 260 bp, Unknown
  Description of Unknown: LeftRegion for integrase B3359 sequence
taaagagcatcctcgctgattgcaggggagacctggcagatgctttcccgcagattatggagaagcagaacacgctcaaggccaagaccgcctctattctggatagcctcttgcaggccgatgttgcggccttaaaagacagcaacaagtaacctattggcctgcgctccggcgcgggccttttttgtttggaggtcatcatggagcagtatctcatatacctgcgcaagtctcgttccgacctcgaggccgaagcgcac

SEQ ID NO: 16359 - DNA, 260 bp, Unknown; identical to SEQ ID NO: 16215
  Description of Unknown: LeftRegion for integrase B3360 sequence

SEQ ID NO: 16360 - DNA, 260 bp, Unknown
  Description of Unknown: LeftRegion for integrase B3361 sequence
tttcgatcaagggcttatgacggtcttgcctgatcttacaattcaggtctcgaactatgtgaaggacggctacgacgaccaaaatacgagagactggctactcggcgtagagggtacaaaaatcatcaggccgaagaggttcgcaccaaatcgcgacatgctggcctaccacaatgagtttgtattcctgaggtgattccatgcagcgagcagtgatatacgccaggtacagccctggaccaaatcagacagagcagtcg

SEQ ID NO: 16361 - DNA, 260 bp, Unknown
  Description of Unknown: LeftRegion for integrase B3362 sequence
gctcagcatcagaagtccctgcgcatgcaccggcttgtgacgctcatcctcttgggtattcttttgctgtgtgcccttgcgcttgtggccgacgtgctcagcccatcgatcggctggttccgcgcataaatcaaaccgccccggcccagcgccggagcggtatccgtataaccttttgcccttgtggtgagaatctgcttatgaaatttacatctacctggaaaatctccgacccgctcgcgcaatacatcatttacctg

SEQ ID NO: 16362 - DNA, 260 bp, Unknown
  Description of Unknown: LeftRegion for integrase B3363 sequence
tctccaactggacggcaaaggcaccctcgccggcagttgcaccgcagcctgcgccacaggttattgaacaaaagccgtctgcagctgatgaaatccgcaagtacaagggcctgcttgacgatggaatcatttcgcaggaagaatttgaggcaaagaagaagcagttgcttggcctgtaaaaccgaaaggagcgtgacggcatgaaaaagcgaatcaacactaattccgcagcccgtgccgtcatctatgcccggtattcc

SEQ ID NO: 16363 - DNA, 260 bp, Unknown
  Description of Unknown: LeftRegion for integrase B3364 sequence
ccgatgctaccaacaccagaccggctcgcatatccgaggatatacacatgtgacctaggaaatcactcgaatattgtatcatcctcggacagctatcgcaagcggaactcctgttccccgctggctgttatttttatactcttttttaggttgttgcgacgtcgcaacagctgcatacactatacgaggaggatgatacgatgtacgaaaatctgtcttttccttacggatccggcacttatgccatctacctccggaag

SEQ ID NO: 16364 - DNA, 260 bp, Unknown
  Description of Unknown: LeftRegion for integrase B3365 sequence
ctatagagtgttctgcgcaatattacataaacggcatttttcaatataatttctctgaacttccttatttttttatcaccaatagtggagatttgcaaattgagtttagttgcaaagaaataccttttgatttacgtgactcttctgaaattactataggtcattccattgaagtttaatataagtgaggagcaataaatatgagcagatattgcatttacctgcgaaaatcccgcgccgaccttgaagcagaagcgcac

SEQ ID NO: 16365 - DNA, 260 bp, Unknown
  Description of Unknown: LeftRegion for integrase B3366 sequence
ccagcagcagaagtccctgcacatgcaccggcttgtgacgctcatcctcttgggtattcttttgctgtgtgcccttgcgcttgtggccgacgcgctcatcccatcgatcggctggattcgcacctgaaaattaccgccccggcctgataagccggagcggttgctgtataacttttttgcccaacggggagaatttgcctatgaaatttacatctgcatggagaattgtggacccgctctcgcagtatatcatttacctg

SEQ ID NO: 16366 - DNA, 260 bp, Unknown
  Description of Unknown: LeftRegion for integrase B3367 sequence
aacggtttgaaaaccgatgttgctgcgctcctcgataaacttatgcaagccgatgtcgataccgcttttgaagtcaaaaaaggcggcctcacatcgtccgggtcgaaggcaatataatctatgtcgattggggcaaccgtttcaaatagcctgtaaccgccgcccctctccgggcggcttcttctttggaggtggtattattgccatattgcttatatgtccgtaagtcccgcgctgacgcggaggcagaggctcgcggg

SEQ ID NO: 16367 - DNA, 260 bp, Unknown
  Description of Unknown: LeftRegion for integrase B3368 sequence
ctgcaatttaattactgcgcagcaggggatgacgatccgacaacaatgcaaatcaagcgcgcctgcaaagaattcaaacccacagatacatttccagaatcattctacagctccatcgtcagcaaaatcatcttacacctcgatacacatatcgacatcaaattgcgaaacggacagacattataataaggaagagcaccatgagcaacgcaagaatcatcgaaattccagccactagacagatacgcagtgggaaaaac

SEQ ID NO: 16368 - DNA, 260 bp, Unknown
  Description of Unknown: LeftRegion for integrase B3369 sequence
cggggagattggttctgtagtagcgacaattatattcggcgtcttattcattgcggttttaggttttctaaaatagtaaccgtttttcagccattaaacgcaattttgagagtttttgtatctaatttagccttttaagcataaaattggggccttaattacaaatttaggctcattttcgttagataagaggtgatactttgagttcggttgataaaatcgccgttatttacgcgcgttattcgtctcacggccagacc

SEQ ID NO: 16369 - DNA, 260 bp, Unknown
  Description of Unknown: LeftRegion for integrase B3370 sequence
gacacacctcctgaaacagatactcttatggttgtcattgttgatgacgaagaaggatttgttaagaaaatcagcattgatgaagatactgtgacccttcgctcttttaatccacactatcctccccgtgtttttggcggtgttgaaattggacgattgcgttttgtcggtagagtcatggagttaaaaaggagatttgcatgaaaaaatttccaatcgacctctcctgtctgacagaggaagaaatctctcaatttcag

SEQ ID NO: 16370 - DNA, 260 bp, Unknown
  Description of Unknown: LeftRegion for integrase B3371 sequence
gctcagcagcagaagtccctgcgcatgcaccggcttgtaacgctcatcctcttgggtattcttttgctgtgtgcccttgcgcttgtggccgacgcgctcatcccatcgatcggctggatccgcgcataaataaaaccgccccggcccagcgccggagcggtatccgtataaccttttgcccttgtggtgagaatcttcctatgaaatttacatctacctggaaaatcgccgacccgctcgcgcagtacatcatttacctg

SEQ ID NO: 16371 - DNA, 260 bp, Unknown
  Description of Unknown: LeftRegion for integrase B3372 sequence
ctgctttaatatttcactcggtattggtttgcttgataaagaaagacctaattacgaagtggcaattagcagtatatttcaggcttatacttcaattaggacgcttgtaaaactctacgattctttaaaagtgacctggagtttttctacatcaatcgttcaactttaatctgttaattacataaggagctaggtgaaatatgagtagatattgcatttacctacgaaaatcccgcgccgacctcgaagcagaagcgcac

SEQ ID NO: 16372 - DNA, 260 bp, Unknown
  Description of Unknown: LeftRegion for integrase B3373 sequence
cttaaacgattcgccgaactttacggcgtcactcttgattatttcggagtgtcaacaaatgatgaagtctttgaattaataagccgtgctcgtgaggtttttgaaagtgaccaagtatcaagtaagacgaaagaggatctatacaaagaatttatgcgtctttacttgaatatcagcaaggattaaaggagttttcacctatgacaatacaaaaggataataccgcgttgcgcgctgccgtatatgtccgttattcgtcg

SEQ ID NO: 16373 - DNA, 260 bp, Unknown; identical to SEQ ID NO: 15097
  Description of Unknown: LeftRegion for integrase B3374 sequence

SEQ ID NO: 16374 - DNA, 260 bp, Unknown
  Description of Unknown: LeftRegion for integrase B3375 sequence
ccagatcattctgatatcaggcgacagtgacttcgtaccggcggctaagttggctcgaagagagggaatcgattttattctcgaccccatgcgttctcccattaaaccggacttatatgaacacgttgacggtattaggtctaaagtgccaaacccaagaaaaatcagagaggctgagcagccagtattggagatgcaacatgagtaaatactgcatctacctacgaaaatcccgtgccgacctcgaagccgaggcacac

SEQ ID NO: 16375 - DNA, 260 bp, Unknown
  Description of Unknown: LeftRegion for integrase B3376 sequence
tattacgtgtattagtttatcaccattacggtgaaaccacctaaatggtaaaaaaggaccaactcttaggagtcagcccttgaccaattaatgatcatataacacacactcatagtatatcattaattggtacatctggcaaactccgggtgtattttttgtaccctttttcataaatttaaacataaaggagatttaaaatggcatactgcatatatttacgtaagtccagagcggacagagaacttgaaaatcaggga

SEQ ID NO: 16376 - DNA, 260 bp, Unknown
  Description of Unknown: LeftRegion for integrase B3377 sequence
tgcccagcagcagaagtccctgcgcatgcaccgacttgtgacgctcatcctcttgggtattcttttgctgtgtgcccttgcgcttttggtcgacgtgctcatcccatcgatcggctggatccgcacataaataaaaccgccccggccggcgccggagcggtatccgtataaccttttgcccttgtggtgagaatttgcttatgaactttacatctacctggaaaatcgccgacccgctcgcgcagtacatcatttacctg

SEQ ID NO: 16377 - DNA, 260 bp, Unknown
  Description of Unknown: LeftRegion for integrase B3378 sequence
caggaacagatcatccgccagaagtccgtcgaggctcggcgcaaggatatcttgatcggcgttctggtgtgcatcgttctcgtcgcgcttctgtcgctccttgtcgacctttgtaatcccaatatcggctgggtccgcgcctccgcgcttgcattttttgtgcccgtataaccgcctgccgcagtggtgagaattggcttatgaactttacatctacgtggaaaatctccgacccgctcgcgcagtacatcatttacctg

SEQ ID NO: 16378 - DNA, 260 bp, Unknown
  Description of Unknown: LeftRegion for integrase B3379 sequence
gctcagcatcagaagtccctgcgcatgcaccggcttgtgacgctcatcctcttgggtattcttttgctgtgtgcccttgcgcttgtggccgacgtgctcagcccatcgatcggctggttccgcgcataaatcaaaccgccccggcccagcgccggagcggtatccgtataaccttttgcccttgtggtgagaatctgcttatgaactttacatctacctggaaaatcgctgacccgctcgcgcagtacatcatttacctg

SEQ ID NO: 16379 - DNA, 260 bp, Unknown
  Description of Unknown: LeftRegion for integrase B3380 sequence
gcccagcagcagaagtccctgcgcatgcaccggcttgtgacgctcatcctcttgggtattcttttgctgtgtgcccttgcgcttttggtcgacgtcctcagtccatcaatcggctggatgcgcacataaataaaaccgccccggctcagcgccggagcggtatccgtataaccttttgctcttgtggtgagaatttgcttatgaactttacatctacctggaaaatcgccgacccgctcgcgcagtacatcatttacctg

SEQ ID NO: 16380 - DNA, 260 bp, Unknown
  Description of Unknown: LeftRegion for integrase B3381 sequence
actcttgttgttaatattatgcataaaaaatagcgcccctgctctggaaaagtaaggcgctatttttagtaattacttctgccggcggtcaggtgtacactggccaacggttctcttgttaagtacattatatcgctatatacggtttatgtcaaacagattcgtttgacatttttattatctaatcgaggtgaggcaatatgccatattgtttatatttaagaaaatcaagggctgatattgatgctgaagccaatgga

SEQ ID NO: 16381 - DNA, 260 bp, Unknown
  Description of Unknown: LeftRegion for integrase B3382 sequence
gcccagcagcagaagtccctgcgcatgcaccggcttgtcacactcatcctcttgggtattcttttgctgtgtgcccttgcgcttttggccgacgtgctcagcccatcgatcggctggatccgcacataaataaaaccgccccggcccagcgccggagcggtatccgtataaccttttgcccttgtggtgagaatctgcttatgaaatttacatctacctggaaaatcgctgacccgctcgcgcagtacatcatttacctg

SEQ ID NO: 16382 - DNA, 260 bp, Unknown
  Description of Unknown: LeftRegion for integrase B3383 sequence
cttactttcacattatttctcttagttgtcttagcaatattagttatttgggcaataaaagtaacacatttagcagacccatccatgaggctaatagtgattccttatgaacgccaagtaattatcaaaactatttcaacatataacttaaaattaggagaaacaataaaatttgattcctaattattcaggagattaaaatgagcagatactgtatttaccttcgaaaatcccgtgccgacctcgaagcagaagcgcac

SEQ ID NO: 16383 - DNA, 260 bp, Unknown
  Description of Unknown: LeftRegion for integrase B3384 sequence
caggaacagatcatccgccagaagtccgtcgaggcgcggcgcaaggatgttttgatcggcgtgcttgtgtgcatcgttctcgtctcgcttctggcgctcctcgtcgacctttgtaatcccaatatcggctgggtccgcgcctccgcgcttgcatcctttgtgcccgtataaccgcctgccgcagtggtgagaatctgcttatgaaatttacatctacctggaaaatcgccgacccgctctcgcagtatatcatttacctg

SEQ ID NO: 16384 - DNA, 260 bp, Unknown
  Description of Unknown: LeftRegion for integrase B3385 sequence
ttcaagtttgatattaacacaaaacttgaaaaataggggcattttgttattttataacgaaatgcgttacatcggagtgattaaatgtacaacgagaaaacggaaaaatctttgttctgcggtgcatttgccgctgaacagcagaaagtacaacataaaattttgacttccgaatatacctattttaatcggagggaaaaatggaacagtattgcttatatctgcgaaaatcaagatcagacatcgaagctgaaaatcac

SEQ ID NO: 16385 - DNA, 260 bp, Unknown
  Description of Unknown: LeftRegion for integrase B3386 sequence
ccagcagcagaaatccctgcgtatgcaccggcttgtgacgctcatcctcttgggtattcttttgctgtgtgcccttgcgcttgtggccgacgtgctcatcccatcaatcggctggatccgcacataaattaaaccgccccggcctgataagccggagcggttgccgtataacttttttgcccaacggggagaatttgcctatgaaatttacatctgcatggagaatcgtggacccgctctcgcagtatatcatttacctg

SEQ ID NO: 16386 - DNA, 260 bp, Unknown
  Description of Unknown: LeftRegion for integrase B3387 sequence
aatataatcatttatctgctatctgcaattgtagcacttacccttgctgcgctgattattgatctatgcagcccgaatctcggctgggtgcgcgccgcgcttcacatgcagttcctgcatttataaaaaacaaagccgccccggcccagcgccggagcggtatccgtataaccttgtgcccttgtggtgagaatctgcttatgaaatttacatctacctggaaaatcgccgacccgctcgcgcagtacatcatttacctg

SEQ ID NO: 16387 - DNA, 260 bp, Unknown
  Description of Unknown: LeftRegion for integrase B3388 sequence
cagtacaacaaactgaacgcaaacgagggatgctccattctggtggctgtcgttctcggcgttatcctcgcagtgatttggtttttcggtcattaaatgcaaattttgatgatttttgtatctgatttggctttttaagcacaaaattaaggccttaattgcaaatttgaggctattttcgttaaatagggggtgatagtttgagttcagttgaaacaaccgccgttgtttacgcacggtattcatcccacggccagacc

SEQ ID NO: 16388 - DNA, 260 bp, Unknown
  Description of Unknown: LeftRegion for integrase B3389 sequence
tgcccagcagcagaagtccctgcgcatgcaccgacttgtgacgctcatcctcttgggtattcttttgctgtgtgcccttgcgcttgtggccgacgtgctcatcccatcaatcggctggatccgcacataaataaaaccgccccggccggcgccggagcggtatccgtataacctttttcccttgtggtgagaatctgcctatgaaatttacatctacctggaaaatctccgacccgctcgcgcagtacatcatttacctg

SEQ ID NO: 16389 - DNA, 260 bp, Unknown
  Description of Unknown: LeftRegion for integrase B3390 sequence
taaagagcatcctcgcggattgcgggggagacctggcaggtgctttcccgcagattatggagaagcagaacacgctcaaggccaagaccgcctctgttttggacagcctcttacaggctgatgttgcggccttaaaagacagcaacaagtaacctttcggcctgcgctccggcgcgggccttttttgtttggaggtcatcatggagcagtatctcatatacctgcgcaagtctcgttccgacctcgaggccgaagcgcac

SEQ ID NO: 16390 - DNA, 260 bp, Unknown
  Description of Unknown: LeftRegion for integrase B3391 sequence
ccagcatcagaagtccctgcgcatgcaccggcttgtgacgctcatcctcttgggtattctttcgctgtgtgcccttgcgcttttggtcgacgtactcagtccatcaatcggctggatccgcacataaataaaaccgccccggcctgataagccggagcggttgctgtataacttttttgcccaacggggagaatttgcctatgaaatttacatctgcatggagaatcgtggacccgctctcgcagtatatcatttacctg

SEQ ID NO: 16391 - DNA, 260 bp, Unknown; identical to SEQ ID NO: 16361
  Description of Unknown: LeftRegion for integrase B3392 sequence

SEQ ID NO: 16392 - DNA, 260 bp, Unknown
  Description of Unknown: LeftRegion for integrase B3393 sequence
gctcagcatcagaagtccctgcgcatgcaccgacttgtgacgctcatcctcttgggtattctttcgctgtgtgccctcgcgcttgtggccgacgtactcagcccatcgatcggctggttccgcgcataaatcaaaccgccccggcccagcgccggagcggtatccgtataaccttttgcccttgtggtgagaatctgcttatgaaatttacatctacctggaaaatcgccgacccgctcgcgcagtacatcatttacctg

SEQ ID NO: 16393 - DNA, 260 bp, Unknown
  Description of Unknown: LeftRegion for integrase B3394 sequence
ctatagagtgttctgcgcaatattacataaacggcatttttcaatataacttctctgaacttcctagtttttttatcactaatagtggagatttgcaaattgagtttagttgtaaagaaataccttttgatttgcgtgactcttctgaaattactataggtcattccattgaagtttaatatgagagaggagcgataaatatgagcagatattgcatttacctgcgaaaatcccgcgccgaccttgaagcagaagcgcac

SEQ ID NO: 16394 - DNA, 260 bp, Unknown
  Description of Unknown: LeftRegion for integrase B3395 sequence
ccagatcattctgatatcaggcgacagtgacttcgtaccggcggctaagttggctcgaagagagggaatcgattttattctcgaccccatgcgttctcccattaaaccggacttatatgaacacgttgacggtattaggtctaaagtgccaaacccaagaaaaatcagagaggctgagcagccagtattggagatgcaacatgagtaaatactgcatctacctacgaaaatcccgtgccgacctcgaagcagaagcgcac

SEQ ID NO: 16395 - DNA, 260 bp, Unknown
  Description of Unknown: LeftRegion for integrase B3396 sequence
cgcgtactgcgagaattgcggatacagctttgactttaccacgcaggatgacctcaatgcccaatataataaactgaacacaaacgagggatgcgccattttggtggcggtcattctcggcgttattcttataacaatttggttttacagccattaaacgcaaatttgaggccgttttcgttaaataagggggtgatagtttgagttcagttgataaaatcgccgtcgtttacgcgcggtattcgtcccacggtcagacc

SEQ ID NO: 16396 - DNA, 260 bp, Unknown
  Description of Unknown: LeftRegion for integrase B3397 sequence
gcccagcagcagaagtccctgcgcatgcaccggcttgtgacgctcatcctcttgggcattctttcgctgtgtgccctcgcgcttgtggccgacgtactcagcccatcgatcggctggttccgcgcataaatcaaaccgccccggcccagcgccggagcggtatccgtataaccttttgcccttgtggtgagaatctgcttatgaaatttacatctacctggaaaatcgccgacccgctcgcgcagtacatcatttacctg

SEQ ID NO: 16397 - DNA, 260 bp, Unknown
  Description of Unknown: LeftRegion for integrase B3398 sequence
tttcgatcaagggcttatgacggtcttgcctgatcttacaattcaggtctcggactatgtgaaagacagctacgacgaccaaaatacgaaagactggctactcggcgtagagggtacaaaaatcatcaggccgaagaggttcgcgccaaatcgcgacatgctggcctaccacaatgagtttgtattcctgaggtgattccatgcagcgagcagtgatatacgccaggtacagccctggaccaaatcagacggagcagtcg

SEQ ID NO: 16398 - DNA, 260 bp, Unknown
  Description of Unknown: LeftRegion for integrase B3399 sequence
agtaaaaagatacttgtatatatactaaatgataaaggcttttatgatgaacccatgttttatacattcaatgataaagtaaaagtaaatatttatgatgatttagaaatagattttagtacatttgatttatgaaaactaaattaagccattagatatttttatttagtggctttaatattataagaggaggttttcttatgaaaaagatagcaatttattctcgtaaatcagtatttactggcaaaggtgaaagtgtt

SEQ ID NO: 16399 - DNA, 260 bp, Unknown
  Description of Unknown: LeftRegion for integrase B3400 sequence
caatttgattactgcgtagcaggggatgacgatccgacaacaatgcaaatcaagcgcgcctgcaaaaaattcaaacccacagatacatttccagaatcattctacaacgccatcgtcagcaaaatcatcttacacctcgatacacgtatcgacatcaaactgcgaaacggacaaacattataataataaggaagagaaccatgagcaacgcaagaatcatcgaaattccagccactagacagatacgcggtgggaaaagc

SEQ ID NO: 16400 - DNA, 260 bp, Unknown; identical to SEQ ID NO: 16394
  Description of Unknown: LeftRegion for integrase B3401 sequence

SEQ ID NO: 16401 - DNA, 260 bp, Unknown
  Description of Unknown: LeftRegion for integrase B3402 sequence
gaagagctttatgacacaaaaatttgtgaaaagtgtgagcattcggatgaattttataagcttaataaaaaaaagcctcataccattaggacaccgaaaaaacggtttgaacctcactatgatgatttttcatttttacaaacttcaaatgatgatgattatgaaccgcactaatcccaaaagcaaaggagttgtttgatatgagcagatattgtatctacctacgaaagtcccgcgccgacctcgaagccgaggcgcac

SEQ ID NO: 16402 - DNA, 260 bp, Unknown
  Description of Unknown: LeftRegion for integrase B3403 sequence
tttcgatcaagggcttatgacggtcttgcctgatcttacaattcaggtctcgaattacgtgaaggacggctacgacgaccaaaatacgagagactggctactcggcgtagagggtacaaaaatcatcaggccgaagaggttcgcaccaaatcgcgacatgctggcctaccacaatgagtttgtattcctgaggtgattccatgcagcaagcagtgatatacgccaggtacagccctggaccaaatcagacagaacagtcg

SEQ ID NO: 16403 - DNA, 260 bp, Unknown
  Description of Unknown: LeftRegion for integrase B3404 sequence
ctgcaatttaattactgcgcagcaggggatgacgatccgacaacaatgcaaatcaagcgcgcctgcaaagaattcaaacccacagatacatttccagaatcattctacagctccatcgtcagcaaaatcatcttacacctcgatacacatatcgacatcaaactgcgaaacggacagacattataataaggaagagcaccatgagcaacgcaagaatcatcgaaattccagccactagacagatacgcagtgggaaaaac

SEQ ID NO: 16404 - DNA, 260 bp, Unknown
  Description of Unknown: LeftRegion for integrase B3405 sequence
gctcagcatcagaagtccctgcgcatgcaccggcttgtgacgctcatcctcttgggtattcttttgctgtgtgcccttgcgcttgtggccgacgtgctcagcccatcgattggctggttccgcgcataaatcaaaccgccccggcccagcgccggagcggtatccgtataaccttttgcccttgtggtgagaatctgcttatgaaatttacatctacctggaaaatctccgacccgctcgcgcaatacatcatttacctg

SEQ ID NO: 16405 - DNA, 260 bp, Unknown
  Description of Unknown: LeftRegion for integrase B3406 sequence
caggaacagatcatccgccagaagtccgccgaggcgcggcgcaaggatgttttgatctgcgttctggtgtgcatcgttctcgtcgcgcttctgtcgctccttgtcgacctttgtaatcccaatatcggctggcttcgcgcctccgcgcttgcatcttttgtgcccgtataaccgcctgccgcagtggtgagaattggcttatgaactttacatctacgtggaaaattactgacccgttcgcgcagtacatcatttacctg

SEQ ID NO: 16406 - DNA, 260 bp, Unknown; identical to SEQ ID NO: 13029
  Description of Unknown: LeftRegion for integrase B3407 sequence

SEQ ID NO: 16407 - DNA, 260 bp, Unknown; identical to SEQ ID NO: 16405
  Description of Unknown: LeftRegion for integrase B3408 sequence

SEQ ID NO: 16408 - DNA, 260 bp, Unknown
  Description of Unknown: LeftRegion for integrase B3409 sequence
ctttatgacacaaaaatttgtgaaaagtgtgagcattcggatgaattttataagcttaataaaaaaaagcctcataccattaggacaccgaaaaaaaggtttgaacctcactatgatgatttttcatttttacaaacttcaaatgatgatgatgatgattatgaaccgcactaatcccaaaagcaaaggagttgtttgacatgagcagctattgtatctaccttcgaaaatcccgcgccgaccttgaagcagaagcgcac

SEQ ID NO: 16409 - DNA, 260 bp, Unknown
  Description of Unknown: LeftRegion for integrase B3410 sequence
ttcaagtttgatgttaacacaaaacttgaaaaataggagcattttgttattttatatcgaaatgcgttatattggagtgattaaatgtacaacgagaaaacggaaaaatctttgttctgcggtacatttgccgctgaacagcagaaagtacaacataaaattttgacttccgaatatacctattttaatcggaggaaaaaatggaacagtattgcttatatctgcgaaaatcaagatcagatgtcgaagccgaaaatcac

SEQ ID NO: 16410 - DNA, 260 bp, Unknown
  Description of Unknown: LeftRegion for integrase B3411 sequence
gcccagcagcagaagtccctgcacatgcaccggcttgtgacgctcatcctcttgggtattcttttgctgtgtgcccttgcgcttgtggccgatgtgttcatcccatcgatcggctggatccgcacataaataaaaccgccccggcccaacgccggagcggtatccgtataaccttttgctcttgtggtgagaatctgcctatgaaatttacatctacctggaaaatctccgacccgctcgcgcagtacattatttacctg

SEQ ID NO: 16411 - DNA, 260 bp, Unknown
  Description of Unknown: LeftRegion for integrase B3412 sequence
gctcagcatcagaagtccctgcgcatgcaccggcttgtgacgctcatcctcttgggtattcttttgctgtgtgcccttgcgcttgtggccgacgtgctcagcccatcgatcggctggttccgcgcataaatcaaaccgccccggcccagcgccggagcggtatccgtataaccttttgcccttgtggcgagaatctgcttatgaaatttacatctacctggaaaatcgccgacccgctcgcgcagtacatcatttacctg

SEQ ID NO: 16412 - DNA, 260 bp, Unknown
  Description of Unknown: LeftRegion for integrase B3413 sequence
ttggctgataacaagaattatgagctgtggagattcagcaaagatatgattgatgttttcgagcacacatatgatgaattatttgaaaatgaaaaaacaaagcagtctataattgaattggcacagctggcaagagtagagcagaagtcaagcaatcgggaaagaatatataataatacagcgaaaggcggggatataatatgaacgctgtaatttatgcaagatattcaagcgaacggcaaacagaggcaagcattgag

SEQ ID NO: 16413 - DNA, 260 bp, Unknown
  Description of Unknown: LeftRegion for integrase B3414 sequence
tctccaactggacggcaaaggcacccgcgccggcagttgcaccgcagcctgcgccacaggttattgaacaaaagccgtctgcagctgatgaaatccgcaagtacaagggtctgcttgacgatggaatcatttcgcaggaagaatttgaggcaaagaagaagcagttgcttggcctgtaaaaccgaaaggagcgtgacggcatgaaaaagcgaatcaacactaattccgcggcccgtgccgtcatttatgctcgttattcc

SEQ ID NO: 16414 - DNA, 260 bp, Unknown; identical to SEQ ID NO: 16402
  Description of Unknown: LeftRegion for integrase B3415 sequence

SEQ ID NO: 16415 - DNA, 260 bp, Unknown
  Description of Unknown: LeftRegion for integrase B3416 sequence
gctcagcatcagaagtccctgcacatgcaccgacttgtgacgctcatcctcttgggcattctttcgctgtgtgccctcgcgcttgtggccgacgtactcagcccatcgatcggctggttccgcgcataaatcaaaccgccccggcccagcgccggagcggtatccgtataaccttttgcccttgtggtgagaatctgcttatgaaatttacatctacctggaaaatcgccgacccgctcgcgcagtacatcatttacctg

SEQ ID NO: 16416 - DNA, 260 bp, Unknown
  Description of Unknown: LeftRegion for integrase B3417 sequence
caggaacagatcatccgccataagtccgtcgaggcgcggcgcaaggatattctgatcggcgtgctggtgtgcatcgttctcatcgcgctcctggcgctccttgtcgacctttgtaatcccaatatcggctggcttcgcgcctccgcgcttgcatcctttgttcccgtataaccgccttccgcagtggtgagaatctgcttatgaaatttacatctacctggaaaatctccgacccgctcgcgcagtacatcatttacctg

SEQ ID NO: 16417 - DNA, 260 bp, Unknown
  Description of Unknown: LeftRegion for integrase B3418 sequence
gcccagcagcagaagtccctgcgtatgcaccggcttgtaacgcttatcctcttgggtattcttctgctgtgtgcccttgcgcttgtggccgatgtgttcatcccatcgatcggctggatccgcacataaataaaaccgccccggcccagcgccggagcggtatccgtataaccttttgctcttgtggtgagaatctgcctatgaaatttacatctacctggaaaatctccgacccgctcgcgcagtacattatttacctg

SEQ ID NO: 16418 - DNA, 260 bp, Unknown
  Description of Unknown: LeftRegion for integrase B3419 sequence
caggaacagatcatccgccataagtccgtcgaggcgcggcgcaaggatattctgatcggcgtgctggtgtgcatcgttctcatcgcgctcctggcgctccttgtcgacctttgtaatcccaatatcggctggcttcgcgcctccgcgcttgcatcctttgttcccgtataaccgccttccacagtggtgagaatttgcttatgaactttacatctacctggaaaatcgctgacccgctcgcgcagtacatcatttacctg

SEQ ID NO: 16419 - DNA, 260 bp, Unknown
  Description of Unknown: LeftRegion for integrase B3420 sequence
tcagcagcagaagtccctgcgcatgcaccggcttgtgacgctcatcctcttgggtattcttctgctgtgtgtccttgcgcttttggtcgacgtgctcatcccatcaatcggctggatccgtacataaattaaaccgccccggcctgataagccggagcggttgctgtataacttttttgcccaacggggagaatttgcctatgaaatttacatctgcatggagaatcgtggacccgctctcgcagtatatcatttacctg

SEQ ID NO: 16420 - DNA, 260 bp, Unknown
  Description of Unknown: LeftRegion for integrase B3421 sequence
tttcgatcaagggcttatgacggtcttgcctgatcttacaattcaggtctcgaactacgtgaaggacggctacgacgaccaaaatacgagagactggctactcggcgtagagggtacaaaaatcatcaggccgaagaggttcgcaccaaatcgcgacatgctggcctaccacaatgagtttgtattcctgaggtgattccatgcagcgagcagtgatatatgccaggtacagccctggaccaaatcagacagagcagtcg

SEQ ID NO: 16421 - DNA, 260 bp, Unknown; identical to SEQ ID NO: 13967
  Description of Unknown: LeftRegion for integrase B3422 sequence

SEQ ID NO: 16422 - DNA, 260 bp, Unknown
  Description of Unknown: LeftRegion for integrase B3423 sequence
gtagcagtacatattttctcgattctaaactcctttgcttttttatccctgttgtattctattggggggaagaaatctctaggtttgataaatatgaaaaattgcgttccaatttatggtggggtgttgttatagcaatttttgtcggaattatcagcagttttctctattcccttattaattaaaaatgaggtaatcatatgattcccttttctgtatcatcttccgctctacccgatggatgtagtgggtttctccgc

SEQ ID NO: 16423 - DNA, 260 bp, Unknown
  Description of Unknown: LeftRegion for integrase B3424 sequence
cagtacgacaaactgaacgcaaacgagggatgctccattctggtggctgtcgttctcggcgttatcctcgcagtgatttggtttttcggtcattaaatgcaaattttgatgatttttgtatctgatttggctttttaagcacaaaatcaaagccttaattgcaaatttgaggctattttcgttaaatagggggtgacagtttgagttcagttgataaaatcgccgttgtttacgcgcggtattcgtcccacggtcagacc

SEQ ID NO: 16424 - DNA, 260 bp, Unknown
  Description of Unknown: LeftRegion for integrase B3425 sequence
tgcccagcagcagaagtccctgcgcatgcaccgacttgtgacgctcatcctcttgggtattcttttgctgtgtgcccttgcgcttttggtcgacgttcttatcccatcaatcggctggatccgcacatgaataaaaccgccccggccggcgccggagcggtatccgtataaccttttgcccttgtggtgagaatctgcttatgaaatttacatctacctggaaaatcgccgacccgctcgcgcagtacatcatttacctg

SEQ ID NO: 16425 - DNA, 260 bp, Unknown; identical to SEQ ID NO: 15405
  Description of Unknown: LeftRegion for integrase B3426 sequence

SEQ ID NO: 16426 - DNA, 260 bp, Unknown
  Description of Unknown: LeftRegion for integrase B3427 sequence
cgatgcgccaacaccagaccggcccgcatatccgaggatatacacatgtgacctaggaaatcacgcaaatattgtatcatcctcggacagctatcgcaagcggaactcctgttccccgctggctgttatttttatacccattttccagcagtgttgcgacgtcgcaacggctgcatacactatacgaggaggatgatacgatgtacgaagacctgtcttttccttacggatccggcacttacgccatctacctccggaag

SEQ ID NO: 16427 - DNA, 260 bp, Unknown
  Description of Unknown: LeftRegion for integrase B3428 sequence
ttctaatattattattttatattcaaagttttttggtgtatccacagactatattttagagttaagtgaattcaaaaaccatacatcaaaccagataagtacaaacaaattcattaataatttacttgacttaattggttcataccttaaagaaattgaagaagaatcatagaatacactaaaaaaaggagaaaattataatgagcagatattgcatttacctgcgaaaatcccgtgccgaccttgaagcagaagcgcac

SEQ ID NO: 16428 - DNA, 260 bp, Unknown
  Description of Unknown: LeftRegion for integrase B3429 sequence
tttcgatcaagggcttatgacggtcttgcctgatcttacaattcaggtctcggattacgtgaaggacggctacgacgaccaaaatacgagagactggctactcggcgtagagggtacaaaaatcatcaggccgaagagattcgcaccaaatcgcgacatgctggcctaccacaatgagtttgtattcctgaggtgattccatgcagcgagcagtgatatacgccaggtacagccctggaccaaatcagacagagcagtca

SEQ ID NO: 16429 - DNA, 260 bp, Unknown; identical to SEQ ID NO: 13711
  Description of Unknown: LeftRegion for integrase B3430 sequence

SEQ ID NO: 16430 - DNA, 260 bp, Unknown
  Description of Unknown: LeftRegion for integrase B3431 sequence
aactcgcccggcgtgaaggcgtcgatgtcgttctcgacccgctcgaacaatctgtaaaggacgatctatttgagcacatcgacggtctgcgctcctgtggaaaccctttcctgtccaagtgaccaaataaacaccgccccggcccgataagccggagcggtatatgtataacctttttatgcaagggtgagaatcttggtatgaaatgtacatcaacatggcggatttcagatccgctcgcgcagtatattgtctatctg

SEQ ID NO: 16431 - DNA, 260 bp, Unknown
  Description of Unknown: LeftRegion for integrase B3432 sequence
aactcttgttgttaatattatgcataaaaaatagcgcccctgctctggaaaagtaaggcgctatttttagtaattacttctgccggcggtcaggtgtacactggccaacggttctcttgttaagtacattatatcgctatatacggtttatgtcaaacagattcgtttgacattttattatctaatcgaggtgaggcaatatgccatattgtttatatttaagaaaatcaagagctgatattgatgccgaagccaatgga

SEQ ID NO: 16432 - DNA, 260 bp, Unknown
  Description of Unknown: LeftRegion for integrase B3433 sequence
tttcgatcaagggcttatgacggtcttgcctgatcttacaattcaggtctcgaattacgtgaaggacggctacgatgaccaaaatacgagagactggctactcggcgtagagggtacaaaaatcatcaggccgaagaggttcgcaccaaatcgcgacatgctggcctaccacaatgagtttgtattcctgaggtgattccatgcagcaagcagtgatatacgccaggtacagccctggaccaaatcagacagaacagtcg

SEQ ID NO: 16433 - DNA, 260 bp, Unknown
  Description of Unknown: LeftRegion for integrase B3434 sequence
gcccagcagcagaagtccctgcgcatgcaccggcttgtgacgctcatcctcttgggcattctttcgctgtgtgccctcgcgcttgtggccgacgtactcagcccatcgatcggctggttccgcgcataaatcaaaccgccccggcccagcgccggagcggtatccgtataaccttttgcccttgtggtgagaatttgcttatgaactttacatctacgtggaaaatctccgacccgctcgcgcagtacatcatttacctt

SEQ ID NO: 16434 - DNA, 260 bp, Unknown; identical to SEQ ID NO: 16380
  Description of Unknown: LeftRegion for integrase B3435 sequence

SEQ ID NO: 16435 - DNA, 260 bp, Unknown
  Description of Unknown: LeftRegion for integrase B3436 sequence
gtttgaccagggccttatgacagtgctgccagacctcacgattcgcatctcggacgtgataaaagacggcttcgacgaccaaaatacaagagagtggctgcttggcctggaaggtactaaaattatccggccaaagcgattcgcgccgaaccgcgacatgctggcctaccataacgaatttgtctttttaaggtgatccaatgaaacgagcagtaatatacgccagatacagcccagggccaaaccagacagagcagtct

SEQ ID NO: 16436 - DNA, 260 bp, Unknown
  Description of Unknown: LeftRegion for integrase B3437 sequence
aactcgcccggcgtgaaggcgtcgatgtcgttctcgacccgctcgaacagtctgtaaaggacgatctatttgagcacatcgacggtctgcgctcctgtggaaaccctttcctgtccaagtgaccaaataaacaccgccccggcccgataagccggagcggtatatgtataacctttttatgcaagggtgagaatcttggtatgaaatttacatcaacatggcggatttcagatccgctcgcgcagtatattgtctatctg

SEQ ID NO: 16437 - DNA, 260 bp, Unknown
  Description of Unknown: LeftRegion for integrase B3438 sequence
ctgctttaatatttcactcggtattggttcgcttgataaagaaagacctaattacgaagtggcaattagcagtatatttcaggcttatacttcaattaggacgcttgtaaaactctacgattctttaaaagtgacctggagtttttctacatcaatcgttcaactttaatctgttaattatataaggagctaggtgaaatatgagtagatattgcatttacctacgaaaatcccgcgccgacctcgaagcagaagcgcac

SEQ ID NO: 16438 - DNA, 260 bp, Unknown
  Description of Unknown: LeftRegion for integrase B3439 sequence
gctcagcagcagaagtccctgcgcatgcaccggcttgtgacgctcatcctcttgggtattcttttgctgtgtgcccttgcgcttttggtcgacgtcctcagtccatcaatcggctggatccacacataaataaaaccgccccggctcagcgccggagcggtatccgtataaccttttgcccttgtggtgagaatctgcttatgaactttacatctacctggaaaatcgccgacccgctcgcgcaatacatcatttacctg

SEQ ID NO: 16439 - DNA, 260 bp, Unknown
  Description of Unknown: LeftRegion for integrase B3440 sequence
tgctcagcagcagaagtccctgcgcatgcaccgacttgtgacgctcatcctcttgggtattcttttgctgtgtgcccttgcgcttttggtcgacgtgctcatcccatcgatcggctggatccgcacatgaataaaaccgccccggccggcgccggagcggtatccgtataaccttttgcccttgtggcgagaatctgcttatgaaatttacatctacctggaaaatcgccgacccgctcgcgcagtacatcatttacctg

SEQ ID NO: 16440 - DNA, 260 bp, Unknown
  Description of Unknown: LeftRegion for integrase B3441 sequence
agccctgatattgaacggtgtttcgttcaatatcagggcttgtcacttattccaatacaaaaagcgtgtgctgagtatgcgccaacagaggaatttccggaaaccttttataaagaagtcgtcagcaaggtaatcctgtaccgtgacactcatattgaattcaaactgcaaaacggacaaattgtgtaaggggaaaagccatgggtaacatgagaatcattgagattcccgcttctatgagggaaagcgccggacagaaa

SEQ ID NO: 16441 - DNA, 260 bp, Unknown; identical to SEQ ID NO: 15405
  Description of Unknown: LeftRegion for integrase B3442 sequence

SEQ ID NO: 16442 - DNA, 260 bp, Unknown
  Description of Unknown: LeftRegion for integrase B3443 sequence
tgctcagcagcagaagtccctgcgcatgcaccgacttgtgacgctcatcctcttgggtattcttttgctgtgtgcccttgcgcttttggtcgacgtgctcatcccatcgatcggctggatccgcacatgaataaaaccgccccggccggcgccggagcggtatccgtataaccttttgcccttgtggtgagaatttgcttatgaactttacatctacgtggaaaatctccgacccgctcgcgcagtacatcatttacctg

SEQ ID NO: 16443 - DNA, 260 bp, Unknown
  Description of Unknown: LeftRegion for integrase B3444 sequence
tatttcagcgtcgtaaccgggaagaacaagtttctctgtaaagtctcctgtgatttccgtgcgctcgaacgcgcctgcaaagcctatgatccgtcccgcaaatccctgagccgctgacccttccagacaaacaccgccccggcctgataagccggagcggtatatgtataaccttttcgtgcaaaggtgaaaatcttgttatgaaatttacatcaacatggcggatctcggatccgatcgcgcagtatatcgtctatctg

SEQ ID NO: 16444 - DNA, 260 bp, Unknown; identical to SEQ ID NO: 16382
  Description of Unknown: LeftRegion for integrase B3445 sequence

SEQ ID NO: 16445 - DNA, 260 bp, Unknown
  Description of Unknown: LeftRegion for integrase B3446 sequence
agagattcttggtgttgatgaacttacaagcgaaataatcgatgagagaattgaaaaagtaattgttggagatgataagttattgactttttatctgaaagatggaaacaaaattgatgcccactggatgcagaaaagcagaagtgaatcatggactgaagaaatgaaagagaacgcaagaagaaaggcggttgaaatacatggcaaaagtaacagtaatcccatcaacgattaatccaattactaaattacctaataat

SEQ ID NO: 16446 - DNA, 260 bp, Unknown
  Description of Unknown: LeftRegion for integrase B3447 sequence
tctccaactggacggcaaaggcacccgcgccggcagttgcaccgcagcctgcgccacaggttattgaacaaaagccgtctgcagctgatgaaatccgcaagtacaagggcctgcttgacgatggaatcatttcgcaggaagaatttgaggcaaagaagaagcagttgcttggcctgtaaaaccgaaaggagcgtgacggcatgaaaaagcgaatcaacactaattccgcagcccgtgctgtcatctacgctcgttattcc

SEQ ID NO: 16447 - DNA, 260 bp, Unknown
  Description of Unknown: LeftRegion for integrase B3448 sequence
ctggatcattgacatggttatgatctgttgtaataaattcaccgacagcaccggcgcggtggttggcctgaaggttgccgagtataccagacagccggatcctgatcttgcagaggcttctctggaggagcagcgggaggcagcggccgagactgccagagcttacggctataccgtaatagagtcaggcgctcaggataatgccgacaagtaaaaacacggctcgaaaatatgccgcaggaggtagctcggataattcc

SEQ ID NO: 16448 - DNA, 260 bp, Unknown
  Description of Unknown: LeftRegion for integrase B3449 sequence
tttcgatcaagggcttatgacggtcttgcctgatcttacaattcaggtctcggactacgtgaaggacagctacgacgaccaaaatacgagagactggctactcggcgtagagggtacaaaaatcatcaggccgaagaggttcgcaccaaatcgcgacatgctggcctaccacaatgagtttgtattcctgaggtgattccatgcagcgagcagtgatatacgccagatacagccctggaccaaatcaaacagagcagtca

SEQ ID NO: 16449 - DNA, 260 bp, Unknown; identical to SEQ ID NO: 16438
  Description of Unknown: LeftRegion for integrase B3450 sequence

SEQ ID NO: 16450 - DNA, 260 bp, Unknown
  Description of Unknown: LeftRegion for integrase B3451 sequence
gctgatgcagaccgtcgccctggttgggcatacgggcgaaataacggcgattacagcccacaacgataatcttctggagttcaccctcaaggacggaaccaacgccgtgaagcggtggcaggaccgctcccgtgccgagagttggacagcggaaatgcgcaaatctgccggagaaaaaacacgggaaaggaataaacgccatgccgaaagctaaaaatgtcaccgtcatccccgccacgctgaatatccataccaaaaca

SEQ ID NO: 16451 - DNA, 260 bp, Unknown
  Description of Unknown: LeftRegion for integrase B3452 sequence
tatgacaatattaaagtattagatttcatagaagtatttaataataacagactgctgttccatctaaaaaataaagaaataaaagaatttatttgggaagaacgttcaagaagtcaatcttggactgatgaaatgagagaagaagcaaagaaaagaacaataataaataacaaaaataaaaagagaggagcaaatggaaaatggcaaaagtcagagtaatacctagcacactaaatccacttactcaatctccaattagt

SEQ ID NO: 16452 - DNA, 260 bp, Unknown
  Description of Unknown: LeftRegion for integrase B3453 sequence
cagtataataaactgaacacgaatgaggggtgcgccattttggtggcggtcatcctcggcgttattctcgcggcaatttggttttgcggccattaaacgcaaattttgatggaatttgtatctgattggctttttaagcacaaaatcaaagccttacttacaaatttgaggctactttcgttaaataagggggtgatagtttgagttcagtggataaaatcgccgtagtctatgcacggtattcatcccacgggcagacc

SEQ ID NO: 16453 - DNA, 260 bp, Unknown
  Description of Unknown: LeftRegion for integrase B3454 sequence
caggaacagatcatccgccataagtccgtcgaggcgcggcgcaaggatattctgatcggcgtgctggtgtgcatcgttctcgtcgcgcttctgtcgctccttgtcgacctttgtaatcccaatatcggctggcttcgcgcctccgcgcttgcatcctttgttcccgtataactgccttccgcagtggtgagaatttgcttatgaactttacatctacctggaaaatcgccgacccgctcgcgcagtacatcatttacctg

SEQ ID NO: 16454 - DNA, 260 bp, Unknown
  Description of Unknown: LeftRegion for integrase B3455 sequence
caggaacagatcatccgccagaagtccgtcgaggcgcggcgcaaggatgttttgatcggcgtgcttatgtgcatcgttctcgtcgcgcttctggcgctcctcgtcgacctttgtaatcccaatatcggctgggtccgcgcctccgcgcttgcatcctttgtgcccgtataaccttttgcccttgtggtgagaatctgcttatgaaatttacatctacatggaaaatcgccgatccgctcgcgcagtacatcatttacctg

SEQ ID NO: 16455 - DNA, 260 bp, Unknown; identical to SEQ ID NO: 13158
  Description of Unknown: LeftRegion for integrase B3456 sequence

SEQ ID NO: 16456 - DNA, 260 bp, Unknown
  Description of Unknown: LeftRegion for integrase B3457 sequence
gagctttatgacacaaaaatttgtgaaaagtgtgagcattcggatgaattttataagcttaataaaaaaaagcctcataccattaggacaccgaaaaaacggtttgaacctcactatgatgatttttcatttttacaaacttcaaatgatgatgatgattatgaaccgcactaatcccaaaagcaaaggagttgtttgatatgagcagatattgtatctacctacgaaagtcccgcgccgacctcgaagccgaggcgcac

SEQ ID NO: 16457 - DNA, 260 bp, Unknown
  Description of Unknown: LeftRegion for integrase B3458 sequence
gagttggaatacgaattctgctctgcaggagatgccgatccggcaactatgcaaatacgaaaggcttgtgccgagtataagccgacagatggcttcccacataccttttataaggaggtcgtcagcaaggtaatcctgtaccgtgacactcatattgaattcaaactgcagaacggacaaattgtgtaaggggaaaagccatgagcaacatgagaatcattgagattcccgcttctatgagggaaagcgccggacggaaa

SEQ ID NO: 16458 - DNA, 260 bp, Unknown
  Description of Unknown: LeftRegion for integrase B3459 sequence
accgagttgccgatgggccaaaaagatactgagtgaaaatgaagtctggtttgattcttcggacgacgccatagccgccggatacggcgcgtgcgggacttgcaatcccaaataacctaccaataaataaacaccgccccggcctgataagccggagcggtatatgtataacctttttatgcaagggtgagaatcttggtatgaaatatacatcaacatggcggatctcggatccgctcgcgcagtatattgtctatctg

SEQ ID NO: 16459 - DNA, 260 bp, Unknown
  Description of Unknown: LeftRegion for integrase B3460 sequence
tatcttctcaaaacaatggtattatgctgaattgcaaaaggaggcggaaagtactatggggcaagaagatttgcaactacttataaaaggaatcgtgttctctctgcgacaacaaaaattgctgacgaaggcagagtccgaatttgtattgaaaattattgaacgaaagtacccacggccaagaattacgagggaagacaatgagtaatgaaaaagactattcggtattgcctgaggtaaccataatccaagaatcggcg

SEQ ID NO: 16460 - DNA, 260 bp, Unknown
  Description of Unknown: LeftRegion for integrase B3461 sequence
ctatagagtgttctgcgcaatattacataaacggcatttttcaatataatttctctgaacttcctaatttttttatcaccaatagtggagatttgcaaattgagtttagttgcaaagaaataccttttgatttacgtgactcttctgaaattactataggtcattccattgaagtttaatataagtgaggagcaataaatatgagcagatattgcatttacctgcgaaaatcccgcgccgaccttgaagcagaagcgcac

SEQ ID NO: 16461 - DNA, 260 bp, Unknown
  Description of Unknown: LeftRegion for integrase B3462 sequence
ttctaatattattattttatattcaaagttttttggtgtatccacagactatattttagagttaagtgaattcaaaaaccatacatcaaaccagataagtacaaacaaattcattaataatttacttgacttaattggttcataccttaaagaaattgaagaagaatcatagaatacactaaaaaaaggagaaaattataatgagcagatattgcatttacctgcgaaaatcccgtgccgacctcgaagcagaagcgcac

SEQ ID NO: 16462 - DNA, 260 bp, Unknown; identical to SEQ ID NO: 15411
  Description of Unknown: LeftRegion for integrase B3463 sequence

SEQ ID NO: 16463 - DNA, 260 bp, Unknown
  Description of Unknown: LeftRegion for integrase B3464 sequence
ccgatgctaccaacaccagaccggccccgcatatccgaggatatacacatgtgacctaggaaatcacgcaaatattgtatcatcctcggacagctatcgcaagcggaactcctgttccccgctggctgttatttttatacccattttcgactgttgcgacgtcgcaacggctgcatacactatatgaggaggatgatacgatgtacgaagacctgtcttttccttacggatccggcacttatgccatctacctccggaag

SEQ ID NO: 16464 - DNA, 260 bp, Unknown
  Description of Unknown: LeftRegion for integrase B3465 sequence
ggtgatgctggtattctcacatatgaatcgaccgatagtgatataattacatctagtggtgaaattatcggaattagagttccctaatatctttactcatgagtttatttgcaaagaaataccttttgatttgcgtgactcttgtgaaattactataggttcattccattgaagtttaatatgagtgaggagcaataaatatgagcagctattgtatctaccttcgaaagtcccgcgccgacctcgaagcagaagcgcac

SEQ ID NO: 16465 - DNA, 260 bp, Unknown; identical to SEQ ID NO: 16418
  Description of Unknown: LeftRegion for integrase B3466 sequence

SEQ ID NO: 16466 - DNA, 260 bp, Unknown
  Description of Unknown: LeftRegion for integrase B3467 sequence
gagcggcggcctgtaccactatttcagcacgggtgagccggttgataatatcaatgtccgctttatagatcagtccggcaatcttttgcaggaagcaaattcaagcgatatgcaataatccgctcaataaacaccgccccggcctaattatccggagcggtatctgtataaccttttcatgcaagggtgagaatctggttatgaaatttacatcaacatggcggatttcagatccgctcgcgcagtatattgtctatctg

SEQ ID NO: 16467 - DNA, 260 bp, Unknown
  Description of Unknown: LeftRegion for integrase B3468 sequence
actcttgttatcaatttaatgcataaaaaatagcgcccctgctctggtaaagtaaggcgctattttttagttactactctatccggcggtcaggtgtgcactggccaacggttctcttgttaagtacattatatcgctatatacggtttatgtcaaacagattcgtttgacattttattatctaatcgaggtgaggcaatatgccatattgtttatatttaagaaaatcaagagctgatattgatgccgaagccaatgga

SEQ ID NO: 16468 - DNA, 260 bp, Unknown
  Description of Unknown: LeftRegion for integrase B3469 sequence
tgcccagcagcagaagtccctgcgcatgcaccggcttgtcacgctcatcctcttgggtattcttttgctgtgtgcccttgcgcttgtggccgacgtactcatcccatcgatcggctggatccgcacataaataaaaccgccccggccggcgccggagcggtatccgtataaccttttgcccttgtggtgagaatttgcctatgaaatttacatctacctggaaaatctccgacccgctcgcgcagtacatcatttacctg

SEQ ID NO: 16469 - DNA, 260 bp, Unknown
  Description of Unknown: LeftRegion for integrase B3470 sequence
atatcgccaactggtcggccgctcaaggtgcagctaccgcaccgcagcccgttcagcaggtagtggagcagaaaccgtctcccgccgatgaaatccgcaaatacaagggcctgctggatgacggtatcatcacgcaggaagaatttgaagctaagaaaaagcaactgctgggcctgtaaatttgaaaggagcgtgacggcatgagaaaaaaatccaacctcaatgcggctactcgtgccgtcatctatgccaggtattcc

SEQ ID NO: 16470 - DNA, 260 bp, Unknown
  Description of Unknown: LeftRegion for integrase B3471 sequence
tgaatacacagaggaagaaatgcagaaggagtatagctatatgcttgcccagcagatgacaaaaaaactgtttgaaaagggcatgatttcagacgtggaattaaataaaattatggctaaaaataaggaaacattttctccgaaattagctgcgataatgccctgaaaccgttgataatactggggcttagaggtaatatgtgaccaagcggaagtggggtgagttgatgaaaacgataacaaaaatagaagaaattgaa

SEQ ID NO: 16471 - DNA, 260 bp, Unknown
  Description of Unknown: LeftRegion for integrase B3472 sequence
ccagcagcagaagtccctgcgcatgcaccggcttgtgacgctcatcctcttgggtattcttttgctgtgtgcccttgcgcttgtggccgacgtgctcatcccatcgatcggctggattcgcgcatgaaaattaccgccccggcccgatcagccggagcggtatatgtataacctttttatgcaagggtgagaatcttggtatgaaatttacatcaacatggcggatttcagatccgctcgcgcagtatattgtctatctg

SEQ ID NO: 16472 - DNA, 260 bp, Unknown
  Description of Unknown: LeftRegion for integrase B3473 sequence
tggggtcgataagttcaacgaggcttttttccacgagcgcgtttcaaagatggtgatttcagtcgggaactgcatcacgtaccacatgaaggacggaacagaaattcagcgggtctggaaagaccgttcacggcgggaaagctggaccccggaaatgaaagaaaaggcaaggcaggcaacgacagaaaggtggagatcaaatggctaacgcaagaaaggtacaggtcatagaggcaacaatcaatcctaagacgcacctg

SEQ ID NO: 16473 - DNA, 260 bp, Unknown
  Description of Unknown: LeftRegion for integrase B3474 sequence
agacggttctgaaatcgttaaacggtggcaagaccgctcacgggcagaatcgtggacgccggagatgaaggaagccgctcgacagaaggctcttgcacggagcagggcttgacggctctctcattataccgccgttttcccaaatcggatcattacattttcagcaaaacctattatgattttgcacaggaggtgcatacatggcaacagcaaaaaatgtgacagtaattcctgccacattcaatccccagacccgccga

SEQ ID NO: 16474 - DNA, 260 bp, Unknown
  Description of Unknown: LeftRegion for integrase B3475 sequence
gctcagcagcagaagtccctgcgcatgcaccggcttgtaacgctcatcctcttgggtattcttttgctgtgtgcccttgcgcttttggtcgacgtcctcagtccatcaatcggctggatgcgcacataaataaaaccgccccggctcagcgccggagcggtatccgtataaccttttgcccttgtggtgagaatctgcttatgaactttacatctacctggaaaatcgccgacccgctcgcgcagtacatcatttacctg

SEQ ID NO: 16475 - DNA, 260 bp, Unknown
  Description of Unknown: LeftRegion for integrase B3476 sequence
tctccaactggacggcaaaggcacccgcgccggcagttgcaccgcagcctgcgccacaggttattgaacaaaagccgtctgcagccgatgaaatccgcaagtacaagggcctgcttgacgatggaatcatttcgcaggaagaatttgaggcaaagaagaagcagttgcttggcctgtaaaaccgaaaggagcgtgacggcatgaaaaagcgaatcaacactaattccgcagcccgtgccgtcatctacgctcgttattcc

SEQ ID NO: 16476 - DNA, 260 bp, Unknown; identical to SEQ ID NO: 13717
  Description of Unknown: LeftRegion for integrase B3477 sequence

SEQ ID NO: 16477 - DNA, 260 bp, Unknown
  Description of Unknown: LeftRegion for integrase B3478 sequence
tttcgatcaagggcttatgacggtcttgcctgatcttacaattcaggtctcggactacgtgaaggacggctacgacgaccaaaatacgagagactggctactcggcgtagagggtacaaaaatcatcaggccgaagaggttcgcaccaaatcgcgacatgctggcctaccacaatgagtttgtattcctgaggtgattccatgcagcgagcagtgatatacgccaggtacagccctggaccaaatcagacagagcagtca

SEQ ID NO: 16478 - DNA, 260 bp, Unknown
  Description of Unknown: LeftRegion for integrase B3479 sequence
acattttgtccgctgcggcatatactatagacacagcgaaagctgcgaatcaagcctttggaattgaccccccacgatcaggggagcgccagatccaagggcttttgatcgttagtgccccaacagtttaacaccgccccggcccgatacgccggagcggtatatgtataaccttttcatgcaagggtgagaatctggttatgaaatttacatcaacatggaggatctcggatccgatcgcgcagtatatcatctatctg

SEQ ID NO: 16479 - DNA, 260 bp, Unknown
  Description of Unknown: LeftRegion for integrase B3480 sequence
tttcgatcaagggcttatgacggtcttgcctgatcttacaattcaggtttcggactacgtgaaggacggctatgacgaccaaaatacgagagactggctactcggcgtagagggtacaaaaatcatcaggccgaagaggttcgcaccaaatcgcgacatgctggcctaccacaatgagtttgtattcctgaggtgattccatgcagcgagcagtgatatacgccaggtacagccctggaccaaatcagacagagcagtca

SEQ ID NO: 16480 - DNA, 260 bp, Unknown
  Description of Unknown: LeftRegion for integrase B3481 sequence
gcccagcagcagaagtccctgcgcatgcaccggcttgtgacgctcatcctcttgggcattctttcgctgtgtgccctcgcgcttgtggccgacgtactcagcccatcgatcggctggttccgcgcataaatcaaaccgccccggcccagcgccggagcggtatccgtataaccttttgcccttgtggtgagaatctgcttatgaaatttacatctacctggaaaatcgctgacccgctctcgcagtacatcatttacctg

SEQ ID NO: 16481 - DNA, 260 bp, Unknown
  Description of Unknown: LeftRegion for integrase B3482 sequence
ccagattattctgatatcaggcgacagtgacttcgtaccggcggctaagttggctcgaagagagggaatcgattttattcttgatcccatgcgttctcccattaaaccggacttatatgaacacgttgacggtatcaggtctaaagtgccaaacccaattaaaagtaaagaaactgaaaagtccgatttggagctccaacatgagtagatattgcatttacctacgaaaatcccgcgccgaccttgaagccgaggcgcac

SEQ ID NO: 16482 - DNA, 260 bp, Unknown
  Description of Unknown: LeftRegion for integrase B3483 sequence
tgcccagcagcagaagtccctgcgcatgcaccggcttgtcacgctcatcctcttgggtattcttttgctgtgtgcccttgcgcttgtggccgacgtactcaccccatcgatcggctggatccgcacataaataaaaccgccccggccggcgccggagcggtatccgtataaccttttgcccttgtggtgagaatttgcctatgaaatttacatctacctggaaaatctccgacccgctcgcgcagtacatcatttacctg

SEQ ID NO: 16483 - DNA, 260 bp, Unknown
  Description of Unknown: LeftRegion for integrase B3484 sequence
ttattagctattatgtttggtttgatgtatttttatgaaagagttttaatcccttctgtctgttttatagctgccgttctgtttattttcttttctattgcttctgaggcatattttatgcttattatcccggtattttgtgttatatatggagtgatttatataaaaagcaatccaataagaaaaaaggataaaagaaaatgaaaaaagctgtaatttatgcaaggtatagttctgacagtcaaaccgagcaatctatc

SEQ ID NO: 16484 - DNA, 260 bp, Unknown; identical to SEQ ID NO: 15097
  Description of Unknown: LeftRegion for integrase B3485 sequence

SEQ ID NO: 16485 - DNA, 260 bp, Unknown
  Description of Unknown: LeftRegion for integrase B3486 sequence
ctgctgacagtggatgaggcggagaagtcccgcattgaactggagcgcaagctccggcccactctgctgttcgcctgaacaggctctatgcgagaatagctgattgcccagtttttccacttctttttcgttggtgttggtaatggctattgcggaaggactgtggtagtgtgtgttgctgaaaggaggtcaaaaaagatatgacggaaacaaacataagtacagcaagagttccgcaggtcacagtaatcgaccccaga

SEQ ID NO: 16486 - DNA, 260 bp, Unknown
  Description of Unknown: LeftRegion for integrase B3487 sequence
cagtacaacagactgaacgcgaacgagggatgttccattctggtggctgtcgttctcggcgttatcctcgcggtgatttggtttttcggccattaaatgcaaattttgatgatttttgtatctgatttggctttttaagcacaaaatcaaagccttaattgcaaatttgaggctattttcgttaaataggaggtgacattttgagttcagttgataaaatcgctgtcgtttatgcgcggtattcatcccacggccagact

SEQ ID NO: 16487 - DNA, 260 bp, Unknown
  Description of Unknown: LeftRegion for integrase B3488 sequence
caggaacagatcatccgccagaagtccgtcgaggcgcggcgcaaggatgttttgatcggcgtgcttgtgtgcatcgttctcgtctcgcttctggcgctcctcgtcgacctttgtaatcccaacatcggctgggtccgcgcctccgcgcttgcatcctttgttcccgtataaccgccttccgcagtggtgagaatttgcttatgaactttacatctacgtggaaaatcgcagacccgctcgcgcagtacatcatttacctg

SEQ ID NO: 16488 - DNA, 260 bp, Unknown
  Description of Unknown: LeftRegion for integrase B3489 sequence
caggaacagatcatccgccagaagtccgtcgaggcgcgtcgcaaggatgttttgatcggcgtgcttgtgtgcatcgttctcgtctcgcttctggcgctcctcgtcgacctttgtaatcccaatatcggctggcttcgtgcctccgcgcttgcatcctttgttcccgtataaccgccttccgcagtggtgagaatctgcttatgaaatttacatctacctggaaaatcgccgacccgctcgcgcagtacatcatttacctg

SEQ ID NO: 16489 - DNA, 260 bp, Unknown
  Description of Unknown: LeftRegion for integrase B3490 sequence
gctcatcagcagaagtccctgcgcatgcaccggcttgtgacgctcatcctcttgggtattcttttgctgtgcgcccttgcgcttgtggccgacgtgctcatcccatcgatcggctgggtccgcacataagtaaaaccgccccggcccagcgccggagcggtatccgtataaccttttgcccttgtggtgagaatctgcctatgaaatttacatctacctggaaaatcgccgacccgctcgcgcaatacatcatttacctg

SEQ ID NO: 16490 - DNA, 260 bp, Unknown
  Description of Unknown: LeftRegion for integrase B3491 sequence
tgcccagcagcagaagtccctgcgtatgcaccggcttgtgacgctcatcctcttgggtattcttttgctgtgcgcccttgcgcttgtggccgacgcgctcatcccatcgatcggctggatccgcacatgaataaaaccgccccggccggtgtcgaagcggtatccgtataaccttttgcccttgtggtgagaatctgcctatgaaatttacatctacttggaaaatctccgacccgctcgcgcagtacatcatatatctg

SEQ ID NO: 16491 - DNA, 260 bp, Unknown
  Description of Unknown: LeftRegion for integrase B3492 sequence
atatcgccaactggtcggccgctcaaggtgcagctaccgcaccgcagcccgttcagcaggtagtggagcagaaaccgtctcccgccgatgaaatccgcaaatacaagggcctgctggatgacggtattatcacgcaggaagaatttgaagctaagaaaaagcaactgctgggcctgtaaatttgaaaggagcgtgacggcatgagaaaaaagtccaacctcaatgcggctactcgtgccgtcatctatgccaggtattcc

SEQ ID NO: 16492 - DNA, 260 bp, Unknown
  Description of Unknown: LeftRegion for integrase B3493 sequence
caggaacagatcatccgccagaagtccgtcgaggcgcggcgcaaggatgttttgatcggcgtgcttgtgtgcatcgttctcgtctcgcttctggcgctccttgtcgacctttgtaatcccaatatcggctggcttcgcgcctccgcgcttgcatcctttgttcccgtataaccgccttccgcagtggtgagaatttgcttatgaactttacatctacctggaaaatcgccgacccgctcgcgcagtacatcatttacctg

SEQ ID NO: 16493 - DNA, 260 bp, Unknown; identical to SEQ ID NO: 16395
  Description of Unknown: LeftRegion for integrase B3494 sequence

SEQ ID NO: 16494 - DNA, 260 bp, Unknown
  Description of Unknown: LeftRegion for integrase B3495 sequence
gagcggtggactgtaccactatttcagcacgggtgagccggtcgataatatcaatgtccgctttgttgatcagtccggcaacctcttgcaggaggcaaattcaagcgatatgcaataatccgctcaataaacaccgccccggcctaattatccggagcggtatctgtataaccttttcatgcaagggtgagaatctggttatgaaatttacatcaacatggcggatctcggatccgctcgcgcagtatatcgtctatctg

SEQ ID NO: 16495 - DNA, 260 bp, Unknown
  Description of Unknown: LeftRegion for integrase B3496 sequence
ctccgcaatctatcgactatgaagccaggacgggtgttttcaaggggtccggcaaaaagccgtatgaggtcaccgaaaccacctgcacctgccgagattattttgtccgcaagctgccgtgcaagcatatctaccggctgcgcatggagcttgccaaggctgacggcgaatagttttcaccagaaaaggagcatgacggcatgagaaaaaagtccaacctcaatgtggctactcgtgccgtcatctatgccaggtattcc

SEQ ID NO: 16496 - DNA, 260 bp, Unknown; identical to SEQ ID NO: 16237
  Description of Unknown: LeftRegion for integrase B3497 sequence

SEQ ID NO: 16497 - DNA, 260 bp, Unknown; identical to SEQ ID NO: 16403
  Description of Unknown: LeftRegion for integrase B3498 sequence

SEQ ID NO: 16498 - DNA, 260 bp, Unknown
  Description of Unknown: LeftRegion for integrase B3499 sequence
atatcgccaactggtcggccgctcaaggtgcagctaccgcaccgcagcccgttcagcaagtagtggagcagaaaccgtctcccgccgatgaaatccgcaaatacaagggcctgctggatgacggtatcatcacgcaggaagaatttgaagctaagaaaaagcaactgctgggcctgtaaatttgaaaggagcgtgacggcatgagaaaaaagtccaacctcaatgcggctactcgtgccgtcatctatgccaggtattcc

SEQ ID NO: 16499 - DNA, 260 bp, Unknown
  Description of Unknown: LeftRegion for integrase B3500 sequence
cgtgaagtagacattgaagatggagatattgtcgtggccgtggtagatcggcaagacggttttatcaaacaagtccactttgaagagaatattcttaccctgcattccttcaacccttactaccctgatatggtctttaaggggaacgagatcaagcaagtccgctttgtaggtaaagcccgagaggtgaagagaattctatgaagaagttcaaattccccattgacctgtccatgctgacagaggaagagatcaaccaa

SEQ ID NO: 16500 - DNA, 260 bp, Unknown
  Description of Unknown: LeftRegion for integrase B3501 sequence
ccagcagcagaagtccctgcgcatgcaccggcttgtgacgcttatcctcttgggtatcctttcgctgtgtgcccttgcgcttgtggccgacgcgctcatcccatcgatcggctggattcgcacatgaaaattaccgccccggcccgatcagccggagcggtatatgtataacctttttatgcaagggtgagaatcttggtatgaaatttacatcaacatggcggatttcagatccgctcgcgcagtatattgtctatctg

SEQ ID NO: 16501 - DNA, 260 bp, Unknown
  Description of Unknown: LeftRegion for integrase B3502 sequence
tgcccagcagcagaagtccctgcgcatgcaccggcttgtgacgctcatcctcttgggcattctttcgctgtgtgccctcgcgcttgtggccgacgtgctcatcccatcaatcggctggatccgcacataaataaaaccgccccggccggcgccggagcggtatccgtataacctttttcccttgtggtgagaatctgcctatgaaatttacatctacctggaaaatctccgacccgctcgcgcagtacatcatttacctg

SEQ ID NO: 16502 - DNA, 260 bp, Unknown; identical to SEQ ID NO: 13027
  Description of Unknown: LeftRegion for integrase B3503 sequence

SEQ ID NO: 16503 - DNA, 260 bp, Unknown
  Description of Unknown: LeftRegion for integrase B3504 sequence
ccagatcattctgatatcaggcgacagtgacttcgtaccggcggctaagttggctcgaagagagggaatcgattttattctcgaccccatgcgttctcccattaaaccggacttatatgaacacgttgacggtattaggtctaaagtgccaaacccaagaaaaatcaaagaggctgagcagccagtattggagatgcaacatgagtaaatactgcatctacctacgaaaatcccgtgccgacctcgaagcagaagcgcac

SEQ ID NO: 16504 - DNA, 260 bp, Unknown
  Description of Unknown: LeftRegion for integrase B3505 sequence
tcatatgtagatcatcctgtgtatttctatgacaatgaaggcaatttacaaattgaattttgttatagcggcctcccatttgatttacgtgaatctgatttcatcaaggttgattatagcttaagatgaataaagttttttagtattttttcaaagacgatgattataaatcgtataaataaaaaaaggagatgtttggtttgagcaaatattgcatttacctacgaaaatcccgcgccgaccttgaagctgaagcacac

SEQ ID NO: 16505 - DNA, 260 bp, Unknown; identical to SEQ ID NO: 14174
  Description of Unknown: LeftRegion for integrase B3506 sequence

SEQ ID NO: 16506 - DNA, 260 bp, Unknown
  Description of Unknown: LeftRegion for integrase B3507 sequence
agtaaaaagatacttgtatatatactaaatgataaaggcttttatgatgaacccatgttttatacattcaatgataaagtaaaagtaaatatttatgatgatttagaaatagattttagtacatttgatttatgaaaactaaattaagccattagatatttttatttagtggctttaatattataagaggaggttttctcatgaaaaagatagcaatttattctcgtaaatcagtatttactggcaaaggtgaaagtgtt

SEQ ID NO: 16507 - DNA, 260 bp, Unknown
  Description of Unknown: LeftRegion for integrase B3508 sequence
gcccagcagcagaagtccctgcgcatgcaccggcttgtgacgctcatcctcttgggtattcttttgctgtgtgcccttgcgcttgtggccgacgtgctcagcccatcgattggctggttccgcgcataaatcaaaccgccccggcccagcgccggagcggtatccgtataaccttttgcccttgtggcgagaatctgcttatgaaatttacatctacctggaaaatcgctgacccgctcgcgcagtacatcatttacctg

SEQ ID NO: 16508 - DNA, 260 bp, Unknown
  Description of Unknown: LeftRegion for integrase B3509 sequence
cagaactggagtaccaattttgctcggcgggcgatgctgacccagcaagcctgcaaatgcaaaaagcgtgtgccgagtataagccgaccgatgattttccatataccttttataaaggaatcgttagcaacgtcagtctataccgcgatacccacatcgaattcaaactgcgaaatggacaaactgtgtgaggaaaagtcatgaataacatgagaattgttgagattcccgcttctatgagggaaaacgccggacggaaa

SEQ ID NO: 16509 - DNA, 260 bp, Unknown
  Description of Unknown: LeftRegion for integrase B3510 sequence
tgaggttgataagttcaacgaagccttttttcacgagcgcgtttcaaagatggtgatttcagccgggaactgcatcacctactactttaaggatggaacagaaatccagcgggtctggaaggaccgctcacggcgagaaagctggaccccggaaatgaaagaaaaggcaagacgggcaacggcagaaaggtggaaagcaaatggctaatgcaagaaaagttcaggtcatagaggcaacaatcaatccgaaaacgcatctg

SEQ ID NO: 16510 - DNA, 260 bp, Unknown
  Description of Unknown: LeftRegion for integrase B3511 sequence
acagggacggcatcgtaactcggattttcgctatattgcgatagcctactatacgataatatcatacatctgaagatgtacaactagctgcaaaaatattgtatcatcttcggaacagcttcgcaagcggaacactcgttccccgctggctgttatttttatacccatttttacatatttttacttaggaggatgatgacatgcaggaaacaaacatctctatcaatgaaattatcatgtatctgcgcaaatcccgatca

SEQ ID NO: 16511 - DNA, 260 bp, Unknown
  Description of Unknown: LeftRegion for integrase B3512 sequence
tattaccattaatatttatagttatttgtatactgctggtggttcctttttgtattttaatagttacatatgttattttagatgcattgtactattcaaattatcgaaatatggttgttccatatgaaaggaaagtaattcttaagacattacaatcttatgatggaagatataaagaattagattagtggggtgactatatgagatatgttatatacctgcgaaaatcccgcgccgaccttgaagcagaagcgcacggc

SEQ ID NO: 16512 - DNA, 260 bp, Unknown; identical to SEQ ID NO: 16510
  Description of Unknown: LeftRegion for integrase B3513 sequence

SEQ ID NO: 16513 - DNA, 260 bp, Unknown
  Description of Unknown: LeftRegion for integrase B3514 sequence
atgtgaggtctttttcgttatctaataaataattcaaactacataaaaaagagccagccgctaacgaccagctccacaagtgatataaataccaccctagacaagttgtattgtatcatttctggagcatccggtcaaatgctgggtgttatttttgtacctattttttaataaaatcaaatataaaggagtgatatactatggcttattgtatttatttaagaaaatccagagctgatagagagttagaactgcaaggt

SEQ ID NO: 16514 - DNA, 260 bp, Unknown; identical to SEQ ID NO: 16513
  Description of Unknown: LeftRegion for integrase B3515 sequence

SEQ ID NO: 16515 - DNA, 260 bp, Unknown
  Description of Unknown: LeftRegion for integrase B3516 sequence
agagggagtgaaaagaatggaaccaaaacaaactaaagaagaaaaatatataattgagagaaaatatgtaggagaaaaaagtctaatagaaatcattacaaaaatgattttacaggaaataaaggtaaaaaatggctaaaaaaataaagatatgttataatcaaaatgagcaagttgaatgttgatgtgaaggaggaagcatgaatacaaacatcaaacatacagctttactaagtagactatcaagagaagatgaaaat

SEQ ID NO: 16516 - DNA, 260 bp, Unknown
  Description of Unknown: LeftRegion for integrase B3517 sequence
aatatgctttaaatgtcaatttaaaaaccggctcctgctaccaacaggaaccggcaaggaataacatccgaaaatgatactcccaattagcaaaaatattgtatcatcttcggaacagcttcgcaagcggaacacccgttccccgctggctgttatttttatacccatttttacatatttttacttaggaggatgatgtcatgcaggaaacaaatatctctatcaatgaaattatcatgtatctgcgcaaatcccgatca

SEQ ID NO: 16517 - DNA, 260 bp, Unknown
  Description of Unknown: LeftRegion for integrase B3518 sequence
atcaatgcttgatgtaattgcacataataaataattattacaaataaaaaaagagccagccactaaggaccagctccaaagtgatacaatatcaccatagacaagtcatattgtatcacataatggaacatctggcaaaggctgggtgttatttttgtacctattttttaataaaatcaaatataaaggagtgatatactatggcttattgtatttatttaagaaaatccagagctgatagagagttagaactgcaaggt

SEQ ID NO: 16518 - DNA, 260 bp, Unknown
  Description of Unknown: LeftRegion for integrase B3519 sequence
cagcgcttgatcgaattcgaaaagcgcccgtgaccttcttcgtgccccttttgccacccttggcaaaatagccatcaaaaacgccccgcccatgtttccagcatggacgagacgaagtattcaattcacactctttttctttatgcggctcatcaagggattcattcaactgttatcactatttaagggggtgatccaatttgaaagccgtcatatatgcccgcttctccagccacaaccagcgcgaagaatccatcgaa

SEQ ID NO: 16519 - DNA, 260 bp, Unknown
  Description of Unknown: LeftRegion for integrase B3520 sequence
tagtcaacattcaaccccctcgaaatcgaaggttttagaatctaaaataaaagagccagcccctaacgaccagctccaaagtgatacaatatcaccatagacaagtcatattgtatcacataatggaacatctggcaaaggctgggtgttatttttgtacctattttttaataaaatcaaatataaaggagtgatatactatggcttattgtatttatttaagaaaatccagagctgatagagagttagaactgcaaggt

SEQ ID NO: 16520 - DNA, 260 bp, Unknown
  Description of Unknown: LeftRegion for integrase B3521 sequence
tatttccattgttcatcccagttattgttatattattagcagttccattttccattattataattacatgtctaatttcttatttattgtactattcaaactatagaaacatggttgttccatatgaaaggaaaatagttcttaaaacattacaatcttatgatggaagatataaagaattagattagtggggtgactatatgagatatgttatctacctacgaaaatcccgcgccgacctcgaagccgaggcacacggc

SEQ ID NO: 16521 - DNA, 260 bp, Unknown; identical to SEQ ID NO: 16513
  Description of Unknown: LeftRegion for integrase B3522 sequence

SEQ ID NO: 16522 - DNA, 260 bp, Unknown
  Description of Unknown: LeftRegion for integrase B3523 sequence
cttggagtgttgggggactggccgaaggtcagccgtagcggaagcaaggctgcgctggaagacgcacaggctgaaattgagcggtggaggcaagagttcattgctgggaatatctcggcgaagaaatacgttaaaattgcggatgctctcatatccaaataaaaaagccgccctcggtgggcggcgggaggttactctgaatgtgtgcaaaaaagaaaccggccatgcttgagccggatatgcaggatgccgtgatctac

SEQ ID NO: 16523 - DNA, 260 bp, Unknown
  Description of Unknown: LeftRegion for integrase B3524 sequence
caccacacatactcataaatagaaaaaaccggctcctgcagcaacaggaaccggcaaggaataacatccgaaaatgatactcccaattagcaaaaatattgtatcatcttcggaacagcttcgcaagcggaacacccgttccccgctggctgttatttttatacccatttttacatatttttacttaggaggatgatgacatgcaggaaacaaacatctctatcaatgaaattatcatgtatctgcgcaaatcccgatca

SEQ ID NO: 16524 - DNA, 260 bp, Unknown
  Description of Unknown: LeftRegion for integrase B3525 sequence
acagggacggcatcgtaactcggattttcgctatattgcgatagcctactatacgataatatcatacatctgaagatgtacaactagctgcaaaaatattgtatcatcttcggaacagcttcgcaagcggaacacccgttccccgctggctgttatttttatacccatttttacatatttttacttaggaggatgatgtcatgcaggaaacaaatatctctatcaatgaaattatcatgtatctgcgcaaatcccgatca

SEQ ID NO: 16525 - DNA, 260 bp, Unknown
  Description of Unknown: LeftRegion for integrase B3526 sequence
ttgttaacgcattaggttttttagcaaaaaatgatttttctttattattcattaatatagtcctccttaatttactatagtaaattaattgttaagtattgatatattataccatatgttagaaaaatttggggtataaagacatatctttgaattaaaccaataactttctatgatataattataatgaggtgatattaatgagtaactatagaagtgctctatatgctagagttagtacacaaaatgaagagcaagat

SEQ ID NO: 16526 - DNA, 260 bp, Unknown
  Description of Unknown: LeftRegion for integrase B3527 sequence
aatatgctttaaatgtcaatttaaaaaccggctcctgttggcgcaggaaccggcaaggaataacatccgaaaatgatactccaacttagcaaaaaatattgtatcatcttcggaacagcttcgcaagcggaacacccgttccccgctggctgttatttttatacccatttttacatatttttacttaggaggatgatgacatgcaggaaacaaacatctctatcaatgaaattatcatgtatctgcgcaaatcccgatca

SEQ ID NO: 16527 - DNA, 260 bp, Unknown; identical to SEQ ID NO: 14465
  Description of Unknown: LeftRegion for integrase B3528 sequence

SEQ ID NO: 16528 - DNA, 260 bp, Unknown; identical to SEQ ID NO: 16513
  Description of Unknown: LeftRegion for integrase B3529 sequence

SEQ ID NO: 16529 - DNA, 260 bp, Unknown
  Description of Unknown: LeftRegion for integrase B3530 sequence
aatatgctttaaatgtcaatttaaaaaccggctcctgctaccaacaggaaccggcaaggaataacatccgaaaatgatactcccaattagcaaaaatattgtatcatcttcggaacagcttcgcaagcggaacacccgttccccgctggctgttatttttatacccatttttacatatttttacttaggaggatgatgtcatgcaggaaacaaatatctctatcaatgaaattattatgtatctgcgcaaatcccgatca

SEQ ID NO: 16530 - DNA, 260 bp, Unknown
  Description of Unknown: LeftRegion for integrase B3531 sequence
gttgcccacttggaccccgatacggtcagaagcaaaataacggcaatcagagcagaaaataataatgtagtcgtgttctgcatggatgacggttcagaaatcgttgaacgatgggcagaccgctccagggcagaaagctggacgccggaaatgaaagaacaggcgcgccaacgggcactgcaggcaaggaggagcaaaaaatgagcagaacagcagcacggtcggtcaccgtcattccaccgaccatcaatccgctgaca

SEQ ID NO: 16531 - DNA, 260 bp, Unknown
  Description of Unknown: LeftRegion for integrase B3532 sequence
aaaagaatcagaaccgatatctctttgggtgttactagactacaaaatacaaattattcagagggaatcaataaaatatttagtgtctatgacttaattagaaaaataggagatttttcagatttcatagatattagatggtcattttcagtaacagcgaatgaaatttaacattaaatattagggagcggtggagtattatggcgcgtaaaacggataagcctttgtccaatattgcagttatatacgctcgattctcc

SEQ ID NO: 16532 - DNA, 260 bp, Unknown
  Description of Unknown: LeftRegion for integrase B3533 sequence
agtttaaaaacaaccgaaaataaaaaccggctcctgcgtcaacaggaaccggcaatagaatatgtatccgaagataatactctgcaatgacaaaaatattgtatcatcttcggaacagcttcgcaagcggaacacccgttccccgctggctgttatttttatacccatttttacatatttttacttaggaggatgatgacatgcaggaaacaaacatctctatcaatgaaattatcatgtatctgcgcaaatcccgatca

SEQ ID NO: 16533 - DNA, 260 bp, Unknown
  Description of Unknown: LeftRegion for integrase B3534 sequence
ccgcagccccacattgttggctattcagaatatctggatacggcataccggttttctttttggtaaagaaaaagccccggctttcaccggggcatcccatgagttgtgctcatgtaatctcgcaaattatagtatagcactgctccgggatattttgaagtattccgggcatttttatgccctttttaggaggttttgctgtgcattttggaatttatggaagaaaatcatattttaaggacacctcagacagtacacag

SEQ ID NO: 16534 - DNA, 260 bp, Unknown
  Description of Unknown: LeftRegion for integrase B3535 sequence
aatatgctttaaatgtcaatttaaaaaccggctcctgctaccaacaggaaccggcaaggaataacatccgaaaatgatactcccaattagcaaaaatattgtatcatcttcggaacagcttcgcaagcggaacacccgttccccgctggctgttatttttatacccatttttacatatttttacttaggaggatgatgacatgcaggaaacaaacatctctatcaatgaaattatcatgtatctgcgcaaatcccgatca

SEQ ID NO: 16535 - DNA, 260 bp, Unknown
  Description of Unknown: LeftRegion for integrase B3536 sequence
gtcaacattcaaccccctcgaaatcgaaaggtttagaatctaaaataaaagagccagccgctaacgaccagctccacaagtgatataaataccaccctagacaagttgtattgtatcatttctggagcatccggtcaaatgctgggtgttatttttgtacctattttttaataaaatcaaatataaaggagtgatatactatggcttattgtatttatttaagaaaatccagagctgatagagagttagaactgcaaggt

SEQ ID NO: 16536 - DNA, 260 bp, Unknown
  Description of Unknown: LeftRegion for integrase B3537 sequence
agacggctacccacaaatcattaccactaccaacttcaagcaggtacagaagcaactgaaaaagcagattgtccggaagcctaaaaagcaaccaactccgcccaccaagttttaccgcgggatcatcaatagatactctgatgatgcttttaaacaggctgaacatatctatcaattaatttacagtgaggtggaagtctatggcgaaagttagaattatccccgcccaagtcaaacaaggtaatcgaaaccgacaaatt

SEQ ID NO: 16537 - DNA, 260 bp, Unknown
  Description of Unknown: LeftRegion for integrase B3538 sequence
ttacaacttatttattaaaaaaccgcccctgttggcgcagagacggtttcaaatcggcaataccgaagatggtatcaaccaaccttttgaccaaaatattgtatcatcttcggaacagcttcgcaagcggaacacccgttccccgctggctgttatttttatacccatttttacatatttttacttaggaggatgatgtcatgcaggaaacaaatatctctatcaatgaaattatcatgtatctgcgcaaatcccgatca

SEQ ID NO: 16538 - DNA, 260 bp, Unknown; identical to SEQ ID NO: 16537
  Description of Unknown: LeftRegion for integrase B3539 sequence

SEQ ID NO: 16539 - DNA, 260 bp, Unknown; identical to SEQ ID NO: 16519
  Description of Unknown: LeftRegion for integrase B3540 sequence

SEQ ID NO: 16540 - DNA, 260 bp, Unknown
  Description of Unknown: LeftRegion for integrase B3541 sequence
attttttcaatgtttccgttgattatttgctcggcgcgtccgccgaagaaagtttttcacggttcatcaagtcgtacggcttggatcgtgtttgcgatgcggatcttctcgcaaagttccgcgacgtcgttgcgtccgtcgattccgacgagcattgacggatccgccgccctgtgcggtgcttataattgggtgtaattatgaaagttgtaggatattgcagattttcgtccgaaggtcaaaaggacggttattcaatc

SEQ ID NO: 16541 - DNA, 260 bp, Unknown
  Description of Unknown: LeftRegion for integrase B3542 sequence
tgagtctaaagaatactcattgagatatagcgcttacaataaatatgagggtacagaaataatgttttattcaaataaccttattcctgttaatttctaatttcataatatcgttataaaaagctatgattaaatcaatagcttttctttttactattttttcaatataataaacatataaatagcaatgaggtgatccaatgaaaatagcaatatattctaggaaaagtaaatttactggcaagggcgaaagtattcaa

SEQ ID NO: 16542 - DNA, 260 bp, Unknown
  Description of Unknown: LeftRegion for integrase B3543 sequence
tagtcaacattcaaccccctcgaaatcgaaaggtttagaatctaaaataaaagagccagccgctaacgaccagctccaaagtgatacaatatcaccatagacaagtcatattgtatcacataatggaacatctggcaaaggctgggtgttatttttgtacctattttttaataaaatcaaatataaaggagtgatatactatggcttattgtatttatttaagaaaatccagagctgatagagagttagaactgcaaggt

SEQ ID NO: 16543 - DNA, 260 bp, Unknown; identical to SEQ ID NO: 16513
  Description of Unknown: LeftRegion for integrase B3544 sequence

SEQ ID NO: 16544 - DNA, 260 bp, Unknown
  Description of Unknown: LeftRegion for integrase B3545 sequence
cagcgcttgatcgaatccgaaaagcgcccgtgaccttcttcgtgccccttttgccacccttggcaaaatagccatcaaaaacgccccgcccatgtttccagcatggacgagacgaagtattcaattcacactctttttctttatgcggctcatcaagggattcattcaactgttatcactatttaagggggtgatccaatttgaaagccgtcatatatgcccgcttctccagccacaaccagcgcgaagaatccatcgaa

SEQ ID NO: 16545 - DNA, 260 bp, Unknown
  Description of Unknown: LeftRegion for integrase B3546 sequence
acagatgcgcttgaccctgatatggtccgaagcaaaataacgatgatccgagcagagaaaaacaatgtcgctgtgttctgcatggacgacggttctgagatcgtgaaacgatggaaagaccgctccagagcagaaagctggtcgccggaaatgaaagagcaggccagacagcgggcattgcagacaaggagggtacaaaaatgagcaccgcgacagtccggtcggtcacgatcattccaccgaccatcaaccctttgacg

SEQ ID NO: 16546 - DNA, 260 bp, Unknown
  Description of Unknown: LeftRegion for integrase B3547 sequence
gctggataaactggccagtctctttgagagcgccatgacggaggtcgctgtcgtgaactacccgcgcaagagcgcgtaaagatctcgaaccaaaaaagatgcccccggcgctaccaacaccgagggcgatcaaagggcagctgactatcgacaggtcttactgcccttctatcttacaacagaataggaggtttcgcaacatgaaaatgatgcagaacgacaaccggacggccatcacctactaccgctattccagccac

SEQ ID NO: 16547 - DNA, 260 bp, Unknown
  Description of Unknown: LeftRegion for integrase B3548 sequence
agccttcgaccgaggccttataactatcactccttccatgaaaatctatgtttctccgataattttggatagccctcaggacgcttttacagcccgctggctggcttctcttgacggaatggttttaccccccccccccgatttccgccgcgtagagagcttctggagtaccataacgacgaaatttttaggagggtcacatgaatacagtaatttatgctcggtattctgccggcccgagacagaccgaccagagtatc

SEQ ID NO: 16548 - DNA, 260 bp, Unknown
  Description of Unknown: LeftRegion for integrase B3549 sequence
gttctcttgttaagtatattatatcaaatcagaggttttagtcaataaaaaaagagccagcccctaacgaccagctccaagtgatacaatatcaccctagacaagtcatattgtatcacataatggaacatctggcaaaggctgggtgttatttttgtacctattttttaataaaatcaaatataaaggagtgatatactatggcttattgtatttatttaagaaaatccagagctgatagagagttagaactgcaaggt

SEQ ID NO: 16549 - DNA, 260 bp, Unknown
  Description of Unknown: LeftRegion for integrase B3550 sequence
ctgattcttaaatatttctttcaaatgaagcaaataaaaaccgccccagtacgccaataccgggacggtggtggatctccgaagagatacctcattccgcaaaaatattgtatcatcttcggagcggctgtacaaccagaacatttgtgtggccgttatttttgtacccattttcacatattttaaaccgaggtgatattatgaagtttttagatgtcgcgaaacttttaaatgtatgtatctacctgcgtaaatcccgt

SEQ ID NO: 16550 - DNA, 260 bp, Unknown
  Description of Unknown: LeftRegion for integrase B3551 sequence
aacaattgtttatattttttcaaatgtaaaaaccgcccagtgttaccagcaccgaacggctttacatagattactgtacggttccggaagaaccgtgatataacctcatggcattaagattatatcacaatcctccggcacctgtacaggtgtattttttatactcttttttcatacttttgataaggaggattgatggtatggaacaatattgtatgtatttacgtaagtcccgtgcggatcgggaagcggaacagcgt

SEQ ID NO: 16551 - DNA, 260 bp, Unknown
  Description of Unknown: LeftRegion for integrase B3552 sequence
acagggacggcatcgtaactcggattttcgctatattgcgatagcctactatacgataatatcatacatctgaagatgtacaactagctgcaaaaatattgtatcatcttcggaacagcttcgcaagcggaacacccgttccccgctggctgttatttttatacccatttttacatatttttacttaggaggatgatgacatgcaggaaacaaacatctctatcaatgaaattatcatgtatctgcgcaaatcccgatca

SEQ ID NO: 16552 - DNA, 260 bp, Unknown
  Description of Unknown: LeftRegion for integrase B3553 sequence
atcaatgcttgatgtaattgcacataataaataattattacaaataaaaaaagagccagccactaaggaccagctccgaagtgatacaatatcaccatagacaagtcatattgtatcacataatggaacatctggcaaaggctgggtgttatttttgtacctattttttaataaaatcaaatataaaggagtgatatactatggcttattgtatttatttaagaaaatccagagctgatagagagttagaactgcaaggt

SEQ ID NO: 16553 - DNA, 260 bp, Unknown
  Description of Unknown: LeftRegion for integrase B3554 sequence
tctcaccgcccatacctagcagcggcatcaggtgtttaaacgccagcgcgatatccagatcgttcccgcctacacggcagccactgtgtcccagcaggctgttttcgcgatcggcgcgctgatgccattgcggccccatcagcagtagtgaacagttgatgtataatgtacgccacagtaagtaacgagagaacaagaagatgaaagtacccgtatggagctacgcacgtgtatcaacactgaatcaggttgatggtttt

SEQ ID NO: 16554 - DNA, 260 bp, Unknown
  Description of Unknown: LeftRegion for integrase B3555 sequence
ttagtcaacattcaaccccctcgaaatcgaaggttttagaatctaaaataaaagagccagcccctaacgaccagctccaagtgatacaatatcaccctagacaagtcatattgtatcacataatggaacatctggcaaaggctgggtgttatttttgtacctattttttaataaaatcaaatataaaggagtgatatactatggcttattgtatttatttaagaaaatccagagctgatagagagttagaactgcaaggt

SEQ ID NO: 16555 - DNA, 260 bp, Unknown
  Description of Unknown: LeftRegion for integrase B3556 sequence
gtactgtttttctttgtctaaaaccttgtatttagttttttatctaaaattataacttcccaatctacttaaattactatgttttacttatatggcactatagtaaatatttttaagtacaaaattaataaatgcattgaatattcattttaactatttttttagcatgatataattatcatgaaaggtggttttataatatgaggattgcaatttattctagaaagtcggtttttactggtaaaggtgactctatagaa

SEQ ID NO: 16556 - DNA, 260 bp, Unknown; identical to SEQ ID NO: 16551
  Description of Unknown: LeftRegion for integrase B3557 sequence

SEQ ID NO: 16557 - DNA, 260 bp, Unknown
  Description of Unknown: LeftRegion for integrase B3558 sequence
tttttaccttagatatatacctacctttatacctaacagaataaaaaataatgaaatttatattaaataacaagaacaatacaaacttattatatcttaaaccccagtaaatacgcacatttaagaattaataaagataatgcgatatggggtaaattatatacccttttttacatatttttacttaggaggatgatgacatgcaggaaacaaacatctctatcaatgaaattatcatgtatctgcgcaaatcccgatca

SEQ ID NO: 16558 - DNA, 260 bp, Unknown
  Description of Unknown: LeftRegion for integrase B3559 sequence
caaatcttaatgtaccagcccttgatgtgtatgaagggcgcaaaagatttaatgatatggtatgggtaacagcaaaggggaaacgttatcactctagccaaggttgttccaacatgaatgctcccgaagaaatcccgcgatccgaagccgaagatatggggtataccccatgctcaaaatgttattaacgaggtaattctatgccatacttaatctatctacgaaagagccgcgccgacatggatgccgaagcccgtggc

SEQ ID NO: 16559 - DNA, 260 bp, Unknown; identical to SEQ ID NO: 15777
  Description of Unknown: LeftRegion for integrase B3560 sequence

SEQ ID NO: 16560 - DNA, 260 bp, Unknown; identical to SEQ ID NO: 16513
  Description of Unknown: LeftRegion for integrase B3561 sequence

SEQ ID NO: 16561 - DNA, 260 bp, Unknown
  Description of Unknown: LeftRegion for integrase B3562 sequence
aatttgatttaaagaaaaaacaattactcgaactataacattttaaataaaaagagccagccactaaggaccagctccaagtgatacaatatcaccctagacaagtcatattgtatcacataatggaacatctggcaaaggctgggtgttatttttgtacccattttttaataaaatcaaatataaaggagtgatatactatggcttattgtatttatttaagaaaatccagagctgatagagagttagaactgcaaggt

SEQ ID NO: 16562 - DNA, 260 bp, Unknown
  Description of Unknown: LeftRegion for integrase B3563 sequence
attttttaggcatctgccagctcctgaaggcgctccgaacggtcgggttttctgagattgaaatcaaaaagatcgcgcggcggatcgctgtcgagcttggtgcaaatttcacactttacgcttgatttttctccgttttgttcatagctattctgaaaatattgtagtagtgtgtgttgctgcagagggaggtgaacggcatggcaaagaagcagaccaacggaaatcttgcgctggaacagcagcgcgtcattgtaatc

SEQ ID NO: 16563 - DNA, 260 bp, Unknown
  Description of Unknown: LeftRegion for integrase B3564 sequence
tagtcaacattcaaccccctcgaaatcgaaggttttagaatctaaaataaaagagccagccactaaggaccagctccaaagtgatacaatatcaccatagacaagtcatattgtatcacataatggaacatctggcaaaggctgggtgttatttttgtacctattttttaataaaatcaaatataaaggagtgatatactatggcttattgtatttatttaagaaaatccagagctgatagagagttagaactgcaaggt

SEQ ID NO: 16564 - DNA, 260 bp, Unknown
  Description of Unknown: LeftRegion for integrase B3565 sequence
aaaaaacaatttttatcaaaacaaaaaaccggctcctgcgtcaacaagaaccggcaaggaataacatccgaaaatgatactccaacttagcaaaaatattgtatcatcttcggaacagcttcgcaagcggaacacccgttccccgctggctgttatttttgtacccttttttacatatttttacttaggaggatgatgtcatgcaggaaacaaatatctctatcaatgaaattatcatgtatctgcgcaaatcccgatca

SEQ ID NO: 16565 - DNA, 260 bp, Unknown
  Description of Unknown: LeftRegion for integrase B3566 sequence
ccgcagccccacattgttggctattcagaatacctggatacggcataccggttttctttttggtaaagaaaaagccccggctttcaccggggcatcccatgagttgtgctcatgtaatctcgcaaattatagtatagcactgctccgggatattttgaagtattccgggcatttttatgccctttttaggaggttttgctgtgcattttggaatttatggaagaaaatcatattttaaggacacctcagacagcacacag

SEQ ID NO: 16566 - DNA, 260 bp, Unknown
  Description of Unknown: LeftRegion for integrase B3567 sequence
gtggtgggatatattcattaaatatagcacagtcgccaggtgctggtaacaccggacggcttcacatagattactgtacggttccggaagaaccgtgatataacctcatcgcaaaaagattatatcacaatcctccggcacctgtacaggtgtattttttatactcttttttcatactttgggtaaggaggattgatggtatggaacaatattgtatgtacttgcgtaaatcccgtgcagatcgggaagcggaacagcgt

SEQ ID NO: 16567 - DNA, 260 bp, Unknown
  Description of Unknown: LeftRegion for integrase B3568 sequence
gcagatgcccttgactctgatatggtccgaagcaaaataacgatgatccgagcagagaaaaacaatgtcgttgtgttctgcatggacgacggttctgaaatcgtgaaacgatggaaagaccgctccagagcagaaagttggtcgccggaaatgaaagagcaggccagacagcgggcattgcagacaaggagggtacaaaaatgagcaccgcagcagtccggtcggtcacaatcattccaccaaccatcaacattctgacg

SEQ ID NO: 16568 - DNA, 260 bp, Unknown
  Description of Unknown: LeftRegion for integrase B3569 sequence
gcaatggcaatacagcttatccttatttatatactgtataaatgaggtggtttcagtgaaagggaaaattaaaatcaatgatgaattaaaagcaagttacagacgtgggattgtaaaggagttgtattcaaggggaatgataacggagcagcagtacaagagattgcttatgaaacagtgacagcggggaggtgtcggcggtgcttaaagtggcggcatatgcgcgtgtttcgacagacaaggatgatcaaatcaattct

SEQ ID NO: 16569 - DNA, 260 bp, Unknown; identical to SEQ ID NO: 16513
  Description of Unknown: LeftRegion for integrase B3570 sequence

SEQ ID NO: 16570 - DNA, 260 bp, Unknown
  Description of Unknown: LeftRegion for integrase B3571 sequence
tatatcagcgtaatatgttcttggtgcatccattggagaggcaagtataccgtcagtttgaatcatttatccggacaaacaagtaaaaacgccgcacctgctctaacaggtacggcgaattgatggagggatgctatgatagtacgaaaccatttctattatagcacatttcccccgaaaaatgcaagagggaatcaataatggaaacatattgcatctatctccggaaatcacgtgcggatgcggatgcagaggcacgt

SEQ ID NO: 16571 - DNA, 260 bp, Unknown
  Description of Unknown: LeftRegion for integrase B3572 sequence
tgaatctgaaaaataagaaatagcatccccgctctgacaaagtaggatgctatttcttaatccttatttcgccagaaacggataggttccagctatcgttccggctgtcttgttaagtatattatacaaacgtttgaaacatttgtcaaacacatttgtttaacaaatccttcttattatatgatatgaggtgaaccaatatgccatattgcctgtatttgagaaaatccagaactgatctggatgcagaagccaacgga

SEQ ID NO: 16572 - DNA, 260 bp, Unknown
  Description of Unknown: LeftRegion for integrase B3573 sequence
aatatgctttaaatgtcaatttaaaaaccggctcctgctaccaacaggaaccggcaaggaataacatccgaaaatgatactccgaattcgcaaaaatattgtatcatcttcggaacagcttcgcaagcggaacacccgttccccgctggctgttatttttatacccatttttacatatttttacttaggaggatgatgtcatgctggaaacaaatatctctatcaatgaaattattatgtatctgcgaaaatcccgatca

SEQ ID NO: 16573 - DNA, 260 bp, Unknown
  Description of Unknown: LeftRegion for integrase B3574 sequence
gtttaaaaacaaccgaaaataaaaaccggctcctgttggcgcaagaaccggcaatagaatatatatccgaagatagatactctaaacacgcaaaaatattgtatcatcttcggaacagcttcgcaagcggaacactcgttctttgctggctgttatttttatacccatttttacatatttttacttaggaggatgatgacatgcaggaaacaaacatctctatcaatgaaattatcatgtatctgcgcaagtcacgatca

SEQ ID NO: 16574 - DNA, 260 bp, Unknown
  Description of Unknown: LeftRegion for integrase B3575 sequence
cacacatactcataaatagaaaaaaccggctcctgcggcaacaggaaccggaaactgaatataaatccgaagataatattcaagaacgtgcaaaaatattgtatcatcttcggaacagcttcgcaagcggaacacccgttccccgctggctgttatttttgtacccatttttacatatttttacttaggaggatgatgtcatgcaggaaacaaatatctctatcaatgaaattatcatgtatctgcgcaaatcccgatca

SEQ ID NO: 16575 - DNA, 260 bp, Unknown
  Description of Unknown: LeftRegion for integrase B3576 sequence
agtttaaaaacaaccgaaaataaaaaccggctcctgcgtcaacaggaaccggcaatagaatatgtatccgaagataatactctgcaatgacaaaaatattgtatcatcttcggaacagcttcgcaagcggaacactcgttccccgctggctgttatttttatacccatttttacatatttttacttaggaggatgatgacatgcaggaaacaaacatctctatcaatgaaattatcatgtatctgcgcaaatcccgatca

SEQ ID NO: 16576 - DNA, 260 bp, Unknown; identical to SEQ ID NO: 16517
  Description of Unknown: LeftRegion for integrase B3577 sequence

SEQ ID NO: 16577 - DNA, 260 bp, Unknown
  Description of Unknown: LeftRegion for integrase B3578 sequence
aaatatgctttaaatgtcaatttaaaaaccggctcctgcttcaacaggaaccggcaaggaataacatccgaaaatgatactccaactatgctaaaatattgtatcatcttcggaacagcttcgcaagcggaacacccgttccccgctggctgttatttttatacccttttttacatatttttacttaggaggatgatgacatgcaggaaacaaacatctctatcaatgaaattatcatgtatctgcgcaaatcccgatca

SEQ ID NO: 16578 - DNA, 260 bp, Unknown
  Description of Unknown: LeftRegion for integrase B3579 sequence
gctggataagctggccagtctctttgagagcgccatgacggaggtcgccgttgtaaactacccgcgcaagagcgcgtaaagatctcgaaccaaaaaagatgcccccggcgctaccaacaccgagggcgatcaaagggcagctgactatcgacaggtcttactgcccttctatcttacaacagaataggaggtttcgcaacatgaaaatgatgcagaatgacaaccggacggccatcacctactaccgctattccagccac

SEQ ID NO: 16579 - DNA, 260 bp, Unknown
  Description of Unknown: LeftRegion for integrase B3580 sequence
tatatcagcgtaatatgttcttggcgcatccattggagaggcaagtataccgtcaatttgaagcatttatccggacaaacaagtaaaaacgccgcacctgctctaacaggtacggcgaattgatgggagggatgctatgatagtacgagacaatttctattatagcatatctctccgaaaaacgcaagagggaatcaataatggaaacatattgtatctatctccgaaaatcacgtgcagatgcggatgcagaggcacgt

SEQ ID NO: 16580 - DNA, 260 bp, Unknown; identical to SEQ ID NO: 16517
  Description of Unknown: LeftRegion for integrase B3581 sequence

SEQ ID NO: 16581 - DNA, 260 bp, Unknown
  Description of Unknown: LeftRegion for integrase B3582 sequence
atgtttttgaggaagggacgccaagcccggaagaaacagccgctgcagaggcggcttatgaaaagagcttaggtattgcgccgagcacggctgcatctgcttcgagtaccaccgaagacacggcctgagtcgactgaagaaataggcaatggctgagggtcccccggtgaagccaaaaaagaaaagggagggccgtccgggtggacagctctccctttttaatgcaggaaaggatgggtattgaactcatggcaaaaaat

SEQ ID NO: 16582 - DNA, 260 bp, Unknown
  Description of Unknown: LeftRegion for integrase B3583 sequence
atgcaaaaatggctatgctttatgcgtattaatatattttaacataataaaaagagccagcccctaacgaccagctccaagtgatacaatatcaccctagacaagtcatattgtatcacataatggaacatctggcaaaggctgggtgttatttttgtacccattttttaataaaatcaaatataaaggagtgatatactatggcttattgtatttatttaagaaaatccagagctgatagagagttagaactgcaaggt

SEQ ID NO: 16583 - DNA, 260 bp, Unknown
  Description of Unknown: LeftRegion for integrase B3584 sequence
agcgcaagcaaagacatgctccaatccgcatcacgacctagccgccatttttccagtgacggaaaaatagccatcaaaaaacgccccgcccatgtttccagcatggacgagacgaagtattcaattcacactctttttctttatgcggctcatcaagggattcattcaactgttatcactatttaagggggtgatccaatttgaaagccgtcatatatgcacgcttctccagccacaaccagcgcgaagaatccatcgaa

SEQ ID NO: 16584 - DNA, 260 bp, Unknown
  Description of Unknown: LeftRegion for integrase B3585 sequence
caaaaatggctatgctttatgcgtattaatatattttaacataataaaaagagccagcccctaacgaccagctccacaagtgatataaataccaccctagacaagttgtattgtatcatttctggagcatccggtcaaatgctgggtgttatttttgtacctattttttaataaaatcaaatataaaggagtgatatactatggcttattgtatttatttaagaaaatccagagctgatagagagttagaactgcaaggt

SEQ ID NO: 16585 - DNA, 260 bp, Unknown
  Description of Unknown: LeftRegion for integrase B3586 sequence
gtcggcattctcgataaacttcaagatttatcggacgtcaaaaaccttgcagccgtttacgagctcgtttcgtctttgagcgacaaggaattcagcgaaagcaataaataaaaaagaaacgaactgtcgtttcgtccgtcgatgccgacgagcattgacggctccgccgccctgtgcggtgcttataattgggtgtaattatgaaagttgtaggatattgcagattttcgtccgaaggtcaaaaggacggttattcaatc

SEQ ID NO: 16586 - DNA, 260 bp, Unknown; identical to SEQ ID NO: 16551
  Description of Unknown: LeftRegion for integrase B3587 sequence

SEQ ID NO: 16587 - DNA, 260 bp, Unknown; identical to SEQ ID NO: 16532
  Description of Unknown: LeftRegion for integrase B3588 sequence

SEQ ID NO: 16588 - DNA, 260 bp, Unknown; identical to SEQ ID NO: 16534
  Description of Unknown: LeftRegion for integrase B3589 sequence

SEQ ID NO: 16589 - DNA, 109 bp, Unknown
  Description of Unknown: LeftRegion for integrase B3590 sequence
atttgcaacaactgctatatcttacagaagcagaggtgagttttgagctatgtactacctgatgtatctgcgcaagtcgcgggcggatctggaggcggaggcgcgcggc

SEQ ID NO: 16590 - DNA, 260 bp, Unknown
  Description of Unknown: LeftRegion for integrase B3591 sequence
actaagacgctatttttacagaacattttgaaaccgccccactctaccaaagcaggacggtcacgcttccgaatgatacgaaagccctaagcaagcatattgtatcattcggagcagccaaacgcaagcggaacaaacgttccttgctggctgttatttttatacccatttttcatatatttttatgagggagtgatactatgtacgaattaactcaatcaatggaatccttaagtgtagatgaaattattgtctatctg

SEQ ID NO: 16591 - DNA, 260 bp, Unknown; identical to SEQ ID NO: 13018
  Description of Unknown: LeftRegion for integrase B3592 sequence

SEQ ID NO: 16592 - DNA, 260 bp, Unknown
  Description of Unknown: LeftRegion for integrase B3593 sequence
tatattccgataccctatggatagggtatctataccgtatccataccgtagcgatacttcgcgtgcgcgcgtgcgtgtgcgcgcgatcgtgcgcgcactatctctgtacctgtctctgtatctgagactgtatctgtaatctgttcctgattctgaagttctactactgcaaatctatcgttagaaggggggtggcgctgttgccgaaaaagactgcaaagcacccggcaaagccgaagcggggcaagaaactggaaatc

SEQ ID NO: 16593 - DNA, 260 bp, Unknown
  Description of Unknown: LeftRegion for integrase B3594 sequence
acatatttttgtcaatttaaaaccgcccctgcggaccggacaccagtcaacaacagaggcggaaacgtgctccgaagatacacgccctaagcaagtatattgtatcattcggaacagccaaacgcaagcggaacaaacgttccttgctagctgttatttttatacccatttttcatatatttttatgagggagtgatactatgtacgaattaactcaatcaatggaatccttaagtgtagacgaaattattgtctatctg

SEQ ID NO: 16594 - DNA, 260 bp, Unknown
  Description of Unknown: LeftRegion for integrase B3595 sequence
ttgggcgctttccaaaaggaaaacaaaagagatgtgtcatgtgcagaggtgggtctatcgaaaactggatatttatatctgcggtaggagagttgcgtggagtgttcggaataatggtagggcaaatttcaaaggcttatggaattgatgttgaggatgagttagcacaaatcattcccgaataattaggaggcgaatcaatgaacattgtcatttatgctcgctattccagccacagccagaccgagcaatccattgag

SEQ ID NO: 16595 - DNA, 260 bp, Unknown; identical to SEQ ID NO: 13516
  Description of Unknown: LeftRegion for integrase B3596 sequence

SEQ ID NO: 16596 - DNA, 260 bp, Unknown
  Description of Unknown: LeftRegion for integrase B3597 sequence
ccgatgaccggggaactgtaacaatccctatccaggaatctattcagctttctgaggaagaacgtattttgatttccgcatttaggagtgcttctatagaaggacgcatgagaatcatccaagtctgtatgaatgaaaaggatgcaaaaggggaaactatcattgcaggataataagcattgaagaatggaggaagaaccatgtacgaagagattaagactgcttgtctatatctgcgatattcaagcagcaaccaaact

SEQ ID NO: 16597 - DNA, 260 bp, Unknown
  Description of Unknown: LeftRegion for integrase B3598 sequence
actaagacgctatttttacagaacattttgaaaccgccccactctaccaaagcaggacggtcacgcttccgaatgatacgaaagctctaagcaagcatattgtatcattcggagcagccaaacgcaagcggaacaaacgttccttgctggctgttatttttatacccatttttcatatatttttatgagggagtgatactatgtacgaattaactcaatcaatggaatccttaagtgtagacgaaattattgtctatctg

SEQ ID NO: 16598 - DNA, 260 bp, Unknown
  Description of Unknown: LeftRegion for integrase B3599 sequence
aattaacagcataaatgaaaaccgcctctgttgacgcagagacggtttcaaatcggcaataccgaagatggtatcaaccaaccttttgaccaagatattgtatcatcttcgggcagtcatcgcaagcggaacacctgttctttgctggctgttatttttatacccttttttacatacatttacacaggaggaatgatactatgcaggaaaatatctccatcaatcaaattatcatgtatctgagaaaatccagatcagat

SEQ ID NO: 16599 - DNA, 260 bp, Unknown
  Description of Unknown: LeftRegion for integrase B3600 sequence
tgacctcatgtccttgcagtcccagctcaaaaacgagattgcctctctgcttgaccggctcatgcaagccgatatggaaatcgcttttaacgtcaagaacggcgtaacaggcgcattctccggcaagacggcaatgtgattgttgttgacttccgcccctccgtgtgaggggcttttcttttactgaggaggtgtttattttggcttactgcctttacctgcgtaaatcccgtgccgacatcgaggcggaggctcacggc

SEQ ID NO: 16600 - DNA, 260 bp, Unknown
  Description of Unknown: LeftRegion for integrase B3601 sequence
gaaggagcgtagcatgaataaagcgttattgctggcattgaacgagcacatataccttcagggattaatcagtaaagaaatgaaagagaaaattgacattgaaattctctctgaaaattagcttaaactattgagcggagatgagatagaagttataataatcttatctctgctcttccaaacagaagggagaacggggcatgaacgtttatcgcactagagaaatactgaagacttgcagtattttcgatttgaaatta

SEQ ID NO: 16601 - DNA, 260 bp, Unknown
  Description of Unknown: LeftRegion for integrase B3602 sequence
gagctggtgcgacaggtcacggatgaccctttcagcgtcaaaaaaatcattgccgatgacggcaacaccctgcactttcacttttcagacggcactgcggtcacacgcacctggacagaccgttcacgagctgaaagctggacgccggaaatgaaagaaaaggcacgacagcagtcactggcaagaaggaggcaaaaatcatgaacactgcggttcggacggttacggtgataccaccgtccatcaaccccatgacccac

SEQ ID NO: 16602 - DNA, 260 bp, Unknown; identical to SEQ ID NO: 14830
  Description of Unknown: LeftRegion for integrase B3603 sequence

SEQ ID NO: 16603 - DNA, 260 bp, Unknown
  Description of Unknown: LeftRegion for integrase B3604 sequence
acaggtcttttgattgtgtgtagtgacccggcgcaaaagaaaattgatagagccgatgccctgaatattccgattgtttcggagcagcaatggtttgaacttatgccggaacttgaggccgttggaatatggaacggaaagcaaattctgtttgcggacaatgatggcatctaccgtgttgaagtgggcggtgaaagctgatggccagaaaaaagaatattgctgctggcctcgatgccgtcatctatgcccggtactca

SEQ ID NO: 16604 - DNA, 260 bp, Unknown
  Description of Unknown: LeftRegion for integrase B3605 sequence
aggtgacgatgatagggaatactgaaatatacataataaacaatgataaatatatagtagaagttcaatttggcgatgaagaattggaaaatattattgcagatataattgaaaaacaaaacctatacagttgacaaccaagtattatcgtgttacaattaataagttgtaacacgattttttattgttaggagaaatatatgatttataatgccgctttatattgccgtttgtcaaaagatgataataatgttggcgat

SEQ ID NO: 16605 - DNA, 260 bp, Unknown
  Description of Unknown: LeftRegion for integrase B3606 sequence
ttcaacgagcagatttttataaacaaggtttcccaaatacgcatccttgataacaaccgagtgcagttccttctttccaatggcaaaaccgaagaacgcacttggaaagaccgctcaaggtcggaaagctggacggacgaaatgaaggaaaccgcacggcaaagaacactgcaacgctacgcatcgaaagaggtggaatgatggcaagagaagtaagagtaatccctgcaagtgtacacaaatttacgaccgttcctttc

SEQ ID NO: 16606 - DNA, 260 bp, Unknown
  Description of Unknown: LeftRegion for integrase B3607 sequence
cgcaacattatggcgattcttgaagctcgaagccgtgagatcatcgccaaatggaccgcttattttggccaggcgcatttctactgctaaacaaaaaacgcccgccgggcgcatcggtgggcatgggaagatagcgtattcagccgatattcagtattatggcacaatactacctttccgtaaatacaagggaggctcttatggcaaaaaagaaaaagtcccttgggggcaacgccatcgtctatgcccgctattcgtcc

SEQ ID NO: 16607 - DNA, 260 bp, Unknown
  Description of Unknown: LeftRegion for integrase B3608 sequence
cagcattactgtttaattttaaaaattcatcaaatatcaccagcattccctcctacaaacattatattgtaaaagagcaattatgtaaaggaaaatactacttgagtttccgcatttttatccacgaccacattattttctattgacagtcacaaataaaagatataaattgtacatatactacaaatgggggtacgtttatggatgcgattgactctactaaatcttatgcgatgtatttaagaaaatcacgaaaagat

SEQ ID NO: 16608 - DNA, 260 bp, Unknown
  Description of Unknown: LeftRegion for integrase B3609 sequence
agattttttcgataccattaactaaataaaaaaccgccccactctaccaaagcaggacggtcacgcttccgaatgatacgaaagccctaagcaagcatattgtatcattcggagcagccaagcgcaagcggaacaaatgttccttgctggctgttatttttatacccatttttcatatatttttatgagggagtgatactatgtacgaattaactcaatcaatggaatccttaaatgtagacgaaattattgtctatctg

SEQ ID NO: 16609 - DNA, 260 bp, Unknown
  Description of Unknown: LeftRegion for integrase B3610 sequence
ctatgcaaagcactcagcgacaatgcttgtctttcactggcggttctcctcgctccgctggccttgacagtaatgctaaccatcatcataattaaaagataaagcaaaaaagccccgccttttggcggggcaaaaaaagagcctttgatagaacaaatgttttcttatcgttaatcatatgattaattggaggtgacgatatgcccgaacaatactgcttatatctccgtaaatcgagagcggatatggatgcagagaaa

SEQ ID NO: 16610 - DNA, 260 bp, Unknown
  Description of Unknown: LeftRegion for integrase B3611 sequence
tgacctcatggccttgcagtcccagctcaaaaatgagattgcctctctgcttgaccggctcatgcaagccgatatggaaatcgcttttaacgtcaagaacggcgtaaccggcgtattctccggcaagacggcaatgtgattgttgttgacttccgcccctccgtgtgaggggcttttattttaccgaggaggtgtttattttggcttactgcctttacctgcgtaaatcccgtgccgacatcgaggcggaggctcacggc

SEQ ID NO: 16611 - DNA, 260 bp, Unknown
  Description of Unknown: LeftRegion for integrase B3612 sequence
ggatatacacaagttacggaaaaattctacaccacaaaatcagggaaactgtttgtgcgtctcagaaatagcaatgatgttgaatcgattctcgacactttgaataaagctaataatattgttttcgctgtttctttcgcgctgaccattatttcaattatagcaagtataatttattcttttatgcattgaggggttttatgaaagcagtcatctacgcccggtactcgccgggccccaaccagaaggataagagcgtt

SEQ ID NO: 16612 - DNA, 260 bp, Unknown
  Description of Unknown: LeftRegion for integrase B3613 sequence
ccgatgaccggggaactgtaacaatccctattcaggaatctattcagctttctgaggaagaacgtattttgatttccgcatttaggagtgcttctatagaaggacgcatgagaattatccaagtctgtatgaatgaaaaggatgcaaaaggggaaactatcattgcaggataataagcattgaagaatggaggaagaaccatgtacgaagagattaagactgcctgtctatatctgcgatattcaagcagcaaccaaact

SEQ ID NO: 16613 - DNA, 260 bp, Unknown; identical to SEQ ID NO: 13341
  Description of Unknown: LeftRegion for integrase B3614 sequence

SEQ ID NO: 16614 - DNA, 260 bp, Unknown; identical to SEQ ID NO: 14039
  Description of Unknown: LeftRegion for integrase B3615 sequence

SEQ ID NO: 16615 - DNA, 260 bp, Unknown
  Description of Unknown: LeftRegion for integrase B3616 sequence
acatatttttgtcaatttaaaaccgcccctgcggaccggataccagccaacaacagaggcggaaacgtgctccgaagatacacgccctaagcaagcatattgtatcattcggagcagccaaacgcaagcggaacaaatgttccttgctggctgttatttttatacccatttttcatatatttttatgagggagtgatactatgtacgaattaactcaatcaatggaatccttaagtgtagacgaaattattgtctatctg

SEQ ID NO: 16616 - DNA, 260 bp, Unknown
  Description of Unknown: LeftRegion for integrase B3617 sequence
atttgcgtatgtgcgaggacgttttgatgtataataaacgctttgcgtttattataccacagaaccaaatcttttacaacggtaaacagtatcaaatttgcagcttttacgctttagcgtcttgaattttatttgagaatagtgtataatataaagtgcaaatattccgattctgtctgctgaaagaaaggacggttattatgaacatacagcagaacaggattacagcgctttattgcaggctcagccgagatgatgat

SEQ ID NO: 16617 - DNA, 260 bp, Unknown; identical to SEQ ID NO: 13967
  Description of Unknown: LeftRegion for integrase B3618 sequence

SEQ ID NO: 16618 - DNA, 260 bp, Unknown
  Description of Unknown: LeftRegion for integrase B3619 sequence
acaggtcttttgattgtgtgtagtgacccggcgcaaaagaaaattgacagagccgatgacttgaatattccaatcatttcagagcagcaatggtatgaactcatgccagaacttgaagccgttggaatgtggaacggaaagcaaattctgtttacggataatgatggcatctaccgtgttgaagtgggcggtgaaagctgatggccagaaaaaagaatattgctgccggcctcgatgccgtcatctatgcccggtactca

SEQ ID NO: 16619 - DNA, 260 bp, Unknown
  Description of Unknown: LeftRegion for integrase B3620 sequence
gcatctgatcccctatggatagggtatctataccgtatccatagggtagtgatacctcgcgtgcgcgtgcgcgggtgcgcgagatcgggcgcgcactgttactgtctctgtatctgtaactggtactgtatctgtaaactgttatctgtttctgtatttctatcttaggaaatctatcgttagaagaaggaggtggcgctgtgcctaaaaaacctacaaagcacccggccaagccgaaacggggcaagaagctggaaacc

SEQ ID NO: 16620 - DNA, 260 bp, Unknown
  Description of Unknown: LeftRegion for integrase B3621 sequence
ttaaccgggaactacgaagctaccgtctactacaaggctggtggcaccgacatcatcacttgggagccggttcccaagaaaagctacccacatacagaagaatacaaagagcttatgcgagagcgtatgaacgaatactggacagacgagcgcaaagctgaaatgagtacaagagtaaaaaagttaaggagtgagaaacattggtcgtccaaaagaaagtaaccaccataccggcatcgctgacccgctttacagcgacg

SEQ ID NO: 16621 - DNA, 260 bp, Unknown
  Description of Unknown: LeftRegion for integrase B3622 sequence
gtctgacctcatggccttgcagtcccagctcaaaaacgagattgcctctctgcttgaccggctcatgcaagccgatatggaaattgcttttaacgtcaagaacggcgtaacaggcgagttctccggcaagacagcaatgtaatcgttgttgatttccgcccctctgtatgaggggcttttttactgaggaggtgtttattttggcttactgcctttacttgcgtaaatcccgtgccgacatcgaggcggaggctcacggc

SEQ ID NO: 16622 - DNA, 260 bp, Unknown
  Description of Unknown: LeftRegion for integrase B3623 sequence
gatggaagaggtgtttgatgcgagggtccaccgcattgaggaaagatactcgcgtatgctcaaaatgcaaaacaggtggcttcggtttacggttatcttgtgtctttgccttaccgtgtttatcatcgtcatgctgttgtatgatgttgcgcatccggacatcggatggatacgagatcatcttaattagggagaaaaaaatggaaagtacagcgcttgcagatgttgtcgtttatgccagatatagctccgcagggcaa

SEQ ID NO: 16623 - DNA, 260 bp, Unknown; identical to SEQ ID NO: 15161
  Description of Unknown: LeftRegion for integrase B3624 sequence

SEQ ID NO: 16624 - DNA, 260 bp, Unknown
  Description of Unknown: LeftRegion for integrase B3625 sequence
gcgtcgctttgcagagttttacggcgtggggcttgattatttcggtgtatcaacagaaaatgaaagttttgaattgttaagccgtgctaaaaatatttttctcaacaaagacattccaaaagaagaacgagaacggctttataaagaagtaatgaaaatgtatcttgaaatgcctgaataaacatcaaaggagcaacataatggggaaattcatcaagaataaagcagatataaaaagggtggtagcatacgcccgattt

SEQ ID NO: 16625 - DNA, 260 bp, Unknown; identical to SEQ ID NO: 13967
  Description of Unknown: LeftRegion for integrase B3626 sequence

SEQ ID NO: 16626 - DNA, 260 bp, Unknown
  Description of Unknown: LeftRegion for integrase B3627 sequence
acaggtcttttgattgtgtgtagtgatacagcgcaaaagaaaattgacagagccgatgccttgaatattccaatcatttcagagcagcaatggtatgaactcatgccagaacttgaagccgttggaatgtggaacggaaagcaaattctgtttgcggacaatgatggcatctaccgtgttgaagtggacggtgaaagctgatggccagaaaaaagaatattgctgctggcctcgatgccgtcatctatgcccggtactcg

SEQ ID NO: 16627 - DNA, 260 bp, Unknown
  Description of Unknown: LeftRegion for integrase B3628 sequence
acatatttttgtcaatttaaaaccgcccctgcggaccggacaccagtcaacaacagaggcggaaacgtgctccgtagatacacgccctaagcaagcatattgtatcattcggagcagccaaacgcaagcggaacaaacgttccttgctggctgttatttttatacccatttttcatatatttttatgagggagtgatactatgtacgaattaactcaatcaatggaatccataagtgtagatgaaattattgtctatctg

SEQ ID NO: 16628 - DNA, 260 bp, Unknown
  Description of Unknown: LeftRegion for integrase B3629 sequence
acatatttttgtcaatttaaaaccgcccctgcggaccggacaccagtcaacaacagaggcggaaacgtgctccgtagatacacgccataagcaagcatattgtatcattcggagcagccaaacgcaagcggaacaaatgttccttgctggctgttatttttatacccatttttcatatatttttatgagggagtgatactatgtacgaattaactcaatcaatggaatccttaagtgtagacgaaattattgtctatctg

SEQ ID NO: 16629 - DNA, 260 bp, Unknown
  Description of Unknown: LeftRegion for integrase B3630 sequence
caagacggtgacaaattgtcaccaactaaaaatgcccccggcactgcaaataccagaggcgcacgcttccgaatgatacgaaagccctaagcaagcatattgtatcattcggagcagccaaacgcaagcggaacaaacgttccttactggctgttatttttatacctatttttcatatatttttatgagggagtgatactatgtacgaattaactcaatcaatggaatccttaagtgtagacgaaatcattgtctatctt

SEQ ID NO: 16630 - DNA, 260 bp, Unknown
  Description of Unknown: LeftRegion for integrase B3631 sequence
agattttttcaataccattaactaaataaaaaaccgccccactctaccaaagcaggacggtcacgcttccgaatgatacgaaagccctaagcaagcatattgtatcattcggagcagccaaacgcaagcggaacaaacgttccttgctggctgttatttttatacccatttttcatatatttttatgagggagtgatactatgtacgaattaactcaatcaatggaatccttaagtgtagatgaaattattgtctatctg

SEQ ID NO: 16631 - DNA, 260 bp, Unknown; identical to SEQ ID NO: 16610
  Description of Unknown: LeftRegion for integrase B3632 sequence

SEQ ID NO: 16632 - DNA, 260 bp, Unknown; identical to SEQ ID NO: 16598
  Description of Unknown: LeftRegion for integrase B3633 sequence

SEQ ID NO: 16633 - DNA, 260 bp, Unknown
  Description of Unknown: LeftRegion for integrase B3634 sequence
acatatttttgtcaatttaaaaccgcccctgtggaccggacaccagtcaacaacagaggcggaaacgtgctccgtagatacacgccataagcaagcatattgtatcattcggagcagccaaacgcaagcggaacaaatgttccttgctggctgttatttttatacccatttttcatatatttttatgggggagtgatactatgtacgaattaactcaatcaatggaatccttaagtgtagacgaaattattgtctatctg

SEQ ID NO: 16634 - DNA, 260 bp, Unknown
  Description of Unknown: LeftRegion for integrase B3635 sequence
cagtcggaaggcttatactgtcactacgacaggcataccatatcggccgcatttccacaatgcgcagaaatcggtcgcgtgtccgggaaacgggattttcgacaaagttcttttggattttcttcccattttctgggcaatcctgctcggaaatgcttgtatatcaacgttttgacaaaaaccaaaaaccggaaaggggaatggaaatgcgcgaaaccatgaaagctgtaatttacgctcgatattcgtcggaaaagcag

SEQ ID NO: 16635 - DNA, 260 bp, Unknown
  Description of Unknown: LeftRegion for integrase B3636 sequence
tgacctcatggccttacagtcccagctcaaaaatgagattgcctctctgcttgaccggctcatgcaagccgatatggaaatcgcttttaacgtcaagaacggcgtaaccggcgcattctccggcaagacggcaatgtgattgttgttgacttccgcccctccatgtgaggggcttttcttttaccgaggaggtgtttattttggctcactgcctttacctgcgtaaatcccgtgctgacatcgaggcggaggctcacggc

SEQ ID NO: 16636 - DNA, 260 bp, Unknown
  Description of Unknown: LeftRegion for integrase B3637 sequence
atgcaaagcactcagcgacaatgcttgtcttttactggcggttctcctcgcttcgctggtcttgacagtaatgctaaccatcatcataattaaaagataaaacaaaaagccccgccttttggcggggcaaaaaaagagctttaaacagaacaaatgtttctgtggttttaatcatacaaattaattgtgggggtgaaataatgcctgaacaatactgcttatatctccgcaaatcaagggcggacatggatgccgaaaaa

SEQ ID NO: 16637 - DNA, 260 bp, Unknown
  Description of Unknown: LeftRegion for integrase B3638 sequence
gcatattttaagaaaacgtgaaatccgtgtaattcgcgcctataatatcaatatattgttaagaaaacacgtataacttattattaatattgaaattgaaatgaagattgtagttttagacggcttaggaacataatcgcaatttgctattttgattcttaattactatatttacataatcaattaaaatacaatgtattatggaagatatagtagtttatttacgtgtttctactgaagaacaagattataataggcaa

SEQ ID NO: 16638 - DNA, 260 bp, Unknown
  Description of Unknown: LeftRegion for integrase B3639 sequence
tgacctcatggccttgcagtcccagctcaaaaacgagattgcctctctgcttgaccggctcatgcaagccgatatggaaatcgcttttaacgtcaagaacggcgtaacaggcgcattctccggcaagacggcaatgtgattgttgttgacttccgcccctccgtgtgaggggcttttcttttactgaggaggtgtttattttggcttactgcctttacctgcgtaaatcccgtgccgacatcgaggcggaggctcacggt

SEQ ID NO: 16639 - DNA, 260 bp, Unknown
  Description of Unknown: LeftRegion for integrase B3640 sequence
tgatgttctagctaaaatgtcatgctattttaatgcgccgattgaatgcctattaggactgcccgaaaagaacgaccaccagaacacggtatcagctctgtttaatgctctggatagcgaaaatcaaaaatccgtgttactatacatggagtttgcactgtccaaacaaaaagcccgcacactggcgggcgggtgatggtatgaaaaaagagaacgaaatccgggcagttgtctatgcccggtactcatcccattcgcaa

SEQ ID NO: 16640 - DNA, 260 bp, Unknown
  Description of Unknown: LeftRegion for integrase B3641 sequence
acatatttttgtcaatttaaaaccgcccctgcggaccggataccagccaacaacagaggcggaaacgtgctccgaagatacacgccctaagcaagcatattgtatcattcggagcagccaaacgcaagcggaacaaatgttccttgctggctgttatttttatacccatttttcatatatttttatgagggagtgatactatgtacgaattaactcaatcaatggaatccttaagtgtagacgaaatcattgtctatctg

SEQ ID NO: 16641 - DNA, 260 bp, Unknown
  Description of Unknown: LeftRegion for integrase B3642 sequence
accttatgggtctaagtgaacttagaacccccggtatggtattgacagaggaagaacttctactgctcaacacctatcgcaattccagcacccagggacgcttccgtattattcaggtctgtatgaatgaaatggataccactggaaaaggggcaaccgtaaatgccggataattgacttgaatgagtggaggaagaaccatgtatgaagaaatcaaagaagtagcgctgtatgtacgctattccagtgccaaccagaca

SEQ ID NO: 16642 - DNA, 260 bp, Unknown; identical to SEQ ID NO: 13005
  Description of Unknown: LeftRegion for integrase B3643 sequence

SEQ ID NO: 16643 - DNA, 260 bp, Unknown
  Description of Unknown: LeftRegion for integrase B3644 sequence
acatatttttgtcaatttaaaaccgcccctgcggaccggacaccagtcaacaacagaggcggaaacgtgctccgtagatacacgccataagcaagcatattatatcattcggagcagccaaacgcaagcggaacaaacgttccttgctggctgttatttttatacccatttttcatatatttttatgagggagtgatactatgtacgaattaactcaatcaatggaatccttaagtgtagatgaaattattgtctatctg

SEQ ID NO: 16644 - DNA, 260 bp, Unknown
  Description of Unknown: LeftRegion for integrase B3645 sequence
ctgaatcttgacgagtttgacaatgaagtatttcaggacgagatcgaatatatctctgtaccaaaaccgaatgtgttaacctttatcttcaaaactggtgagaagcgcacagtccactggcttgaccactcacgcacagaagcgtggacacctgaaatgcggaaaaaagccgctgagcatagcaagaaaagaggtaagaaatgtcaagagtaacagttattccggcaaaacttgatagggctacattcatgccgctggat

SEQ ID NO: 16645 - DNA, 260 bp, Unknown
  Description of Unknown: LeftRegion for integrase B3646 sequence
agattttttcgataccattaactaaataaaaaaccgccccactctaccaaagcaggacggtcacgcttccgaatgatacgaaagccctaagcaagcatattgtatcattcggagcagccaaacgcaagcggaacaaacgttccttgttggctgttatttttatacccatttttcatatatttttattagggagtgatactatgtacgaattaactcaatcaatggaatccttaagtgtagacgaaattattgtctatctg

SEQ ID NO: 16646 - DNA, 260 bp, Unknown
  Description of Unknown: LeftRegion for integrase B3647 sequence
ctgactatcttctgggtctaagtaaagttagattttcacaagatgaactttcggaagaagaattgcttttactcaatgcctacagaactgccactgtgcagggacgattccacattatccaagtctgtatgaatgaaaaggatgcaaaaggggaaactatcattgcaggataataagcattgaagaatggaggaagaaccatgtacgaagagattaagactgcctgtctatatctgcgatattcaagtagcaaccaaacc

SEQ ID NO: 16647 - DNA, 260 bp, Unknown
  Description of Unknown: LeftRegion for integrase B3648 sequence
ctgactatcttctcggtctaagtaaagttagattttcacaggacgaactttcggaagaagaattgcttttactcaacgcttatagaactgccagtgtacagggacgattccatattatccaagtctgtatgaacgaaaaggattcaaaaggggaaactatcattgcaggataataagcattgaggaatggaggaagaaccatgtacgaagagattaagactgcttgtctatatctacgatattcaagtagcaaccaaact

SEQ ID NO: 16648 - DNA, 260 bp, Unknown
  Description of Unknown: LeftRegion for integrase B3649 sequence
ttttgtaatatggttgtaaaataaccgtaatacaaataaaggaagtgtacatatatgaataaatcaaacaatgacgaatattctgaaatggtaaagctatttaaccaacttaccgttgaagaagctgaacttgtactgatttttataagaaatcttcgtcaaaaccgtaaaaccgatgaaaagcgaaaggatgactgattatgcaatattgtttatatctaagaaaatctcgtgccgacagtgaagcagaagcacgaggt

SEQ ID NO: 16649 - DNA, 260 bp, Unknown; identical to SEQ ID NO: 16187
  Description of Unknown: LeftRegion for integrase B3650 sequence

SEQ ID NO: 16650 - DNA, 260 bp, Unknown
  Description of Unknown: LeftRegion for integrase B3651 sequence
attttgtaatgtagttgtaaaataactgtaatacaaataaaggagtgtacatatatgaataaatcaaacaatgacgaatattctgaaatggtaaagctatttaaccaacttaccgttgaagaagctgaacttgtactgatttttataagaaatcttcgtcaaaaccgaaaaaacgatgaaaagcgaaaggatgactgattatgcaatattgtttatatctaagaaaatctcgtgccgacagcgaggcagaagctcgaggt

SEQ ID NO: 16651 - DNA, 260 bp, Unknown; identical to SEQ ID NO: 16650
  Description of Unknown: LeftRegion for integrase B3652 sequence

SEQ ID NO: 16652 - DNA, 260 bp, Unknown
  Description of Unknown: LeftRegion for integrase B3653 sequence
taaaataaaagctcctgtgctggtaacacaagagcttttacacgatacttacatcaagcaatgctacaatgatataataccgccataatcaagccatattatatcatctgtaacaccgctttgacaagtaggtgttatttttatacccatttttaggcttgtatcggcacagcctgcatatatttaacagaaaggattagatgataaatatggtatcttttgacaatattattatatatcttagaaaatcacgctcagac

SEQ ID NO: 16653 - DNA, 260 bp, Unknown
  Description of Unknown: LeftRegion for integrase B3654 sequence
aacctattcttcttttgtgttccattgtcggatgcattgccgctttctacttctgctttataaggtaactgcaaaaaataccttccctgcacccccttcgggtgcttttttatttggaaattttctgtgttcgcttttttctcccctcgttctgtgctatcatgcaggcaagggaaaaatcatgagaaaggagaaaacctatgccgtattgcatttatttgagaaaatcaagagcagatgcagaggcagaattggcaggc

SEQ ID NO: 16654 - DNA, 260 bp, Unknown
  Description of Unknown: LeftRegion for integrase B3655 sequence
ttttgtaatatagttgtaaaataactgtaatgcaaataaaggaagtgtacatatatgaataaatcaaacaatgacgaatattctgaaatggtaaagctatttaaccaacttaccgttgaagaagctgaacttgtactgatttttataagaaatcttcgtcaaaaccgtaaaaccgatgaaaagcgaaaggatgactgattatgcaatattgtttatatctaagaaaatctcgtgccgacagtgaagcagaagcactaggt

SEQ ID NO: 16655 - DNA, 260 bp, Unknown
  Description of Unknown: LeftRegion for integrase B3656 sequence
agccttcgaccgaggccttataactatcactccttccatgaaaatctatgtttctccgataattttggatagccctcaggacgcttttacagcccgctggctggcttctcttgacggaatggttttcccccccccccccgatttccgccgcgtagagagcttctggagtaccataacgacgaaatttttaggagggtcacatgaatacagtaatttatgctcggtattctgccggcccgagacagaccgaccagagtatc

SEQ ID NO: 16656 - DNA, 260 bp, Unknown
  Description of Unknown: LeftRegion for integrase B3657 sequence
acctgtttttcttttgtgttccattgtcggatgcattgccgctttctacttcctctttttaaggtaactgcaaaaaataccttcccagcactcccttcgggtgcttttttttattgcaaattccccttgttcgcttttctcctctgccattctgtgctatcatgcaggcaaggggaaaatcatgagaaaggagtaaacctatgccgtattgcatttatttgagaaaatcaagagcagatgcagaggcagaattggcaggc

SEQ ID NO: 16657 - DNA, 260 bp, Unknown
  Description of Unknown: LeftRegion for integrase B3658 sequence
cctgtacgagcgtgccggagtgccggagtattggattgtcagccccgaggagcgcaccgtacaggtcagcaccctggtggatggccgctaccgtgtccaggagctctacaccgctgaggccgtggccaaggtcaacaccctgtctggctgctttatcgagctgtccaaggtgttcccggcagagcagtgagggccgccctatggacgaatattgcctgtatctccgtaaatcccgtatagacctggaggccgaggccaac

SEQ ID NO: 16658 - DNA, 260 bp, Unknown; identical to SEQ ID NO: 16654
  Description of Unknown: LeftRegion for integrase B3659 sequence

SEQ ID NO: 16659 - DNA, 260 bp, Unknown
  Description of Unknown: LeftRegion for integrase B3660 sequence
taccgcagaaataattaagagcaaggtggaccacattgatgtcctcaaaggtaacagactggtttttcatttgaagaacggttcgaccatcgaagaaacatggaagagcctatcaagaaaagacaactggacaccagaaatgaaagaaaaggctcgtcaaagggcgatagcgcaatatcgaagaaaggaaggcaagcacaatggctaaggttaccatcatcccatcgaaaataaacccaataacgcttactcccgttggg

SEQ ID NO: 16660 - DNA, 260 bp, Unknown
  Description of Unknown: LeftRegion for integrase B3661 sequence
tcgcgccctcggcattctgctgattgcgcttggcgttctcctgctggtgcttgggcttctatcatgggcgtgggcgattcttggtgcgctgagtgccgtcggcggggtgctgctgcttaaaaatgcaaaattgatttctgaacgcgggaacgctgctgctttggctgcggctcgaaacgtggccgaggcaaggatggaagatgaagaagaagccgattgaacctgaaatgcaggatgccgtgatctacactcggtactcg

SEQ ID NO: 16661 - DNA, 260 bp, Unknown
  Description of Unknown: LeftRegion for integrase B3662 sequence
aagctggcgattgccgatgtggcgaagtacaaggataagctgatagcgacgactagacgggttgtcggagcgtaaaagaataagcccgtcgctcttttgggcggcgggttttataattaaatgcgtatttacgcaattcatcatataggtgggactaacgtgaaagcctataagcagaaattacgggagggggtaaacctatggcacgtaagaagaaattcgcgccgaacgacaacaaccttgcgatagcgtactatcgc

SEQ ID NO: 16662 - DNA, 260 bp, Unknown; identical to SEQ ID NO: 16656
  Description of Unknown: LeftRegion for integrase B3663 sequence

SEQ ID NO: 16663 - DNA, 260 bp, Unknown; identical to SEQ ID NO: 15474
  Description of Unknown: LeftRegion for integrase B3664 sequence

SEQ ID NO: 16664 - DNA, 260 bp, Unknown
  Description of Unknown: LeftRegion for integrase B3665 sequence
ttttgtaatatggttgtaaaataactgtaatacaaataaaggaagtgtacatatatgaataaatcaaacaatgacgaatattctgaaatggtaaagctatttaaccaacttactgttgaagaagctgaacttgtactgatttttataagaaatcttcgtcaaaaccgtaaaaccgatgaaaagcgaaaggatgactgattatgcaatattgtttatatctaagaaaatctcgtgccgacagtgaagcagaagcacgaggt

SEQ ID NO: 16665 - DNA, 260 bp, Unknown; identical to SEQ ID NO: 14792
  Description of Unknown: LeftRegion for integrase B3666 sequence

SEQ ID NO: 16666 - DNA, 260 bp, Unknown
  Description of Unknown: LeftRegion for integrase B3667 sequence
gccgatcagcattctcaggatatactcatcacaaggaggaagtcccatgtaggattcatccatcggcaacacacatgcacaaattgtcgatcttccgaatgtccgcttattttttgcgccggcatccaatccgcaggttgagaaagaggttctcaccatgtagcttcgcgataccgccgcgcccgaaggaggaaacgacaatgaaacgggttctgtgtctctacagagtgtccacgataggacaggttgatcatgacgac

SEQ ID NO: 16667 - DNA, 260 bp, Unknown; identical to SEQ ID NO: 16654
  Description of Unknown: LeftRegion for integrase B3668 sequence

SEQ ID NO: 16668 - DNA, 260 bp, Unknown; identical to SEQ ID NO: 16654
  Description of Unknown: LeftRegion for integrase B3669 sequence

SEQ ID NO: 16669 - DNA, 260 bp, Unknown; identical to SEQ ID NO: 16664
  Description of Unknown: LeftRegion for integrase B3670 sequence

SEQ ID NO: 16670 - DNA, 260 bp, Unknown
  Description of Unknown: LeftRegion for integrase B3671 sequence
atatgatttttggctccatttaaattgttttgttaataaaaaaaatcccgcatcctgctgaccaggacacgggacgcgcggcagtattgcagtactgctggcaagtgtaaatcatctaaaaagatacttggatttagggtgattcacggtatcattatatcatgaatcagccccattcgcctacgaaaggactgatttttatgtcaacaaatgctgttatctacgcccgtttttcctctgacaaacaaagagaagaatcc

SEQ ID NO: 16671 - DNA, 260 bp, Unknown
  Description of Unknown: LeftRegion for integrase B3672 sequence
tcggcaacggagatggttttccatttcaaggacggcaggacggtcagccgcacatgggagcagccgaaacgagtcggcagaccttggacggacgaacagagagccaagttcaaggaatccatcaaaggcaggtacacgccggaggtacggcagcggatgagtgaacacatgaagcagctacggaaggagcgtgggaaagcatggcgcaaagaaaagtaacggcgatcccggctaccatcagcaggtacacagccacgccg

SEQ ID NO: 16672 - DNA, 260 bp, Unknown
  Description of Unknown: LeftRegion for integrase B3673 sequence
taaaataaaagctcctgtgctggtaacacaagagcttttacacgatacttacatcaagcaatgctacaatgatataataccgccataatcaagccatattatatcatctgtaacaccgctttgacaagtaggtgttatttttatacccatttttaggcttgtatcggcacagcctgcatatatttaacagaaaggattagatgataaatatggtatcttttgacaatattattatatatctcagaaaatcacgctcagac

SEQ ID NO: 16673 - DNA, 260 bp, Unknown
  Description of Unknown: LeftRegion for integrase B3674 sequence
attatttattctgtttatctgattcaccatacccaaaagtagagatttccctaacggaagaagagcaattactgcttgacgcattccgttccgctaccccacaaggtagattcaacattattactacctgtatgtgtgagaagcgaaaaggggacaacgaaagtgccgggtgattgattttgtagagtggaggaagaaccatgtatgaggatataaaaacagcctgcctatacgttagattctcaagccataaccagact

SEQ ID NO: 16674 - DNA, 260 bp, Unknown
  Description of Unknown: LeftRegion for integrase B3675 sequence
ttttgtaatatagttgtaaaataactgtaatgcaaataaaggaagtgtacatatatgaataaatcaaacaatgacgaatattctgaaatggtaaagctatttaaccaacttactgttgaagaagctgaacttgtactgatttttataagaaatcttcgtcaaaaccgaaaaaacgatgaaaagcgaaaggatgactgattatgcaatattgtttatatctaagaaaatctcgtgccgacagcgaggcagaagctcgaggt

SEQ ID NO: 16675 - DNA, 260 bp, Unknown; identical to SEQ ID NO: 16654
  Description of Unknown: LeftRegion for integrase B3676 sequence

SEQ ID NO: 16676 - DNA, 260 bp, Unknown
  Description of Unknown: LeftRegion for integrase B3677 sequence
attttgtaatatagttgtaaaataactgtaatacaaataaaggagtgcacatatatgaataaatcaaacaatgacgaatattctgaaatggtaaagctatttaaccaacttactgttaaagaagctgaacttgtactgatttttataagaaatcttcgtcaaaaccgtaaaaccgataaaaagcgaaaggatgactgattatgcaatattgtttatatctaagaaaatctcgtgccgacagtgaggcagaagcacgaggt

SEQ ID NO: 16677 - DNA, 260 bp, Unknown
  Description of Unknown: LeftRegion for integrase B3678 sequence
ttttgtaatatggttgtaaaataactgtaatacaaataaaggaagtgtacatatatgaataaatcaaacaatgacgaatattctgaaatggtaaagctatttaaccaacttaccgttgaagaagctgaacttgtactgatttttataagaaatcttcgtcaaaaccgtaaaaccgatgaaaagtgaaaggatgactgattatgcaatattgtttatatctaagaaaatctcgtgccgacagcgaggcagaagcacgaggt

SEQ ID NO: 16678 - DNA, 260 bp, Unknown; identical to SEQ ID NO: 16654
  Description of Unknown: LeftRegion for integrase B3679 sequence

SEQ ID NO: 16679 - DNA, 260 bp, Unknown
  Description of Unknown: LeftRegion for integrase B3680 sequence
gccttcgaccgaggccttataactatcactccttccatgaaaatctatgtttctccaataattttggatagccctcaggacgcttttacagcccgctggctggcttctcttgacggaatggttttacccccccccccccgatttccgccgcgtagagagcttctggagtaccataacgacgaaatttttaggagggtcacatgaatacagtaatttatgctcggtattctgccggcccgagacagaccgaccagagtatc

SEQ ID NO: 16680 - DNA, 260 bp, Unknown
  Description of Unknown: LeftRegion for integrase B3681 sequence
taaaataaaagcccctgtgttactaacacaagagcttttacacgatacttacatcaagcaatgctacaatgatataataccgccatagacaagctatattatatcatctgtaacaccactttgacaagtaggtgttatttttatacccatttttaggcttgcatcggcacagcctgcatatattaaacggaaaggattagatgataaatatggtatcttttgacaatattattatatatcttagaaagtcacgctcggac

SEQ ID NO: 16681 - DNA, 260 bp, Unknown
  Description of Unknown: LeftRegion for integrase B3682 sequence
gccttcgaccgaggccttataactatcactccttccatgaaaatctatgtttctccgataattttggatagccctcaggacgcttttgctgcccgggggctggcttctgttgagggaatggttttccccccccccccccgatttccgccgcgtagagagcttctggagtaccataacgacgaaatttttaggagggtcacatgaatacagtaatttatgctcggtattctgccggcccgagacagaccgaccagagtatc

SEQ ID NO: 16682 - DNA, 260 bp, Unknown
  Description of Unknown: LeftRegion for integrase B3683 sequence
ttttggggctgaaccagatttcatggttggcgccttcgcgtacaatataacaaccatttttcttaagtagttttttcagttcgctgtacctcatgttcctcacctcttgattatattatagcacgtattaatacgtgtgtcaacactttttagaaaaattatacgtatttttacgtataaagagaaaggtggttattagtatgaatacaactaacgctgttatatatgctcggtattcgtccgataagcaaaccgagcaa

SEQ ID NO: 16683 - DNA, 260 bp, Unknown; identical to SEQ ID NO: 16657
  Description of Unknown: LeftRegion for integrase B3684 sequence

SEQ ID NO: 16684 - DNA, 260 bp, Unknown; identical to SEQ ID NO: 16677
  Description of Unknown: LeftRegion for integrase B3685 sequence

SEQ ID NO: 16685 - DNA, 260 bp, Unknown
  Description of Unknown: LeftRegion for integrase B3686 sequence
tgcgggtctgtgcatcttcctggccctggtatttgtggcgtatctgtttgtggatgtgtcggacgctgaccatggctttatccggaataatcaggtttcccctacattgatcatcttgatattggcaatcgtagtgacggcccttggcacggcccatagtatcgcaaaaagaaaagcaacaatgaaaaggaatggtaaacatgacagcaactgacgaaatgatagaaaaggcttgtaataagtacaaaaagacacggtat

SEQ ID NO: 16686 - DNA, 260 bp, Unknown; identical to SEQ ID NO: 15409
  Description of Unknown: LeftRegion for integrase B3687 sequence

SEQ ID NO: 16687 - DNA, 260 bp, Unknown
  Description of Unknown: LeftRegion for integrase B3688 sequence
taaaacaaaagctcctgtgctggtaacacaagagcttttacacgatacttacatcaagcaatgctacaatgatataataccgccctaatcaagccatattatatcatctgtaacaccactttgacaagcaggtgttatttttatacccatttttaggcttgcatcggcacagcctgcatatatttaacagaaaggattagatgataaatatggtatcttttgacaatattattatatatcttagaaagtcacgctcggac

SEQ ID NO: 16688 - DNA, 260 bp, Unknown; identical to SEQ ID NO: 15631
  Description of Unknown: LeftRegion for integrase B3689 sequence

SEQ ID NO: 16689 - DNA, 260 bp, Unknown
  Description of Unknown: LeftRegion for integrase B3690 sequence
attatcttttctgtttatctgattcaccttgcccgaaagtagagatttccctaacagaagaagagcaattactgcttgacgcatttcgttccgctaccccacaaggtagattcaacattattactacctgtatgtgtgagaagcgaaaaggggacaacgaaaatgtcgggtaattgatttcatagaatggaggaaaaaccatgtatgaggatataaaaacagcctgcctatacgttagattctcaagccataaccagact

SEQ ID NO: 16690 - DNA, 260 bp, Unknown
  Description of Unknown: LeftRegion for integrase B3691 sequence
gggtcagaatgattttactcacgagtggctttgccaccgaattcagcatattcgcgtctgcaatgataataccctgattttctatttcaaggacggttcggaaattactcgaatttggaaagaccgctcacgcagtcaaagttggacggacgagatgaaagaagccgcccgtcagaaaacattagaaaggagcaagcataatgcctaaagttacgatgataccggcgactgtaaattccttgacgcatctgccaaaggca

SEQ ID NO: 16691 - DNA, 260 bp, Unknown
  Description of Unknown: LeftRegion for integrase B3692 sequence
aatgccgatcagtacaaggctatattggaataagtccgcaagcgttatgtacatccgcacccctcccttctggggagggaaaaagaaggattcccctcccgggataatgggagggactaaccgcctaccgttatcgatagcaccttacggctttgagtataccataacatgcgatacttgtccacaggggaggtgatctcgtgtcagaaaaatctgctgtcatttatgcccgatacagcagccacaaccagcgggaggaa

SEQ ID NO: 16692 - DNA, 260 bp, Unknown; identical to SEQ ID NO: 16657
  Description of Unknown: LeftRegion for integrase B3693 sequence

SEQ ID NO: 16693 - DNA, 260 bp, Unknown
  Description of Unknown: LeftRegion for integrase B3694 sequence
tctgcctgctgtgatgttttggaaatatcggaatttgatgcggaacaatttgcggaacgaatcgaacagattcagattccggcacccaatgaactgcaattctgcttttcagacggaacggaacaaaccgtacattggaaagaccgttcccgttcggaaagctggacggcggaaatgcgagagaaagcgaggcagaaaaaatggcgacagtcctaaaaataccagcaaagtttcaccccataacgcatttgccggaaatc

SEQ ID NO: 16694 - DNA, 260 bp, Unknown; identical to SEQ ID NO: 14115
  Description of Unknown: LeftRegion for integrase B3695 sequence

SEQ ID NO: 16695 - DNA, 260 bp, Unknown; identical to SEQ ID NO: 16676
  Description of Unknown: LeftRegion for integrase B3696 sequence

SEQ ID NO: 16696 - DNA, 260 bp, Unknown
  Description of Unknown: LeftRegion for integrase B3697 sequence
ttcgatcgaggccttataactatcactccttccatgaaaatctatgtttctccaataattttggatagccctcaggacgcttttacagcccgctggctggcttctcttgacggaatggttttaccccccccccccccccgatttccgccgcgtagagagcttctggagtaccataacgacgaaatttttaggagggtcacatgaatacagtaatttatgctcggtattctgccggcccgagacagaccgaccagagtatc

SEQ ID NO: 16697 - DNA, 260 bp, Unknown
  Description of Unknown: LeftRegion for integrase B3698 sequence
tcagatcttctccgataaaaataaaaccggctcctgcgtcaacaggaaccggcaaggaatatatccgaagatgataccccaaaattaagcaaacatattgtatcatcttcggacagcccccgcaagcggaacatccgttccccgctggctgttatttttatacccttttttacatacatttgatacaggaggatgatactatgcaggaaatgaacatctctatcaatgatctgatcatgtatctgagaaaatcccggtct

SEQ ID NO: 16698 - DNA, 260 bp, Unknown
  Description of Unknown: LeftRegion for integrase B3699 sequence
attttgtaatatagctgtaaaataactgtaatacaaataaaggagtgtacatatatgaataaatcaaacaatgacgaatattctgaaatggtaaagctatttaaccaacttaccgttgaagaagctgaacttgtactgatttttataagaaatcttcgtcaaaaccgaaaaaacgatgaaaagcgaaaggatgactgattatgcaatattgtttatatctaagaaaatctcgtgccgacagcgaggcagaagctcgaggt

SEQ ID NO: 16699 - DNA, 260 bp, Unknown; identical to SEQ ID NO: 16664
  Description of Unknown: LeftRegion for integrase B3700 sequence

SEQ ID NO: 16700 - DNA, 260 bp, Unknown
  Description of Unknown: LeftRegion for integrase B3701 sequence
ccttcgaccgaggccttataactatcactccttccatgaaaatctatgtttctccaataattttggatagccctcaggacgcttttacagcccgctggctggcttctcttgacggaatggttttaccccccccccccccgatttccgccgcgtagagagcttctggagtaccataacgacgaaatttttaggagggtcacatgaatacagtaatttatgctcggtattctgccggcccgagacagaccgaccagagtatc

SEQ ID NO: 16701 - DNA, 260 bp, Unknown
  Description of Unknown: LeftRegion for integrase B3702 sequence
gatatatcctctgaatggttggaaaactcatacacatacacgccaaagccgtataagccttcaaagcgcgccctccaaatggaggcggacatcaaagaaactgctcacaaatacataacaagcgaaaaagccctcctgctgggcgcagaagggcgtaacgggtaacagatatgtcgatagatattaaatggcaagtgccaatggcaaagccagaggtcagcgaactggccgtcgtatatgcccggtattcaagccacagt

SEQ ID NO: 16702 - DNA, 260 bp, Unknown
  Description of Unknown: LeftRegion for integrase B3703 sequence
agccttcgaccgaggccttataactatcactccttccatgaaaatctatgtttctccgataattttggatagccctcaggacgcttttacagcccgttggctgggttctcttgtcggaatggttttaacccccccccccgatttccgccgcgtagagagcttctggagtaccataacgacgaaatttttaggagggtcacatgaatacagtaatttatgctcggtattctgccggcccgagacagaccgaccagagtatc

SEQ ID NO: 16703 - DNA, 260 bp, Unknown
  Description of Unknown: LeftRegion for integrase B3704 sequence
cagacgtatgtaaaacacgttgaaatgtggcataaagagtttggtatggatccgttcacagatgaagaacatgaaaaactgatggaatatggcaggtttctcatttcgttaagaaagaagtagataaaactaaagaataaagggggtgataccaggcgaaatataattctgcatcaagacaaacttaggaggaatacaacatgacagcatttgaaaagaacaacatcgtcgagagctccatacccacacatatggataaa

SEQ ID NO: 16704 - DNA, 260 bp, Unknown
  Description of Unknown: LeftRegion for integrase B3705 sequence
aacctgtttttcttttgtgttccattgtcggaggcgttgttgctttctactttctctttttaaggtaaccgcaaaaaataccttccctgcacccccttcgggtgcttttttatttggaaattttctgtgttcgcttttttctcccctcgttctgtgctatcatgcaggcaagggaaaaatcatgagaaaggagaaaacctatgccgtattgcatttatttgagaaaatcaagagcagatgcagaggcagaattggcaggc

SEQ ID NO: 16705 - DNA, 260 bp, Unknown
  Description of Unknown: LeftRegion for integrase B3706 sequence
tctttttggatatataatgttgaagctgccaaagtcgaaggctatactccttgcaaagattgcaaccctccccaataatcatcccctgcacccccttcgggtgctttttttatttggaaattttctgtgttcgcttttttctcccctcgttctgtgctatcatgcaggcaaggggaaaatcatgagaaaggagaaaacctatgccgtattgcatttatttgagaaagtcaagagcagatgcagaggcggagctgctgggc

SEQ ID NO: 16706 - DNA, 260 bp, Unknown; identical to SEQ ID NO: 16687
  Description of Unknown: LeftRegion for integrase B3707 sequence

SEQ ID NO: 16707 - DNA, 260 bp, Unknown
  Description of Unknown: LeftRegion for integrase B3708 sequence
ccttgcggtctgcatcgtgtcgctcccgatcggcttgatcattgtagccgttggagcgtaccgggcggtaaaagccggggatatttatgatgctgcagttgctcggtacgagcagcaaatctcggactatgttgactggctggatgaagtcaacgcaaaataaaaagccgccctcggtgggcggcgggaggttgctctgaatgtgcgcaaaaaagaaaccggccatgcttgagccggatatgcaggatgccgtgatctac

SEQ ID NO: 16708 - DNA, 260 bp, Unknown
  Description of Unknown: LeftRegion for integrase B3709 sequence
ccttcgaccgaggccttataactatcactccttccatgaaaatctatgtttctccgataattttggatagccctcaggacgcttttacagcccgctggctggcttctcttgacggaatggtttttccccccccccccccgatttccgccgcgtagagagcttctggagtaccataacgacgaaatttttaggagggtcacatgaatacagtaatttatgctcggtattctgccggcccgagacagaccgaccagagtatc

SEQ ID NO: 16709 - DNA, 260 bp, Unknown; identical to SEQ ID NO: 16698
  Description of Unknown: LeftRegion for integrase B3710 sequence

SEQ ID NO: 16710 - DNA, 260 bp, Unknown
  Description of Unknown: LeftRegion for integrase B3711 sequence
ttctttttggatatataatgttgaagctgccaaagtcgaaggctatactccttgcaaagattgcaaccctccccaataatcatcccctgcacccccttcgggtgcttttttatttggaaattttctgtgttcgcttttttctcccctcgttctgtgctatcatgcaggcaaggggaaaatcatgagaaaggagaaaacctatgccgtactgcatttatttgagaaagtcaagagcagatgcagaggcggagctgctgggc

SEQ ID NO: 16711 - DNA, 260 bp, Unknown
  Description of Unknown: LeftRegion for integrase B3712 sequence
attttgtaatatggttgtaaaataactgtaatacaaataaaggagtgtacatatatgaataaatcaaacaatgacgaatattctgaaatggtaaagctatttaaccaacttaccgttgaagaagctgaacttgtactgatttttataagaaatcttcgtcaaaaccgaaaaaacgatgaaaagcgaaaggatgactgattatgcaatattgtttatatctaagaaaatctcgtgccgacagcgaggcagaagctcgaggt

SEQ ID NO: 16712 - DNA, 260 bp, Unknown
  Description of Unknown: LeftRegion for integrase B3713 sequence
acctattcttcttttgtgtacgattttcggatgcattgccgctttctactttctctttttaaggtaactgcaaaaaataccttctcagcaccccccttcgggtgcttttttatttggaaattttctgtgttcgcttttttctcccctcgttctgtgctatcatgcaggcaaggggaaaatcatgagaaaggagaaaacctatgccgtattgcatttatttgagaaagtcaagagcagatgcagaggcggagctgctgggc

SEQ ID NO: 16713 - DNA, 260 bp, Unknown
  Description of Unknown: LeftRegion for integrase B3714 sequence
catgtcctttactctgcttgtttatattatcctcgatgcgaatgtgccggacgccgggttcatccgctacggacgtcccagcgctgccgcattggtcgttatcgccgtcattgcagccgcagcaatcattgtcgcgtggtcaatcatacacgccgtgcgtaaaccgaagaaacactccaagaaataattgaggttcccttatggactatacaaatttgaatcttgccaacgtcgtcatctatgcccgctattcctccgac

SEQ ID NO: 16714 - DNA, 260 bp, Unknown; identical to SEQ ID NO: 16654
  Description of Unknown: LeftRegion for integrase B3715 sequence

SEQ ID NO: 16715 - DNA, 260 bp, Unknown; identical to SEQ ID NO: 16657
  Description of Unknown: LeftRegion for integrase B3716 sequence

SEQ ID NO: 16716 - DNA, 260 bp, Unknown
  Description of Unknown: LeftRegion for integrase B3717 sequence
tttgcccccatcttttcccaaaagcaaaaaccgctcctggcgggaaccaggaacggtttttgtgatactattgccgagtgcacacacaaggcgatataatatcagcatgacatctgtattatatcatcctgaagtgcacccggtcaatgggtgtattttttgtacgtttttttaatacattttacgaggaggatggtataatggagcttagaaaagatggattatattttgcatatctgcgcaagtcccgggaggatcgg

SEQ ID NO: 16717 - DNA, 260 bp, Unknown
  Description of Unknown: LeftRegion for integrase B3718 sequence
gacgatcggctggcccaccgcaccgccctgctggccgaagatcagcgcagggccgacgcggatctgcagcgtgagcgccatcgcgcccatgtggccagcattatttcgtatgtcgcgctgatcctgtttgtaatattgtttttaatggatttccttttgcccaaccgcggctggttcgtccgctgaagggaggactatgcatgcccactctctcctcggccggaaattactgcatgtacctccgccgatcccgcgccgac

SEQ ID NO: 16718 - DNA, 260 bp, Unknown
  Description of Unknown: LeftRegion for integrase B3719 sequence
catgtcctttactctgcttgtttatattatcctcgatgcgaatgtgccggacgccgggttcatccgctacggacgtcccagcgctgccgcattggttgttatcgccgtcattgcagccgcagcaatcattgtcgcgtggtcaatcatacacgccgtgcgtaaaccgaagaaacactccaagaaataattgaggttcccttatggactatataaatttgaatcttgccaacgtcgtcatctatgcccgctattcctccgac

SEQ ID NO: 16719 - DNA, 260 bp, Unknown; identical to SEQ ID NO: 16664
  Description of Unknown: LeftRegion for integrase B3720 sequence

SEQ ID NO: 16720 - DNA, 260 bp, Unknown; identical to SEQ ID NO: 14115
  Description of Unknown: LeftRegion for integrase B3721 sequence

SEQ ID NO: 16721 - DNA, 260 bp, Unknown; identical to SEQ ID NO: 15409
  Description of Unknown: LeftRegion for integrase B3722 sequence

SEQ ID NO: 16722 - DNA, 260 bp, Unknown
  Description of Unknown: LeftRegion for integrase B3723 sequence
caccttggcactccaaattggagtgatggtgttatccctgcctttgcttttactcttcattaaataaaaaagccccggcttcagccagggccctccatgagttatgctcatgtaatctcgcaaattatattatagcatagctcccggagtatttcattatgttccgggcatttttatgcccatttttaggaggatgctatatgaattttggtatttacggaagaaaatcatattttgttgatacctcagagagcactcag

SEQ ID NO: 16723 - DNA, 260 bp, Unknown
  Description of Unknown: LeftRegion for integrase B3724 sequence
attgcttcttggaagcggcaaatattctgttgatgatattgtatccatttgtaaaaacaccaaataaaaaagccccggcatctctgccagggccatgagctatgctcatatataatctcgcaaattgtattatagcatagctcccggactatttcactatgttccgggcatttttatgcccatttttaggaggatgctatatgaattttggtatttacggaagaaaatcatattttgttgatacctcagagagcactcag

SEQ ID NO: 16724 - DNA, 260 bp, Unknown
  Description of Unknown: LeftRegion for integrase B3725 sequence
tgcgggtctgtgcatcttcctggccctggtatttgtggcgtatctgtttgtggatgtgtcggacgctgaccatggctttatccggaataatcaggtttcccctacattgatcatcttgatattggcaatcgtagtgacggcccttggcacggcccacagtatcgcaaaaagaaaagcaacaatgaaaaggaatggtgaacatgacagcaactgacgaaataataaaaaaggcttgtaataagtacaaaaagacacggtat

SEQ ID NO: 16725 - DNA, 260 bp, Unknown
  Description of Unknown: LeftRegion for integrase B3726 sequence
gatttattcaataagaaaatagattatattattgcaaagcctaacaatgttttagaaattcatttatttgatggaaaaattgatgaaattaaatggactgatccaactagaaaaaatagctggactcctgaaatgaaagaaaaagcaagaattaaatcaaaagaaatagaaaaaaatctaaaaagaggagctgatggaaaatgggtaaagtcagagtaataccatcaacgattaatcctttaacgcatcaaagtattgtc

SEQ ID NO: 16726 - DNA, 260 bp, Unknown; identical to SEQ ID NO: 14174
  Description of Unknown: LeftRegion for integrase B3727 sequence

SEQ ID NO: 16727 - DNA, 260 bp, Unknown
  Description of Unknown: LeftRegion for integrase B3728 sequence
tttggatatacaactttgaagctgccaaaagcgaaggctatactccttgcaaagattgtaatccccctcaataaaacacaacgcagcaccccccccttcgggtgcttttttatttggaaattttctgtgttcgcttttttctcccctcgttctgtgctatcatgcagacaaggggaaaatcatgagaaaggagtaaacctatgccgtattgcatttatttgagaaaatcaagagcagatgcagaggcggagctgctgggc

SEQ ID NO: 16728 - DNA, 260 bp, Unknown; identical to SEQ ID NO: 16654
  Description of Unknown: LeftRegion for integrase B3729 sequence

SEQ ID NO: 16729 - DNA, 260 bp, Unknown
  Description of Unknown: LeftRegion for integrase B3730 sequence
ccggtatcgcttgcaataattcagtaaaccttccctgtctggatagcttataaaaaatctgccccagtacgccaataccggggcagattaaggaaccacatcgggaaaacccgatacagtcgccctacacaagcagattgtaccattttcccggtgaaaatacaagcaccgggcatttttatgtccaaaaaggaggaattatgttatatgaattgtctccaagtgacatatctcacattattatctatctaagaaagtca

SEQ ID NO: 16730 - DNA, 260 bp, Unknown; identical to SEQ ID NO: 15405
  Description of Unknown: LeftRegion for integrase B3731 sequence

SEQ ID NO: 16731 - DNA, 260 bp, Unknown
  Description of Unknown: LeftRegion for integrase B3732 sequence
tgcgcattgattggtcttgcaatcactgttttaggtgctgcaatcgtcggtgttccaattgctatattgggcgctttgcttgccgtaggtgcaaggggaaggaaatagaaaaccctgcgcggcttcttggcagtcggcgcgcagggcaagtgcaaagaacgaagcgcattagcgcactcgctctaaggggtgattttagcatggtgaagaacagagcagccatatacgcgcgcttcagctcgcacaatcagcgctctgaa

SEQ ID NO: 16732 - DNA, 260 bp, Unknown
  Description of Unknown: LeftRegion for integrase B3733 sequence
gacattcgatccgacatttattgatcagaatgtgagggaaattattctgtacgacaataggttggtgttcagtatgactgatgggcgagaggagaaaattagttggaaaaataaatcacgctctcaatcgtggacgccggaaatgaaagaacgtgcaagacaaaggactatggaacggttgcagaataggaggataaacgatgccgacagtaaaggtaataccagcgactcgtgattttcatacgggcatagaaaagaca

SEQ ID NO: 16733 - DNA, 260 bp, Unknown
  Description of Unknown: LeftRegion for integrase B3734 sequence
ccagtctttccgcactggatagtcagacacttactcttaccgcagaggaagtgcgcttaattctcaaataccgggctttagataaagagggacgcacaatggttgagtctactcttattcaggaaacccgtagaatggatacggagaaaggggaaactgtaagtgccgggtaatcagccttgccgaatggaggaagaaccatgtatgaagaagtgaaaaccgcctgcatttatgcccggtattccagcaataatcaaacc

SEQ ID NO: 16734 - DNA, 260 bp, Unknown
  Description of Unknown: LeftRegion for integrase B3735 sequence
tgacctcatggccttgcagtcgcagctcaaaaacgagattgcctctctgcttgaccggctcatgcaagccgatatggaaattgcctttaacgtcaagaacggcgtaacaggcgtattctccggcaagacggcaatgtgattgttgttgacttccgcccctctgtgtgaggggcttttcttttaccgaggaggtgtttattttggcttactgcctttacctgcgcaaatcccgttccgacatcgaggcggaggctcacggc

SEQ ID NO: 16735 - DNA, 260 bp, Unknown
  Description of Unknown: LeftRegion for integrase B3736 sequence
tgcgcattggttggtcttgcaatcactgttttaggtgctgcaatcgtcggtgttccaattgctatattgggcgctttgcttgccgtaggtgcaaggggaaggaaatagaaaaccctgcgcggcttcttggcggtcggcgcgcagggcaagtgcaaagaacgaagcgcattagcgcactcgctctaaggggtgattctagcatggtgaagaacagagcagccatatacgcgcgcttcagctcgcacaatcagcgctctgag

SEQ ID NO: 16736 - DNA, 260 bp, Unknown
  Description of Unknown: LeftRegion for integrase B3737 sequence
atctgtgatgtacttaaattggatgaatttgatacggctgtatttcgagataacattcatcacattgtgattccaaaaccatttgaggtacagtttttctttcatgatggaacatcagaaatacgccactgggaatacccatcaagggcagaaagttggacagaggaaatgaaacaagccgcacgagaaaggaatcagaaatgggtcgaaaagtaactgtaataccgccaacaatcagtctgcaaacgcacctgccgaca

SEQ ID NO: 16737 - DNA, 260 bp, Unknown
  Description of Unknown: LeftRegion for integrase B3738 sequence
gaatatcgagagcgtgaagcgctatgcgaaacgtgcgccggaaacactgcctagcatgctcgttctttcaggcagaatcgccgagctgaacgagatcaggcaataaaaaaatccccgcacggcttcttggcggttggcgcgcggggaataggtgaaaagcaggtcgctttgccgcgaccgctctaagaggtgattttagcatggcgaagaaccgagccgccatatatgcgcgcttcagctcgcacaatcagcgttcggaa

SEQ ID NO: 16738 - DNA, 260 bp, Unknown
  Description of Unknown: LeftRegion for integrase B3739 sequence
atatggtatcgcacgcaaactttttggggaaatcatcatggtataccgtagtgatacctcgcgtgcgcgcgtgcgtgtgcgcgcgatcgtgcgcgcactgtctctgtacctgtatctgtatctgagactgtatctgtattctgtttctgattctgaatatctactactgcaaatctatcgttagaaggggggtggcgctgttgccgagaaaacctgcaaagcacccggcgaagccgaagcggggcaagaagctggaaatc

SEQ ID NO: 16739 - DNA, 260 bp, Unknown
  Description of Unknown: LeftRegion for integrase B3740 sequence
agatagatggatttttgctgaaagcttttatatttacttatgttttgttacatgttattatatttttacacaaaaaaccgactcctgcgaccaacaggaaccggtttaataaataagataatctcggagaaaatcttacctacaccataattatatcatctcctggattatcgcacaagtaaaaaaaggagaatgataaaatgaatgaatcagtatgcatctatctaaggaaatccagagccgatcgggaagctgaagca

SEQ ID NO: 16740 - DNA, 260 bp, Unknown
  Description of Unknown: LeftRegion for integrase B3741 sequence
gcggccttcggcaatgcgctctgtgtgcaaagcctatcgcttttgtgtatggacattctcgtgtgtatcactcgacgacttggtgtaccgatgcaatgtcacaaccgtttcaaatgtttgaagaagaagctattgcaaaaggatttcggaagtgcaaggcttgtcaaaagcgagatgaaagcattaaggagtaatggtgtatggcacgttcagcgaagaaaattgaatatgcactcgctgaacagatcggtgtgatctat

SEQ ID NO: 16741 - DNA, 260 bp, Unknown
  Description of Unknown: LeftRegion for integrase B3742 sequence
cttacgacctctgtgatccaacgtaactgcaagtgcggaatcaaccgcgcgtactcgatactacgcaatcttcaggtctacgggcttattcatgaggccggaaaagacacctatgaatggacagaaaaagccctcctgctgggcgcagaagggcgtaacgggtaacagatatgtcgatagatattaaatggcaagtgccaatggcaaagccggaggtcagcgaactggccgtcgtatatgcccggtattcaagccacagt

SEQ ID NO: 16742 - DNA, 260 bp, Unknown
  Description of Unknown: LeftRegion for integrase B3743 sequence
gacattcgatccgacatttattgagcagaatgtgaggaaaattattctgtacgacaataggttggtgttcagtatggctgatgggcgagaggagaaaattagttggaaaaataaatcacgctctcaatcgtggacgccggaaatgaaagaacacgcaagacaaaggactatggaacggttgcagaataggaggataaacgatgccgacagtaaaggtaataccagcgactcgtgattttcatacgggcatagaaaagaca

SEQ ID NO: 16743 - DNA, 260 bp, Unknown
  Description of Unknown: LeftRegion for integrase B3744 sequence
ggatggaagaggtttttgatgcgagggtccgccgcattgaggcaagatactcgcatatgctcaaaatgcaaaacaggtggctgcggtttacggttatcttgtgtctttgccttaccgtgtttatcatcgtcatgctgttgtatgatgttacgcatccggacatcggatggatacgagatcatcttaattagggagaaaaaatggatacgcttgcagatgttgtcgtttatgccagatacagctcagcagggcaaaacgat

SEQ ID NO: 16744 - DNA, 260 bp, Unknown
  Description of Unknown: LeftRegion for integrase B3745 sequence
cttacgacctctgcgatccaacgtagctgcaagtgcggaatcaaccgcgcgtactcgatactacgcaatcttcaggtctacgggcttattcatgaggccggaaaagacacctatgaatggacagaaaaagccctcctgctgggcgcagaagggcgtaacgggtaacagatatgtcgatagatattaaatggcaagtgccaatggcaaagccggaggtcagcgaactggccgtcgtatatgcccggtattcaagccacagt

SEQ ID NO: 16745 - DNA, 260 bp, Unknown
  Description of Unknown: LeftRegion for integrase B3746 sequence
aagatacttatgaatacaagagggaagacggaaccgtcggaaaccttcacaaagagaataccgggatgtacgattttgagttgccagatgaacttccatcggctgaaactattccagagccgttatacggttatgtcgtagaatggcttgcagaaaaagcaaagtcatacagttgaatttgatctttgaggtaaggaactatggcacgttcagcgaagaaaattgaatacgcgcccgctgaacagatcggcgtgatctat

SEQ ID NO: 16746 - DNA, 260 bp, Unknown
  Description of Unknown: LeftRegion for integrase B3747 sequence
aatcaaggctctgcttgaaaatcacgaacaattaaatacgctcgatataggcttattcaaagcgtgtgtttcacgaatttggataagccatttttgcaccatagaggttgaatttatcaacggcatacacatcaaaaatataacggaaaggaagcttgaaaatgaccacagcaacaaatgtaacgataattcctgcgaaagtgcagactgcggaaaatcgcagtaaataccaccagttgagagttgccgcatactgccga

SEQ ID NO: 16747 - DNA, 260 bp, Unknown
  Description of Unknown: LeftRegion for integrase B3748 sequence
atatcgccaactggtcggccgctcaaggtgcagctaccgcaccgcagcccgttcagcaggtagtggagcagaaaccgtctcccgccaatgaaatccgcaaatacaagggcctgctggatgacggtatcatcacgcaggaagaatttgaagctaagaaaaagcaactgctgggcctgtaaatttgaaaggagcgtgacggcatgagaaaaaagtccaacctcaatgcggctactcgtgccgtcatctatgccaggtattcc

SEQ ID NO: 16748 - DNA, 260 bp, Unknown
  Description of Unknown: LeftRegion for integrase B3749 sequence
cgattgcgtgttcgtgcacaagaatatggatatagcagcaaacacggcacaattttgagaaattttcaggacaaatgctgtgagtataaagcaaagatcaaggaaaatgcgtctattgaaaacctcaccgcttatgcagcatatttgcaaagcggtgagggattgccaaaacgctatgagcggataaagaggacaagaccatgaatgtagtcatatatgcccggttctcatcgcacagtcaaacagaacagagtattgag

SEQ ID NO: 16749 - DNA, 260 bp, Unknown; identical to SEQ ID NO: 16742
  Description of Unknown: LeftRegion for integrase B3750 sequence

SEQ ID NO: 16750 - DNA, 260 bp, Unknown
  Description of Unknown: LeftRegion for integrase B3751 sequence
tctttaacaactgttggctatggcgatatatacccggtatcaaccgccgggcgtgttttcactatgctgtcgtcgctggttggtattgccgttgtagccttgcccgccggtatcataacggcggggtacatggacgcgctgcgcgaagattccgacaaaaagaaatagcccaccaatcggcgggcagggggggtgcttatatgcgggcgtttatttactgccgattttccagccataagcagcaagagcttagcatagag

SEQ ID NO: 16751 - DNA, 260 bp, Unknown
  Description of Unknown: LeftRegion for integrase B3752 sequence
ccttaacggcaacatgtaagcaacaacaaaagccgtgcagtgcctcagcacagaacggctttcacgtagattctctcttgccggacgctccggaagatataatctgtctcgcaaactaattatatcatttctggtacgtccttggcaaggggcgtatttttgtaccttttatttcataccatatttaaggagatgatattatgttggacccgaatgggatttattttgcttatcttagaaagtcgcgtgaggatcgtgag

SEQ ID NO: 16752 - DNA, 260 bp, Unknown
  Description of Unknown: LeftRegion for integrase B3753 sequence
ccttgagtgccttgatgacttctcttgacgagtagcttctcatgtcggcttccctcctgacatgagaagtataacacatagtattatatttgtcaatcggcaattacaaatatttctatatttgttttttgatttcagcataacaaaagctgccctgcatcgattgctcggggcaattatgaaagaaggagtcaatcaaaatgtggatgcttccccaaatgtccgtcgatgacatcataatgtatctccggaagtcccga

SEQ ID NO: 16753 - DNA, 260 bp, Unknown
  Description of Unknown: LeftRegion for integrase B3754 sequence
aagggaaatgtacagatgttggagaagtctttggatattctcttgatattgatgaaatagaataaataataaaaaagccggcttctgcgaccaacaggaaccggttttaataaataagataattcggagaaaatcttacctacaccataattatatcatctcctggattatcgcacaagtaaaaaaaggagaatgataaaatgaatgaatcagtatgcatctatctaaggaaatccagagccgatcgggaagctgaagcg

SEQ ID NO: 16754 - DNA, 260 bp, Unknown
  Description of Unknown: LeftRegion for integrase B3755 sequence
cgaactcggctaccgcggcgacgcgtttgctgcggaggacgtctccatcagcgacgacctcggccccgatgaccgcatcggctggccgaatacgcactatgtctgcatccgccggatgggcgacgacgactttgtggcaaggttcggatcgccgcaggccatcgggttctgcgcgtttttagaggaaaaggagaaattaaatggatacggtaaataaatttggcagctattgcatgtatctgcgccgatcccgcgcggac

SEQ ID NO: 16755 - DNA, 260 bp, Unknown
  Description of Unknown: LeftRegion for integrase B3756 sequence
tcgccagacgcagttttggaatttcaattcaatgatggccatgcagaaatacataattggtcatacgagcgccatgggcacaaatggacagccgctcagagagcacgtttttcagaaaccatgaagcgtcattacacaccggagcgcaggcagaccatgagtgagaaaatgaagcagatcaggaaggagcgcggagcacagtggcgaaaagagtaacgacgatcatgccgacattggtgcggtttacggaagcgcccatt

SEQ ID NO: 16756 - DNA, 260 bp, Unknown
  Description of Unknown: LeftRegion for integrase B3757 sequence
atctgtgatgtacttaaattggatgaatttgatgcggctgtatttcgggataatattcaccatattgtgattccgaaaccgtttgaggtgcagtttttctttcacgatggaacatctgatatacggcattggaagtacccatcaagggcagaaagttggacagaggaaatgaaacaagccgcacgagaaaggaatcagaaatgggtcgaaaagtaactgtaataccgccaacaatcagtctgcaaacgcacctgccgaca

SEQ ID NO: 16757 - DNA, 260 bp, Unknown
  Description of Unknown: LeftRegion for integrase B3758 sequence
ccttgagcgccttgatgacttctcttgacgagtagcttctcatgtcggcttccctcctgacatgatcagcataacacatagtattatatttgtcaatcggcaattacgaatatttctatatttgttttttgatttcagcataacaaaagctgccctgcaccgattgctcggggcaattatgaaagaaggtgtcaatcaaaatgtggatgcttcccccaatgtccgtcgatgacatcataatgtacctccggaagtcccga

SEQ ID NO: 16758 - DNA, 260 bp, Unknown; identical to SEQ ID NO: 16187
  Description of Unknown: LeftRegion for integrase B3759 sequence

SEQ ID NO: 16759 - DNA, 260 bp, Unknown; identical to SEQ ID NO: 16751
  Description of Unknown: LeftRegion for integrase B3760 sequence

SEQ ID NO: 16760 - DNA, 260 bp, Unknown; identical to SEQ ID NO: 16475
  Description of Unknown: LeftRegion for integrase B3761 sequence

SEQ ID NO: 16761 - DNA, 260 bp, Unknown
  Description of Unknown: LeftRegion for integrase B3762 sequence
ggttggtttagataatattgattgggttgaggtatttcctaataatgaattaaaaatatatttacgtgatggtacaaatgtaattgaaaaatggaatgactattcacgtaagaattcttggactgatgaaatgaaagcaaaggctagagagcaagctataaaaaagtcattagttaattatttgaggggcggtaatattaatggctaaagttacaattatcccctcaaagaaaaatccaataaccttaactccaatcaat

SEQ ID NO: 16762 - DNA, 260 bp, Unknown
  Description of Unknown: LeftRegion for integrase B3763 sequence
cgatctcggttatcgcggcgacgcgtttgccgcggaggacgtctccatcagcgacgacctcggccccgatgaccgcatcggttggccgaatacgcactatgtctgcatccgccggatgggcgacgacgactttgtggcaaggttcgggtcgccgcaggccatcgggttctgcgcgtttttcgagggaaaggatgaattaaatggatacggtaaataaatttggcagctattgcatgtatctgcgccgatcccgcgcggac

SEQ ID NO: 16763 - DNA, 260 bp, Unknown
  Description of Unknown: LeftRegion for integrase B3764 sequence
tactgatgagttttttgataaatcaatacaatatatgcgtcttaaatatggtgttcaaagaatttgtaaaggtattttattttattttgaacctatttttatgatctacaaggaaatagaataatttattgaaatattttcaaatagattattgtattttatttgtatagattgttaataaagaagaaaggaatgattttatgaaaaaagttgctatttattctcgtaaatctaaatttactggtaaaggtgaatcaata

SEQ ID NO: 16764 - DNA, 260 bp, Unknown; identical to SEQ ID NO: 13709
  Description of Unknown: LeftRegion for integrase B3765 sequence

SEQ ID NO: 16765 - DNA, 260 bp, Unknown; identical to SEQ ID NO: 15752
  Description of Unknown: LeftRegion for integrase B3766 sequence

SEQ ID NO: 16766 - DNA, 260 bp, Unknown
  Description of Unknown: LeftRegion for integrase B3767 sequence
catcttctccgcagaaaagacagggcgttttggaacgagttgaacctaaacgtgcaactctacttatataaatgactcccagatatgatatttcggaaatgaatttaactttttgactgttgaaagtgtggaaagatttattttccccagaacttgcaacggcttgcaacaaacttaaaactacttgaaaggtggtatttatgcctcgcaaaaagaaactgcaagaggtaggcggactgcggctggtggcgtactatcgc

SEQ ID NO: 16767 - DNA, 260 bp, Unknown
  Description of Unknown: LeftRegion for integrase B3768 sequence
ggaaaatgtacagatgttggagaagtccttggatattctcttgatattgatgaaatagaataaataataaaaaagccggctctcgctaccaacgggaaccggttttaataaataagataatccggagaaaaatcttacctacaccataattatatcatctcctggattatcgcacaagtaaaaaaaaggagaatgataaaatgaatgaatcagtatgtatctatttaaggaaatccagagccgatcgggaagctgaagca

SEQ ID NO: 16768 - DNA, 260 bp, Unknown
  Description of Unknown: LeftRegion for integrase B3769 sequence
cttgagcgccttgatgacttctcttgacgagtagcttctcatgtcggcttccctcctgacatgaggagtataacacatagtattatatttgtcaatcggcaattacaaatatttctatatttgtttttttgatttcagcataacaaaagctgccctgcatcgattgctcggggcaattatgaaagaaggtgtcaatcaaaatgtggatgcttcccccaatgtccgtcgatgacatcataatgtatctccggaaatcccga

SEQ ID NO: 16769 - DNA, 260 bp, Unknown
  Description of Unknown: LeftRegion for integrase B3770 sequence
aggaaaaatgccgtccttcgtccatagactacgatgcgggtatggccatttttgagggttcaggtaaaaagccttacgaaaccacggtaaattcctgcacctgcagagatttctttgtccgccgtttgccgtgtaagcatatctaccggcttcggatggagcttgaaaacagagaagctcgttaaaaatgggggcgttatatggctcgatcaaagaaaactgaatgcttgccacttgagcggatcggcgtgatctatgcc

SEQ ID NO: 16770 - DNA, 260 bp, Unknown
  Description of Unknown: LeftRegion for integrase B3771 sequence
atttgaacgttttaaagtttggaataaagagtttggacgaatacattttactgatgaagaaatcaataaaataatggaatatacaaggttcttacttagccaaagaagacagtaagtctacataggtttactctatttaaaggaggtgatgcctgaattcagttcatcgtagaatttacatcaaaggaaaggtggaaccaatgacaacgtttgatatgaacaacgctgtagacaatgcgttcggtatggacgtatatgct

SEQ ID NO: 16771 - DNA, 260 bp, Unknown; identical to SEQ ID NO: 14662
  Description of Unknown: LeftRegion for integrase B3772 sequence

SEQ ID NO: 16772 - DNA, 260 bp, Unknown
  Description of Unknown: LeftRegion for integrase B3773 sequence
caaaggcattagcgccaaagattaggaagttctatgatagtgacaagggcaaagcttactttgaaaaatggcttaccaaacaccctgaatatgatgaacggacacctgatgcaactgcatcgggcgtctgagttttcgcacattcgacagcaaataaaggaggattataattatgtatagaaagaattggaggctcacagatgaatgttgtaatatacgctcggttttccagccatagtcaaaccgagcaatctattaaa

SEQ ID NO: 16773 - DNA, 260 bp, Unknown
  Description of Unknown: LeftRegion for integrase B3774 sequence
ttatttggtattttataaatttgccgtgcggcattggtgctgctgtcggtctgttttttgccatgtacaaggcattaataaaagaaattagccagcgtccgcttcctggtgcctataaaacaaaagaggctgcgcagttggctatgcttaatactttaaaagctattaaagccaaaaaacaaagcaaggaagggtaggaaatggcaacaaaaaagaaaaccgccacccaaagggcggacggcgtatataatcgggcggtt

SEQ ID NO: 16774 - DNA, 260 bp, Unknown
  Description of Unknown: LeftRegion for integrase B3775 sequence
ccttgagcgccttgatgacttctcttgacgagtagcttctcatgtcggcttccctcctgacatgattagtataacacatagtattatatttgtcaatccgcaattacgaatatttctatatttgttttttgatttcggcataacaaaagctgccctgcaccgattgctcggggcaattatgaaagaaggtgtcaatcaaaatgtggatgcttcccccaatgtccgtcgatgacatcataatgtacctccggaagtcccga

SEQ ID NO: 16775 - DNA, 260 bp, Unknown; identical to SEQ ID NO: 16767
  Description of Unknown: LeftRegion for integrase B3776 sequence

SEQ ID NO: 16776 - DNA, 260 bp, Unknown
  Description of Unknown: LeftRegion for integrase B3777 sequence
ggcaatccctgtagggggcacaacctgcgcgaaacactcctcgaacaagcctgcgcagacatgctcggcacccagggtttcgaccccgtccaggttggcgagcagatcgtgatgatcgaggccttcgagcatcagctcaccttccacctcgcggatggaaccatgacaccagtggggttaaccagtgaggggaggctggcatgaaccgcaccgtcaccgcgatacccgcaacaaagaaacttgggaatctcacagcctca

SEQ ID NO: 16777 - DNA, 260 bp, Unknown
  Description of Unknown: LeftRegion for integrase B3778 sequence
tgcgcattgattggtcttgcaatcactgttttaggtgctgcaatcgtcggtgttccaattgctatattgggcgctttgcttgccgtaggtgcaaggggaaggaaatagaaaaccctgcgcggcttcttggcggtcggcgcgcagggcaagtgcaaagaacgaagcgcattagcgcactcgctctaaggggtgattttagcatggtgaagaacagagcagccatatacgcgcgcttcagctcgcacaatcagcgctctgag

SEQ ID NO: 16778 - DNA, 260 bp, Unknown
  Description of Unknown: LeftRegion for integrase B3779 sequence
ccttgagcgccttgatgacttctcttgacgagtagcttctcatgtcggcttccctcctgacatgattagcataacacatagtattatatttgtcaatcggcaattacgaatatttctatatttgttttttgatttcagcataacaaaagctgccctgcaccgattgctcagggcaattatgaaagaaggtgttaatcaaaatgtggatgcttcccccaatgtccgtcgatgacatcataatgtacctccggaagtcccga

SEQ ID NO: 16779 - DNA, 260 bp, Unknown
  Description of Unknown: LeftRegion for integrase B3780 sequence
taactattatctattatataagcatgacggaggaatttggcctatgaaaacaaaacagattgacgaaacccatgtggaaatagccggtctgccaaatgtgcggctctttttcagccaatccccctctcccggtctcgaagctgctgtgctggggatgtagttgcgtgattcactgtcgcaggatcagggagggaatagcgatgaagaaacgggttctatgcctgtacagggtatcgacaatcggtcaggtagatcatgac

SEQ ID NO: 16780 - DNA, 260 bp, Unknown
  Description of Unknown: LeftRegion for integrase B3781 sequence
attttatctttgacggtcatactaaatatgctgaatacaatgtaacgcaagttacagcattaagaaaagcatttggtgaagaagtggaaaatatactacttccgttagcaaagttgaatgataaagggttagcaaaagttcgtaattacatttccgatatgctgaaaatagaagaatatcgcaattaggaggaatattacttgaagtcgaaaaacaagccattcatacggaaagccgttgcttacgctcggttttcatca

SEQ ID NO: 16781 - DNA, 260 bp, Unknown
  Description of Unknown: LeftRegion for integrase B3782 sequence
aacatccggcaacagctcgggcgaatgcggaaaagaatctatgattctctgtacaatagcctcgaaatgccgctcacaagcggacgcaatataacagaatttctttgtaagtgcgacagatttcaaggagtttccgttcaagtatttaatgattactacgcttttttgaatgaaaagctgattgaaagggggccgctggtatgaatgtagtcatatatgcccggttttcctcacacagtcaaacagaacagagtattgag

SEQ ID NO: 16782 - DNA, 260 bp, Unknown
  Description of Unknown: LeftRegion for integrase B3783 sequence
cttgagcgccttgatgacttctcttgacgagtagcttctcatgtcggcttccctcctgacatgagaagtataacacatagtattatatttgtcaatcggcaattacaaatatttctatatttgttattttgatttcagcataacaaaagctgccctgcatcgattgctcggggcaattatgaaagaaggagtcaatcaaaatgtggatgcttccccaaatgtccgtcgatgacatcataatgtatctccggaagtcccga

SEQ ID NO: 16783 - DNA, 260 bp, Unknown
  Description of Unknown: LeftRegion for integrase B3784 sequence
cgactggaactatatctatggaattgactcggtagggcttttaactatcgttcattgtatctatacagaatccaataagtccttaacacaacttttggatgaatatttcagagcatatctttcatgttcgcttgaaatgactaacaaagctatgttaccatatttaaagtgactggtcgcttatttcaaggaggaatatgatgtatttagaaataagcaaccccatggattatcatgttgcattgtatattcgtttatca

SEQ ID NO: 16784 - DNA, 260 bp, Unknown; identical to SEQ ID NO: 14662
  Description of Unknown: LeftRegion for integrase B3785 sequence

SEQ ID NO: 16785 - DNA, 260 bp, Unknown
  Description of Unknown: LeftRegion for integrase B3786 sequence
ggaaacccctgtagggggcacaacctgcgcgaaacgctcctcgaacacgcctgcgcagacatgctcggcacccagggtttcgaccctgtccaggttggcgagcaggtcgtgatgatcgaggccttcgagcatcagctcaccttccacctcgcagatggaaccatgatgccggtgggcttaaccagtgaggggtggttggcatgagtcgcacggtcacagcgatacccgcaacaaagaaacttgggaatgtcacaaccccg

SEQ ID NO: 16786 - DNA, 260 bp, Unknown
  Description of Unknown: LeftRegion for integrase B3787 sequence
ttgatgaaggaggtgtgccatgaaagcacaggaactggtaatcagctgtttttacgataatgatggggagtccatacgggacttgctatattcatccttcgctgccttcctcaagcgggagcttggaaaatttgcgcccgcacaggatcatcctgtatgatagacgggatgaatggccgcttatctcaggaggttagagtatgtatcaagagataagcaaccctatggattatcatgtggcattatacatcagactgtca

SEQ ID NO: 16787 - DNA, 260 bp, Unknown; identical to SEQ ID NO: 16598
  Description of Unknown: LeftRegion for integrase B3788 sequence

SEQ ID NO: 16788 - DNA, 260 bp, Unknown
  Description of Unknown: LeftRegion for integrase B3789 sequence
aattattgcagcgtcattattttgctgcgccagttggtggcagcgggtcactgcacaaaaaaggaagccaacaggatcgctgcccggatcgcgagaaagaccggtgtggatctgatcctttctatataaaattatcgaattaacactagctattccagaaaaggtgtggtaatgtgtgttgctgacaaggggggggaggaatggcagtggcaagggacaatttggcaagaaagcagattttcataccagccaatatgccg

SEQ ID NO: 16789 - DNA, 260 bp, Unknown
  Description of Unknown: LeftRegion for integrase B3790 sequence
aaagatagcacgttttgcattccagtcgaaaaataaaacgcccacggtgttaccagcaccgtaggcgttccagatcagcttacccggagatagtacggaaaccagttcagttctatccagaagggcaataacagccaacctcacagatgttattgtaccacctccgggcaggcttgtcaaagtgtacccggaggtattttatgggcaaaaagcaaaaaatcactggcggtgacgccgtcatttacgcccgctactcgtcc

SEQ ID NO: 16790 - DNA, 260 bp, Unknown
  Description of Unknown: LeftRegion for integrase B3791 sequence
actgccttacagcgctggataatcaggctctttctcttacagcagatgaagtgcgccttattttgaagtaccgtgctttggacgatgaaggacggactatggttgagtccacccttattcaggaaacacgtagagtggaaacggctaaaggggaaaccgcaaatgccgggtgataaattttgcagaatggaggaagcaccatgtatgacgatataaaaacctgtgtcctgtatgtcaggtattcaagcaataaccaaaca

SEQ ID NO: 16791 - DNA, 260 bp, Unknown
  Description of Unknown: LeftRegion for integrase B3792 sequence
atatcgccaactggtcggccgctcaaagtgcagctaccgcaccgcagcccgttcagcaggtagtggagcagaaaccgtctcccgccgatgaaatccgcaaatacaagggcctgctggatgacggtatcatcacgcaggaagaatttgaagctaagaaaaagcaactgctgggcctgtaaatttgaaaggagcgtgacggcatgagaaaaaagtccaacctcaatgcggctactcgtgccgtcatctatgccaggtattcc

SEQ ID NO: 16792 - DNA, 260 bp, Unknown
  Description of Unknown: LeftRegion for integrase B3793 sequence
ataaaaccgttcttggttcaagtgttaccctgccgcttgcttatgcggattccgtcaggcttgacccataaaaaaaccgcccctgcattcacaggagcggaccatttgagagagacaccagcaccacccgatgtcccaccaccgcgcttagtatagcacagcggcggcggggctgtaaaccccttatgaaaggattttttatgaacgctgtgatttatgcccgctactcttctcataatcagaccgaacaatctatcgaa

SEQ ID NO: 16793 - DNA, 260 bp, Unknown
  Description of Unknown: LeftRegion for integrase B3794 sequence
attagatgaatttgactcaaatgcatttgacgaacaaataaaaaaagtaatagtaattggtgatgacttgctagaatttcattttaatgatggaaagataataagtgagaaatgggaatacaatgctagaaaagaatattggacagaagaaaaaagaagagaacgtggagaaaaattaaaaaagagttggaggatgaaaaatgacaaaaaaagtaacaacgataccagcattactaaataagcaatctacaaatcaggtt

SEQ ID NO: 16794 - DNA, 260 bp, Unknown
  Description of Unknown: LeftRegion for integrase B3795 sequence
taaagataataattttgttattccgttgaaatacggctcctcaagcggcgaattctttgagggaattgcttgtgttgaggtaaacaaaaaatccgaaacttattacaaatatatttttacaaatgataaagattcgttctaatgataacatttgtgtctttggacttgattaatactgcacaaagagcgatgaatggagtatgacaaaagttttaaaatgtgccatatatacaagaaaatcatctgaagaaggtcttgaa

SEQ ID NO: 16795 - DNA, 260 bp, Unknown; identical to SEQ ID NO: 15029
  Description of Unknown: LeftRegion for integrase B3796 sequence

SEQ ID NO: 16796 - DNA, 260 bp, Unknown
  Description of Unknown: LeftRegion for integrase B3797 sequence
ccttgagcgccttgatgacttctcttgacgagtagcttctcatgtcggcttccctcctgacatgattagtataacacatagtattatatttgtcaatcggcaattacaaatatttctatatttgttttttgatttcagtataacaaaagctgccctgcaccgattgctcggggcaattatgaaagaaggtgttaatcaaaatgtggatgcttccccaaatgtccgtcgatgacatcataatgtacctccggaagtcccga

SEQ ID NO: 16797 - DNA, 260 bp, Unknown
  Description of Unknown: LeftRegion for integrase B3798 sequence
tatgagcgcagcgcccgcacgaaaaatattatcatttatctgctatctgcaattttagcacttgcccttgctgcgctgattattgatctgtgcagcccgaatctcggctggctgcgcgccgcgcttcacatgcagttcctgcatttataaaaaacaaagccgccccggcgcataccggagcggcaattttggaggttcttatgggctatgatatcaaccttgcaaatgtagtgatctatgcccgctactcgtccgccggg

SEQ ID NO: 16798 - DNA, 260 bp, Unknown
  Description of Unknown: LeftRegion for integrase B3799 sequence
attggactggccctctacggtatgattgtgatgagcattctggatgcggagttacacgccgccattcttcccggcatcttcatgatgctggcgttcaacgcacctgacctgatccggctgaaactgggcaagttccgggataacgtgggcgattatctgcggcaataaaaaagcccgcgcaatggcgggcgggtgatggcatgaaaaaagagaacgaaatccgggcagttgtctacgcccggtactcatcccattcgcaa

SEQ ID NO: 16799 - DNA, 260 bp, Unknown
  Description of Unknown: LeftRegion for integrase B3800 sequence
cattattcctataactatagtaaataatgttatcagtactatacacgttttcttcataaataccaactcccttaaattatacttataatttttaaataataattcataattaaatatttgattttaaccatttaacctcaataagtttaccatatttttactattttgttatattatataataaggaaggggtgaatcttgtgattgctgcaatatattctagaaaatcaaaatttacaggaaaaggcgaatctatagaa

SEQ ID NO: 16800 - DNA, 260 bp, Unknown
  Description of Unknown: LeftRegion for integrase B3801 sequence
cagcactgggggaatccagtgcaaggctgcttgaactcgcggatgaagatccgctggaagaataaaaaacgcccccggtgctaccaacaccgagagcgtttacagagcagcttgcccacaagggtacaagacgacccaaccaattgttattgtactccaaaaaggcaggcttgtcaaagtataccggtttggagggcaaaatggaaaacgcaaagcgaaaaaaggatgatctggccgggagccgggcggtgatctatgcc

SEQ ID NO: 16801 - DNA, 260 bp, Unknown; identical to SEQ ID NO: 14830
  Description of Unknown: LeftRegion for integrase B3802 sequence

SEQ ID NO: 16802 - DNA, 260 bp, Unknown; identical to SEQ ID NO: 15606
  Description of Unknown: LeftRegion for integrase B3803 sequence

SEQ ID NO: 16803 - DNA, 260 bp, Unknown; identical to SEQ ID NO: 15411
  Description of Unknown: LeftRegion for integrase B3804 sequence

SEQ ID NO: 16804 - DNA, 260 bp, Unknown; identical to SEQ ID NO: 16737
  Description of Unknown: LeftRegion for integrase B3805 sequence

SEQ ID NO: 16805 - DNA, 260 bp, Unknown
  Description of Unknown: LeftRegion for integrase B3806 sequence
ttataatccaaaagggttattttgagagggctatcagtgtaagggctgatagccctattttttttgtctaaaaatgaggagtatctctggttattactcaaataacaagtaatgggtttacatagtatcaaaaaggtgtataataactatgagatattatgacaaacctgtacaaattctatcaaacaggaggaaacaggatggtacaggaaagattaagagcggtattttatgcaagagtttctacagaggaggagaaa

SEQ ID NO: 16806 - DNA, 260 bp, Unknown
  Description of Unknown: LeftRegion for integrase B3807 sequence
agaatatcgagagcgtgaagcgctatgcgaaacgtgcgccggaaacactgcctagcatgctcgttctttcaggcagaatcgccgagctgaacgagatcaggcaataaaaaatccccgcacggcttcttggcggttggcgcgcggggaataggtgaaaagcaggtcgctttgccgcgaccgctctaagaggtgattttagcatggcgaagaaccgagccgccatatatgcgcgcttcagctcgcacaatcagcgttcggaa

SEQ ID NO: 16807 - DNA, 260 bp, Unknown
  Description of Unknown: LeftRegion for integrase B3808 sequence
attttatttttgacggtcacactaaatacgccgaatacaatgtatcgcaagttacggctttaagaaaggcgtttggtgaagaagcggcaaatatactactgccgttagcaaagttaaatgatacagggttggcaaaagtccgtaattacatttccgatatgctaaaaatagaggaatatcgcaaatagggggagcattacttgaaatcgaaaaacaaaccgtatgtgcggaaagctgttgcttatgctcggttttcatca

SEQ ID NO: 16808 - DNA, 260 bp, Unknown; identical to SEQ ID NO: 14243
  Description of Unknown: LeftRegion for integrase B3809 sequence

SEQ ID NO: 16809 - DNA, 260 bp, Unknown
  Description of Unknown: LeftRegion for integrase B3810 sequence
tgcaatgctcagagctgtgtaggtgttgacaatgctgggacgtttaagatcaacgtgattcagtacgatggaaacggaaataagcagactgccactttcgttgtcaacgttcctgagaactaaaaaaaagccctcctgctgggcgcagaagggcgtaacgggtaacagatatgtcgatagatattaaatggcaagtgccaatggcaaagccggaggtcagcgaactggccgtcgtatatgcccggtattcaagccacagt

SEQ ID NO: 16810 - DNA, 260 bp, Unknown
  Description of Unknown: LeftRegion for integrase B3811 sequence
tactgatgagttttttgataaatcaatacaatatatgcgtcttaaatatggtgttcaaagaatttgtaaaggtattttattttattttgaacctatttttatgatctacaaggaaatagaataatttattgaaatattttcaaatagattattgtattttatttgtatagattgttaataaagaagaaaggaatgattttatgaaaaaagttgctatttattctcgtaaatctaaatttaccggtaaaggtgaatcaata

SEQ ID NO: 16811 - DNA, 260 bp, Unknown
  Description of Unknown: LeftRegion for integrase B3812 sequence
atctgtgatgtacttaaattggatgaatttgatgcggctgtatttcgggataatattcaccatattgtgattccgaaaccgtttgaggtgcagtttttctttcacgatggaacatctgatatacggcattggaaatacccatcaagggcagaaagttggacagaggaaatgaaacaagccgcacgagaaaggaatcagaaatgggtcgaaaagtaactgtaataccgccaacaatcagtctgcaaacgcacctgccgaca

SEQ ID NO: 16812 - DNA, 260 bp, Unknown
  Description of Unknown: LeftRegion for integrase B3813 sequence
ctggatcattgacatggttatgatctgttgcaacaaattcaccgacagcaccggcgcggtggtcggcctgaaggttgccgagtacaccagacagccggatcctgatcttgcagaggcttctctggaggagcagcgggaggcagcggccgagactgccagagcttacggctataccgtaatagagtcaggcgctcaggataatgccgacaagtaaaaacacggctcgaaaatgtgccgcaggaggtagctcggataattcc

SEQ ID NO: 16813 - DNA, 260 bp, Unknown
  Description of Unknown: LeftRegion for integrase B3814 sequence
tttgcatgaacgtgtgaaaataagttgtgcaatggcatggcaaataatcctttgtaacaaatgtttaatgaggatgaattgaaagtttatgataagaaatttcaagcaataggtattttagacaaagaagaacaaaaaaagatactggagttcttctatacattaggtgttattacgtttaacctttaatttaacgattgatgagtaagaaaaaaagtaaagagaaagtagtagagttttctaaattgacaaataaagtg

SEQ ID NO: 16814 - DNA, 260 bp, Unknown
  Description of Unknown: LeftRegion for integrase B3815 sequence
tatacatcttcttattcattcgacgattatgacagtgatgaagatgaataaataacaaaaaaccgccccggcgccaaccaggacggccctgcgaatataccaggttatggtaaaacgccttgacaagctcaattttatcatttccccgggatatttgcaaatattacggggcttttttcgcccttttaggaggaaattgtatgaaaagaataggtatttatggtagaaagtctgttttttcagataaatctgaatcaatt

SEQ ID NO: 16815 - DNA, 260 bp, Unknown; identical to SEQ ID NO: 15631
  Description of Unknown: LeftRegion for integrase B3816 sequence

SEQ ID NO: 16816 - DNA, 260 bp, Unknown; identical to SEQ ID NO: 15725
  Description of Unknown: LeftRegion for integrase B3817 sequence

SEQ ID NO: 16817 - DNA, 260 bp, Unknown
  Description of Unknown: LeftRegion for integrase B3818 sequence
gatggaagaggtgtttgatgcgagggtccgccgcattgaggcaagatactcgcatatgctcaaaatgcaaaacaggtggctgcggtttacggttgtcttgtgtctttgccttaccgtgtttatcatcgtcatgctgttgtatgatgttgcgcatccgaacatcggatggatacgagatcatcttaattagggagaaaaaaatggatacgcttgcagatgttgtcgtgtatgccagatacagctcagcagggcagaacgat

SEQ ID NO: 16818 - DNA, 260 bp, Unknown; identical to SEQ ID NO: 15411
  Description of Unknown: LeftRegion for integrase B3819 sequence

SEQ ID NO: 16819 - DNA, 260 bp, Unknown
  Description of Unknown: LeftRegion for integrase B3820 sequence
attattctggtatattataccagtggtaatatttggtattttttttgacgcataaaaaaaccgcccaactcggcaaagttggacggcggcacctaacaaaggtaggcactataatattaactgcaattatattataaaccataggcctgcttttgtataggcttattttttatgcaatttattagaaagtaggtatttctatggttagaatcgcaagttatttaagaaaatcagtatattcagacaaatcggacagtata

SEQ ID NO: 16820 - DNA, 260 bp, Unknown; identical to SEQ ID NO: 16746
  Description of Unknown: LeftRegion for integrase B3821 sequence

SEQ ID NO: 16821 - DNA, 260 bp, Unknown; identical to SEQ ID NO: 16741
  Description of Unknown: LeftRegion for integrase B3822 sequence

SEQ ID NO: 16822 - DNA, 260 bp, Unknown
  Description of Unknown: LeftRegion for integrase B3823 sequence
cttgagcgccttgatgacttctcttgacgagtagcttctcatgtcggcttccctcctgacatgattagtataacacatagtattatatttgtcaatcggcaattacaaatatttctatatttgtttttttgatttcagcataacaaaagctgccctgcaccgattgctcggggcaattatgaaagaaggagtcaatcaaaatgtggatgcttccccaaatgtccgtcgatgacatcataatgtatctccggaagtcccga

SEQ ID NO: 16823 - DNA, 260 bp, Unknown
  Description of Unknown: LeftRegion for integrase B3824 sequence
taggagatgatatacctaagataaaagaaattatcgtttatccaaataatactcttttattaaatttgaatgatggctctagtattactaaaacttggaatgacatatcaagaagtaattcctggactgatgagatgaaagaagaggctagaaagcgttctttgaagcaatgggaaaatataaaaagggagggtaagtaaatggcaaaagtaacagttattccttccactaaagttagtacattctctaatgcctttaat

SEQ ID NO: 16824 - DNA, 260 bp, Unknown; identical to SEQ ID NO: 14232
  Description of Unknown: LeftRegion for integrase B3825 sequence

SEQ ID NO: 16825 - DNA, 260 bp, Unknown
  Description of Unknown: LeftRegion for integrase B3826 sequence
agggaaatgtacagatgttggagaagtctttggatattctcttgatattgatgaaatagaataaataataaaaaagccggctcctgcgaccaacaggaaccggtttaataaataagataatctcggagaaaatcttacctacactatgattatatcatctcctggattatcgcacaagttaaaaaaaggagaatgataaaatgaatgaatcagtatgcatctatctaaggaaatccagagctgatcgggaagctgaagcg

SEQ ID NO: 16826 - DNA, 260 bp, Unknown
  Description of Unknown: LeftRegion for integrase B3827 sequence
aagggaaatgtacagatgttggagaagtctttggatattctcttgatattgatgaaatagaataaataataaaaaagccggctcctgcgaccaacaggaaccggttttaataaataagataatccggagaaaatcttacctacactatgattatatcatctcctggattatcgcacaagttaaaaaaggagaatgataaaatgaatgaatcagtatgcatctatctaaggaaatccagagccgatcgggaagctgaagcg

SEQ ID NO: 16827 - DNA, 260 bp, Unknown
  Description of Unknown: LeftRegion for integrase B3828 sequence
agagcttttagatagcggtattattactcaagaagaatttgaccagaaaaaatcagaacttttataaaaagaaccggctcctgctaccaacgggaaccggttttttgaaaaataagacaatctcggtgataatcttacctacacattaagtatatcatctccgggattgccgtacaagtgtaaaaaaggagaatgatgaaatgaatgaatcagtatgcatctatttaaggaaatccagagccgatcgggaagctgaagca

SEQ ID NO: 16828 - DNA, 260 bp, Unknown
  Description of Unknown: LeftRegion for integrase B3829 sequence
aagggaaatgtacagatgttggagaagtctttggatattctcttgatattgatgaaatagaataaataataaaaaagccggctcctgcgaccaacaggaaccggttttaataaataagataatccggagaaaatcttacctacaccataattatatcatctcctggattatcgcacaagtaaaaaaaggagaatgataaaatgaatgaatcagtatgcatctatctaaggaaatccagagccgatcgggaagctgaggcg

SEQ ID NO: 16829 - DNA, 260 bp, Unknown; identical to SEQ ID NO: 16828
  Description of Unknown: LeftRegion for integrase B3830 sequence

SEQ ID NO: 16830 - DNA, 260 bp, Unknown; identical to SEQ ID NO: 16825
  Description of Unknown: LeftRegion for integrase B3831 sequence

SEQ ID NO: 16831 - DNA, 260 bp, Unknown
  Description of Unknown: LeftRegion for integrase B3832 sequence
agatagatggatttttgctgaaagcttttatatttacttatgttttgttacatgttattatatttttacacaaaaaaccgactcctgcggccaacaggaaccggtttaataaataagatagtctcggagaaaatcttacctacaccataattatatcatctcctggattatcgcacaagtaaaaaaaggagaatgataaaatgaatgaatcagtatgtatctatttaaggaaatccagagccgatcgggaagctgaagca

SEQ ID NO: 16832 - DNA, 260 bp, Unknown
  Description of Unknown: LeftRegion for integrase B3833 sequence
gctttgtcagcgtttcggtagatttttccgtttttcagcaaaataaaaacgcccacggtgttacaagcaccgcaggcgttccagatcagcttgctcagagatggtacaggataaaacctgtccagagcaataacaaacctcgcagatgttattgtaccacctccgggcaggcttgtcaaagtgtacccggaggtatttttatgggcaaaaaacaaaagacaaacggcggcgatgcggtcatctacgcccgctattcttcc

SEQ ID NO: 16833 - DNA, 260 bp, Unknown
  Description of Unknown: LeftRegion for integrase B3834 sequence
tctgaagatgccttcaataagaaaatcgattatattactgtctttccaggcaatgtactaagaattaaaagagttgatggaaacgaagatgatattacatggaatgatccaaaaagaagtgaaggatggactccagaaatgagagaaaaggcaaggcaaagggctaaagcgcattacaagaaagaaggagctgatgaataatggcaaaagtaacaataataccttcaaagattaatccaattacacatcagcatcttgat

SEQ ID NO: 16834 - DNA, 260 bp, Unknown
  Description of Unknown: LeftRegion for integrase B3835 sequence
agatagatggatttttgctgaaagcttttatatttacttatgttttgttacatgttattatatttttacacaaaaaaccgactcctgcgaccaacaggaaccggtttaataaataagataatctcggagaaaatcttacctacaccataattatatcatctcctggattatcacacaagtaaaaaaaggagaatgataaaatgaatgaatcagtatgcatctatctaaggaaatccagagccgatcgggaagctgaagca

SEQ ID NO: 16835 - DNA, 260 bp, Unknown; identical to SEQ ID NO: 16825
  Description of Unknown: LeftRegion for integrase B3836 sequence

SEQ ID NO: 16836 - DNA, 260 bp, Unknown
  Description of Unknown: LeftRegion for integrase B3837 sequence
caatcatagaatcaaccattacagtcaatacagatttttacattgttggtgatatacctttagaaaaactcgacagcaattgcttgagcagcaacggacgaaagcttgaacgcctgcttgataagggtgagtgctatgcaacggagctggatgaagataaactgttagccctgctcgcggaagaataaccgaggtatcgcatgaaatttaagtatcccgccatgggaacaacaaaaaacgcggttatctatgcccgatac

SEQ ID NO: 16837 - DNA, 260 bp, Unknown; identical to SEQ ID NO: 16825
  Description of Unknown: LeftRegion for integrase B3838 sequence

SEQ ID NO: 16838 - DNA, 260 bp, Unknown
  Description of Unknown: LeftRegion for integrase B3839 sequence
cacaattaaagtctaaaataaaaagccgccccggtgcgccaacaccagagcggcaatcgatcatccggaaaatggataatccataacatttacataataccattttccgggacgccaaacaatcagaatatttgttctggtgtttttttgtactctttttactatgtatttacatgattatgatacggaggtatggaattatgagattttttaactacggacgtaaatctgtttactctgacaaatcagattctatcgat

SEQ ID NO: 16839 - DNA, 260 bp, Unknown
  Description of Unknown: LeftRegion for integrase B3840 sequence
aggaaaatgtacagatgttggagaagtccttggatattctcttgatattgatgaaatagaataaataataaaaaagccggctctcgctaccaacgggaaccggttttaataaataagataatccggagaaaaatcttacctacaccataattatatcatctcctggattatcacacaagtaaaaaaaggagaatgataaaatgaatgaatcggtatgtatctatctaaggaaatccagagctgatcgagaagctgaggcg

SEQ ID NO: 16840 - DNA, 260 bp, Unknown
  Description of Unknown: LeftRegion for integrase B3841 sequence
gtcgatgacctaaaaaaatatgaaagcggagaacggtgtatttctaggaacaccatggaaaaaatgataaattattctccattcaagcagtggagtgaagagtttggcgatacagtattcaacgattctgagtacaataaaatcgctgaatacgccagatttatgttatatctgagaaaaaataaaggagatgacagcacatgttaaaatataattctgaaacgaatctcgactccgatattgactctgacattgataaa

SEQ ID NO: 16841 - DNA, 260 bp, Unknown
  Description of Unknown: LeftRegion for integrase B3842 sequence
gtcgatgacttaaaaaaatatgaaagcggagaacggtgtatttctaggaacaccatggaaaaaatgataaattattctccattcaagcagtggagtgaagagtttggcgatacagtattcaacgattctgagtacaataaaatcgctgaatacgccagatttatgttatatctgagaaaaaataaaggagatgacagtacatgttaaaatataattctgaaacgaatctcgactccgatattgactctgacattgataaa

SEQ ID NO: 16842 - DNA, 260 bp, Unknown
  Description of Unknown: LeftRegion for integrase B3843 sequence
atgtacaactgtcggagaagtactggggtattctcttgatattgatgaaatagaataaatgtaaaaaaaaagaaccggctctcgctaccaacgggaaccggttttgaaaaataagacaattccagagaaaaatcttacctacacattaagtatatcatctccgggattgccatacaagtgcaaaaaaggagaatgataaaatgaatgaatcagtatgcatctatttaaggaaatccagagccgatcgggaagctgaagcg

SEQ ID NO: 16843 - DNA, 260 bp, Unknown
  Description of Unknown: LeftRegion for integrase B3844 sequence
tgcgcttcgcgcgcagctttcccagcagcagaaatccctgcgtatgcaccggcttgtgacactcatcctcttgggtattcttttgctgtgtgcccttgcgcttttggtcgacgtactcagtccatcaatcggctggatccgcacataaaaaatcaaccgccccggcctgataagccggagcggtatttctggaggttgccatggacggcctgaatcttgcaaacgttgtgatctatgcgcggtattcttctgccggtcag

SEQ ID NO: 16844 - DNA, 260 bp, Unknown
  Description of Unknown: LeftRegion for integrase B3845 sequence
taatagaccaactcatacagctccgcaaatctcaaggcctcactcagaaagacctagccgctgctgccaatcttgcacagccggccattgcacggcttgagagcaaatcagcggtaccgcagcttgataccttcgtgaaggtagccggagcactcggctataccatagaacttgtacaccaataactagggagtgattatatgctattacttgagaatttaataatgtatctccgaaaatcccgctccgatgacatcagc

SEQ ID NO: 16845 - DNA, 260 bp, Unknown
  Description of Unknown: LeftRegion for integrase B3846 sequence
ttatcgaccagctcattgcgcttcgcaaatctaaaggtctcacccaaaaagaccttgccgctgctgccaacctcgcacagcccgccattgcccgcatggaaagtaaagccgctgttccgcagcttgatactttcgtcaaagtagccggagcgctcggctacactatagagcttgtacaacaatgatataggagtgattatatgctattacctgaaaacttaataatgtatcttcgcaaatcccgttccgatgacgctgcc

SEQ ID NO: 16846 - DNA, 260 bp, Unknown; identical to SEQ ID NO: 16827
  Description of Unknown: LeftRegion for integrase B3847 sequence

SEQ ID NO: 16847 - DNA, 260 bp, Unknown
  Description of Unknown: LeftRegion for integrase B3848 sequence
cgtattgacgacctgcaacgtgccattgcgcggaaggagcgctggaacaaacgtttcttcgttctctgcgtctgccttactgcgtttatactccttctttttgcggtcgatatcctgaccccaaatatcggttggttccgagcataacaaaaaagccgccccggttggagaaaccggagcggcatctttggaggttttttatggatggtctgaatcttgccaacgttgtgatttatgctcggtattcttccgctgggcag

SEQ ID NO: 16848 - DNA, 260 bp, Unknown
  Description of Unknown: LeftRegion for integrase B3849 sequence
aaatattacctattcaattataacactgcatttatcaaaaagcaacaggaatatgtacaaacaatgtaagaatattttgttgcgaggtgatattatggaaataaccgaagcagagatagaaatcattacaaggcagattgttaaaatcatcataaatcatcaacgtgacgcatcagctgtcggtcctgaggacgctgacgatgaataagctcagagccgcagcctattgccgtgtttcaaccgaccgtgccgagcaatcc

SEQ ID NO: 16849 - DNA, 260 bp, Unknown
  Description of Unknown: LeftRegion for integrase B3850 sequence
aagggaaatgtacagatgttggagaagtctttggatattctcttgatattgatgaaatagaataaataataaaaaagccggctcctgcgaccaacaggaaccggttttaataaataagataatccggagaaaatcttacctacaccataattatatcatctcctggattatcacacaagtaaaaaaaggagaatgataaaatgaatgaatcagtatgcatctatctaaggaaatccagggccgatcgggaagctgaagcg

SEQ ID NO: 16850 - DNA, 260 bp, Unknown
  Description of Unknown: LeftRegion for integrase B3851 sequence
aaatgtacggatgtcggagaagtgcttggatattctcttgatattgatgaaatagaataaatgctaaaaaagaccggctctcgctaccaacggggaccggtttttaaaaataagacaattccagagaaaaatcttacctgcacattaagtatatcatctccgggattgccatacaagtgtaaaaaaaggagaatgataaaatgaatgaatcagtatgtatctatttaaggaaatccagagccgatcgggaagctgaagcg

SEQ ID NO: 16851 - DNA, 260 bp, Unknown
  Description of Unknown: LeftRegion for integrase B3852 sequence
ggcggattcgacggtatgaagtatggatgcaatatagaacttgcattttataaaaactaggcaaaacaaaaaccgcccgacgctgcaacgtcgaacggctcgtataaggcttattgccaatatttagcaaatatattatagcataagccttacaatttgtgtaggcttattttttatactcttttttaggtggtgttactatgttaatgattgctgattatagtagaaaatctgtatacagtgataaatcagatagcacg

SEQ ID NO: 16852 - DNA, 260 bp, Unknown
  Description of Unknown: LeftRegion for integrase B3853 sequence
tacttaccgccgagatcgcccaggcagtggaagccgaaaggctgagaagagatgccctttacaagggtacaagatacacgaaggaagcggtgactacggtgatccctacaaggtttgccatgaagcgtaccgctccgaaatgccaagatccaatcaagcaggcagaatacgcctacagtcagataaaggcggcgaagtaaatgcaggcactggcacagaatgttaccgtcattccggcacgaagacgagtcggttcacag

SEQ ID NO: 16853 - DNA, 260 bp, Unknown
  Description of Unknown: LeftRegion for integrase B3854 sequence
taaatttttttatcttggtaatatatgtaagaaatatattaagaattaaaataaccgcttccggcaagaagcggttacaaataattacctacaaaaagtaataggtcttatataaaaagccattgaaattataacataagccatactttttgtataggcttattttttatactcatttttaagaaagttggtgtttttttatgacaataattgcttgttacagtcgaaaatcaatttacagtgacaaatctgatagcaca

SEQ ID NO: 16854 - DNA, 260 bp, Unknown
  Description of Unknown: LeftRegion for integrase B3855 sequence
caaaagcctccgcacccagcgcgatcagcttcgaaaatccctgaaaatgcaccgtatcaccacccttgtcctgctcggcatcgtcgcgctttgcgcttttgctctggtggtggatatcctgagccccaacctcggttggttccgtgcataaaaaatagccgccccggcgcactgccggagcggtatctttggaggttcttatggatcatggcctgaatctcgtcaacgttgtgatttacgcccggtattcatccgtcggc

SEQ ID NO: 16855 - DNA, 260 bp, Unknown
  Description of Unknown: LeftRegion for integrase B3856 sequence
aggaaaatgtacagatgttggagaagtccttggatattctcttgatattgatgaaatagaataaataataaaaaagccggctcctgcgaccaacgggaaccggttttaataaataagataatctcggagaaaatcttacctacactatgattatatcatctcctggattatcgcacaagttaaaaaaggagaatgataaaatgaatgaatcagtatgcatctatctaaggaaatccagagccgatcgggaagctgaagca

SEQ ID NO: 16856 - DNA, 260 bp, Unknown; identical to SEQ ID NO: 16850
  Description of Unknown: LeftRegion for integrase B3857 sequence

SEQ ID NO: 16857 - DNA, 260 bp, Unknown
  Description of Unknown: LeftRegion for integrase B3858 sequence
cattatacatacaaaataaaaactactttccccttcggcggaattgtatataaaattttaatttattatatttaaaacaaaaaaatccccgactgctaccaacagtcggggaaatagtgtagtgttatggtacaccaattaaaaacatatatattgtaccataacaccgattaaaaatcaagttaagaggtgttatttttatgaaaaaaactaaaaattcagtgcaaagggctgttatatatgcacgttattcgtgtagt

SEQ ID NO: 16858 - DNA, 260 bp, Unknown
  Description of Unknown: LeftRegion for integrase B3859 sequence
aaatattacctatttaattataacactgcatttagcaaaaagcaacaggaatatgtacaaacaatgtaagaatattttgttgcgaggtgatattatggaaataaccgaagcagagatagaaataattacaaggcagattgttaaaatcatcataaatcatcaacgtgacgcatcagctgtcattcctgaggatgcagacgatgaataagctcagagccgcagcctattgccgtgtttcgaccgaccgtgccgagcaatcc

SEQ ID NO: 16859 - DNA, 260 bp, Unknown
  Description of Unknown: LeftRegion for integrase B3860 sequence
aataatagtgaatttacgtaatttgtaccaaattattatgctttatttatttttatattgtgctataatttaaaaaaccgactcctgcgaccaacaggaaccggtttaataaataagataatccggagaaaatcttacctacacaatgattatatcatctcctggattatcgcacaagtaaaaaaaaggagaatgataaaatgaatgaatcagtatgcatctatctaaggaaatccagagccgatcgggaagctgaagca

SEQ ID NO: 16860 - DNA, 260 bp, Unknown
  Description of Unknown: LeftRegion for integrase B3861 sequence
gaaaatgtacagatgttggagaagtccttggatattctcttgatattgatgaaatagaataaataataaaaaagccggctctcgctaccaacgggaaccggttttaataaataagataatccggagaaaaatcttacctacaccataattatatcatctcctggattatcgcacaagtaaaaaaaaaggagaatgataaaatgaatgaatcagtatgcatctatctaaggaaatccagagccgatcgggaagctgaagca

SEQ ID NO: 16861 - DNA, 260 bp, Unknown
  Description of Unknown: LeftRegion for integrase B3862 sequence
ctttttttacataccaaccatctttttttaacattttaagcagctctttacttgtcatcttatcgctcctttcaattatattatacgcctattttatgcgtatgtcaagtatattttcaattatctcagttattttttcttgtttcgaacaaattttcgttatataatagacttatcaaattcaaaaggagtgcttttctatgattacttttgacaacataattatatatttaagaaaatctcgttctgatgaccctaat

SEQ ID NO: 16862 - DNA, 260 bp, Unknown
  Description of Unknown: LeftRegion for integrase B3863 sequence
ttggaatgttggaggactggccgaaggtcagtcgtagtggaagcaaggctgcgctggaagacgcacaggctgaaattgagcggtggaggcaagagttccttgccgggaacatctcggcaaagaaatacgtcaaaatcgcggacgctctcatgtccaaataaaaaaagccgccctcggtgggcggcgggaggttgctctgaatgtgtgcaaaaaagaaaccggccatgcttgagccggatatgcaggatgccgtgatctac

SEQ ID NO: 16863 - DNA, 260 bp, Unknown
  Description of Unknown: LeftRegion for integrase B3864 sequence
cttgatcccgcggaacattgaaatcgttggcatttgatcaactcctttgttgtaactataatatagcgtattcgcgcttaaatgtcaatagcgaatttgctattgacttgcgggcatcttgcacaaaatatcctgttactttttgtgcacattgcgcccgctctgagatggtacaatctgtgtgataggaggttatccaaatgcccgattgtttgtatttgcgtaagtcccgcgttgatatggaggcggaggcgcgcggc

SEQ ID NO: 16864 - DNA, 260 bp, Unknown
  Description of Unknown: LeftRegion for integrase B3865 sequence
taataatagtgctttgccgtaatttgcaccaaattattatactttatttattttcatattatgctataatttaaaaaaccgactcctgctaccaacaggaaccggtttaataaataagataatctcggagaaaatcttacctacaccatgattatatcatctcctggattatcacacaagtaaaaaaggagaatgataaaatgaatgaatcagtatgcatctatttaaggaaatccagggccgatcgggaagctgaagca

SEQ ID NO: 16865 - DNA, 260 bp, Unknown
  Description of Unknown: LeftRegion for integrase B3866 sequence
tccaagcaggaacagatcatccgccagaagtccgtcgaggcgcggcgcaaggatgttttgatctgcgttctggtgtgcatcgttctcgtcgcgcttctgtcgctccttgtcgatctttgtaatcccaatatcggctgggtccgcacatgcaaattaccgccccggcccgatcagccagagcggtatctttggaggcttttgtggataatttgaatcttgccaacgtcgtgatctacgcccggtattcttccgccgggcaa

SEQ ID NO: 16866 - DNA, 260 bp, Unknown
  Description of Unknown: LeftRegion for integrase B3867 sequence
agatagatggatttttgctgaaagcttttatatttacttatgttttgttacatgttattatatttttacacaaaaaaccgactcctgcgaccaacaggaaccggtttaataaataagataatctcggagaaaatcttacctgcaccatgattatatcatctcctggattatcacacaagtaaaaaaaggagaatgataaaatgaatgaatcagtatgcatctatctaaggaaatccagggccgatcgggaagctgaagca

SEQ ID NO: 16867 - DNA, 260 bp, Unknown; identical to SEQ ID NO: 16834
  Description of Unknown: LeftRegion for integrase B3868 sequence

SEQ ID NO: 16868 - DNA, 260 bp, Unknown; identical to SEQ ID NO: 16828
  Description of Unknown: LeftRegion for integrase B3869 sequence

SEQ ID NO: 16869 - DNA, 260 bp, Unknown
  Description of Unknown: LeftRegion for integrase B3870 sequence
acgcggccctgcgtgagcagctggcgcagcagcagaaatccctgcgtatgcaccggcttgtgacgcttatcctgctcagcatcgtcgcgctttgcgcttttgctctggtggtggatatcttgagccctaccctcggttggtttcgtgcataaaaatagccgccccggcgcattgccggagcggtgtctttggaggtttttatggatcatgatctgaatctcgctaacgttgtgatttacgcccggtattcatccgccggc

SEQ ID NO: 16870 - DNA, 260 bp, Unknown
  Description of Unknown: LeftRegion for integrase B3871 sequence
gcacagatgtcggagaagtactggggtattctcttgatattgatgaaatagaataaatgttaaaaaaagaaccggctctcgctaccaacgggaaccggtttttaaaaataagacaattccagagaaaaatcttacctacacattaagtatatcatctccgggattgccgtacaagtgcaaaaaaaaaggagaatgataaaatgaacgaatcagtatgtatctatttgagaaaatccagagccgatcgggaagctgaggca

SEQ ID NO: 16871 - DNA, 260 bp, Unknown
  Description of Unknown: LeftRegion for integrase B3872 sequence
aactggagaagtggaagatctgaacgcagaggaaactgaataaaaaaatcgcccggcgcttccaacgccagacgatctcgtgaaatccttgcagacacagccgttcagctggctacaatgctctctagtcaagagaattatagcacagttcatggcgcctgcataggtgttatttttatacccttttttaggaggttcttatgaacatttgttgctatggcaggaagtcgatctattctgatcactcagattctatcgac

SEQ ID NO: 16872 - DNA, 260 bp, Unknown
  Description of Unknown: LeftRegion for integrase B3873 sequence
tcagacaacggatactcgaacttggataagtattcagcaatatttaacgtatcagtaaattaataaattaaaaaaagccggctcctgcgaccaacaggaaccggttttaataaataagataatccggagaaaaatcttacctacaccataattataccatctcctggattatcacacaagtaaaaaaggagaatgataaaatgaatgaatcagtatgcatctatctaaggaaatccagagcagatcgggaagctgaagca

SEQ ID NO: 16873 - DNA, 260 bp, Unknown
  Description of Unknown: LeftRegion for integrase B3874 sequence
attctttcccctgttacaatattttaattccagaaaactataaagttatgctgtaaaagaaccgcctttgcagacggtcctttaccggaaaaacttttttgaaataaaactatatttggggatagttcggttgtatctttcgatactttattattataatacgactttttatccccctacaacacaagtgaggtataaatatgcgtaatgatccaattttatctttaaaccaggttatcatatacctgcgaaaatcccgt

SEQ ID NO: 16874 - DNA, 260 bp, Unknown
  Description of Unknown: LeftRegion for integrase B3875 sequence
agaacttttagatagtggcattattacacaagaagaattcaatcagaaaaaaacagaacttttgtaaaaaaagaaccggctctcgctaccaacgaggaccggtttttaaaaataagacaattccagagaaaaatcttacctacgcattaagtatatcatttccgggattgccgcacaagtgcaaaaaggagaatgataaaatgaatgaatcagtatgtatctatctaagaaaatccagagccgatcgggaagctgaagcg

SEQ ID NO: 16875 - DNA, 260 bp, Unknown
  Description of Unknown: LeftRegion for integrase B3876 sequence
agagcttttagatagcggtattattactcaagaagaatttgaccagaaaaaatcagaacttttataaaaaagaaccggctctcgctaccaacgaggaccggtttttaaaaataagacaattccagagaaaaatcttacctacacattaagtatatcatctccgggattgccgtacaagtgtaaaaaaggagaatgatgaaatgaatgaatcagtatgcatctatttaaggaaatccagagccgatcgggaagctgaagca

SEQ ID NO: 16876 - DNA, 260 bp, Unknown; identical to SEQ ID NO: 16828
  Description of Unknown: LeftRegion for integrase B3877 sequence

SEQ ID NO: 16877 - DNA, 260 bp, Unknown
  Description of Unknown: LeftRegion for integrase B3878 sequence
aaatattacctatttaattataacactgcatttatcaaaaagcaacaggaatatgtacaaacaatgtaagaatattttgttgcgaggtgatattatggaaataaccgaagcagagatagaaataattacaaggcagattgttaaaatcatcataaatcatcaacgtgacgcatcagctgtcattcctgaggatgcagacgatgaataagctcagagccgcagcctattgccgtgtttcgaccgaccgtgccgagcaatcc

SEQ ID NO: 16878 - DNA, 260 bp, Unknown
  Description of Unknown: LeftRegion for integrase B3879 sequence
ccgcgcaacgtccgatgaccgcaaaaaatggcgcaatatcttctgcgttgttgcctttatagccattgcgacaatcatgctggcgattgtcgctgacgttcttaataaaggcgtgggcttcttctggcttgaagatcattcggttataggggattttgcaaacaatgttataaatcatataaaaggcgggaacttataggatgaatacagaccaaataatagaaaaagtaacaagtcaatatacacaagacaagtatgca

SEQ ID NO: 16879 - DNA, 260 bp, Unknown
  Description of Unknown: LeftRegion for integrase B3880 sequence
ctcggcggaatcaatgccgacagcgttacaaagaaaaccaactttcttgttttggggaacaacgacctgtgttcctcaatcaaagacggcaagagttccaaacataaaaaagccgaaaagtacattttgggcggtgcagacctgtctattatcccggaaaatgttttttatgatatgttagacgaataaagggtgattgtatgcgggcttttatttactgccgattttccagccataagcagcaagagcttagcatagag

SEQ ID NO: 16880 - DNA, 260 bp, Unknown
  Description of Unknown: LeftRegion for integrase B3881 sequence
atttgctgggtcttagtacagtaagaaaaccgcaaacctgcaatctcacggaagaagaacgccttttgctggaagcctaccgttcagccagcactcagggacgcttccatatcattcaggtttgcatgaacgaaaaaacagacgcacccaaaggggaggtagttgccgggtgattgacttagcagaatggaggaagaaccatgtatgaggatataaaaacagcctgcctttatgtcagattttccagccataatcagacg

SEQ ID NO: 16881 - DNA, 260 bp, Unknown; identical to SEQ ID NO: 16850
  Description of Unknown: LeftRegion for integrase B3882 sequence

SEQ ID NO: 16882 - DNA, 260 bp, Unknown
  Description of Unknown: LeftRegion for integrase B3883 sequence
atgccgcaaaagaaaaaggaattgacataaaaactgattaaaaataaaaaccgccccggcggcaaccggaacggcttttagatagattctcttaccaggtttacccggaaagataattcaactcaacacttgaattataccatctccggcgcgtcctggcaaggggcgtattttctatacactttttgggaggtggacatatgatattctgttgttatgggcgtaaatctgtgtactctgaccgctccgactccgtggac

SEQ ID NO: 16883 - DNA, 260 bp, Unknown; identical to SEQ ID NO: 16828
  Description of Unknown: LeftRegion for integrase B3884 sequence

SEQ ID NO: 16884 - DNA, 260 bp, Unknown
  Description of Unknown: LeftRegion for integrase B3885 sequence
ttccagaaaatgttttttatgatataatttctgaaaattaataaaaaccgcccctgcttaacagagacggctttaagaatctttgcagttgtaaatgctcaattctttcctggacagttagaattatagcatatttgtttacacctgcaaaggtgtattttttatacccttttttacataaaatatcacggaggtgtgttatgagtcttgaaaatgtatgtatctatttaagaaagtcccgcgctgatcaggaagctgag

SEQ ID NO: 16885 - DNA, 260 bp, Unknown
  Description of Unknown: LeftRegion for integrase B3886 sequence
aagagcttttagatagcggtattattactcaagaagaatttgaccagaaaaaatcagaacttttataaaaagaaccggctcctgctaccaacgggaaccggttttttgaaaaataagacaatctcggtgataatcttacctacacattaagtatatcatctccgtgattgccgcacaagtacaaaaaggagattgataacatgaatgaatcagtatgcatctatttaaggaaatccagagccgatcgggaagctgaagca

SEQ ID NO: 16886 - DNA, 260 bp, Unknown; identical to SEQ ID NO: 15796
  Description of Unknown: LeftRegion for integrase B3887 sequence

SEQ ID NO: 16887 - DNA, 260 bp, Unknown
  Description of Unknown: LeftRegion for integrase B3888 sequence
ccgcgcaacgtccgatgaccgcaaaaaatggcgcaacatcttctgcattgttgcctttatagccattgcgataatcatgctggcgattgtctttgacgttcttaataaaggcgtgggcttcttctggcttgaagatcattcggatataggggattttgcaaacaatgttataaatcatataaaaggcgggaacttataggatgaatacagaccaaataatagaaaaagtaacaagtcaatatacacaagacaagtatgca

SEQ ID NO: 16888 - DNA, 260 bp, Unknown
  Description of Unknown: LeftRegion for integrase B3889 sequence
aaagggaaatgtacagatgttggagaagtctttggatattctcttgatattgatgaaatagaataaataataaaaaagccggctcctgcgaccaacaggaaccggttttaataaataagataatccggagaaaatcttacctacaccataattatatcatctcctggattatcgcacaagtaaaaaaggagaatgataaaatgaatgaatcagtatgtatctatctaaggaaatccagagctgatcgggaagctgaagca

SEQ ID NO: 16889 - DNA, 260 bp, Unknown; identical to SEQ ID NO: 16888
  Description of Unknown: LeftRegion for integrase B3890 sequence

SEQ ID NO: 16890 - DNA, 260 bp, Unknown
  Description of Unknown: LeftRegion for integrase B3891 sequence
aaggaaaatgtacagatgttggagaagtctttggatattctcttgatattgatgaaatagaataaataataaaaaagccggctcctgcgaccaacaggaaccggtttaataaataagataatctcggagaaaatcttacctacaccataattatatcatctcctggattatcgcacaagttaaaaaaggagaatgataaaatgaatgaatcagtatgtatctatctaaggaaatccagagctgatcgggaagctgaggca

SEQ ID NO: 16891 - DNA, 260 bp, Unknown
  Description of Unknown: LeftRegion for integrase B3892 sequence
aggaaaatgtacagatgttggagaagtccttggatattctcttgatattgatgaaatagaataaataataaaaaagccggctctcgctaccaacgggaaccggttttaataaataagataatccggagaaaaatcttacctacaccataattatatcatctcctggattatcgcacaagtaaaaaaaggagaatgataaaatgaatgaatcagtatgcatctatctaaggaaatccagagcagatcgggaagctgaagca

SEQ ID NO: 16892 - DNA, 260 bp, Unknown; identical to SEQ ID NO: 16825
  Description of Unknown: LeftRegion for integrase B3893 sequence

SEQ ID NO: 16893 - DNA, 260 bp, Unknown
  Description of Unknown: LeftRegion for integrase B3894 sequence
agagcttttagatagcggtattattactcaagaagaatttgaccagaaaaaatcagaacttttataaaaagaaccggctcctgctaccaacgggaaccggttttttgaaaaataagacaatctcggtgataatcttacctacacattaagtatatcatctccgggattgccgtacaagtgtaaaaaaggagaatgatgaaatgaatgaatcagtatgcatctatttaaggaaatccagagccgatcgggaagctgaaaca

SEQ ID NO: 16894 - DNA, 260 bp, Unknown
  Description of Unknown: LeftRegion for integrase B3895 sequence
taatagaccaactaatacagctccgcaaagctaaaggtctcacccaaaaagaccttgccgctgctgccaacctcgctcagcctgccattgcacggcttgaaagtaagtcagcagttccacagcttgacacattcgtcaaggtagccggagcacttggctacaccatagagcttgtgcaggaataataaagaggtgattgaatgatactgcttgaaaatctgataatgtatctcaggaagtcccgctccgatgacataagc

SEQ ID NO: 16895 - DNA, 260 bp, Unknown; identical to SEQ ID NO: 16875
  Description of Unknown: LeftRegion for integrase B3896 sequence

SEQ ID NO: 16896 - DNA, 260 bp, Unknown
  Description of Unknown: LeftRegion for integrase B3897 sequence
ggcagagtaacattaactgatgaagaattcgaaaaaataattgagtatggaaaatttctgttatatatgagaaacgatgacgaatgatgtagtgctaagattgcttacatagtaaagtaagtggcattaaaggaggtgagtacaatgtagtcgcctaattaattcgcgtatatcaccaaaacaatcggaggagaaaagtcatgacagtatttgaaatgaatgacgcgattaatgatgcattcactggaaagatggacaaa

SEQ ID NO: 16897 - DNA, 260 bp, Unknown
  Description of Unknown: LeftRegion for integrase B3898 sequence
ccgcgcaacatccgatgaccgcaaaaaatggcgcaatatcttctgcgttgttgcctttatagccattgcgataatcatgctggcgattgccgctgacgttcttaataaaggcgtgggcttcttctggcttgaagatcattcggttataggggattttgcaaacaatgttataaatcatataaaaggcgggaacttataggatgaatacagaccaaataatagaaaaagtaacaagtcaatatacacaagacaagtatgca

SEQ ID NO: 16898 - DNA, 260 bp, Unknown
  Description of Unknown: LeftRegion for integrase B3899 sequence
aaaatgtacagatgttggagaagtccttggatattctcttgatattgatgaaatagaataaataataaaaaagccggctctcgctaccaacgggaaccggttttaataaataagataatccggagaaaaatcttacctacaccataattatatcatctcctggattatcacacaagtaaaaaaaaaaggagaatgataaaatgaatgaatcagtatgcatctatctaaggaaatccagagcagatcgggaagctgaagca

SEQ ID NO: 16899 - DNA, 260 bp, Unknown
  Description of Unknown: LeftRegion for integrase B3900 sequence
gatagatggatttttgctgaaagcttttatatttacttatgttttgttacatgttattatatttttacacaaaaaaccgactcctgcgaccaacaggaaccggtttaataaataagataatctcggagaaaatcttacctacaccatgattatatcatctcctggattatcacacaagtaaaaaaaaggagaatgataaaatgaatgaatcagtatgtatctatttaaggaaatccagagccgatcgggaagctgaagca

SEQ ID NO: 16900 - DNA, 260 bp, Unknown
  Description of Unknown: LeftRegion for integrase B3901 sequence
cgtttccgctctttgattgtagcgcggctctgcgatttctgcaagccgtgagtttttgaaaaaagaagtgcccggcgctggtacgaacagcgtcgggctgaatggaagcattcacacaaaacgaaggtaaatctttttgcgcctgctgggtctattgtaccacctcccggccgggcgcgcaagccgggaggttttattttatgtctcgcacatctcgcaaagtaaaagcaccggactccaccgaggcggtcacccgtctg

SEQ ID NO: 16901 - DNA, 260 bp, Unknown
  Description of Unknown: LeftRegion for integrase B3902 sequence
aaggaaaatgtacagatgttggagaagtccttggatattctcttgatattgatgaaatagaataaataataaaaaagccggctctcgctaccaacgggaaccggttttaataaataagataatccggagaaaatcttacctacaccataattatatcatctcctggattatcacacaagtaaaaaaaggagaatgataaaatgaatgaatcagtatgcatctatctaaggaaatccagggccgatcgggaagctgaagcg

SEQ ID NO: 16902 - DNA, 260 bp, Unknown; identical to SEQ ID NO: 16855
  Description of Unknown: LeftRegion for integrase B3903 sequence

SEQ ID NO: 16903 - DNA, 260 bp, Unknown
  Description of Unknown: LeftRegion for integrase B3904 sequence
gcagcccttcgcgcgcagtttgcccagcagcagaagtccctgcacatgcaccggcttgtgacgctcatcctcttgggtattcttttgctgtgcgcccttgcgcttgtggccgacgtgctcatcccatcgatcggctggattcgcacatgaaaattaccgccccggcctgatcagccggagcggtatctttggaggcttttgtggataatttgaatcttgccaacgtcgtgatctacgcccggtattcttccgccgggcaa

SEQ ID NO: 16904 - DNA, 260 bp, Unknown
  Description of Unknown: LeftRegion for integrase B3905 sequence
cgatgatgactttgacgatgacgatgacggcgaacctttaaaatggggtctgcattttaacattaaattcaggaaataaaaaaagacccgctcctgcgggaacaggaacgagtcagacatcaaccacccaaagcgtcagtaagttgatatatttattatatcagcccgctcgccaaaaagcaagaaagcgaggcttttttatggagaacgcagtaatttatgcgagatattcttccgataagcaaacggagcagagcatt

SEQ ID NO: 16905 - DNA, 260 bp, Unknown; identical to SEQ ID NO: 16850
  Description of Unknown: LeftRegion for integrase B3906 sequence

SEQ ID NO: 16906 - DNA, 260 bp, Unknown
  Description of Unknown: LeftRegion for integrase B3907 sequence
aaatattacctatttaattataacactgcatttagcaaaaagcaacaggaatatgtacaaacaatgtaagaatattttgttgcgaggtgatattatggaaataaccgaagcagagatagaaataattacaaggcagattgttaaaatcatcataaatcatcaacgtgacgcatcagctgtcggtcctgaggatgcagacgatgaataagctcagagccgcagcctattgccgtgtttcgaccgaccgtgccgagcaatcc

SEQ ID NO: 16907 - DNA, 260 bp, Unknown
  Description of Unknown: LeftRegion for integrase B3908 sequence
atagatggatttttgctgaaagcttttatatttacttatgttttgttacatgttattatatttttacacaaaaaaaccgactcctgcgaccaacaggaaccggtttaataaataagataatctcggagaaaatcttacctgcaccataattatatcatctcctggattatcacacaagtaaaaaaaaggagaatgataaaatgaatgaatcagtatgcatctatctaaggaaatccagagcagatcgggaagctgaagcg

SEQ ID NO: 16908 - DNA, 260 bp, Unknown
  Description of Unknown: LeftRegion for integrase B3909 sequence
aaaatgtacggatgtcggagaagtgcttggatattctcttgatattgatgaaatagaataaatgctaaaaaagaccggctctcgctaccaacgaggaccggtttttaaaaataagacaattccagagaaaaatcttacctacacattaagtatatcatctccgggattgccacacaagtgcaaaaaaggagaatgatgaaatgaacgaatcagtatgtatctatttgaggaaatccagagccgatcgggaagctgaagca

SEQ ID NO: 16909 - DNA, 260 bp, Unknown; identical to SEQ ID NO: 16834
  Description of Unknown: LeftRegion for integrase B3910 sequence

SEQ ID NO: 16910 - DNA, 260 bp, Unknown
  Description of Unknown: LeftRegion for integrase B3911 sequence
atattgatagctatgctggaaatagttacgcaaaatattccgcaatatttaatgtcccaattagataaataaaaaataccggctcctgcgaccaacaggaaccggtttaataaataagataatctcggagaaaatcttacctacaccataattatatcatctcctggattatcgcacaagtaaaaaaggagaatgataaaatgaatgaatcagtatgtatctatctaaggaaatccagagctgatcgggaagctgaggca

SEQ ID NO: 16911 - DNA, 260 bp, Unknown
  Description of Unknown: LeftRegion for integrase B3912 sequence
gtgattctcaatatattgtaagcaaataacttttatataaaaaccgcccctgctggtaacaaggacggcttttcaagaatctttgcagttgtgaatgctcaattctttcctggacagttagaattatagcatatttatttgcacctgcaaaggtgtattttttatacccttttttacataaaatatcacggaggtgtgctatgagtctcgaaaacgtatgtatctatttaagaaagtcccgcgctgatcaggaggctgaa

SEQ ID NO: 16912 - DNA, 260 bp, Unknown
  Description of Unknown: LeftRegion for integrase B3913 sequence
gcttatgatggtgcttataacggaatttcaaattatttttcaaatgatgaattggaaaatagcacaaacaacatttcactaaaaaatatacttaaaggctttgcacaatattataacaaagaacttaatcaaaaagtaataaatgaaggcaaataagccttcatttttaatagatattataaaaggaaggagcaataaaattgaatgtagtaatttatgcaagatttagttcacacaaccaaacagaacaatctattgaa

SEQ ID NO: 16913 - DNA, 260 bp, Unknown
  Description of Unknown: LeftRegion for integrase B3914 sequence
aataatagtgaatttacgtaatttgtactaaattattatgctttatttatttttatattgtgctataatttaaaaaaccgactcctgcgaccaacaggaaccggtttaataaataagataatctcggagaaaatcttacctacactataattatatcatctcctggattatcacacaagtaaaaaaaggagaatgataaaatgaatgaatcagtatgcatctatttaaggaaatccagagctgatcgggaagctgaagca

SEQ ID NO: 16914 - DNA, 260 bp, Unknown
  Description of Unknown: LeftRegion for integrase B3915 sequence
aaagtacactggtatatattgccagtggtaatatttggtagttttttaacacataaaaaaaccgcccaactcggcaaagttggacggcggcacctaacaaagtaggcactataatattaactgcaattatattataaaccataggcctgcttttgtataggcttattttttatgcaatttattagaaagtaggtatttctatggttagaatcgcaagttatttaagaaaatcagtatattctgataaatcagacagcata

SEQ ID NO: 16915 - DNA, 260 bp, Unknown; identical to SEQ ID NO: 15725
  Description of Unknown: LeftRegion for integrase B3916 sequence

SEQ ID NO: 16916 - DNA, 260 bp, Unknown
  Description of Unknown: LeftRegion for integrase B3917 sequence
tccttttggaattgcaccggtgcaactactttcaattttataaattaactaataataaaaaaccgccccggtgccaaccgggacggaaagcgaatataccagatgatggtaaaacgccctgaacaagcttattttatcatttgcctagtatatttgcaacgatattaccgggcatttttatgcccagaaatgaggtttctatgaagatcggtatttatggaaggaaatctgtgttttcggacaagtcggaatctatcgaa

SEQ ID NO: 16917 - DNA, 260 bp, Unknown
  Description of Unknown: LeftRegion for integrase B3918 sequence
caaaagcctccgcatccagcgcgagcatctgcagaaatccctgcgtatgcaccggcttgtgacgcttatcctgctcagcatcgtcgcgctttgcgcttttgctctggtggtagatatcctgagccccaccctcggttggttccgtgcataaaaaatagccgccccggcgcactgccggagcggtatctttggaggtttttatggatcatggtctgaatctcgccaacgttgtgatttacgcccggtattcatccgccggc

SEQ ID NO: 16918 - DNA, 260 bp, Unknown
  Description of Unknown: LeftRegion for integrase B3919 sequence
tattgatagctatgctggaaatagttacgcaaaatattccgcaatatttaatgtcccaattagataaataaaaaataccggctcctgcgaccaacaggaaccggtttaataaataagataatctcggagaaaatcttacctacaccataattatatcatatcctggattatcgcacaagtaaaaaaaggagaatgataaaatgaatgaatcagtatgcatctatctaagaaaatccagggccgatcgtgaagctgaagcg

SEQ ID NO: 16919 - DNA, 260 bp, Unknown
  Description of Unknown: LeftRegion for integrase B3920 sequence
aatgcacagatgtcggagaagtccttggatattcttttgatattacagaaatagaataaatactaaaaagaaccggctctcgctaccaacgggaaccggtttttgaaaaataagacaattccggagaaaaatcttacctacacattaagtatatcatctccgggattgccgtacaagtgtaaaaaaaggagaatgataaaatgaacgaatcagtatgtatctatttaagaaaatccagggccgatcgagaagctgaagca

SEQ ID NO: 16920 - DNA, 260 bp, Unknown; identical to SEQ ID NO: 16888
  Description of Unknown: LeftRegion for integrase B3921 sequence

SEQ ID NO: 16921 - DNA, 260 bp, Unknown
  Description of Unknown: LeftRegion for integrase B3922 sequence
aaaatgttttttatgatataatttctgaaaattaataaaaaccgccccctgctggtaacaaggacggcttttgagaatctttgcagttgtgaaactgtgttcaattcttcatggacagttgaattatagcacacttctttacatctgcaaaggtgtattttttatacccttttttacgtaaaatatagtggaggtgtgctatgagtcttgaaaatgtatgtatctatttaaggaaatcccgtgctgatcgggaagccgaa

SEQ ID NO: 16922 - DNA, 260 bp, Unknown; identical to SEQ ID NO: 16859
  Description of Unknown: LeftRegion for integrase B3923 sequence

SEQ ID NO: 16923 - DNA, 260 bp, Unknown
  Description of Unknown: LeftRegion for integrase B3924 sequence
aggaaaatgtacagatgttggagaagtccttggatattctcttgatattgatgaaatagaataaataataaaaaagccggctctcgctaccaacgggaaccggttttaataaataagataatccggagaaaaatcttacctacaccataattatatcatctcctggattatcgcacaagtaaaaaaaggagaatgataaaatgaatgaatcagtatgcatctatctaaggaaatccagagccgatcgggaagctgaagca

SEQ ID NO: 16924 - DNA, 260 bp, Unknown
  Description of Unknown: LeftRegion for integrase B3925 sequence
ttcttttaggtctaagtgaacttagaaaaccgcagacttgtacattttctgaggaagaacgcctcttactggaagcctaccgttcagccagcacccagggacgtttccatatcattcaggtttgcatgaacgaaaaaacaaccgcacccaaaggggaggtagttgccgggtgattgacttagcagaatggaggaaaaaccatgtttgaggatgtaaaaacagcctgcctttacgtcagattttccagccataatcagacg

SEQ ID NO: 16925 - DNA, 260 bp, Unknown
  Description of Unknown: LeftRegion for integrase B3926 sequence
gatagatggatttttgctgaaagcttttatatttacttatgttttgttacatgttattatatttttacacaaaaaaccgactcctgcgaccaacaggaaccggtttaataaataagataatctcggagaaaatcttacctacaccataattatatcatctcctggattatcgcacaagtaaaaaaaaggagaatgataaaatgaatgaatcagtatgcatctatctaaggaaatccagagccgatcgggaagctgaagca

SEQ ID NO: 16926 - DNA, 260 bp, Unknown
  Description of Unknown: LeftRegion for integrase B3927 sequence
tgtgattctcaatatactgtaagcaaataactttatataaaaaccgcccctgctggtaacaaggacggcttttcaagaatctttgcagttgtgaatgctcaattctttcctggacagttagaattatagcatatttatttacacctgcaaaggtgcattttttatacccttttttacataaaatatcacggaggtgtgctatgagtcttgaaaatgtatgtatctatttaagaaagtcccgcgctgatcgggaggctgaa

SEQ ID NO: 16927 - DNA, 260 bp, Unknown
  Description of Unknown: LeftRegion for integrase B3928 sequence
ttaggagagttcattgtagctctccttatttttatatacaaaaaaagaattagaaagtgtttgagttttcgcacagtacaaccacttatctaattccgacaatcactattgaaagcgatttctataatattataacattatagttactccgttttcaatagtttattagtaaatttaattgaaaatggaggtattttattttgtataataatataaataataatatggaaatgtatattaaatatttaagaaaatctaga

SEQ ID NO: 16928 - DNA, 260 bp, Unknown; identical to SEQ ID NO: 14770
  Description of Unknown: LeftRegion for integrase B3929 sequence

SEQ ID NO: 16929 - DNA, 260 bp, Unknown
  Description of Unknown: LeftRegion for integrase B3930 sequence
aatattcagataacggatattcggattcagacaaatattccgcaatatttaatgtatcagtaaactaataaaaaaaccggctctcgctaccaacgggaaccggtttaataaataagatagtctcggagaaaatcttacctacaccataattatatcatctcctggattatcacacaagtaaaaaaaaggagaatgataaaatgaatgaatcagtatgtatctatctaaggaaatccagggccgatcgggaagctgaagca

SEQ ID NO: 16930 - DNA, 260 bp, Unknown
  Description of Unknown: LeftRegion for integrase B3931 sequence
tgcttatgtaaaaatctgcactgcccttgccaaactgaagaaatgaaaaaaatcgcccggcgcttccaacgccagacgatctcttaaatcttgcagacagccgttcagctggctacaattccctctcgacacgagaattatagcacagttcatggcacctgcataggtgttatttttatacccttttttaggaggttcttatgaacatttgttgctatggtagaaagtcgatctattctgatcactcagattctatcgac

SEQ ID NO: 16931 - DNA, 260 bp, Unknown
  Description of Unknown: LeftRegion for integrase B3932 sequence
cttgtgcctgtcggcgaataattggcaaataactttatataaaaaccgcccctgttggtaacaaggacggctttaagaatctttgcagttgtgaatgctcaattctttcctggacagttagaattatagcatatttatttacacctgcaaaggtgtattttttatacccttttttacataaaatatcacggaggtgtgctatgagtcttgaaaatgtatgtatctatttaagaaagtcccgcgctgatcgggaagctgaa

SEQ ID NO: 16932 - DNA, 260 bp, Unknown
  Description of Unknown: LeftRegion for integrase B3933 sequence
acttttagatagtggcattattacacaagaagaattcaatcagaaaaaaacagaacttttgtaaaaaaagaaccggctctcgctaccaacgggaaccggttttgaaaaaaataagacaattccagagaaaaatcttacctacacattaagtatatcatctccgggattgccgtacaagtgtaaaaaaggagaatgatgaaatgaatgaatcagtatgcatctatctaaggaaatccagagccgatcgagaagctgaggca

SEQ ID NO: 16933 - DNA, 260 bp, Unknown
  Description of Unknown: LeftRegion for integrase B3934 sequence
atgtttgaaatggtgatggcttccgaccgttgccgtcaaataccatccatttgcttttaagattttgatgacttcccgtgacgaataacttttcatctccttcctccttatgtatatattataacacatattattatatttgtcaagggctttgactaatatttttctatttgttgtttggcgaaagaaggtatatgcggatgaatgcggtcatctatgcgagatactcgtcggataagcaaacggagcagtccattgaa

SEQ ID NO: 16934 - DNA, 260 bp, Unknown
  Description of Unknown: LeftRegion for integrase B3935 sequence
aagggaaatgtacagatgttggagaagtctttggatattctcttgatattgatgaaatagaataaataataaaaaagccggctcctgcgaccaacaggaaccggttttaataaataagataatccggagaaaatcttacctacaccataattatatcatctcctggattatcacacaagtaaaaaaaggagaatgataaaatgaatgaatcagtatgcatctatctaaggaaatccagggccgatcgtgaagctgaagcg

SEQ ID NO: 16935 - DNA, 260 bp, Unknown
  Description of Unknown: LeftRegion for integrase B3936 sequence
caaaagcctccgcatccagcgcgatcagcttcgaaaatccctgaaaatgcaccgcatcaccactcttgtcctgctcggcatcgtcgcgctttgtgcttttgctctggtggtggatatcctgagtccaaccctagggtggttccgtgcataaaaaatagccgccccggcgcactgccggagcggtatctttggaggtttttatggatcatggcctgaatctcgccaacgttgtgatttacgcccggtattcatccgccggt

SEQ ID NO: 16936 - DNA, 260 bp, Unknown
  Description of Unknown: LeftRegion for integrase B3937 sequence
atattgatagctatgctggaaatagttacacaaaatattccgcaatatttaatgttccaattagataaataaaaagccggctcctgcgaccaacaggaaccggtttaataaataagataatctcggagaaaatcttacctacaccataattatatcatctcctggattatcacacaagtaaaaaaaaggagaatgataaaatgaatgaatcagtatgtatctatttaaggaaatccagagccgatcgggaagctgaagcg

SEQ ID NO: 16937 - DNA, 260 bp, Unknown
  Description of Unknown: LeftRegion for integrase B3938 sequence
agcttttagatagtggcattatcactcaggaagaattcaatcagaaaaaaacagaacttttgtaaaaaaagaaccggctctcgctaccaacgggaaccggttttgaaaaataagacaattccagagaaaaatcttacctacacattaagtatatcatctccgggattgccgtacaagtgtaaaaaaaggagaatgataaaatgaacgaatcagtatgtatctatttgaggaaatccagagccgatcgggaagctgaagca

SEQ ID NO: 16938 - DNA, 260 bp, Unknown; identical to SEQ ID NO: 16828
  Description of Unknown: LeftRegion for integrase B3939 sequence

SEQ ID NO: 16939 - DNA, 260 bp, Unknown
  Description of Unknown: LeftRegion for integrase B3940 sequence
tcttgcggtctgcgtcgtgtcgctcccggtcggcttgatcattgtggccattggagcgtaccgggtggcaaaggccggggatatttatgacgctgcggtcgctcggtacgaacagcaaatctcggactatgttgactggctggatgaagtcaacgcaaaataaaaagccgccctcggtgggcggtgggaggttgctctgaatgtgtgcaaaaaagaaaccggccatgcttgagccggatatgcaggatgccgtgatctac

SEQ ID NO: 16940 - DNA, 260 bp, Unknown
  Description of Unknown: LeftRegion for integrase B3941 sequence
aataatagtgaatttacgtaatttgtaccaaattattatgctttatttatttttatattgtgctataatttaaaaaaccgactcctgcgaccaacaggaaccggtttaataaataagataatctcggagaaaatcttacctacaccataattataccatctcctggattatcgcacaagtaaaaaaaggagaatgataaaatgaatgaatcagtatgcatctatctaaggaaatccagggccgatcgggaagctgaagca

SEQ ID NO: 16941 - DNA, 260 bp, Unknown
  Description of Unknown: LeftRegion for integrase B3942 sequence
gacaggtaaaagaatctctcgattctgtatcattagaataataaaaaccgcccctgcttaacagagacggctttaagaatctttgcagttgtgattgctcaattctttcctggacagttagaattatagcatatttatttgcacctgcaaaggtgtattttttatacccttttttacataaaatatcacggaggtgtgctatgagtctcgaaaatgtatgtatctatttaagaaagtcccgcgctgatcgggaggctgaa

SEQ ID NO: 16942 - DNA, 260 bp, Unknown; identical to SEQ ID NO: 16855
  Description of Unknown: LeftRegion for integrase B3943 sequence

SEQ ID NO: 16943 - DNA, 260 bp, Unknown
  Description of Unknown: LeftRegion for integrase B3944 sequence
ggaaaatgtacagatgttggagaagtccttggatattctcttgatattgatgaaatagaataaataataaaaaagccggctctcgctaccaacgggaaccggttttaataaataagataatccggagaaaaatcttacctacaccataattatatcatctcctggattatcgcacaagtaaaaaaaaggagaatgataaaatgaatgaatcagtatgcatctatctaaggaaatccagagcagatcgggaagctgaagcg

SEQ ID NO: 16944 - DNA, 260 bp, Unknown; identical to SEQ ID NO: 16827
  Description of Unknown: LeftRegion for integrase B3945 sequence

SEQ ID NO: 16945 - DNA, 260 bp, Unknown; identical to SEQ ID NO: 16877
  Description of Unknown: LeftRegion for integrase B3946 sequence

SEQ ID NO: 16946 - DNA, 260 bp, Unknown; identical to SEQ ID NO: 16834
  Description of Unknown: LeftRegion for integrase B3947 sequence

SEQ ID NO: 16947 - DNA, 260 bp, Unknown; identical to SEQ ID NO: 16921
  Description of Unknown: LeftRegion for integrase B3948 sequence

SEQ ID NO: 16948 - DNA, 260 bp, Unknown
  Description of Unknown: LeftRegion for integrase B3949 sequence
cgtataaaaatgatttggacagctttacattagaggacgtttcagaattatgcggcatttttcgtgacgatgcgcacagaagtctctctgactgcttcgcaactggcgctgtgttcaaaaactgtattgaagatattacaaacaaataaccatgtgttgcgtggttatcaattcatctatgaaattaactgggggacggtatgcgggcttttatttactgccggttttcgagccacaaacagcaggaattaagcatcgaa

SEQ ID NO: 16949 - DNA, 260 bp, Unknown
  Description of Unknown: LeftRegion for integrase B3950 sequence
aaatattacctatttaattataacactgcatttatcaaaaagcaacaggaatatgtacaaacaatgtaagaatattttgttgcgaggtgatattatggaaataaccgaagcagagatagaaatcattacaaggcagattgttaaaatcatcataaatcatcaacgtgatgcatcagctaccaattctgaggacgcagacgatgaataagctcagagccgcagcctattgccgtgtttcgaccgaccgtgccgaacaatcc

SEQ ID NO: 16950 - DNA, 260 bp, Unknown; identical to SEQ ID NO: 16841
  Description of Unknown: LeftRegion for integrase B3951 sequence

SEQ ID NO: 16951 - DNA, 260 bp, Unknown; identical to SEQ ID NO: 16849
  Description of Unknown: LeftRegion for integrase B3952 sequence

SEQ ID NO: 16952 - DNA, 260 bp, Unknown
  Description of Unknown: LeftRegion for integrase B3953 sequence
ataatagtgttttgccgtaatttgcactaaattattatactttatttattttcatattatgctataatcaaaaaaaccgactcctgctaccaacaggaaccggttttaataaataagataatctcggagaaaatcttacctacaccatgattatatcatctcctggattatcacacaagttaaaaaaggagaatgataaaatgaatgaatcagtatgtatctatttaaggaaatccagagccgatcgggaagctgaagcg

SEQ ID NO: 16953 - DNA, 260 bp, Unknown
  Description of Unknown: LeftRegion for integrase B3954 sequence
ggaaaatgtacagatgttggagaagtccttggatattctcttgatattgatgaaatagaataaataataaaaaagccggctctcgctaccaacgggaaccggttttaataaataagataatccggagaaaaatcttacctacaccataattatatcatctcctggattatcgcacaagtaaaaaaaaggagaatgataaaatgaatgaatcagtatgcatctatctaaggaaatccagagctgatcgagaagctgaggcg

SEQ ID NO: 16954 - DNA, 260 bp, Unknown
  Description of Unknown: LeftRegion for integrase B3955 sequence
aaatattacctattaaattataacactgcatttatcaaaaagcaacaggaatatgtacaaacaatgtaagaatattttgttgcgaggtgatattatggaaataaccgaagcagagatagaaatcattacaaggcagattgttaaaatcatcataaatcatcaacgtgacgcatcagctgtgggtcctgaggatgcagacgatgaataagctcagagccgcagcctattgccgtgtttcgaccgaccgtgccgagcaatct

SEQ ID NO: 16955 - DNA, 260 bp, Unknown
  Description of Unknown: LeftRegion for integrase B3956 sequence
aatgtacggatgtcggagaagtacttggatattctcttgatattgatgaaatagaataaatactaaaaaagaccggctctcgctaccaacgaggaccggtttttaaaaaataagactattccagagaaaaatcttacctgcacattaagtatatcatctccgggattgccgtacaagtgtaaaaaaaggagaatgataaaatgaacgaatcagtatgcatctatttgaggaaatccagagccgatcgggaagctgaggcg

SEQ ID NO: 16956 - DNA, 260 bp, Unknown
  Description of Unknown: LeftRegion for integrase B3957 sequence
agatagatggatttttgctgaaagcttttatatttacttatgttttgttacatgttattatatttttacacaaaaaaccgactcctgcgaccaacaggaaccggtttaataaataagataatctcggagaaaatcttacctgcaccatgattatatcatctcctggattatcgcacaagtaaaaaaaggagaatgataaaatgaatgaatcagtatgcatctatctaaggaaatccagagccgatcgggaagctgaagca

SEQ ID NO: 16957 - DNA, 260 bp, Unknown
  Description of Unknown: LeftRegion for integrase B3958 sequence
aaatgtacggatgtcggagaagtgcttggatattctcttgatattgatgaaatagaataaatgctaaaaaagaccggctctcgctaccaacgaggaccggtttttaaaaataagacaattccagagaaaaatcttacctacacattaagtatatcatctccgggattgccatacaagtgcaaaaaaaggagaatgataaaatgaatgaatcagtatgtatctatttaaggaaatccagagccgatcgggaagctgaggcg

SEQ ID NO: 16958 - DNA, 260 bp, Unknown; identical to SEQ ID NO: 16825
  Description of Unknown: LeftRegion for integrase B3959 sequence

SEQ ID NO: 16959 - DNA, 260 bp, Unknown
  Description of Unknown: LeftRegion for integrase B3960 sequence
atgggactataataaatgtcgtgccgtttcccatgctgcaggagtttaatttggttcttgctgaacaatttcaacagctcgcttagcttcacgcgctctcccctcactttctgtatttattatagcacgtattcgcacgtatgtcaaggggtttcgaaaatattattattttttttgcttataaaaggagacatacatcagtgaacgcagtcatctatgcaagatattcctccgacaagcagacggagcaatctatcgaa

SEQ ID NO: 16960 - DNA, 260 bp, Unknown; identical to SEQ ID NO: 14762
  Description of Unknown: LeftRegion for integrase B3961 sequence

SEQ ID NO: 16961 - DNA, 260 bp, Unknown
  Description of Unknown: LeftRegion for integrase B3962 sequence
gaaaaacgcataataaaaaacgcccctttactaccagcacggaaataactaatctttatgcatttaaaacaaaaaagccggctcctgcgaccaacaggaaccggtttaataaataagataatctcggagaaaatcttacctacaccataattatatcatctcctggattatcacacaagtaaaaaaaggagaatgacaaaatgaacgaatcagtatgcatctatctaaggaaatccagagctgatcgggaagatgaggca

SEQ ID NO: 16962 - DNA, 260 bp, Unknown
  Description of Unknown: LeftRegion for integrase B3963 sequence
aaatattacctatttaattataacactgcatttatcaaaaagcaacaggaatatgtacaaacaatgtaagaatattttgttgcgaggtgatattatggaaataaccgaagcagagatagaaataattacaaggcagattgttaaaatcatcataaatcatcaacgtgacgcatcagctgtgggtcctgaggatgcagacgatgaataagctcagagccgcagcctattgccgtgtttcgaccgaccgtgccgagcaatcc

SEQ ID NO: 16963 - DNA, 260 bp, Unknown; identical to SEQ ID NO: 16844
  Description of Unknown: LeftRegion for integrase B3964 sequence

SEQ ID NO: 16964 - DNA, 260 bp, Unknown
  Description of Unknown: LeftRegion for integrase B3965 sequence
aaatgtacggatgtcggagaagtgcttggatattctcttgatattgatgaaatagaataaacgctaaaaaaagaccggctctcgctaccaacgaggaccggtttttaaaaataagacaattccagagaaaaatcttacctacacattaagtatatcatctccgggattgccgtacaagtgtaaaaaaggagaatgataaaatgaacgaatcagtatgtatctatttgaggaaatccagagccgatcgggaagctgaagcg

SEQ ID NO: 16965 - DNA, 260 bp, Unknown
  Description of Unknown: LeftRegion for integrase B3966 sequence
gacaggtaaaagaatctctcgattctgtatcattagaataataaaaaccgcccctgcttaacagagacggctttaagaatctttgcagttgtgaatgctcaattctttcctggacagttagaattatagcatatttatttacacctgcaaaggtgtattttttatacccttttttacataaaatatcacggaggtgtgctatgagtcttgaaaatgtatgtatctatttaagaaagtcccgtgctgatcgggaggctgaa

SEQ ID NO: 16966 - DNA, 260 bp, Unknown; identical to SEQ ID NO: 16825
  Description of Unknown: LeftRegion for integrase B3967 sequence

SEQ ID NO: 16967 - DNA, 260 bp, Unknown; identical to SEQ ID NO: 16921
  Description of Unknown: LeftRegion for integrase B3968 sequence

SEQ ID NO: 16968 - DNA, 260 bp, Unknown; identical to SEQ ID NO: 16955
  Description of Unknown: LeftRegion for integrase B3969 sequence

SEQ ID NO: 16969 - DNA, 260 bp, Unknown
  Description of Unknown: LeftRegion for integrase B3970 sequence
catcccttcgcgcgcagcttgcccagcatcagaagtccctgcgcatgcaccggcttgtgacgcttatcctcttgggtatcctttcgctgtgtgcccttgcgcttgtggccgacgtactcagcccatcaatcggctggatccgcacataaaaaacaaccgccccggtctgataagccggagcggtatttctggaggttgccatggacggcctgaatcttgcaaacgttgtgatctatgcgcggtattcttctgccgggcag

SEQ ID NO: 16970 - DNA, 260 bp, Unknown
  Description of Unknown: LeftRegion for integrase B3971 sequence
caaaagcctccgcatccagcgcgatcagcttcgaaaatccctgaaaatgcaccgcatcaccacccttgtcctgctcggcatcgtcgcgctttgcgcttttgctctggttgtggatatcttgagccctaccctcggttggtttcgtgcataaaaaatagccgccccggcgcactgccggagcggtatctttggaggtttttatggatcatggcctgaatctcgccaacgttgtgatttacgcccggtattcatccgtcggc

SEQ ID NO: 16971 - DNA, 260 bp, Unknown
  Description of Unknown: LeftRegion for integrase B3972 sequence
aagatagatggattttgctgaaagcttttatatttacttatgttttgttacatgttattatatttttacacaaaaaaccgactcctgcgaccaacaggaaccggtttaataaataagatagtctcggagaaaatcttacctacaccataattatatcatctcctggattatcacacaagtaaaaaaaggagaatgataaaatgaatgaatcagtatgtatctatttaaggaaatccagagccgatcgagaagctgaggca

SEQ ID NO: 16972 - DNA, 260 bp, Unknown
  Description of Unknown: LeftRegion for integrase B3973 sequence
agaaaaacgcataataaaaaacgcccctttactaccagcacggaaataactaatctttatgcatttaaaacaaaaaagccggctcctgcgaccaacaggaaccggtttaataaataagataatccggagaaaaatcttacctacaccataattatatcatctcctggattatcacacaagtaaaaaaggagaatgataaaatgaatgaatcagtatgcatctatctaaggaaatccagagccgatcgggaagctgaagca

SEQ ID NO: 16973 - DNA, 260 bp, Unknown
  Description of Unknown: LeftRegion for integrase B3974 sequence
taggcggttataatgataatagataaggacgtgaaatgcacgaatgaagctccatataaccgacgattcgcacgcatagatcgaagacatgccaaacattcggcttttcttcagctcttctcctgatcaggacattgagaatatggttttgggaatgtagttgcgggactctccacatcaacgggaggaagaaaacaagcatgaaacgagtattatgcctttacagggtttcaaccatcgggcaggtagaccatgacgat

SEQ ID NO: 16974 - DNA, 260 bp, Unknown; identical to SEQ ID NO: 16923
  Description of Unknown: LeftRegion for integrase B3975 sequence

SEQ ID NO: 16975 - DNA, 260 bp, Unknown
  Description of Unknown: LeftRegion for integrase B3976 sequence
gatagatggatttttgctgaaagcatttatatttacttatgttttgttacatgttattatatttttacacaaaaaaccgactcctgcgaccaacaggaaccggttttaataaataagataatccggagaaaaatcttacctacaccataattatatcatctcctggattatcacacaagtaaaaaaaggagaatgataaaatgaatgaatcggtatgtatctatctaaggaaatccagagctgatcgagaagctgaggcg

SEQ ID NO: 16976 - DNA, 260 bp, Unknown; identical to SEQ ID NO: 16959
  Description of Unknown: LeftRegion for integrase B3977 sequence

SEQ ID NO: 16977 - DNA, 260 bp, Unknown; identical to SEQ ID NO: 16828
  Description of Unknown: LeftRegion for integrase B3978 sequence

SEQ ID NO: 16978 - DNA, 260 bp, Unknown
  Description of Unknown: LeftRegion for integrase B3979 sequence
tgtgcctgtcggcgaataattggcaaataactttatataaaaaccgcccctgttggtaacaaggacggcttttcaagaatctttgcagttgtgaatgctcaattctttcctggacagttagaattatagcatatttatttgcacctgcaaaggtgtattttttatacccttttttacataaaatatcacggaggtgtgctatgagtcttgaaaatgtatgtatctatttaagaaagtcccgtgctgatcgggaggctgaa

SEQ ID NO: 16979 - DNA, 260 bp, Unknown
  Description of Unknown: LeftRegion for integrase B3980 sequence
tccaagcaagagcagatcatccgccagaagtccgtcgaggcgcggcgcaaggatgttttgatcggtgtgcttgtgtgcatcgttctcgtcgtgcttctggtgctcctcgtcgacctttgtaatctcaatatcggctgggtccgcgcataaataaaaccgccccgacccgatcagccggagcggtatctttggaggcttttgtggataatttgaatcttgccaacgtcgtgatctacgcccggtattcttccgccgggcaa

SEQ ID NO: 16980 - DNA, 260 bp, Unknown; identical to SEQ ID NO: 16882
  Description of Unknown: LeftRegion for integrase B3981 sequence

SEQ ID NO: 16981 - DNA, 260 bp, Unknown
  Description of Unknown: LeftRegion for integrase B3982 sequence
agaaaatgttttttatgatataatttctgaaaattaataaaaaccgcccctgctggtaacaaggacggcttttcaagaatctttgcagttgtgaatgctcaattctttcctggacagttagaattatagcatatttatttacacctgcaaaggtgcattttttatacccttttttacataaaatatcacggaggtgtgctatgagtcttgaaaatgtatgtatctatttaagaaagtcccgcgctgatcgggaggctgaa

SEQ ID NO: 16982 - DNA, 260 bp, Unknown; identical to SEQ ID NO: 16828
  Description of Unknown: LeftRegion for integrase B3983 sequence

SEQ ID NO: 16983 - DNA, 260 bp, Unknown
  Description of Unknown: LeftRegion for integrase B3984 sequence
aaagggaaatgtacagatgttggagaagtctttggatattctcttgatattgatgaaatagaataaataataaaaagccggctcctgcgaccaacaggaaccggttttaataaataagataatccggagaaaatcttacctacaccataattatatcatctcctggattatcgcacaagtaaaaaaaggagaatgataaaatgaatgaatcagtatgcatctatctaaggaaatccagagccgatcgggaagctgaggcg

SEQ ID NO: 16984 - DNA, 260 bp, Unknown
  Description of Unknown: LeftRegion for integrase B3985 sequence
tatgggacagagagaaacttgataatttaattgctacatccaaataaaagccgccccggcggcaaccggaacggcttttagatagattctcttaccaggtttacccggaaagataattcaaatcgacacttgaattataccatctccggcgcgtcctggcaaggggcgtattttttatacactttttgggaggtggacatatgatattttgttgctatgggcgtaaatctgtgtactctgaccgctccgactccgtggac

SEQ ID NO: 16985 - DNA, 260 bp, Unknown
  Description of Unknown: LeftRegion for integrase B3986 sequence
aaatattacctattcaattataacactgcatttatcaaaaagcaacaggaatatgtacaaacaatgtaagaatattttgttgcgaggtgatattatggaaataaccgaagcagagatagaaatcattacaaggcagattgttaaaatcatcataaatcatcaacgtgatgcatcagctgtgggtcctgaggatgcagacgatgaataagctcagagccgcagcctattgccgtgtttcgaccgaccgtgccgagcaatcc

SEQ ID NO: 16986 - DNA, 260 bp, Unknown
  Description of Unknown: LeftRegion for integrase B3987 sequence
ttggaatgttggaggactggccgaaggtcagtcgtagtggaagcaaggctgcgctggaagacgcacaggctgaaattgagcggtggaggcaagagttccttgccgggaacatctcggcaaagaaatacgtcaaaatcgcggacgctctcatgtccaaataaaaaaagccgccctcggtgggcggcgggaggttgctctgaatgtgtgcgaaaaagaaaccggccatgcttgagccggatatgcaggatgccgtgatctac

SEQ ID NO: 16987 - DNA, 260 bp, Unknown; identical to SEQ ID NO: 16858
  Description of Unknown: LeftRegion for integrase B3988 sequence

SEQ ID NO: 16988 - DNA, 260 bp, Unknown
  Description of Unknown: LeftRegion for integrase B3989 sequence
ttgtatgatcttatctggtattccggtgatactaaaatatcactttttatcggtacaccaaaggacaatgatacccttacatatttcagaatatggtatcagaaagatgatgatgcagccagcagatccgataatggaaatctttgatttataaataaaaatccccgcccggcgctggaacaccgaacggggagagggatatgtataaaatacacaccacagtaactgtattttatcatatcctgacgaaaaaatcaata

SEQ ID NO: 16989 - DNA, 260 bp, Unknown
  Description of Unknown: LeftRegion for integrase B3990 sequence
atgcaggaatatcaggtggataatctggatgacatcggctgttttgtaatccttgaaaaagaggaatttgcttgcgtcccgatgaatgaactagagtttatggaagtgttggaaatcggagcagaaagctatctgcacggtgtcagaatcattgatgacagctatggtgaagacatctatctgcccgttgaggtggtaagatgctgagtataccaaaggttgcacaatacgctcgattcagttcggataatcaacgaagt

SEQ ID NO: 16990 - DNA, 260 bp, Unknown
  Description of Unknown: LeftRegion for integrase B3991 sequence
tgtgcctgtcggcgaataattggcaaataactttatataaaaaccgcccctgttggtaacaaggacggcttttcaagaatctttgcagttgtgaatgctcaattctttcctggacagttagaattatagcatatttatttacacctgcaaaggtgtattttttatacccttttttacataaaatatcacggaggtgtgctatgagtcttgaaaatgtatgtatctatttaagaaagtcccgcgctgatcgggaagctgaa

SEQ ID NO: 16991 - DNA, 260 bp, Unknown
  Description of Unknown: LeftRegion for integrase B3992 sequence
gaaaatgtacggatgtcggagaagtacttggatattctcttgatattgatgaaatagaataaatgataaaaaaaaccggctctcgctaccaacgaggaccggtttttaaaaataagacaattccagagaaaaatcttacctgcacattaagtatatcatctccgggattgccatacaagtgtaaaaaggagaatgataaaatgaatgaatcagtatgcatctatttgaggaaatccagagccgaccgggaagctgaggcg

SEQ ID NO: 16992 - DNA, 260 bp, Unknown; identical to SEQ ID NO: 16866
  Description of Unknown: LeftRegion for integrase B3993 sequence

SEQ ID NO: 16993 - DNA, 260 bp, Unknown; identical to SEQ ID NO: 15631
  Description of Unknown: LeftRegion for integrase B3994 sequence

SEQ ID NO: 16994 - DNA, 260 bp, Unknown
  Description of Unknown: LeftRegion for integrase B3995 sequence
ggaaaatgtacagatgttggagaagtccttggatattctcttgatattgatgaaatagaataaataataaaaaagccggctctcgctaccaacgggaaccggttttaataaataagataatccggagaaaaatcttacctacaccataattatatcatctcctggattatcgcacaagtaaaaaaaaggagaatgataaaatgaatgaatcagtatgcatctatctaaggaaatccagagccgatcgggaagctgaagca

SEQ ID NO: 16995 - DNA, 260 bp, Unknown
  Description of Unknown: LeftRegion for integrase B3996 sequence
agcattgctgaatttgatgcaaatatctttgaaaatcaggttgaaaaaattcttgttcccgcaccaaacaaattgattattcaattaaaaaacgggaaatgcataaataccacatggaaagaccgttcacgttctgaaagctggacagaggaaaaacgggctgccgctgctaaatcatcaaaaacaaggagatggagaaaatgccaaaagtaacaaaaattccgccaagattaaatcctgccacttttgcacctttggag

SEQ ID NO: 16996 - DNA, 260 bp, Unknown
  Description of Unknown: LeftRegion for integrase B3997 sequence
aaaacgcataataaaaaaccgcccctgtgctaccagcgcggaattaactaatttttatgcatttaaaatgaaaaaagccggctcctgcgaccaacgggaaccggttttaataaataagataatctcggagaaaatcttacatacaccataattatatcatctcctggattatcgcacaagtaaaaaaggagaatgataaaatgaatgaatcagtatgtatctatttaaggaaatccagagccgatcgggaagctgaagca

SEQ ID NO: 16997 - DNA, 260 bp, Unknown
  Description of Unknown: LeftRegion for integrase B3998 sequence
aggagaatttgagcaaaagaaaaatcaattattaaatatgtaaaacaaaaccgccccggcggcaaccggaacggcttttagatagattctcttaccaggtttacccggaaagataattcaaatcgacacttgaattataccatctccggcgcgtcctggcaaggggcgtattttttatacacttttttggaggtggacatatgatattttgttgctatggacgtaaatctgtgtactctgaccgctccgattccgtggac

SEQ ID NO: 16998 - DNA, 260 bp, Unknown; identical to SEQ ID NO: 16882
  Description of Unknown: LeftRegion for integrase B3999 sequence

SEQ ID NO: 16999 - DNA, 260 bp, Unknown; identical to SEQ ID NO: 16849
  Description of Unknown: LeftRegion for integrase B4000 sequence

SEQ ID NO: 17000 - DNA, 260 bp, Unknown
  Description of Unknown: LeftRegion for integrase B4001 sequence
tatgggacagagagaaacttgataatttaattgctacatccaaataaaaaccgccccggcagcaaccggaacggcttttagatagattctcttaccaggtttacccggaaagataattcaaatcgacacttgaattataccatctccggcgcgtcctggcaaggggcgtattttttatacactttttgggaggtggacatatgatattttgttgttatggacgtaaatccgtgtactctgatcgctccgattccgtggac

SEQ ID NO: 17001 - DNA, 260 bp, Unknown
  Description of Unknown: LeftRegion for integrase B4002 sequence
gggaaatgtacagatgttggagaagtctttggatattctcttgatattgatgaaatagaataaataataaaaaagccggctcccgcgaccaacaggaaccggttttaataaataagataatccagagaaaaatcttacctacaccataattataccatctcctggattatcgcacaagtaaaaaaaaggagaatgataaaatgaacgaatcagtatgcatctatctaaggaaatccagagccgatcgggaagctgaagca

SEQ ID NO: 17002 - DNA, 260 bp, Unknown
  Description of Unknown: LeftRegion for integrase B4003 sequence
cggcggattcgacggtatgaagtatggatgcaatatagaacttgcattttataaaaactaggcaaaacaaaaaccgctcgacgctgcaacgtcgaacggctcgtataaggcttattgccaatatttagcaaatatattatagcataagccttacaatttgtgtaggcttattttttatactctttttaggtggtgttactatgttaatgattgctgattatagtagaaaatctgtatacagtgataaatcagatagcacg

SEQ ID NO: 17003 - DNA, 260 bp, Unknown
  Description of Unknown: LeftRegion for integrase B4004 sequence
tagaaaatgtggaagaatatttgaagtgaaactttaaggagaaatgaatatgaaaaagaaaaacgcataataaaaagccggctcctgcgaccaacaggaaccggttttaataaataagataatccggagaaaaatcttacctacaccataattataccatctcctggattatcacacaagtaaaaaaggagaatgataaaatgaacgaatcagtatgcatctatctaaggaaatccagggccgatcgtgaagctgaagca

SEQ ID NO: 17004 - DNA, 260 bp, Unknown
  Description of Unknown: LeftRegion for integrase B4005 sequence
aaatattacctattcaattataacactgcatttatcaaaaagcaacaggaatatgtacaaacaatgtaagaatattttgttgcgaggtgatattatggaaataaccgaagcagagatagaaatcattacaaggcagattgttaaaatcatcataaatcatcaacgtgatgcatcagctaccaattctgaggacgctgacgatgaataagctcagagccgcagcctattgccgtgtttcaaccgaccgtgccgagcaatcc

SEQ ID NO: 17005 - DNA, 260 bp, Unknown; identical to SEQ ID NO: 16855
  Description of Unknown: LeftRegion for integrase B4006 sequence

SEQ ID NO: 17006 - DNA, 260 bp, Unknown
  Description of Unknown: LeftRegion for integrase B4007 sequence
aagagcttttagatagcggtattattactcaagaagaatttgaccagaaaaaatcagaacttttataaaaagaaccggctcctgctaccaacgggaaccggttttttgaaaaataagacaatctcggtgataatcttacctacacattaagtatatcatctccgggattgccatacaagtgtaaaaaggagaatgataaaatgaatgaatcagtatgcatctatttaaggaaatccagagccgatcgagaagctgaggca

SEQ ID NO: 17007 - DNA, 260 bp, Unknown
  Description of Unknown: LeftRegion for integrase B4008 sequence
atcccttcgcgcgcagcttgcccagcatcagaagtccctgcgcatgcaccggcttgtgacgctcatcctcttgggtattctttcgctgtgtgcccttgcgcttgtggccgacgtactcagcccatcaatcggctggatccgcacataaaaaaacaaccgccccggtctgataagccggagcggtatttctggaggttgccatggacggcctgaatcttgcaaacgttgtgatctatgcgcggtattcttctgccgggcag

SEQ ID NO: 17008 - DNA, 260 bp, Unknown
  Description of Unknown: LeftRegion for integrase B4009 sequence
aaatgtacagatgtcggagaagtgctgggatattctcttgatattacagaaatagaataaatactaaaaagaaccggctctcgctaccaacgggaaccggtttttgaaaaataagacaattccggagaaaaatcttacctacacattaagtatatcatctccgggattgccgtacaagtgtaaaaaaggagaatgatgaaatgaatgaatcagtatgtatctatttgagaaaatccagagccgatcgggaagctgaggcg

SEQ ID NO: 17009 - DNA, 260 bp, Unknown; identical to SEQ ID NO: 16827
  Description of Unknown: LeftRegion for integrase B4010 sequence

SEQ ID NO: 17010 - DNA, 260 bp, Unknown; identical to SEQ ID NO: 16975
  Description of Unknown: LeftRegion for integrase B4011 sequence

SEQ ID NO: 17011 - DNA, 260 bp, Unknown; identical to SEQ ID NO: 14770
  Description of Unknown: LeftRegion for integrase B4012 sequence

SEQ ID NO: 17012 - DNA, 260 bp, Unknown
  Description of Unknown: LeftRegion for integrase B4013 sequence
ataactgtggtgcagactggaacgaacaggcagtaaagaaagcaaaggaatatttggactattcttctttctctcgttccgggctgattggtcagctgaaatatgaaggctttacaaatgagcaggccgaatacggcgtaactcaaaacggcctataattgtaatttcccgccacagcgggggcaaaggggtgaaatgcagtgcgggcgtttatctatggccgcttttccagccataagcagcaggaattaagcatagag

SEQ ID NO: 17013 - DNA, 260 bp, Unknown; identical to SEQ ID NO: 16991
  Description of Unknown: LeftRegion for integrase B4014 sequence

SEQ ID NO: 17014 - DNA, 260 bp, Unknown
  Description of Unknown: LeftRegion for integrase B4015 sequence
tccaagcaagagcagatcatccgccagaagtccgtcgaggcgcggcgcaaggatgttttgatcggtgtgcttgtgtgcatcgttctcgtcgtgcttctggtgctcctcgtcgacctttgtaatctcaatatcggctgggtccgcgcataaataaaaccgccccggcccgatcagccggagcggtatctttggaggcttttgtggataatttgaatcttgccaacgtcgtgatctacgcccggtattcttccgccgggcaa

SEQ ID NO: 17015 - DNA, 260 bp, Unknown
  Description of Unknown: LeftRegion for integrase B4016 sequence
agcattactgaatttgatgcaaatatctttgaaaatcaagttgaaaaaattcttgttcccgtaccaaacaaattgatttttcaattaacaaacgggaaatgcataaataccacatggaaagaccgttcccgttctgaaagctggacagaggaaaaacgtgctgccgctgctgaatcatcaaaaacaaggagatggagaaaatgccaaaagtaacaaaaattccgccaagattaaatcctgccacttttgcacctttggag

SEQ ID NO: 17016 - DNA, 260 bp, Unknown
  Description of Unknown: LeftRegion for integrase B4017 sequence
ttgacaaagaaatccagacaagatttctggaagaactgacacgaagggcagggaaccttggaaggctcaacagaagaagcaaggaacacaataagacagttcctacagcatttcatttcaagccagccgatttaacatttcctgatccatttgagcaggcagaatacatttacagtttgatagaaagcgaggaatgacacatggcaggagcaaagaacataacagttattccggcaaaaaaacgtgtaggtaatacagta

SEQ ID NO: 17017 - DNA, 260 bp, Unknown
  Description of Unknown: LeftRegion for integrase B4018 sequence
gacaggtaaaagaatctctcgattctgcatcattagaataataaaaaccgcccctgcttaacagagacggctttaagaatctttgcagttgtgaatgctcaattctttcctggacagttagaattatagcatatttatttacacctgcaaaggtgtattttttatacccttttttacataaaatatcacggaggtgtgctatgagtcttgaaaatgtatgtatctatttaagaaagtcccgcgctgatcgggaagctgaa

SEQ ID NO: 17018 - DNA, 260 bp, Unknown; identical to SEQ ID NO: 16850
  Description of Unknown: LeftRegion for integrase B4019 sequence

SEQ ID NO: 17019 - DNA, 260 bp, Unknown
  Description of Unknown: LeftRegion for integrase B4020 sequence
ccgcgcaacgtccgatgaccgtaaaaaatggcgcaatatcttctgcattgttgcctttatagccattgcgataatcatgctggcgattgtcgctgacgttcttaataaaggcgtgggattcttctggcttgaagatcattcggttataggggattttgcaaacaatgttataaatcatataaaaggcgggaacttataggatgaatacagaccaaataatagaaaaagtaacaagtcaatatacacaagacaagtatgca

SEQ ID NO: 17020 - DNA, 260 bp, Unknown
  Description of Unknown: LeftRegion for integrase B4021 sequence
aataatagtgaatttacgtaatttgtaccaaattattatgctttatttatttttatattgtgctataatttaaaaaaccgactcctgcgaccaacaggaaccggtttaataaataagataatctcggagaaaatcttacctgcaccataattatatcatctcctggattatcgcacaagtaaaaaaaggagaatgataaaatgaatgaatcagtatgcatctatctaaggaaatccagagccgatcgggaagctgaagca

SEQ ID NO: 17021 - DNA, 260 bp, Unknown
  Description of Unknown: LeftRegion for integrase B4022 sequence
atattctttcccctgttacaatattttaattccagaaaactataaagttatgctgtaaaagaaccgcctttgcagacggccctttaccggaaaaacttttttgaaataaaactatatttggggatagttcggttgtatctttcgatactttattattataatactactttttatcccctacaatacaaggaggcataaatatgcgtaatgatcctattttatctttgagtcatgttatcatctatcttcgaaaatcccgc

SEQ ID NO: 17022 - DNA, 260 bp, Unknown
  Description of Unknown: LeftRegion for integrase B4023 sequence
aagagcttttagatagcggtattattactcaagaagaatttgaccagaaaaaatcagaacttttataaaaagaaccggctcctgctaccaacgggaaccggttttttgaacaataagacaatctcggtgataatcttacctacacattaagtatatcatctccgtgattgccgcacaagtgtaaaaaggagaatgataaaatgaatgaatcagtatgcatctatttgagaaaatccagagccgatcgggaagctgaagca

SEQ ID NO: 17023 - DNA, 260 bp, Unknown
  Description of Unknown: LeftRegion for integrase B4024 sequence
tgttaagtatattatatgtcaaatccgtttatttgtcaaactgcaaaaaccgcccctgcgccaacaggaacggctttctataaccccgaagagttacatcaacattcataattcattgtatcatctccggggcagccatgcaagcggaacattcgttcctgctggctgttatttttgtactcaaaaaggaggatgattgaatgttttttggaatttatggaagaaaatctgtctattctgataagtctgattccgtagat

SEQ ID NO: 17024 - DNA, 260 bp, Unknown; identical to SEQ ID NO: 16943
  Description of Unknown: LeftRegion for integrase B4025 sequence

SEQ ID NO: 17025 - DNA, 260 bp, Unknown
  Description of Unknown: LeftRegion for integrase B4026 sequence
ataaataaaagcccctgtgctaccaacacaagagcttttaccacgatacttacataagctgtgcttatgatataataccgccttcgacaagccatattatatcattcatagcaccgcttttgcaagtggtgttatttttgtacccatttttgagttgcaccggtgcaacttgcatatattttacagaaaggatgattaatatggtatcatttgacagcattattatctatcttagaaagtcccgctctgatgatccggcg

SEQ ID NO: 17026 - DNA, 260 bp, Unknown
  Description of Unknown: LeftRegion for integrase B4027 sequence
aattcaactcgttagtaggacaaggaatcatgggaaatcaagagggatttaatactatgatcttatataaataaaaaaggacctattgcagcaacaataggaccgagtacagaaaataaaattacctaccacagcaattctttttctgtactctcattatagcaaatttaacgaatattcgcaataaggagagtaataaaatgaacaataattatgaaaatattacagtagatgatttattaaagaatctgcctatatac

SEQ ID NO: 17027 - DNA, 260 bp, Unknown
  Description of Unknown: LeftRegion for integrase B4028 sequence
ctggaagatgaattagtggaaagttttcccggattacgggctctgattaagaattgtaaataaaaaatcgcccggtgctgcgaacaccaggcgacctgttcttccttgcggaagctgtaaactctacgaataaattttacagcgtttccgataaatccgcaagggtttattttttatactcttttttgggaggtgggacgatgaggttcttttcctacggacgaaaatccgtattttctgataaatcagattcaatcgat

SEQ ID NO: 17028 - DNA, 260 bp, Unknown
  Description of Unknown: LeftRegion for integrase B4029 sequence
ccagatcagcgccgacgcatatgtgaaggtctgcacgcctttggctaagatggcaaaataaaaaaatcgcccagtgctgcgaacaccaggcgacctgttcttccttgcggaagctgtaaactctacgaataaattttacagcgtttccgataaatccgcaagggtttattttttatactctttttttgggaggtgagacgatgaggttcttttcctacggacgaaaatccgtattttctgataaatcagattcaatcgat

SEQ ID NO: 17029 - DNA, 260 bp, Unknown; identical to SEQ ID NO: 17026
  Description of Unknown: LeftRegion for integrase B4030 sequence

SEQ ID NO: 17030 - DNA, 260 bp, Unknown
  Description of Unknown: LeftRegion for integrase B4031 sequence
ttaagtatattatatgtcaaatacgtttatttgtcaaattacaaaaccgcccagtgctaccaacactgaacggttttagaaccccggagggctcatatagattttccaaatttcattgtatcatctccggggcagccatgcaagcggaacattcgttcctgctggctgttatttttgtactcaaaaaggaggatgattgaatgttttttgggatttatggaagaaaatctgtctattccgataagtctgattccgtagat

SEQ ID NO: 17031 - DNA, 260 bp, Unknown
  Description of Unknown: LeftRegion for integrase B4032 sequence
ctggatgatgaattcgtggaaaacttccccggattacgggctctgattaagaattgtaaataaaaaaatcgcccagtgctgcgaacaccaggcgacctgttcttccttgcggaagctgtaaactctacgaataaattttacagcgtttccgataaatccgcaagggtttatttttatactcttttttgggaggtgagacgatgaggttcttttcctacggacgaaaatccgtattttctgataaatcagattcaatcgat

SEQ ID NO: 17032 - DNA, 260 bp, Unknown
  Description of Unknown: LeftRegion for integrase B4033 sequence
aaatattgcagaattattaaaataaataaaaaaccgccccactctaaagcaggacggtcacgctctcgaatgatacgaaagccctagacaagcatattgtatcattcggagcagccaaacgcaagcggaacaccagttctctgctggctgttatttttatacccttttttacatacattttcacaaaggagtgataccttatgccaaacaccaaatcattcactgtaaatgaagtcttagtctatctccgcaagtcccgg

SEQ ID NO: 17033 - DNA, 260 bp, Unknown
  Description of Unknown: LeftRegion for integrase B4034 sequence
gacaggtaaaagaatctctcgattctgcatcattagaataataaaaaccgcccctgcttaacagagacggctttaagaatctttgcagttgtgaatgctcaattctttcctggacagttagaattatagcatgtttcttcacacctgtataggtgtattttttatacccatttttcataaaatataacggaggtttacctatgaatgaaaatgtatgtatctatttaagaaagtctcgtgctgatcaggaagctgagctt

SEQ ID NO: 17034 - DNA, 260 bp, Unknown
  Description of Unknown: LeftRegion for integrase B4035 sequence
tggatgatgaattcgtggaaaacttccccggattacgggctctgattaagaattgtaaataaaaaaatcgcccagtgctgcgaacaccaggcgacctgttcttccttgcggaagctgtaaactctacgaataaattttacagcgtttccgataaatccgcaagggtttattttttatactctttttgtggaggtgagacgatgaggttcttttcctacggacgaaaatccgtattttctgataaatcagattcaatcgat

SEQ ID NO: 17035 - DNA, 260 bp, Unknown
  Description of Unknown: LeftRegion for integrase B4036 sequence
cgtggagactctccccggattgcgtgcgttaattaagaaatgtaaataaaaaaatcgcccagtgctgcgaacaccaggcgacctgttcttccttgcggaagctgcataatttgacgtaaatcatcaaatcttattttacagccgtttccgtaaatccgcaagggtttattttttatactctttttttgggaggtgggacgatgaggttcttttcctacggacgaaaatccgtattttctgataaatcagattcaatcgat

SEQ ID NO: 17036 - DNA, 260 bp, Unknown
  Description of Unknown: LeftRegion for integrase B4037 sequence
cggatgcatatgtgaaagtctgcagcgcgcttgcgaaattgaagaaataaaaaaccgcccggtgctaccaacaccaggcgacttgctcttccttgcggaagctgtaaatataagatatgttttgcataaatattttacagccgtttccgtaaatccgcaagggtttattttttatactctttttttgggaggttaggacaatgaggttcttttcatacggacgaaaatccgtattttctgataaatcagattctatcgat

SEQ ID NO: 17037 - DNA, 260 bp, Unknown
  Description of Unknown: LeftRegion for integrase B4038 sequence
acgctttacttcatgatgacaagttaataaatcaatttaaagataaccataatggaaattatgagtttgaagcaaatttatttgcagtagcattactatttaatgaagaagactttaatattaagtttaataaattagataattacatcctacagggaattcttgatagtaatatagaattagtctaaggagatgataaattgaacaccattgctatttatactcgtaaatctaaattcactggaaaaggtgaatctatt

SEQ ID NO: 17038 - DNA, 260 bp, Unknown
  Description of Unknown: LeftRegion for integrase B4039 sequence
tacctgcgagataggaagcaaatctgtatctgacacagaaactgaataaaaaatcgcccggcgcttccaacgccagacgatctcataaatcttgcagacagccgttcagctggctacaattccctctagacaagagaattatagcacagttcatggcacctgcataggtgttatttttataccctttttaggaggttcttatgaacatttgttgctatggtaggaagtcgatctattctgatcactcagattctatcgac

SEQ ID NO: 17039 - DNA, 260 bp, Unknown
  Description of Unknown: LeftRegion for integrase B4040 sequence
tggatgatgaattcgtggaaaacttccccggattacgggctctgattaagaattgtaaataaaaaaatcgcccagtgctgcgaacaccaggcgacctgttcttccttgcggaagctgtaaactctacgaataaattttacagcgtttccgataaatccgcaagggtttattttttatactcttttttgggaggtgggacgatgaggttcttttcctacggacgaaaatccgtattttctgataaatcagattcaatcgat

SEQ ID NO: 17040 - DNA, 260 bp, Unknown
  Description of Unknown: LeftRegion for integrase B4041 sequence
ctggaggatgaattcgtggagactctccccggattgcgtgcgttaattaagaaatgtaaataaaaaatcgcccagtgctgcgaacaccaggcgacctgttcttccttgcggaagctgtaaactctacgaataaattttacagcgtttccgataaatccgcaagggtttattttttatactcttttttgggaggtgagacgatgaggttcttttcctacggacgaaaatccgtattttctgataaatcagattcaatcgat

SEQ ID NO: 17041 - DNA, 260 bp, Unknown
  Description of Unknown: LeftRegion for integrase B4042 sequence
ggaagatgaattcgtggagactctccccggattgcgtgcgttaattaagaaatgtaaataaaaaaatcgcccagtgctgcgaacaccaggcgacctgttcttccttgcggaagctgtaaactctacgaataaattttacagcgtttccgataaatccgcaagggtttattttttatactctttttttgggaggtgggacgatgaggttcttttcctacggacgaaaatccgtattttctgataaatcagattcaatcgat

SEQ ID NO: 17042 - DNA, 260 bp, Unknown
  Description of Unknown: LeftRegion for integrase B4043 sequence
cgagataggaaacaaatctgtatctgacacagaaactgaataaaaaaatcgcccagcgctaccaacaccagacgattttgtgaaatccttgcagacacagccgtttggctggctacaatgctctctagtcaagagaattatagcacagttcatggcacctgcataggtgttatttttatacccttttttaggaggttcttatgaacatttgttgctatggcaggaagtcgatctattctgatcactcagattccatcgac

SEQ ID NO: 17043 - DNA, 260 bp, Unknown
  Description of Unknown: LeftRegion for integrase B4044 sequence
tgaggatgaatttctggacggactgccaggtcttcgtggattgattaagaaatgtaaataaaaaaatcgcccggtgctgcgaacaccaggcgacctgttcttccttgcggaagctgtcaaactttgcataaatattttacagccgtttccgtaaatccgcaagggtttattttttatactcttttttgggaggtgggacgatgaggttcttttcctacggacgaaaatccgtattttctgataaatcagattctatcgat

SEQ ID NO: 17044 - DNA, 260 bp, Unknown
  Description of Unknown: LeftRegion for integrase B4045 sequence
gcaacaatcctcgaccacatggtcacgttccatttcagggacggccacatcgaatccagagacttcttggataagcggcacggcaccccttggaccgaggaacggcgggaaaaagcaaaaaaatccatgaaggccgcttggacagacgagcgcagggaggcaatgagtgaaagaatcaagaaaataaggagcgaaaagaaatggccaaatccgtaaccacgataccggcgacgctgtcacgcttcacggcggcaccgatt

SEQ ID NO: 17045 - DNA, 260 bp, Unknown; identical to SEQ ID NO: 17025
  Description of Unknown: LeftRegion for integrase B4046 sequence

SEQ ID NO: 17046 - DNA, 260 bp, Unknown
  Description of Unknown: LeftRegion for integrase B4047 sequence
tggaagatgaattagtggaaagttttcccggattacgggctctgattaagaattgtaaataaaaaaatcgcccggtgctgcgaacaccaggcgacctgttcttccttgcggaagctgtaaactctacgaataaattttacagcgtttccgataaatccgcaagggtttattttttatactcttttttgggaggtgggacgatgaggttcttttcctacggacgaaaatccgtattttctgataaatcagattcaatcgat

SEQ ID NO: 17047 - DNA, 260 bp, Unknown
  Description of Unknown: LeftRegion for integrase B4048 sequence
ataaataaaagcccctgtgctaccaacacaagagcttttactgcgacttacaattaagctgtgctcaaatgatataatcgccctagacaagccatattatatcattcatagcaccgcttttgcaagtggtgttatttttgtacccatttttgagttgcaccggtgcaacttgcatatattttacagaaaggatgattaatatggtatcatttgacagcattattatctatcttagaaagtcccgctctgatgatccggcg

SEQ ID NO: 17048 - DNA, 260 bp, Unknown
  Description of Unknown: LeftRegion for integrase B4049 sequence
ataaataaaagcccctgtgctatcaacacaagagcttttaccacgatacttacataagctgtgcttatgatataataccgccttcgacaagccatattatatcattcatagcaccgcttttgcaagtggtgttatttttgtacccatttttgagttgcaccggtgcaacttgcatatattttacagaaaggatgattaatatggtatcttttgacagcattattatctatcttagaaagtcacgttctgatgatccggcg

SEQ ID NO: 17049 - DNA, 260 bp, Unknown
  Description of Unknown: LeftRegion for integrase B4050 sequence
tgcatcgaagcaaatcccggaagatgtgttgcaacaactcataccatcgaattttgaagaaatacgagtgactgaacgaaataaagtagtaattgttttgcaggatggttctaagatagaaaaaacatggcagtataagtcacgcagtgaatcttggactggggaaatgagaaaaaaagccagcgaaaggagacagaaacgtgaatacagcaagaactgtgacggtgattcctgcaacgcttaatttgtttacaagtacg

SEQ ID NO: 17050 - DNA, 260 bp, Unknown
  Description of Unknown: LeftRegion for integrase B4051 sequence
tggatgatgaattcgtggaaaacttccccggattacgggctctgattaagaattgtaaataaaaaatcgcccagtgctgcgaacaccaggcgacctgttcttccttgcggaagctgtaaactctacgaataaattttacagcgtttccgataaatccgcaagggtttatttttttatactcttttttgggaggtgggacgatgaggttcttttcctacggacgaaaatccgtattttctgataaatcagattcaatcgat

SEQ ID NO: 17051 - DNA, 260 bp, Unknown
  Description of Unknown: LeftRegion for integrase B4052 sequence
ctggatcattgacatggttatgatctgctgcaacaaattcaccgacagcaccggtgcggtggtcggtctgaaggttgctgagtataccggacagccggatcccaatcttgcagaggcttctctggaggagcagcgggaggcagcggccgagactgccagagcttacggctataccgtaatagagtcaggcgatcaggataatgccgacaagtaaaaacatggctcgaaaatatgccgcaggaggtggctcggataattcc

SEQ ID NO: 17052 - DNA, 260 bp, Unknown
  Description of Unknown: LeftRegion for integrase B4053 sequence
tgtgcctgtcggcgaataattggcaaataactttatataaaaaccgcccctgttggtaacaaggacggcttttcaagaatctttgcagttgtgaatgctcaattctttcctggacagttagaattatagcatgtttcttcacacctgtataggtgtattttttatacccatttttcataaaatataacggaggtttacctatgaatgaaaatgtatgcatctatttaagaaagtctcgtgctgatcaggaagctgagctt

SEQ ID NO: 17053 - DNA, 260 bp, Unknown
  Description of Unknown: LeftRegion for integrase B4054 sequence
ctggaggatgaattcgtggagactctccccggattgcgtgcgttaattaagaaatgtaaataaaaaatcgcccagtgctgcgaacaccaggcgacctgttcttccttgcggaagctgtaaactctacgaataaattttacagcgtttccgataaatccgcaagggtttattttttatactcttttttgggaggtgagacgatgaggttcttttcatacggacgaaaatccgtattttctgataaatcagattctatcgat

SEQ ID NO: 17054 - DNA, 260 bp, Unknown
  Description of Unknown: LeftRegion for integrase B4055 sequence
atccgtctccgagctgcttcagctggaaaacaaaagcctccgcatccagcgcgatcagcttcgaaaatccctgaaaatgcaccgcatcaccacccttgtcctgctcggcatcgtcgcgctttgcgcttttgctctggtggtggatatactgagtcccaccgtcggctggttccgtgcataagaataatttggaggcttttatggatggattaaatcttgcaaatgttgtaatttacgcccggtactcatccgtcggacag

SEQ ID NO: 17055 - DNA, 260 bp, Unknown
  Description of Unknown: LeftRegion for integrase B4056 sequence
agaacttttagatagtggcattattacacaagaagaattcaatcagaaaaaaacagaacttttgtaaaaaaagaaccggctctcgctaccaacgggaaccggttttgaaaaataagacaattccagagaaaaatcttacctacacattaagtatatcatctccgggattgccgtacaagtgtaaaaaggagaatgataaaatgaatgaatcagtatgtatctatttgaggaaatccagagccgatcgggaagctgaagca

SEQ ID NO: 17056 - DNA, 260 bp, Unknown
  Description of Unknown: LeftRegion for integrase B4057 sequence
ttccagaaaatgttttttatgatataatttctgaaaattaataaaaaccgcccctgcttaacagagacggctttaagaatctttgcagttgtgattgctcaattctttcctggacagttagaattatagcatgtttcttcacacctgtataggtgtattttttatacccatttttcataaaatataacggaggtttacctatgaatgaaaatgtatgtatctatttaagaaagtctcgtgctgatcaggaagctgagctt

SEQ ID NO: 17057 - DNA, 260 bp, Unknown
  Description of Unknown: LeftRegion for integrase B4058 sequence
tttggaggatgaattcgtggagactctccccggattgcgtgcgttaattaagaaatgtaaataaaaaatcgcccagtgctgcgaacaccaggcgacctgttcttccttgcggaagctgtaaactctacgaataaattttacagcgtttccgataaatccgcaagggtttattttttatactcttttttggaggtgggacgatgaggttcttttcctacggacgaaaatccgtattttctgataaatcagattcaatcgat

SEQ ID NO: 17058 - DNA, 260 bp, Unknown
  Description of Unknown: LeftRegion for integrase B4059 sequence
aaatattgcagaattattaaaataaataaaaaaccgccccactctaaagcaggacggtcacgctctcgaatgatacgaaagccctagacaagcacattgtatcattcggagcagccaaacgcaagcggaacaccagttctctgctggctgttatttttatactcttttttacatacattttcacaaaggagtgataccttatgccaaacaccaaatcgttcactgtaaatgaagtcttagtctatctccgcaagtcccgg

SEQ ID NO: 17059 - DNA, 260 bp, Unknown
  Description of Unknown: LeftRegion for integrase B4060 sequence
ataaataaaagcccctgtgctaccaacacaagagcttttaccacgatacttacataagctgtgcttatgatataataccgccctagacaagccatattatatcattcatagcaccgcttttgcaagtggtgttatttttgtacccatttttgagttgcaccggtgcaacttgcatatattttacagaaaggatgattaatatggtatcttttgacagcattattatctatcttagaaagtcacgttctgatgatccggcg

SEQ ID NO: 17060 - DNA, 260 bp, Unknown; identical to SEQ ID NO: 17059
  Description of Unknown: LeftRegion for integrase B4061 sequence

SEQ ID NO: 17061 - DNA, 260 bp, Unknown
  Description of Unknown: LeftRegion for integrase B4062 sequence
atattgcagaattattaaaataaataaaaaccgccccactctaccaaagcaggacggtcacgctcccggatgatccaagaaccctcaacaagcacattgtatcattcccggagcagctacgcaagcggaacacccgttccccgctggctgttatttttatacccttttttacatacattttcacaaaggagtgataccttatgccaaacatcgaatcattcactgtaaatgaagtcttagtctatctccgcaaatcccgg

SEQ ID NO: 17062 - DNA, 260 bp, Unknown
  Description of Unknown: LeftRegion for integrase B4063 sequence
tggaggatgaattcgtggagactctccccggattgcgtgcgttaattaagaaatgtaaataaaaaaatcgcccagtgctgcgaacaccaggcgacctgttcttccttgtggaagctgtaaactctacgaataaattttacagcgtttccgataaatccgcaagggtttattttttatactcttttttgggaggtgggacgatgaggttcttttcctacggacgaaaatccgtattttctgataaatcagattcaatcgat

SEQ ID NO: 17063 - DNA, 260 bp, Unknown
  Description of Unknown: LeftRegion for integrase B4064 sequence
taagtatattatatgccaatcacaattatttgtcaaatcataaaaccgcccagtgttaccagcactgaacggctttctatagctccggagagctacatcaatattcataattcattgtatcatctccggggcagccatgcaagcggaacattcgttcctgctggctgttatttttgtacccaaaaaaggaggatgattgaatgttttttggaatttatggaagaaaatctgtctattctgataagtctgattccgtagat

SEQ ID NO: 17064 - DNA, 260 bp, Unknown
  Description of Unknown: LeftRegion for integrase B4065 sequence
atccggctccgagctgcttcggctggaaaacaaaagcctccgcatccagcgcgatcagcttcgaaaatccctgaaaatgcaccgcatcaccacccttgtcctgctcggcatcgtcgcgctttgcgcttttgctctggtgctggatatcctgagccccaccgtcggctggttccgtgcataagaataatttggaggcttttatggatggattaaatcttgcaaatgttgtaatttacgcccggtactcatccgtcggacag

SEQ ID NO: 17065 - DNA, 260 bp, Unknown
  Description of Unknown: LeftRegion for integrase B4066 sequence
gctgattgatgaggagcttttcaataaggtgcaggagctacgaaacagtaatgccagatctcaaaaccgtattcgtgattatataaagcaggcgcctgttgcagaaaacattcaatatcgcattggaaaagttcagcagcgctatgaaaacccataccaacaagcagaatacgcctatgggttaatcaaggaggaaaaatatgaatgagaatgtaaccttaattccggccagaaaaaggcccggtaatagaatctcaaaa

SEQ ID NO: 17066 - DNA, 260 bp, Unknown; identical to SEQ ID NO: 17040
  Description of Unknown: LeftRegion for integrase B4067 sequence

SEQ ID NO: 17067 - DNA, 260 bp, Unknown
  Description of Unknown: LeftRegion for integrase B4068 sequence
acagaaatgcttatcgaatcgtaagagattatctaaataaataaaaaaaccgcccggtgctggtaacaccgaacggcttcttcgcttcccttgcgggatgcggttgcttaaccttcgcaggattaagtataccgcattttccacgagtccacaagggcttattttttatactcttttttagaatttcaggaggtggaacaatgaggttttttagctacggacgaaaatccgtattttctgataaatccgattcgattgac

SEQ ID NO: 17068 - DNA, 260 bp, Unknown
  Description of Unknown: LeftRegion for integrase B4069 sequence
gcacagatgtcggagaagtccttggatattcttttgatattacagaaatagaataaatattaaaaaaaaagaaccggctctcgctaccaacgaggaccggttttttaaaaataagacaattccagagaaaaatcttacctacacattaagtatatcatctccgggattgttacacaagtgtaaaaaaggagaatgataaaatgaacgaatcagtatgtatctatttgagaaaatccagagccgatcgagaagccgaagcg

SEQ ID NO: 17069 - DNA, 260 bp, Unknown
  Description of Unknown: LeftRegion for integrase B4070 sequence
ttagatagtggcattattacgcaagaagaatttgaacagaaaaaaatagaacttttataaaaaaaaaagaaccggctctcgctaccaacgggaaccggttttgaaaaaaataagacaattccagagaaaaatcttacctgcacattaagtatatcatctccgggattgccgtacaagtgtaaaaaaaggagaatgataaaatgaacgaatcagtatgtatctatttaagaaaatccagggccgatcgagaagctgaagca

SEQ ID NO: 17070 - DNA, 260 bp, Unknown; identical to SEQ ID NO: 17062
  Description of Unknown: LeftRegion for integrase B4071 sequence

SEQ ID NO: 17071 - DNA, 260 bp, Unknown
  Description of Unknown: LeftRegion for integrase B4072 sequence
tggaagatgaattagtggaaagttttcccggattacgggctctgattaagaattgtaaataaaaaaatcgcccggtgctgcgaacaccaggcgacctgttcttccttgcggaagctgtaaaccctacgaataaattttacagcgtttccgataaatccgcaagggtttattttttatactcttttttgggaggtgggacgatgaggttcttttcctacggacgaaaatccgtattttctgataaatcagattcaatcgat

SEQ ID NO: 17072 - DNA, 260 bp, Unknown
  Description of Unknown: LeftRegion for integrase B4073 sequence
tattttgtgccatatgattctagataaataaaaaccgccccactgtaaagcaaggcggcaatgctcccgatgatacggtagccctaagcaagcatattgtatcattcggagcagccaaacgcaagcggaacacccgttccccgctggctgttatttttatactcttttttacatacattttcacaaaggagtgataccttatgccaaacaccgaatcattcactgtaaatgaaatcttagtctatctccgcaagtcccgg

SEQ ID NO: 17073 - DNA, 260 bp, Unknown
  Description of Unknown: LeftRegion for integrase B4074 sequence
ataaataaaagcccctgtgctaccaacacaagagcttttaccacgatacttacataagctgtgcttatgatataataccgccctagacaagccatattatatcattcatagcaccgcttttgcaagtggtgttatttttgtacccatttttgagttgcaccggtgcaacttgcatatattttacagaaaggatgattaatatggtatcttttgacagtattattatctatcttagaaagtcacgttctgatgatccggcg

SEQ ID NO: 17074 - DNA, 260 bp, Unknown; identical to SEQ ID NO: 13549
  Description of Unknown: LeftRegion for integrase B4075 sequence

SEQ ID NO: 17075 - DNA, 260 bp, Unknown
  Description of Unknown: LeftRegion for integrase B4076 sequence
gtggagactctccccggattgcgtgcgttaattaagaaatgtaaataaaaaaatcgcccagtgctgcgaacaccaggcgacctgttcttccttgcggaagctgcataatttgacgtaaatcatcaaatcttattttacagccgtttccgtaaatccgcaagggtttattttttatactcttttttttgggaggtgggacgatgaggttcttttcctacggacgaaaatccgtattttctgataaatcagattcaatcgat

SEQ ID NO: 17076 - DNA, 260 bp, Unknown
  Description of Unknown: LeftRegion for integrase B4077 sequence
tggaggatgaattcgtggagactctccccggattgcgtgcgttaattaagaaatgtaaataaaaaaatcgcccagtgctgcgaacaccaggcgacctgttcttccttgcggaagctgtaaactctacgaataaattttacagcgtttccgataaatccgcaagggtttattttttatactcttttttgggaggtgggacgatgaggttcttttcctacggacgaaaatccgtattttctgataaatcagattcaatcgat

SEQ ID NO: 17077 - DNA, 260 bp, Unknown
  Description of Unknown: LeftRegion for integrase B4078 sequence
aaccataaaaatacacatataaaaaccgccccagtgctaccaacaccagagcggcaaacacattgctccgaaaagcatatgccctaagcaagcatattgtatcattcggagcagccaaacgcaagcggaacacctgttctctgctggctgttatttttatactcttttttacatacattttcacaaaggagtgataccttatgccaaacaccgaatcattcactgtaaatgaagtcttagtctatctccgcaagtcccgg

SEQ ID NO: 17078 - DNA, 260 bp, Unknown
  Description of Unknown: LeftRegion for integrase B4079 sequence
acctgcgagataggaagcaaatctgtatctgacacagaaactgaataaaaaatcgcccggcgcttccaacgccagacgatctcgtaaatcttgcagacagccgttcagctggctacaattccctctcgacaagagaattatagcacagttcatggcgcctgcataggtgttatttttatacccttttttaggaggttcttatgaacatttgttgctatggcaggaagtcaatctattctgatcactcagattccatcgat

SEQ ID NO: 17079 - DNA, 260 bp, Unknown
  Description of Unknown: LeftRegion for integrase B4080 sequence
ggccagatcagcgccgacgcatatgtgaaggtctgcacgcctttggctaagatggcaaaataaaaaatcgcccagtgctgcgaacaccaggcgacctgttcttccttgcggaagctgtaaactctacgaataaattttacagcgtttccgataaatccgcaagggtttattttttatactcttttttggaggtggaaacgatgaggttcttttcctacggacgaaaatccgtattttctgataaatcagattcaatcgac

SEQ ID NO: 17080 - DNA, 260 bp, Unknown
  Description of Unknown: LeftRegion for integrase B4081 sequence
ttgtagggaggttttcgaaaaagcagaggaggaaagacaatccagagctagaaagcttggaagggtttgggaactaaagactaaagaattgcctgccgcacccatgagttttacgatgggccgacagacaaaagcgtttaatgatccttatgagcaggctgaatatgaatatagcttaatagaaagtgagacaaatgctaatgaacgtgagtaagaatataacaataattcctgcgcgcaggcgcgtaggcaatacagct

SEQ ID NO: 17081 - DNA, 260 bp, Unknown
  Description of Unknown: LeftRegion for integrase B4082 sequence
tgactgcgttgtctacgtcaacgggcaggacgcaacactcaagcgaataaagcggtatgaagatggttcgttaagcctctgccctttgaatacaagttattcaccctgcacattcacggcaaaacaggttcaagagttgcccgttaccatcggcggtgtggctgttgagctgcgccgcaagttccgtacgaggtgaaactgtgtaccaacttcccaatttgcaatcctcgcaggtgctgatatacctgcgcaaatccaga

SEQ ID NO: 17082 - DNA, 260 bp, Unknown
  Description of Unknown: LeftRegion for integrase B4083 sequence
tggccagatcagcgccgacgcatatgtgaaggtctgtacgcctttggctaagatggcaaaataaaaaatcgcccagtgctgcgaacaccaggcgacctgttcttccttgcggaagctgtaaactctacgaataaattttacagcgtttccgataaatccgcaaggatttattttttatactcttttttggaggtgggacgatgaggttcttttcctacggacgaaaatccgtattttctgataaatcagattcaatcgat

SEQ ID NO: 17083 - DNA, 260 bp, Unknown; identical to SEQ ID NO: 13018
  Description of Unknown: LeftRegion for integrase B4084 sequence

SEQ ID NO: 17084 - DNA, 260 bp, Unknown
  Description of Unknown: LeftRegion for integrase B4085 sequence
ggaggatgaattcgtggagactctccccggattgcgtgcgttaattaagaaatgtaaataaaaaaaatcgcccagtgctgcgaacaccaggcgacctgttcttccttgcggaagctgtaaactctacgaataaattttacagcgtttccgataaatccgcaagggtttattttttatactcttttttgggaggtgagacgatgaggttcttttcctacggacgaaaatccgtattttctgataaatcagattcaatcgat

SEQ ID NO: 17085 - DNA, 260 bp, Unknown
  Description of Unknown: LeftRegion for integrase B4086 sequence
atccgacagctttttgattttggcaaagatatccgaccattcgctcgtagtcatacggcatggctcctttctcaaatttactgtcggcagcaactgaattatatcaaatacgcacccgcttttcagggattcgtagaattataccgaaaatcggaaaaatattgcgaattttgaagaagataatcgtgaggtgatggttgatggcccgaaaaaagaatattgctgcgggtcagaatgccgtcatttatgcccgctattcc

SEQ ID NO: 17086 - DNA, 260 bp, Unknown
  Description of Unknown: LeftRegion for integrase B4087 sequence
gcacttaaataatgtgtcgtatcctttagtgttattcattttcttcattccaggtttcattatatcatataaagagcaagatgtaaatatacattttgtaaaatttttttcgtttctgtttgtgttttatgtagaaataagaaatattacagcacactacaaattcaccagtggaaaaactataaaaaggaggtatcacaatgcccgattatgctatatacctgcgtaaatcccgtaaggacaacgaagccgaacagcgt

SEQ ID NO: 17087 - DNA, 260 bp, Unknown
  Description of Unknown: LeftRegion for integrase B4088 sequence
ggaagatgaattagtggaaagttttcccggattacgggctctgattaagaattgtaaataaaaaaaatcgcccggtgctgcgaacaccaggcgacctgttcttccttgcggaagctgtaaactctacgaataaattttacagcgtttccgataaatccgcaagggtttattttttatactcttttttgggaggtgggacgatgaggttcttttcctacggacgaaaatccgtattttctgataaatcagattcaatcgat

SEQ ID NO: 17088 - DNA, 260 bp, Unknown
  Description of Unknown: LeftRegion for integrase B4089 sequence
gacaggtaaaagaatctctcgattctgcatcattagaataataaaaaccgcccctgcttaacagagacggctttaagaatctttgcagttgtgattgctcaattctttcctggacagttagaattatagcatgtttcttcacacctgtataggtgtattttttatactcatttttcataaaatataacggaggtttacctatgaatgaaaatgtatgtatctatttaagaaagtctcgtgctgatcaggaagctgagctt

SEQ ID NO: 17089 - DNA, 260 bp, Unknown
  Description of Unknown: LeftRegion for integrase B4090 sequence
aagaaggcagagcttttataaaatataaaaaccgccccggtgctggtaacactggagcggtgggaatctccgaagagatacctatctttagcaggaatattgtatcaccttcggagcagccatgcaagcggaacctttgtttgcgctggctgttatttttgtaccccaatttccataattatatacgaggtgatacaactatgagcaattatcttgaaaacaactgtatctatctaagaaagtcccgcgctgatcgggaa

SEQ ID NO: 17090 - DNA, 260 bp, Unknown; identical to SEQ ID NO: 15610
  Description of Unknown: LeftRegion for integrase B4091 sequence

SEQ ID NO: 17091 - DNA, 260 bp, Unknown
  Description of Unknown: LeftRegion for integrase B4092 sequence
cggatgcatatgtgaaagtctgcagcgcgcttgcgaaattgaagaaataaaaaaccgcccggtgctaccaacaccaggcgacttgctcttccttgcggaagctgtaaatataagatatgttttgcataaatattttacagccgttttcgtaaatccgcaagggtttattttttatactcttttttagggaggtgaggacgatgaggttcttttcatacggacgaaaatccgtattttctgataaatcagattctatcgat

SEQ ID NO: 17092 - DNA, 260 bp, Unknown
  Description of Unknown: LeftRegion for integrase B4093 sequence
acactacaatagaatattttctaacaggaaaacgccctatatctaatctgactgatatggaaaatcttctattagaagcatacagatcagcagatgtaaaaggacaagctacaatcatccaagtctgcatgaatgaaaaggatgcaaaaagggaaactatcattgcaggataataagcattgaagaatggaggaagaaccatgtacgaagagattaagactgcttgtctatatctgcgatattcaagcagcaaccaaact

SEQ ID NO: 17093 - DNA, 260 bp, Unknown
  Description of Unknown: LeftRegion for integrase B4094 sequence
aaaataaaagctcctgtgctggtaacacaagagcttttacacgatacttacatcaagcaatgctacaatgatataataccgccctaatcaagccatattatatcacctgaagcaccgcttatgcaagtggtgttatttttgtacccatttttgagttgcaccggtgcaacttgcatatattttacaggaggatgattaatatggtatcttttgacaatattattatatatcttagaaagtcacgctctgatgatcctgtg

SEQ ID NO: 17094 - DNA, 260 bp, Unknown
  Description of Unknown: LeftRegion for integrase B4095 sequence
tattgacagcgagaccttttccaaagtcgcagaagagcggaatcgccgtgccggagcattaggcagaacccgggagcggacaacaccgccgccttgcgaagcagagaccgcctttattataggaaaggtcacacacagatacgatgacccattcaagcaggccgcatacatttacagtctgatagaaagtgaggtacggaatggctgagaaaacgatcaccgtaattccggcgagaaaacgagtcggcagcagaaagcag

SEQ ID NO: 17095 - DNA, 260 bp, Unknown; identical to SEQ ID NO: 17027
  Description of Unknown: LeftRegion for integrase B4096 sequence

SEQ ID NO: 17096 - DNA, 260 bp, Unknown
  Description of Unknown: LeftRegion for integrase B4097 sequence
tcgtggagactctccccggattgcgtgcgttaattaagaaatgtaaataaaaaaatcgcccagtgctgcgaacaccaggcgacctgttcttccttgcggaagctgcataatttgacgtaaatcatcaactcttattttacagccgtttccgtaaatccgcaagggtttattttttatactctttttttggaggtaggacgatgaggttcttttcctacggacgaaaatccgtattttctgataaatcagattcaatcgat

SEQ ID NO: 17097 - DNA, 260 bp, Unknown
  Description of Unknown: LeftRegion for integrase B4098 sequence
tgcgtattgattgggcttgcaatcactgttttaggcgcagcaatcgttggtgtcccgattgctatattgggcgctttgcttgccataggttcaaagggaaggaaatagaaaaccctgcgcggcttcttggcggtcggcgcgcagggcaagtgcaaagaacgaagcgcaattgcgcgctcgctctaaggggtgattttagcatggtgaagaaccgagctgccatatacgcgcggttcagctcgcacaaccaacgctcagaa

SEQ ID NO: 17098 - DNA, 260 bp, Unknown
  Description of Unknown: LeftRegion for integrase B4099 sequence
gccagatcagcgctgatgcatacgtgaaagtctgcgggcctctggcaaagatggccaaataaaaaaaccgccgggtgctggtaacacctgacggtccattccttccttgcggaagctgtaaactctacgaataaattttacagcgtttccgtaaatccgcaagggtttattttttatactcttttttgggaggtgagacgatgaggttcttttcctacggacgaaaatccgtattttctgataaatcagattcaatcgat

SEQ ID NO: 17099 - DNA, 260 bp, Unknown
  Description of Unknown: LeftRegion for integrase B4100 sequence
aaaactggaaaaataactaaaatccaataataaaagaaaaccgcccagctaccaaccggacggaatctcagaaacctatcaaccatggatggctgatataagttctgccttaacaacagaattatatcatacatcctataaatttacaaattgataagggtgtattttttgtacccttttttagaaaggaatgatgatatatgaacataggaaatcagttaggaaaactaaaaaaatcagatcaattctgcatttactta

SEQ ID NO: 17100 - DNA, 260 bp, Unknown
  Description of Unknown: LeftRegion for integrase B4101 sequence
tggaagatgaattcgtggagactctccccggattgcgtgcgttaattaagaaatgtaaataaaaaaatcgcccagtgctgcgaacaccaggcgacctgttcttccttgcggaagctgtaaactctacgaataaattttacagcgtttccgataaatccgcaagggtttattttttatactcttttttgggaggtgggacgatgaggttcttttcctacggacgaaaatccgtattttctgataaatcagattcaatcgat

SEQ ID NO: 17101 - DNA, 260 bp, Unknown
  Description of Unknown: LeftRegion for integrase B4102 sequence
acagaaatgcttatcgaatcgtaagagattatctaaataaataaaaaaaccgcccggtgctggtaacaccgaacggcttcttcgcttcccttgcgggatgcggttgcttaaccttcgcaggattaagtataccgcattttccacgagtccacaagggcttattttttatactctttttttaaattttaggaggtggaacaatgaggttttttagctatgggcgaaaatccatattttctgacaagtctgattcgatcgac

SEQ ID NO: 17102 - DNA, 260 bp, Unknown
  Description of Unknown: LeftRegion for integrase B4103 sequence
tattttgtgccatatgattctagataaataaaaaccgccccactgtaaagcaaggcggcaatgctcccgatgatacggtagccctaagcaagcatattgtatcattcggagcagccaaacgcaagcggaacacccgttctctgctggctgttatttttatactcttttttacatacattttcacaaaggagtgataccttatgccaaacaccgaatcattcactgtaaatgaaatcttagtctatctccgcaagtcccgg

SEQ ID NO: 17103 - DNA, 260 bp, Unknown
  Description of Unknown: LeftRegion for integrase B4104 sequence
cgtggagactctccccggattgcgtgcgttaattaagaaatgcaaataaaaaaatcgcccagtgctgcgaacaccaggcgacctgttcttccttgcggaagctgcataatttgacgtaaatcatcaaatcttattttacagccgtttccgtaaatccgcaagggtttattttttatactctttttttgggaggtgggacgatgaggttcttttcctacggacgaaaatccgtattttctgataaatcagattcaatcgat

SEQ ID NO: 17104 - DNA, 260 bp, Unknown
  Description of Unknown: LeftRegion for integrase B4105 sequence
aataccgaagagcagtatatcattgatacctaccgtatgtgtaccagctatgaggctcaccgcagtctgctcaatgtttgtgagcagcttcggtcggagaacgcccttgggaacaagacaactgcataattctggccgaatggtataagtatcacaaataaaaaaaaggcccaccttacggtgagccaagaggttctattatgaaagcctgtctttatctccgatattccagcagctctcaaacggagcaatccattgag

SEQ ID NO: 17105 - DNA, 260 bp, Unknown
  Description of Unknown: LeftRegion for integrase B4106 sequence
ggatgatgaattcgtggaaaacttccccggattacgggctctgattaagaattgtaaataaaaaaaatcgcccagtgctgcgaacaccaggcgacctgttcttccttgcggaagctgtaaactctacgaataaattttacagcgtttccgataaatccgcaagggtttattttttatactcttttttgggaggtgagacgatgaggttcttttcctacggacgaaaatccgtattttctgataaatcagattcaatcgat

SEQ ID NO: 17106 - DNA, 260 bp, Unknown; identical to SEQ ID NO: 15077
  Description of Unknown: LeftRegion for integrase B4107 sequence

SEQ ID NO: 17107 - DNA, 260 bp, Unknown
  Description of Unknown: LeftRegion for integrase B4108 sequence
cattgaaactggagaagtggaagatctgaacgcagaggaaactgaataaaaaatcgcccggcgcttccaacgccagacgatctcataaatcttgcaggcagccgttcagctggctacaattccctctagacaagagaattatagcacagttcatggcacctgcataggtgttatttttataccctttttaggaggttcttatgaacatttgttgctatggtaggaagtcgatctattctgatcactcagattctatcgac

SEQ ID NO: 17108 - DNA, 260 bp, Unknown
  Description of Unknown: LeftRegion for integrase B4109 sequence
ggccagatcagcgccgacgcatatgtgaaggtctgcacgcctttggctaagatggcaaaataaaaaatcgcccggtgctgcgaacacctggcgacctgttcttccttgcggaagctgtaaactctacgaataaattttacagcgtttccgataaatccgcaagggtttattttttatactcttttttgggaggtgggacgatgaggttcttttcctacggacgaaaatccgtattttccgataaatcagattcaatcgat

SEQ ID NO: 17109 - DNA, 260 bp, Unknown
  Description of Unknown: LeftRegion for integrase B4110 sequence
ataaataaaagcccctgtgctatcaacacaagagcttttaccacgatacttacataagctgtgcttatgatataataccgccctagacaagccatattatatcattcatagcaccgcttttgcaagtggtgttatttttgtacccatttttgagttgcaccggtgcaacttgcatatattttacagaaaggatgattaatatggtatcttttgacagcattattatctatcttagaaagtcacgttctgatgatccggcg

SEQ ID NO: 17110 - DNA, 260 bp, Unknown
  Description of Unknown: LeftRegion for integrase B4111 sequence
tacgacaatatttttttgccgtaagtctcttattgtttatgccgcttgactgccacgcctttttctgatttttcgtggttgtcgaaagacaaatcaaagcaaaaaattgctaacagagcaaaaaataatttcaaaccggtaaaaaagtgtccggtttgaaggttaaaatgtgctcaaaagctaatacaaggaggcttccaatgaagacagcggtcatctacgcccgttattcgagcgacagacaaacagaacaatctatc

SEQ ID NO: 17111 - DNA, 260 bp, Unknown
  Description of Unknown: LeftRegion for integrase B4112 sequence
ggccagatcagcgccgacgcatatgtgaaggtctgcacgcctttggctaagatggcaaaataaaaaatcgcccagtgctgcgaacaccaggcgacctgttcttccttgcggaagctgtaaactctacgaataaattttacagcgtttccgatgaatccgcaagggtttattttttatactcttttttggaggtgggaacgatgaggttcttttcctacggacgaaaatccgtattttctgataaatcagattcaatcgat

SEQ ID NO: 17112 - DNA, 260 bp, Unknown
  Description of Unknown: LeftRegion for integrase B4113 sequence
ataaataaaagcccctgtgctaccaacacaagagcttttaccacgatacttacataagctgtgcttatgatataataccgccctagacaagccatattatatcattcatagcaccgcttttgcaagtggtgttatttttgtacccatttttgagttacataacctaaactcacatatactttacagaaaggatgattaatatggtatcttttgacagcattattatctatcttagaaagtcccgatctgatgatcctgcg

SEQ ID NO: 17113 - DNA, 260 bp, Unknown
  Description of Unknown: LeftRegion for integrase B4114 sequence
cgtggagactctccccggattgcgtgcgttaattaagaaatgtaaataaaaaaatcgcccagtgctgcgaacaccaggcgacctgttcttccttgcggaagctgcataatttgacgtaaatcatcaaatcttattttacagccgtttccgtaaatccgcaagggtttattttttatactctttttttgggaggtgagacgatgaggttcttttcctacggacgaaaatccgtattttctgataaatcagattcaatcgat

SEQ ID NO: 17114 - DNA, 260 bp, Unknown
  Description of Unknown: LeftRegion for integrase B4115 sequence
gtcagatcagcgcggatgcatatgtgaaagtctgcagcgcgcttgcgaaattgaagaaataaaaaaccgcccagtgctgcgaacaccaggcgacctgttcttccttgcggaagctgtaaactctacgaataaattttacagcgtttccgataaatccgcaagggtttattttttatactctttttttgggaggtgagacgatgaggttcttttcctacggacgaaaatccgtattttctgataaatcagattctatcgac

SEQ ID NO: 17115 - DNA, 260 bp, Unknown
  Description of Unknown: LeftRegion for integrase B4116 sequence
ttgcgacattcaagaaaattgttgcagacattcttgcaggcaataatacgcttgtaacagattttgtatcacaaagaacgatgaaaaaatatgacaatgttccaagtgaggaagaacttgacagagagataacaaaacttggtgtataaaaacttccccgccgtaacaagcggggaaaactataaaaaggaggtatcacaatgcctgattacgctatatacctgcgtaaatcccgtaaggacaacgaagccgaacagcgt

SEQ ID NO: 17116 - DNA, 260 bp, Unknown
  Description of Unknown: LeftRegion for integrase B4117 sequence
ctggatgatgaattcgtggaaaacttccccggattacgggctctgattaagaattgtaaataaaaaaatcgcccagtgctgcgaacaccaggcgacctgttcttccttgcggaagctgtaaactctacgaataaattttacagcgtttccgataaatccgcaagggtttattttttatactcttttttggaggtgagacgatgaggttcttttcttacggacgaaaatccgtattttctgataaatcagattcaatcgat

SEQ ID NO: 17117 - DNA, 260 bp, Unknown
  Description of Unknown: LeftRegion for integrase B4118 sequence
cggagtcggaacaaacataaatgtgtccacactagcggtatccaagaagattggctgaaaaaaacagcggcagcccttcttggcgaatctacatttgatgagcaaaaatttcgggaacaggtggaatggattgaggttcagaagaatcggaccctgctgttccggttttattctagagaaaataaagaggtgcaattgccatgaaaaaagtgcaggttataccagctacactacagaattacacagaaaagcctattcat

SEQ ID NO: 17118 - DNA, 260 bp, Unknown
  Description of Unknown: LeftRegion for integrase B4119 sequence
ctggtgataccgacaaggacagctactatatttccagagttgaggacccggatgacccggacctgagaatagaaattgaatattctaagctggcaaatatcatccaccaggtgcttgaggatgccgatgctaagagagaggaatatatccaaaagcgcctggacgctgagttttcattgtgaaagtgagatgagccctacatgatacccgctgttatctatgcacggtttagcagccactctcaaacggagcagtctatt

SEQ ID NO: 17119 - DNA, 260 bp, Unknown
  Description of Unknown: LeftRegion for integrase B4120 sequence
ccgcaatctttaatataaaagtcaattaaatataaaaaccgccccagtacgccaataccgggacggtggtggatctccgaagagatatccaatttttaccaaagatattgtatcatcttcggagcggctacacaatcagaacgtttgtgtggtcgttatttttgtacctattttttcatattttaaaccgaggtgatattatggaacttttaaatgtatgtatctacctacgtaagtcccgtgctgatcgggaagctgaa

SEQ ID NO: 17120 - DNA, 260 bp, Unknown
  Description of Unknown: LeftRegion for integrase B4121 sequence
ttccagaaaatgttttttatgatataatttctgaaaattaataaaaaccgcccctgcttaacagagacggctttaagaatctttgcagttgtgaatgctcaattctttcctggacagttagaattatagcatgtttcttcacacctgtataggtgtattttttatacccatttttcataaaatataacggaggtttacctatgaatgaaaatgtatgtatctatttaagaaagtctcgtgctgatcaggaagctgagctt

SEQ ID NO: 17121 - DNA, 260 bp, Unknown
  Description of Unknown: LeftRegion for integrase B4122 sequence
ggccagatcagcgccgacgcatatgtgaaggtctgcacgcctttggctaagatggcaaaataaaaaatcgcccagtgctgcgaacaccaggcgacctgttcttccttgcggaagctgtaaactctacgaataaattttacagcgtttccgataaatccgcaagggtttattttttatactcttttttggaggtgggaacgatgaggttcttttcctacggacgaaaatccgtattttctgataaatcagattcaatcgac

SEQ ID NO: 17122 - DNA, 260 bp, Unknown
  Description of Unknown: LeftRegion for integrase B4123 sequence
taggtagagtaacattaaccgatgaagaattcgaaaaaataatcgagtatggaaaatttctgctatacatgagagaagaagataaatgatgtagtgctaagatttcttacatagtaaagtaggtggcattaaaggaggtgagtacaatgtagtcgcctaattaattcgcgcatataactataacgacaggaggagaaaacatgacagtatttgaaatgaacgacgcaattgataacgcgttcagtggaaaaatggacaaa

SEQ ID NO: 17123 - DNA, 260 bp, Unknown
  Description of Unknown: LeftRegion for integrase B4124 sequence
gccagatcagcgccgacgcatatgtgaaggtctgcacgcctttggctaagatggcaaaataaaaaatcgcccagtgctgcgaacaccaggcgacctgttcttccttgcggaagctgtaaactctacgaataaattttacagcgtttccgataaatccgcaagggtttattttttatactctttttttgggaggtgagacgatgaggttcttttcctacggacgaaaatccgtattttctgataaatcagattcaatcgat

SEQ ID NO: 17124 - DNA, 260 bp, Unknown
  Description of Unknown: LeftRegion for integrase B4125 sequence
tggaggatgaattcgtggagactctccccggattgcgtgcgttaattaagaaatgtaaataaaaaaatcgcccagtgctgcgaacaccaggcgacctgttcttccttgcggaagctgtaaactctacgaataaattttacagcgtttccgataaatccgcaagggtttattttttatactctttttttggaggtggggcgatgaggttcttttcctacggacgaaaatccgtattttctgataaatcagattcaatcgat

SEQ ID NO: 17125 - DNA, 260 bp, Unknown
  Description of Unknown: LeftRegion for integrase B4126 sequence
gcaacaatcctcgaccacatggtcacgttccatttcagggacggccacatcgaatccagagacttcttggataagcggcacggcaccccttggaccgaggaacggcgggaaaaagcaagagaatccatgaaggctgcttggacagacgagcgcagggaggcaatgagtgaaagaatcaagaaaataaggagcgaaaagaaatggccaaatccgtaaccacgataccggcgacgctgtcacgcttcacggcggcaccgatc

SEQ ID NO: 17126 - DNA, 260 bp, Unknown; identical to SEQ ID NO: 17088
  Description of Unknown: LeftRegion for integrase B4127 sequence

SEQ ID NO: 17127 - DNA, 260 bp, Unknown
  Description of Unknown: LeftRegion for integrase B4128 sequence
ggaggatgaattcgtggagactctccccggattgcgtgcgttaattaagaaatgtaaataaaaaaatcgcccagtgctgcgaacaccaggcgacctgttcttccttgcggaagctgtaaactctacgaataaattttacagcgtttccgataaatccgcaagggtttattttttatactcttttttggggaggtgagacgatgaggttcttttcctacggacgaaaatccgtattttctgataaatcagattcaatcgat

SEQ ID NO: 17128 - DNA, 260 bp, Unknown; identical to SEQ ID NO: 17052
  Description of Unknown: LeftRegion for integrase B4129 sequence

SEQ ID NO: 17129 - DNA, 260 bp, Unknown
  Description of Unknown: LeftRegion for integrase B4130 sequence
gccagatcagtgctgatgcatacgtgaaagtctgcgggcctctggcaaaaatggcaaaataaaaaaccgccgggtgctggtaacacctgacggtccattccttccttgcggaagctgtaaactctacgaataaattttacagcgtttccgataaatccgcaagggtttattttttatactcttttttgggaggtgagacgatgaggttcttttcctacggacgaaaatccgtattttctgataaatcagattcaatcgat

SEQ ID NO: 17130 - DNA, 260 bp, Unknown
  Description of Unknown: LeftRegion for integrase B4131 sequence
ggccagatcagcgccgacgcatatgtgaaggtctgcacgcctttggctaagatggcaaaataaaaaatcgcccagtgctgcgaacaccaggcgacctgttcttccttgcggaagctgtaaactctacgaataaattttacagcgtttccgataaatccgcaagggtttattttttatactcttttttgggaggtgagacgatgaggttcttttcctacggacgaaaatccgtattttctgataaatcagattcaatcgat

SEQ ID NO: 17131 - DNA, 260 bp, Unknown
  Description of Unknown: LeftRegion for integrase B4132 sequence
aaacgcgctccatagtaatatggggcgcgttttgctttataaagttcaacttgaacaaaataaaaaagcgcccccggcgctgcaacgccagggacgcttatgatagatcagcttgcccggaacggacaatatagaccctacaatctatataataccaccttcgggcaggctttgacaagtgtaccccggaggtattttttatgcgtgaatttaaacaggaagagctgctcccagcagtagcctactatcgctactcccca

SEQ ID NO: 17132 - DNA, 260 bp, Unknown
  Description of Unknown: LeftRegion for integrase B4133 sequence
tgacaataccgaaaatcagtaaataaaaaccgctccaccattaagcggagcggcaatgcaattgctctgaatgaacaatagccctaagcaagcatattgtatcatccggagcagccaaacgcaagcggaacaccagttctctgctggctgttatttttatacccttttttacatacattttcacaaaggagtgataccttatgccaaacaccgaatcattcactgtaaatgaagtcttagtctatctccgcaagtcccgg

SEQ ID NO: 17133 - DNA, 260 bp, Unknown
  Description of Unknown: LeftRegion for integrase B4134 sequence
cgagttagccgcggctgatgaggtgcaagacctcctggctcgcgctcgggatgtttttgttagccctgatgtctcccaggagacgaaggacgctctctacaaagagattgcgatgttatatcttaaattgaagtgagttatatctttttgaggattgacctctgtaaaatgttaattagaaagcaagggaatgttatatcatgaaaaagaaacaaagagtagtaatttatatccgttattcttcgcataaacaagcggag

SEQ ID NO: 17134 - DNA, 260 bp, Unknown
  Description of Unknown: LeftRegion for integrase B4135 sequence
tcgtggagactctccccggattgcgtgcgttaattaagaaatgtaaataaaaaaatcgcccagtgctgcgaacaccaggcgacctgttcttccttgcggaagctgcataatttgacgtaaatcatcaaatcttattttacagccgtttccgtaaatccgcaagggtttattttttatactctttttcgggaggtgagacgatgaggttcttttcctacggacgaaaatccgtattttctgataaatcagattcaatcgat

SEQ ID NO: 17135 - DNA, 260 bp, Unknown
  Description of Unknown: LeftRegion for integrase B4136 sequence
ccatgcaaacgatgttggaataaataaaaaccgccccactctaccaaagcaggacggtcacgctcccgtatgatacgaaagccctcaacaagcacattgtatcattcccggagcagctacgcaagcggaacacccgttccccgctggctgttatttttatactcttttttacatacattttcacaaaggagtgataccttatgccaaacaccgaatcattcactgtaaatgaagtcttagtctatctccgcaagtcccgg

SEQ ID NO: 17136 - DNA, 260 bp, Unknown
  Description of Unknown: LeftRegion for integrase B4137 sequence
gcggatgcatatgtgaaagtctgcagcgcgcttgcgaaattgaagaaataaaaagtcgcccagtgctaccaacaccagacgacttgctcttccttgcggaagctgtaaatataagaaatgttttgcataaatattttacagccgtttccgtaaatccgcaagggtttattttttatactcttttttgggaggtgaggacgatgaggttcttttcatacggacgaaaatccgtattttctgataaatcagattctatcgat

SEQ ID NO: 17137 - DNA, 260 bp, Unknown
  Description of Unknown: LeftRegion for integrase B4138 sequence
ggatgcatatgtgaaagtctgcagcgcgcttgcgaaattgaagaaataaaaaaccgcccggtgctaccaacaccaggcgacttgctcttccttgcggaagctgtaaatataagatatgttttgcataaatattttacagccgtttccgtaaatccgcaagggtttattttttatactcttttttttgggaggttaggacaatgaggttcttttcatacggacgaaaatccgtattttctgataaatcagattctatcgat

SEQ ID NO: 17138 - DNA, 260 bp, Unknown
  Description of Unknown: LeftRegion for integrase B4139 sequence
cttacaacgtccgcaattcagcgcaaatgtaaatgcggaagcaactgtgcgtatgcagttcttcaaagcctacaggtctacggaatgattcgagagattcggcaattcacatacgaatggacagaaaaagccctcctgctgggcgcagaagggcgtaacgggtaacagatatgtcgatagatattaaatggcaagtgccaatggcaaagccggaagtcagcgaactggccgtcgtatatgcccggtattcaagccacagt

SEQ ID NO: 17139 - DNA, 260 bp, Unknown; identical to SEQ ID NO: 17036
  Description of Unknown: LeftRegion for integrase B4140 sequence

SEQ ID NO: 17140 - DNA, 260 bp, Unknown; identical to SEQ ID NO: 13224
  Description of Unknown: LeftRegion for integrase B4141 sequence

SEQ ID NO: 17141 - DNA, 260 bp, Unknown
  Description of Unknown: LeftRegion for integrase B4142 sequence
ataaataaaagcccctgtgctaccaacacaagagcttttactgcgacttacaattaagctgtgctcaaatgatataatcgccctagacaagccatattatatcattcatagcaccgcttttgcaagtggtgttatttttgtacccatttttgagttgcaccggtgcaacttgcatatattttacagaaaggatgattaatatggtatcttttgacagcattattatctatcttagaaagtcccgatctgatgatcctgcg

SEQ ID NO: 17142 - DNA, 260 bp, Unknown; identical to SEQ ID NO: 15631
  Description of Unknown: LeftRegion for integrase B4143 sequence

SEQ ID NO: 17143 - DNA, 260 bp, Unknown; identical to SEQ ID NO: 17105
  Description of Unknown: LeftRegion for integrase B4144 sequence

SEQ ID NO: 17144 - DNA, 260 bp, Unknown; identical to SEQ ID NO: 17088
  Description of Unknown: LeftRegion for integrase B4145 sequence

SEQ ID NO: 17145 - DNA, 260 bp, Unknown
  Description of Unknown: LeftRegion for integrase B4146 sequence
aagagcttttagatagcggtattattactcaagaagaatttgaccagaaaaaatcagaacttttataaaaagaaccggctcctgctaccaacgggaaccggttttttgaaaaataagacaatctcggtgataatcttacctacacattaagtatatcatctccgtgattgccgcacaagtgtaaaaaggagaatgataaaatgaatgaatcagtatgcatctatttgagaaaatccagagccgatcgggaagctgaagca

SEQ ID NO: 17146 - DNA, 260 bp, Unknown
  Description of Unknown: LeftRegion for integrase B4147 sequence
tcgtggagactctccccggattgcgtgcgttaattaagaaatgcaaataaaaaaatcgcccagtgctgcgaacaccaggcgacctgttcttccttgcggaagctgcataatttgacgtaaatcatcaaatcttattttacagccgtttccgtaaatccgcaagggtttattttttatactcttttttgggaggtgggacgatgaggttcttttcctacggacgaaaatccgtattttctgataaatcagattcaatcgat

SEQ ID NO: 17147 - DNA, 260 bp, Unknown
  Description of Unknown: LeftRegion for integrase B4148 sequence
cgtggagactctccccggattgcgtgcgttaattaagaaatgtaaataaaaaaatcgcccagtgctgcgaacaccaggcgacctgttcttccttgcggaagctgcataatttgacgtaaatcatcaactcttattttacagccgtttccgtaaatccgcaagggtttattttttatactcttttttttggaggtgggacgatgaggttcttttcctacggacgaaaatccgtattttctgataaatcagattcaatcgat

SEQ ID NO: 17148 - DNA, 260 bp, Unknown
  Description of Unknown: LeftRegion for integrase B4149 sequence
cgatcaggaaactttcgatgcggtagaagaaaagaggatggaacgagcaagatgtctggggcgtattcgtgaactaaaagaaccaccaaaaccggaatgctcgactcagttttatcgtccaaaggtaaaaaaaatatatgaagacccatttaaacaggctgaatatgcctatagtttgattgaaagggaggattttataaatgacaacagctaagaatgttatggttattcctgccagacgcaggctaggaaacaccgta

SEQ ID NO: 17149 - DNA, 260 bp, Unknown
  Description of Unknown: LeftRegion for integrase B4150 sequence
tatacagttcatttcctgcccgagagtcgctcggtcttagttcctatatgacagcatctcagctggagggacactctccctcgactcattactgctacttctttctcataatataacttgtatttttcgcgaatcattaaaggaggtgatgcctgaattcagctcatcgtagaatatacatcaaaggaaaggtggaaccaatgacaacgtttgatatgaacaacgctgtagaaatcgcaaaaatggacatatacgctatt

SEQ ID NO: 17150 - DNA, 260 bp, Unknown
  Description of Unknown: LeftRegion for integrase B4151 sequence
cgtggagactctccccggattgcgtgcgttaattaagaaatgcaaataaaaaaatcgcccagtgctgcgaacaccaggcgacctgttcttccttgcggaagctgcataatttgacgtaaatcatcaaatcttattctacagccgtttccgtaaatccgcaagggtttattttttatactctttttttgggaggtgggacgatgaggttcttttcctacggacgaaaatccgtattttctgataaatcagattcaatcgat

SEQ ID NO: 17151 - DNA, 260 bp, Unknown
  Description of Unknown: LeftRegion for integrase B4152 sequence
ttaaaactggagaagtggaagatctgaacgcagaggaaactgaataaaaaatcgcccggcgcttccaacgccagacgatctcttaaatcttgcagacagccgttcagctggctacaattccctctcgacaagagaattatagcacagttcatggcacctgcataggtgttatttttatacccttttttaggaggtttgctatgaatatctgttgctatggcaggaagtcgatctattctgatcactcagattctatcgac

SEQ ID NO: 17152 - DNA, 260 bp, Unknown
  Description of Unknown: LeftRegion for integrase B4153 sequence
aaagaacttttagatagtggtattatcactcaagaagaattcgatcagaaaaaaatagaacttttgtaaaaagaaccggctcctgctaccaacgggaaccggttttaataaataagacgatctcggtgataatcttacctacacattaagtatatcatctccgggattgacgtacaagtgtaaaaaaggagaatgataaaatgaatgaatcagtatgcatctatttgagaaaatccagagccgatcgagaagccgaagca

SEQ ID NO: 17153 - DNA, 260 bp, Unknown; identical to SEQ ID NO: 17120
  Description of Unknown: LeftRegion for integrase B4154 sequence

SEQ ID NO: 17154 - DNA, 260 bp, Unknown
  Description of Unknown: LeftRegion for integrase B4155 sequence
acgaaggggactaaggtgtggtcttgcagtcagccacgcacaaagtgccaactgaggagattgcccgaatccgagctgagggaagctgcggcatccttctttggcaatggctacgagggcaagatcgttcagaacgtcgagcggatcatcatatccgacgatgaagttgttttccatttgaaagaaggaggcgcataccgatggcaaagaccgtgcgggtaatccctgcaagccctaaaatctttcgttctgaggttacg

SEQ ID NO: 17155 - DNA, 260 bp, Unknown
  Description of Unknown: LeftRegion for integrase B4156 sequence
acaggtcttttgattgtgtgtagtgacccggcgcaaaagaaaattgatagagccgatgccttgaatattccaatcatttcagagcagcaatggtatgaactcatgccagaacttgaagccgttggaatgtggaacggaaagcaaattctgtttgcggacaatgatggcatctaccgtgttgaagtggacggtgaaagctgatggccagaaaaaagaatattgccgctggcctcgatgccgtcatctatgcccggtactca

SEQ ID NO: 17156 - DNA, 260 bp, Unknown
  Description of Unknown: LeftRegion for integrase B4157 sequence
aggcatataaaaaagatttggacagcttttctcttcaagacgtttccgaattatgcggtgtttttcgtgacgatgcgcatagaagcctttctgactgtttcgcaaccggcattgtgttcaaaaactgtgttgaagatatcactggcaggtaagccctccaggtgtacggttgtcagtttcgaatctgaacgggggacagtatgcgggcatttatttactgccgattttccagccataagcagcaggaacttagtatagag

SEQ ID NO: 17157 - DNA, 260 bp, Unknown
  Description of Unknown: LeftRegion for integrase B4158 sequence
ccagatcagcgctgatgcatacgtgaaagtctgcgggcctctggcaaagatggccaaataaaaaaaccgccgggtgctggtaacacctgacggtccattccttccttgcggaagctgtaaactctacgaataaattttacagcgtttccgataaatccgcaagggtttattttttatactcttttttgggaggtgggacgatgaggttcttttcctacggacggaaatccgtattttctgataaatcagattcaatcgat

SEQ ID NO: 17158 - DNA, 260 bp, Unknown
  Description of Unknown: LeftRegion for integrase B4159 sequence
tgttaagtatattatatgtcaaatacgtttatttgtcaaattacaaaaaccgcccctgcgccaacaggaacggctttctataaccccgaagagttacatcaacattcataattcattgtatcatctccggggcagccatgcaagcggaacattcgttcctgctggctgttatttttgtactcaaaaaggaggatgattgaatgttttttggaatttatggaagaaaatctgtctattctgataagtctgattccgtagat

SEQ ID NO: 17159 - DNA, 260 bp, Unknown
  Description of Unknown: LeftRegion for integrase B4160 sequence
agagcttttagatagcggtattattactcaagaagaatttgaccagaaaaaatcagaacttttataaaaaggaccggctcctgctaccaacgggaaccggtttttttgaaaaataagacaatctcggtgataatcttacctacacattaagtatatcatctccgtgattgccgcacaagtacaaaaaggagattgataacatgaatgaatcagtatgcatctatttaaggaaatccagagccgatcgggaagctgaagca

SEQ ID NO: 17160 - DNA, 260 bp, Unknown; identical to SEQ ID NO: 17120
  Description of Unknown: LeftRegion for integrase B4161 sequence

SEQ ID NO: 17161 - DNA, 260 bp, Unknown
  Description of Unknown: LeftRegion for integrase B4162 sequence
tcgtggagactctccccggattgcgtgcgttaattaagaaatgtaaataaaaaaatcgcccagtgctgcgaacaccaggcgacctgttcttccttgcggaagctgcataatttgacgtaaatcatcaaatcttattttacagccgtttccgtaaatccgcaagggtttattttttatactcttttttgggaggtgggacgatgaggttcttttcctacggacgaaaatccgtattttccgataaatcagattcaatcgat

SEQ ID NO: 17162 - DNA, 260 bp, Unknown
  Description of Unknown: LeftRegion for integrase B4163 sequence
gcggatgcatatgtgaaagtctgcagcgcgcttgcgaaattgaagaaataaaaaaccgcccggtgctaccaacaccaggcgacttgctcttccttgcggaagctgtaaatataagatatgttttgcataaatattttacagccgtttccgtaaatccgcaagggtttattttttatactcttttttgggaggtgaggacgatgaggttcttttcatacggacgaaaatccgtattttctgataaatcagattctatcgat

SEQ ID NO: 17163 - DNA, 260 bp, Unknown; identical to SEQ ID NO: 17039
  Description of Unknown: LeftRegion for integrase B4164 sequence

SEQ ID NO: 17164 - DNA, 260 bp, Unknown
  Description of Unknown: LeftRegion for integrase B4165 sequence
aataatagtgaatttacgtaatttgtaccaaattattatgctttatttatttttatattgtgctataatttaaaaaaccgactcctgcgaccaacaggaaccggtttaataaataagataatctcggagaaaatcttacctacaccataattataccatctcctggattatcacacaagttaaaaaaggagaataataaaatgaatgaatcggtatgtatctatctaaggaaatccagagctgatcgggaagctgaagca

SEQ ID NO: 17165 - DNA, 260 bp, Unknown
  Description of Unknown: LeftRegion for integrase B4166 sequence
ttaagtatattatatgtcaaatccgtttatttgtcaaattataaaaccgcccagtgttaccagcactgaacggctttctatagctccggagagctacatcaacattcataattcattgtatcatctccggggcagccatgcaagcggaacattcgttcctgctggctgttatttttgtactcaaaaaggaggatgattgaatgttttttggaatttatggaagaaaatctgtctattctgataagtctgattccgtagat

SEQ ID NO: 17166 - DNA, 260 bp, Unknown
  Description of Unknown: LeftRegion for integrase B4167 sequence
tgcacagatgtcggagaagtccttggatattcttttgatattacagaaatagaataaatattaaaaaaaagaaccggctctcgctaccaacgaggaccggttttttaaaaataagacaattccagagaaaaatcttacctacacattaagtatatcatctccgggattgccgtacaagtgtaaaaaaggagaatgataaaatgaacgaatcagtatgtatctatttgaggaaatccagatccgatcgggaagctgaagca

SEQ ID NO: 17167 - DNA, 260 bp, Unknown
  Description of Unknown: LeftRegion for integrase B4168 sequence
cagcatgaacatattttactatattttagcacaatgttgcttgcagaagaagatttcaaacaaaataaaaaacgcccacggtgttaccagcaccgcaggcgttccagatcagcttacccagagggcaataacagccaacctcacagatgttattgtaccacctccgggcaggcttgtcaaagtgtacccggaggtattttatgggcaaaaagcaaaaaatcactggcggtgacgccgtcatttacgcccgctactcgtcc

SEQ ID NO: 17168 - DNA, 260 bp, Unknown
  Description of Unknown: LeftRegion for integrase B4169 sequence
cgtggaaaacttccccggattacgggctctgattaagaattgtaaataaaaaaatcgcccagtgctgcgaacaccaggcgacctgttcttccttgcggaagctgcataatttgacgtaaatcatcaactcttattttacagccgtttccgtaaatccgcaagggtttattttttatactctttttttgggaggtgagacgatgaggttcttttcttacggacgaaaatccgtattttctgataaatcagattcaatcgat

SEQ ID NO: 17169 - DNA, 260 bp, Unknown
  Description of Unknown: LeftRegion for integrase B4170 sequence
gcggatgcatatgtgaaagtctgcagcgcgcttgcgaaattgaagaaataaaaaaccgcccggtgctaccaacaccaggcgacttgctcttccttgcggaagctgtaaaatataagatatgttttgcatatatattttacagccgtttccgtaaatccgcaagggtttattttttatactcttttttggaggtgaggacgatgaggttcttttcgtacggaagaaaatccgtattttctgataaatcagattcaatcgat

SEQ ID NO: 17170 - DNA, 260 bp, Unknown
  Description of Unknown: LeftRegion for integrase B4171 sequence
cgtggagactctccccggattgcgtgcgttaattaagaaatgtaaataaaaaaatcgcccagtgctgcgaacaccaggcgacctgttcttccttgcggaagctgcataatttgacgtaaatcatcaaatcttattttacagccgtttccgtaaatccgcaagggtttattttttatactctttttttgggaggtgagacgatgaggttcttttcctacggacgaaaatccgtattttctgataaatcagattcgatcgat

SEQ ID NO: 17171 - DNA, 260 bp, Unknown
  Description of Unknown: LeftRegion for integrase B4172 sequence
aggcatataaaaaagatttggacagcttttctcttcaagacgtttccgaattatgcggtgtttttcgtgacgatgcacatagaagcctttctgactgtttcgcaaccggcattgtgttcaaaaactgtgttgaagatatcactggcaggtaagccttccgggtgtacggttgacagtttcgaatctgaacgggggacagtatgcgggcatttatttactgccgattttccagccataagcagcaggaacttagtatagag

SEQ ID NO: 17172 - DNA, 260 bp, Unknown
  Description of Unknown: LeftRegion for integrase B4173 sequence
gcacttaaataatgtgacgtatcctttagtgttattcattttcttcattccaggtttcattatatcatataaagagcaagatgtaaatatacattttgtaaaatttttttcgtttctgtttgtgttttatgtagaaataagaaatattacagcacactacaaattcaccagtgggaaaactataaaaaggaggtatcacaatgcccgattatgctatatacctgcgtaaatcccgtaaggacaacgaagccgaacagcgt

SEQ ID NO: 17173 - DNA, 260 bp, Unknown
  Description of Unknown: LeftRegion for integrase B4174 sequence
ggaggatgaattcgtagagactctccccggattgcgtgcgttaattaagaattgtaaataaaaaaatcgcccagtgctgcgaacaccaggcgacctgttcttccttgcggaagctgtaaactctacgaataaattttacagcgtttccgataaatccgcaagggtttattttttatactctttttttgggaggtgggacgatgaggttcttttcctacggacgaaaatccgtattttctgataaatcagattcaatcgat

SEQ ID NO: 17174 - DNA, 260 bp, Unknown; identical to SEQ ID NO: 17040
  Description of Unknown: LeftRegion for integrase B4175 sequence

SEQ ID NO: 17175 - DNA, 260 bp, Unknown
  Description of Unknown: LeftRegion for integrase B4176 sequence
cgtggagactctccccggattgcgtgcgttaattaagaaatgtaaataaaaaaatcgcccagtgctgcgaacaccaggcgacctgttcttccttgcggaagctgcataatttgacgtaaatcatcaaatcttattttacagccgtttccgtaaatccgcaagggtttattttttatactcttttttttggaggtgggacgatgaggttcttttcctacggacgaaaatccgtattttctgataaatcagattcaatcgat

SEQ ID NO: 17176 - DNA, 260 bp, Unknown
  Description of Unknown: LeftRegion for integrase B4177 sequence
gttaagtatattatatgtcaaatccgtttatttgtcaaattgcaaaaaccgcccctgcgccaacaggaacggctttatataaccccgaagagttacatcaacattcataattcattgtatcatctccggggcagccatgcaagcggaacattcgttcctgctggctgttatttttgtacccaaaaaaggaggatgattgaatgttttttggaatttatggaagaaaatctgtctattctgataagtctgattccgtagat

SEQ ID NO: 17177 - DNA, 260 bp, Unknown
  Description of Unknown: LeftRegion for integrase B4178 sequence
tattttgtgccatatgattctagataaataaaaaccgccccactgtaaagcaaggcggcaatgctcccgatgatacggtagccctaagcaagcatattgtatcattcggagcagccaaacgcaagcggaacacctgttccccgctggctgttatttttatactcttttttacatacattttcacaaaggagtgataccttatgccaaacaccgaatcattcactgtaaatgaaatcttagtctatctccgcaagtcccgg

SEQ ID NO: 17178 - DNA, 260 bp, Unknown
  Description of Unknown: LeftRegion for integrase B4179 sequence
tcgtggagactctccccggattgcgtgcgttaattaagaaatgtaaataaaaaaatcgcccagtgctgcgaacaccaggcgacctgttcttccttgcggaagctgcataatttgacgtaaatcatcaaatcttattttacagccgtttccgtaaatccgcaagggtttattttttatactcttttttgggaggtgagacgatgaggttcttttcctacggacgaaaatccgtattttctgataaatcagattcaatcgat

SEQ ID NO: 17179 - DNA, 260 bp, Unknown
  Description of Unknown: LeftRegion for integrase B4180 sequence
aatctaaaaattatcagcttttaaaagaaaaatgtgctgattgcggaataatcttaaatgaagaataaaaaatcccatcgaagcggttgatgtacctgctccggtgggattttttcttgcttttcatgtgaatgtatggtacaataaataaaaaatccgccttgcattttttgcagggcggtacaattaaggagcgattcatgaaaagagcagtgttttatggtcgttattccagcgaccgacaaacagaacagagcatt

SEQ ID NO: 17180 - DNA, 260 bp, Unknown
  Description of Unknown: LeftRegion for integrase B4181 sequence
tatatggtatcgcacgcaaactttttgggaaaatcatcatggtataccgtagtgatacctcgcgtgcgcgagtgcgtgtgcgcgcgatcgtgcgcgcactgtctctgtacctgtatctgtatctgagactgtatctgtattctgtttctgattctgaatatctactactgcaaatctatcgttagaagggggtggcgctgttgccgagaaaacctgcaaagcacccggcgaagccgaagcggggcaagaagctggaaatc

SEQ ID NO: 17181 - DNA, 260 bp, Unknown; identical to SEQ ID NO: 17025
  Description of Unknown: LeftRegion for integrase B4182 sequence

SEQ ID NO: 17182 - DNA, 260 bp, Unknown
  Description of Unknown: LeftRegion for integrase B4183 sequence
ataaataaaagcccctgtgctaccaacacaagagcttttaccacgatacttacataagctgtgcttatgatataataccgccctagacaagccatattatatcattcatagcaccgcttttgcaagtggtgttatttttgtacccatttttgagttgcaccggtgcaacttgcatatattttacagaaaggatgattaatatggtatcatttgacagcattattatctatcttagaaagtcccgctctgatgatccggcg

SEQ ID NO: 17183 - DNA, 260 bp, Unknown
  Description of Unknown: LeftRegion for integrase B4184 sequence
tcgtggaaaacttccccggattacgggctctgattaaaaattgtaaataaaaaaatcgcccagtgctgcgaacaccaggcgacctgttcttccttgcggaagctgcataatttgacgtaaatcatcaaatcttattttacagccgtttccgtaaatccgcaagggtttattttttatactcttttttgggaggtgagacgatgaggttcttttcctacggacgaaaatccgtattttctgataaatcagattcaatcgat

SEQ ID NO: 17184 - DNA, 260 bp, Unknown
  Description of Unknown: LeftRegion for integrase B4185 sequence
ctggatcattgacatggttatgatctgttgcaacaaattcaccgacagcaccggcgcggtggttggcctgaaggttgctgagtataccagacagccggatcctgatcttgcagaggcttctctggaggagcagcgggaggcagcggccgagactgccagagcttacggctataccgtaatagagtcaggcactcaggataatgccgacaagtaaaaacacggctcgaaaatatgccgcaggaggtggctcggataattcc

SEQ ID NO: 17185 - DNA, 260 bp, Unknown
  Description of Unknown: LeftRegion for integrase B4186 sequence
ataaataaaagcccctgtgctaccaacacaagagcttttaccacgatacttacataagctgtgcttatgatataataccaccctagacaagccatattatatcattcatagcaccgcttttgcaagtggtgttatttttgtacccatttttgagttgcaccggtgcaacttgcatatattttacagaaaggatgattaatatggtatcttttgacagcattattatctatcttagaaagtcacgttctgatgatccggcg

SEQ ID NO: 17186 - DNA, 260 bp, Unknown; identical to SEQ ID NO: 17040
  Description of Unknown: LeftRegion for integrase B4187 sequence

SEQ ID NO: 17187 - DNA, 260 bp, Unknown
  Description of Unknown: LeftRegion for integrase B4188 sequence
ataaataaaagcccctgtgctatcaacacaagagcttttaccacgatacttacataagctgtgcttatgatataataccgccctagacaagccatattatatcattcatagcaccgcttttgcaagtggtgttatttttgtacccatttttgagttgcaccggtgcaacttgcatatattttacagaaaggatgattaatatggtatcttttgacagtattattatctatcttagaaagtcacgttctgatgatccggcg

SEQ ID NO: 17188 - DNA, 260 bp, Unknown
  Description of Unknown: LeftRegion for integrase B4189 sequence
aagacaggtcttttgattgtgtgtagtgacccggcgcaaaggaaaattgacagagccgatgccatgaatattccgattgtttcggagcagcaatggtttgagctcatgccagaacttgaagccgttggaatgtggaacggaaagcgaatcctgttttcagacgacggcatctaccgtgttgaagtgggcggtgaaagctgatggccagaaaaaagaatattgctgctggcctcgatgccgtcatctatgcccggtactca

SEQ ID NO: 17189 - DNA, 260 bp, Unknown
  Description of Unknown: LeftRegion for integrase B4190 sequence
tagataaacataatcgtggatatgtatacaaaccacgaaaaaataaaaatgttgagcaataagacaattttatctataaaaaacgcccctaccctgcgccaacaggataggggcaatgcctatagtatatacaggcaaaccaacacaataacattatacctgtatatcctataaatttcaatacttataggagaatttttatgagcattaaagcagtaagctattgcagatatagcacagacaaccaaacggaaaacagc

SEQ ID NO: 17190 - DNA, 260 bp, Unknown
  Description of Unknown: LeftRegion for integrase B4191 sequence
cagataacggatactcaagttcagataagtactcagcaatatttaacgtatcagtaaattaataaattaaaaaaagccggctcctgcgaccaacaggaaccggttttaataaataagataatccggagaaaaatcttacctacacactaagtatatcattttccggattatcgcacaagtaaaaaaaggagaatgataaaatgaatgaatcggtatgtatctatctaaggaaatccagagccgatcgggaagctgaagca

SEQ ID NO: 17191 - DNA, 260 bp, Unknown; identical to SEQ ID NO: 17067
  Description of Unknown: LeftRegion for integrase B4192 sequence

SEQ ID NO: 17192 - DNA, 260 bp, Unknown
  Description of Unknown: LeftRegion for integrase B4193 sequence
ttgcgacattcaagaaaattgttgcagacattcttgcaggcaataatacgcttgtaacggattttgtatcacaaagaacgatgaaaaaatatgacaatgtaccgagcgaggaagagcttgacagagagatagcaaaacttggtgtataaaaactaccccgccgtaacaagcggggaaaactataaaaaggaggtatcccaatgcctgattacgccatatatcttcgtaagtcacgtaaggacaacgacgccgaacagcgt

SEQ ID NO: 17193 - DNA, 260 bp, Unknown
  Description of Unknown: LeftRegion for integrase B4194 sequence
tggaggatgaattcgtggagactctccccggattgcgtgcgttaattaagaaatgtaaataaaaaaatcgcccagtgctgcgaacaccaggcgacctattcttccttgcggaagctgtaaactctacgaataaattttacagcgtttccgataaatccgcaagggtttattttttatactcttttttgggaggtgagacgatgaggttcttttcctacggacgaaaatccgtattttctgataaatcagattcaatcgat

SEQ ID NO: 17194 - DNA, 260 bp, Unknown
  Description of Unknown: LeftRegion for integrase B4195 sequence
tggatgatgaattcgtggaaaactttcccggattacgggctctgattaagaattgtaaataaaaaaatcgcccagtgctgcgaacaccaggcgacctgttcttccttgcggaagctgtaaactctacgaataaattttacagcgtttccgataaatccgcaagggtttattttttatactcttttttgggaggtgggacgatgaggttcttttcctatggacgaaaatccgtattttctgataaatcagattcaatcgat

SEQ ID NO: 17195 - DNA, 260 bp, Unknown; identical to SEQ ID NO: 17078
  Description of Unknown: LeftRegion for integrase B4196 sequence

SEQ ID NO: 17196 - DNA, 260 bp, Unknown
  Description of Unknown: LeftRegion for integrase B4197 sequence
acaatttgtaaatattttcataaaaaccgccctagtgttggcagcactaagacggtccatatacatccgaagatgcactacatagtaagaacatgtatattgtatcatcttcggacacccattgcaatccgaactgtagttcgtgattgggtgctatttttatattcatttttaatatatttaattaggaggatatcattgtgatagcaatttataccagacaatccctttttaagaaagattctctttccacttctcag

SEQ ID NO: 17197 - DNA, 260 bp, Unknown
  Description of Unknown: LeftRegion for integrase B4198 sequence
tggaggatgaattcgtggagactctccccggattgcgtgcgttaattaagaaatgtaaataaaaaaatcgcccagtgctgcgaacaccaggcgacctgttcttccttgcggaagctgtaaactctacgaataaattttacagcgtttccgataaatccgcaagggtttattttttatactcttttttgggaggtgagacgatgaggttcttttcctacggacgaaaatccgtattttctgataaatcagattcaatcgat

SEQ ID NO: 17198 - DNA, 260 bp, Unknown
  Description of Unknown: LeftRegion for integrase B4199 sequence
tgatcaggaactgttcgacaaagccgaggaagaaagacaatccagagccagtcagcttggcagggtcagagaactgaagggcaaagaaatgcctgccgttcccctgtgttttacaatgggtcgacagacaaaggttttctatgacccttacgagcaggctgaatacgcctatagtctgatagaaagtgagatgaattctaatggaaacagttaaaaacataacggtgattccggcacgtaggcgtgttggtaacactgca

SEQ ID NO: 17199 - DNA, 260 bp, Unknown
  Description of Unknown: LeftRegion for integrase B4200 sequence
atattgcagaattattaaaataaataaaaaccgccccactctaccaaagcaggacggtcacgctcccggatgatccaagaaccctcaacaagcacattgtatcattcccggagcagctacgcaagcggaacacccgttccccgctggctgttatttttatacccttttttacatacattttcacaaaggagtgataccttatgccaaacaccgaatcattcaccgtaaatgaagtcttagtctatctccgcaagtcccgt

SEQ ID NO: 17200 - DNA, 260 bp, Unknown; identical to SEQ ID NO: 17040
  Description of Unknown: LeftRegion for integrase B4201 sequence

SEQ ID NO: 17201 - DNA, 260 bp, Unknown
  Description of Unknown: LeftRegion for integrase B4202 sequence
acagaatctaccacaagatgtatatcagttcttattagaacacaatggaatatctcaaacagatatttataaggcatttgaacccattctgaaaaacgatatccaagaactattatatcgttgggataaatctgggacgataaaaagagaaaagagcggtaaaacctacaacgtatttatagcaaaataaaggagttcttatgtctgtaagaaatataataatatatttacgaaaatcaagatctgatgacccaggcatg

SEQ ID NO: 17202 - DNA, 260 bp, Unknown
  Description of Unknown: LeftRegion for integrase B4203 sequence
ataaataaaagcccctgtgctaccaacacaagagcttttaccacgatacttacataagctgtgcttatgatataataccgccctagacaagccatattatatcattcatagcaccgcttttgcaagtggtgttatttttgtacccatttttgagttgcaccggtgcaacttgcatatattttacagaaaggatgattaatatggtatcttttgacagtattattatctatcttagaaagtcccgctctgatgatccggcg

SEQ ID NO: 17203 - DNA, 260 bp, Unknown; identical to SEQ ID NO: 17028
  Description of Unknown: LeftRegion for integrase B4204 sequence

SEQ ID NO: 17204 - DNA, 260 bp, Unknown
  Description of Unknown: LeftRegion for integrase B4205 sequence
aacagaaatgcttatcgaatcgtaagagattatctaaataaataaaaaaaccgcccggtgctggtaacaccgaacggcttcttcgcttcccttgcgggatgcggttgcttaaccttcgcaggattaagtataccgcattttccacgagtccacaagggcttattttttatactcttttttaaattttaggaggtggaacaatgaggttttttagctatgggcgaaaatccatattttctgacaagtctgattcgatcgac

SEQ ID NO: 17205 - DNA, 260 bp, Unknown
  Description of Unknown: LeftRegion for integrase B4206 sequence
aaccataaaaatacacatataaaaaccgccccagtgctaccaacaccagagcggcaaacacattgctccgaaaagcatatgccctaagcaagcatattgtatcattcggagcagccaaacgcaagcggaacaccagttctctgctggctgttatttttatactcttttttacatacattttcacaaaggagtgataccttatgccaaacaccgaatcattcaccgtaaatgaagtcttagtctatctccgcaagtcccgg

SEQ ID NO: 17206 - DNA, 260 bp, Unknown
  Description of Unknown: LeftRegion for integrase B4207 sequence
ataaataaaagcccctgtgctaccaacacaagagcttttaccacgatacttacataagctgtgcttatgatataataccgccttcgacaagccatattatatcattcatagcaccgcttttgcaagtggtgttatttttgtacccatttttgagttgcaccggtgcaacttgcatatattttacagaaaggatgatcaatatggtatcatatgacagcattattatctatcttagaaagtcacgttctgatgatccggcg

SEQ ID NO: 17207 - DNA, 260 bp, Unknown
  Description of Unknown: LeftRegion for integrase B4208 sequence
tgcgcattagttgggcttgttatcgctgttttaggcgctgcaattgtcggcgttccaattgcgatattgggcgctttgcttgcctttgggtcaaagggaaggaaatagaaaaccctgcgcggcttctttgcggtcggcgcgcagggcaagtgcaaagaacgaagcgcaatagcgcactcgctctaaggggtgattttagcatggtgaagaaccgagctgccatatacgcgcggttcagctcgcacaaccaacgctcagaa

SEQ ID NO: 17208 - DNA, 260 bp, Unknown; identical to SEQ ID NO: 17028
  Description of Unknown: LeftRegion for integrase B4209 sequence

SEQ ID NO: 17209 - DNA, 260 bp, Unknown
  Description of Unknown: LeftRegion for integrase B4210 sequence
aagacgggtcttttgattgtgtgtagtgacccggcgcaaaagaaaatcgacagagcggatgccctgaatattccgatcgtttcggagcagcaatggtttgagatcatgccagaacttgaagccgttggaatgtggagcggaaagcgaatcctgttttcagacgacggcatctaccgtgttgaagtgggcggtgaaagctgatggccagaaaaaagaatattgctgctggcctcgatgccgtcatctatgcccggtactca

SEQ ID NO: 17210 - DNA, 260 bp, Unknown
  Description of Unknown: LeftRegion for integrase B4211 sequence
ctgtgacgattgcggatttagctttgactttacaacgcaaaaggatattgacgacaagtgtaaaacgctattaaacggtgaaattggctctattgtagttgcgatcattttggggatcgctttgtttgttataaacggatatctgcattgaaagcgaataaaagtgttatacgtcgatcaaacggttaggaggtggtattttgagctcaatagataaaacagccgtaatttacgcgcggtattcatcccatggtcagacc

SEQ ID NO: 17211 - DNA, 260 bp, Unknown
  Description of Unknown: LeftRegion for integrase B4212 sequence
tgagaacatcgagcatgtgaagcgatttgcgaaatgtgccccggaaacgcttcttagcatgcttgttctttcaggccgaatcgctgagttgaacgagattaggcaatagaaaagccctgcgcgacttcttggcggtcggcgcgcagggcaatggtcgaattgagcgctttagcgcgctcgcttcaaggagtgattctagcatggtaaagaacagagctgccatatatgcgcgctttagctcgcacaatcagcgctcagag

SEQ ID NO: 17212 - DNA, 260 bp, Unknown
  Description of Unknown: LeftRegion for integrase B4213 sequence
gcgtcaatcccagactgcgctctcccggcgtcgtttaaacactagattccggccacacgagccttgatgcctctcagaaggcggctcgcctcgttcatcagcgagccacgccccggcttagatagaaagcgccccgtcacgggacgaggccgtgacggggcgaacgtccgcaccttgggattgggagggaccaccacattatgccacgcaggaggaaggtcgcggccaaggacaggggccgctgcgtcatatacgcgcgc

SEQ ID NO: 17213 - DNA, 260 bp, Unknown
  Description of Unknown: LeftRegion for integrase B4214 sequence
aaaacaggcggcttatcgcttagcttcaaagctgtgaactggtgttattcggttttagttatgttgggaagtggcgaaaaacggcgacataaagtgctgttttcagagagaaaccccgcgcgggaacttggcggaacgcgcgcggggctggtcaagaagcagagcgctttaccgcgctcgctctaaggggtgattttagcatggtgaagaaccgagcagccatatatgcgcgcttcagctcgcacaatcagcgctcagag

SEQ ID NO: 17214 - DNA, 260 bp, Unknown; identical to SEQ ID NO: 13188
  Description of Unknown: LeftRegion for integrase B4215 sequence

SEQ ID NO: 17215 - DNA, 260 bp, Unknown
  Description of Unknown: LeftRegion for integrase B4216 sequence
gataaagaattacaggacgcagtccgggcggaaaaggaacgccgtgctaaacgctgggggaaggataagctaaagaaaaagtccccaaagcctgccccgatatcgacacagttccatatgaagaaaaagctggcaacgcaccagaacccgtatcgtcaagccgaatacatgtacagtttaattgaaagcgaggaaaccacatggcaaatgtaacgataattcctgcccgcaggaaagcagacaagtcaacagaagaaaaa

SEQ ID NO: 17216 - DNA, 260 bp, Unknown
  Description of Unknown: LeftRegion for integrase B4217 sequence
caattgtttcacttgtaaaacataattaataaaaccaaaaccgcccctgctggtaacagagacggctttcaagaatctttgcagttataaaaaactgtgctatattcttcctgaacagttgaattatagcacacttctttacatctgcaaaggtgtattttttatacccttttttcgtaaaatgcaatggaggtgtgctaatgaatcttgaaaatgtatgtctttatttaagaaaatcccgtgctgatcgggaggctgag

SEQ ID NO: 17217 - DNA, 260 bp, Unknown
  Description of Unknown: LeftRegion for integrase B4218 sequence
tcccaaacagcggacagtcacaaaaatagcagaagccccggtgttaccagcaccagagcctctacctttgaatactatacaggtctcaagaacctagtacaataccaaaacgcaaatatattgtaccacattttcttagcacctgcataggtgttatttttatactcttttttacatattttaggaaaggtggtacatatatgcgcgaacaatatttaatctatctaagaaaatcccgtaacgatgcacaacttgaagca

SEQ ID NO: 17218 - DNA, 260 bp, Unknown
  Description of Unknown: LeftRegion for integrase B4219 sequence
ttaaaaaaccgcccctgcgccaacaggaacggtttgcgccttggccggataccagtcaagacattactataacatctccggagatgctacagctttcagcaaaaatattgtatcatcttcggagcggttgcacaatcagaacgtttgtgtggtcgttatttttgtacccatttttacatattttaaaccgaggtgatattatggaacttttaaatgtatgtatctacctgcgtaagtcccgtgctgatcgggaggctgaa

SEQ ID NO: 17219 - DNA, 260 bp, Unknown
  Description of Unknown: LeftRegion for integrase B4220 sequence
gtcttttacgttatctacaataaaataacagaagccccggtgttaccagcaccagagcctccatctttgaatactatacaggttccaagaacccagtacaataaccaaacgcaaatatattgtaccacactttcttagcacctgcataggtgttatttttatactcttttttacatatttttaggaaaggtggtacatatatgcgtgaacaatatctaatctatctaagaaaatcccgtaacgatgcacagcttgaagca

SEQ ID NO: 17220 - DNA, 260 bp, Unknown
  Description of Unknown: LeftRegion for integrase B4221 sequence
atttcatgggtgtcttttactttatataaatatatacaaaaaccggctcctgcgccaacaggaaccggtatgtagcttccgaagatgctactcatttcgcaaaaatattgtatcatcttcggagcggctgcacaatcagaacgtttgtgtggtcgttatttttgtacccttttttacatattttaaaccgaggtgatattatggaacttttaaatgtatgtatctacctgcgtaagtctcgcgccgatcgggaggccgaa

SEQ ID NO: 17221 - DNA, 260 bp, Unknown
  Description of Unknown: LeftRegion for integrase B4222 sequence
taaagaaaatgatttcaaaacaaaagtagaataccttattgctaaaccaaataatgagatagaaatgcacttcaaagatgggaatgttgcaataatcaaatgggaagatagaagtcgtagtgaatcttggacttctgagatgaaagaaaaagcaaggcaaaaaaagattgaacaatacaaaaaaagaggaggtggattaaatgggtaaagttagaataattccacaaacaatcaatccattaactcaagttaaaattggt

SEQ ID NO: 17222 - DNA, 260 bp, Unknown
  Description of Unknown: LeftRegion for integrase B4223 sequence
gcagtggcattgcagtacctcaaacggctctttacagcagggctgcttactgacgaggaatatcaaagggcttgtgacctgctgataagaaggtatctggcagcagcataagagcctatctgtctgcgcttcaccatagatatattgaggattgtgtggtagtgttgttgcttgaaaagagccgaaaggaggtgccctgcatgcccaaggtacgtgtgatacaggcaacgaaaggatcgcttgcaaacaggctgcctgtt

SEQ ID NO: 17223 - DNA, 260 bp, Unknown
  Description of Unknown: LeftRegion for integrase B4224 sequence
gccgttaaaggtgtctttaacggtgtcttgtcagaaaatattgtagagtggaacgagtttgaaatcaatggtaatcgttgccacgatgccacactattttatatgcgagcagccgcacaattatgctacacgaaaggaggcgatgcccgcaaagtacagcggcaacaccgatacaataacatcataaggacgtgaatcaagtgacagcattagaacaaaacagcgcggttgaatcggcgctgcacccacagatggacaaa

SEQ ID NO: 17224 - DNA, 260 bp, Unknown; identical to SEQ ID NO: 15387
  Description of Unknown: LeftRegion for integrase B4225 sequence

SEQ ID NO: 17225 - DNA, 260 bp, Unknown
  Description of Unknown: LeftRegion for integrase B4226 sequence
tactatcgattatcgatggagagcttcacaaaaggtacacgagattcgagagatagaaataacgtacgtctcgaacgatttaagatgtgggccgaaaattttggagaaatagaattaactgatgaagagcatgataagattattgaatataccaaatttttactttattcaagagagaaacaaaagaaaggaccaacatcatgacaacatttgatatgcacaacgcagccgatcgagctcttaaaatagacgtttatgca

SEQ ID NO: 17226 - DNA, 260 bp, Unknown
  Description of Unknown: LeftRegion for integrase B4227 sequence
ctcacgccggaggtgctcagccgagaaacatactgcgccacctttattggcggagacggggcgaggtataaaaccacgctgataggctgttcgtgcccagacttcgaggagcgggggcttccgtgtaagcatatgtactggctcgcgcagcagctcggactcaatgactccgtgccggccagcggcgccggcggagaggcgtgagcgccggaaagagtgcagcaggagggccgcccgatgctgccatgcgggcgtatatc

SEQ ID NO: 17227 - DNA, 260 bp, Unknown
  Description of Unknown: LeftRegion for integrase B4228 sequence
agacccccgttctatcggcggcaaacccccgaaaatcggtcacttcgtgccgataaaacggggttgtcgtccaaaatcaggccgttctggcggacaaatcaggttgtcgtccgcacgcggcggacaaaaaatggcccacgcgccgggttgggcgcgggggccgccgtccacaccttgggattgggagggaccaccacattatgccacgcaggaggaagttcgcggccaaggacaggggtcgctgcgtcatatacgcgagg

SEQ ID NO: 17228 - DNA, 260 bp, Unknown
  Description of Unknown: LeftRegion for integrase B4229 sequence
gttcaccgatgaagagcatgagaagttaatggagtatggtagattcttaatttcacagagacaaaaataaaagaaagagcccttgttaggactctgcctttatttcaaatttaggatcataggagttgaaaataacgcgaaggaggtgatgccaacttattcccttggcaagtacatcattagatataggaagtgactccatgacaacatttgatatgaataatgcgacatctaaagctttggatatggacgtttatgcg

SEQ ID NO: 17229 - DNA, 260 bp, Unknown
  Description of Unknown: LeftRegion for integrase B4230 sequence
tccgcaatctttaatataaaagtcaattaaacacaaaaaccgtcccagtacgccaataccgggacgggaatggatctccgaagagatacctcatttcaacaaaaatattgtatcatcttcggagcggctgcacaatcagaacatttgtgtggtcgttatttttgtacccatttttacatattttaaaccgaggtgatattatggaacttttaaatgtatgtatctacctgcgtaagtcccgtgctgatcgggaagctgaa

SEQ ID NO: 17230 - DNA, 260 bp, Unknown
  Description of Unknown: LeftRegion for integrase B4231 sequence
ttttatcatactaaaaaaaaaaaatccaacccaaatcacttctccatcaatactaagaatcataaaaaatggccccgctgtcatatagacaacggggcaccgaccgaccacgtatggtaacggtccatacatctgattatattttatcgtacttatcactaaaaatcaatacgtcaaacaaatagttaggagttgtttttatgtcaaatgccgttatatacgcccgctattcttccgggcatcagcgtgaagaaagtatt

SEQ ID NO: 17231 - DNA, 260 bp, Unknown
  Description of Unknown: LeftRegion for integrase B4232 sequence
tccgcaatctttaatataaaagtcaattaaacacaaaaaccgtcccagtacgccaataccgggacgggaatggatctccgaagagatacctcatttcagcaaaaatattgtatcatcttcggagcggctgcacaatcagaacatttgtgtggtcgttatttttgtacccatttttacatattttaaaccgaggtgatattatggaacttttaaatgtatgtatctacctgcgtaagtcccgtgctgatcgggaggctgaa

SEQ ID NO: 17232 - DNA, 260 bp, Unknown
  Description of Unknown: LeftRegion for integrase B4233 sequence
atggggcgataacggaagaagaatataatcttaagaaaattcagctgctgaataaataaaaaaatcccgcccgccctgcaccaccaggacgaacggggtaccatcagccggacggcaaacggcacggcataaacaccatgcctatcataccacacgccgtccgaacacgcaagaggcattatgcccggaaaggatggcaaatgaacggggtaatttacgcaagatacagcagccacaaccagagggaagaatccatagag

SEQ ID NO: 17233 - DNA, 260 bp, Unknown
  Description of Unknown: LeftRegion for integrase B4234 sequence
ccgcaatttttaatataaagatcaattaaacatataaaaaccgccccagtacgccaataccgggacggtggtggatctccgaagagatacctcatttcgcaaaaatattgtatcatcttcggagcggctgcacaatcagaacatttgtgtggtcgttatttttgtacccatttttacatattttaaaccgaggtgatattatggaacttttaaatgtatgtatctacctgcgtaagtcccgtgctgatcgcgaggctgaa

SEQ ID NO: 17234 - DNA, 260 bp, Unknown; identical to SEQ ID NO: 15411
  Description of Unknown: LeftRegion for integrase B4235 sequence

SEQ ID NO: 17235 - DNA, 260 bp, Unknown
  Description of Unknown: LeftRegion for integrase B4236 sequence
ttgtcagcgtttcggtagatttttccgtttttcagcaaaataaaaacgcccacggtgttaccagcaccgcaggcgttccagatcagcttgctcagagagatggtacagggataaaacctgtccagagcaataacagacctcgcagatgttattgtaccacctccgggcaggcttgtcaaagtgtacccggaggtatttttatgggcaaaaaacaaaagacaaacggcggcgatgcggtgatctacgcccgctattcttcc

SEQ ID NO: 17236 - DNA, 260 bp, Unknown
  Description of Unknown: LeftRegion for integrase B4237 sequence
ttcaaataaatccacttcatgtatgatattaccttgtttcttggaagatcgttcagctttcagcaaaccagatctaacccatcgtctaactgtttcttcgttgatatccaataagtcagcgatttctttagtgttatacatgctcatacaaccgctcctttctataaaggatatgaatcacaaaaagaggaagtgacatcatgacaacattcgatatgaatatcgcaacagaacacgctttaaagatggatgtatacgct

SEQ ID NO: 17237 - DNA, 260 bp, Unknown; identical to SEQ ID NO: 15411
  Description of Unknown: LeftRegion for integrase B4238 sequence

SEQ ID NO: 17238 - DNA, 260 bp, Unknown
  Description of Unknown: LeftRegion for integrase B4239 sequence
gccgggactgctgctgagggccgatgggtatgagacgagggaatataggaaggagtgacagttaaagtggaatctatcgaagccggaaagccagactgcttgactgtccatttcaagagtgggagaacagaagagatttcttatacgcctacgccatccaagcggcgtcccaaggcacggagaaaggagagcggagaaaagtggcaaagacagtaagggccatcccggccaccatcagccgttatacggcggctccgatt

SEQ ID NO: 17239 - DNA, 260 bp, Unknown
  Description of Unknown: LeftRegion for integrase B4240 sequence
tatgggtgtcttttactatgtaaaaataatagaagccccggtgttaccagcaccagagcctctacctttgaatactatacaggtctcaagaacctggtacaataccaaaacacaaatatattgtaccacattttcttagcacctgcataggtgttatttttatactcttttttacatatttttaaggaaaggtggtacatatgaacgaacaatatttaatctatcttagaaaatcccgtaacgatgcacagcttgaagca

SEQ ID NO: 17240 - DNA, 260 bp, Unknown
  Description of Unknown: LeftRegion for integrase B4241 sequence
atgggtgtcttttactatgtaaaaataatagaagccccggtgttaccagcaccagagcctccatctttgaatactatacaggttccaagaacccagtacaataaccaaacgcaaatatattgtaccacattttcttagcacctgcataggtgttatttttatactcttttttacatatttttaggaaaggtggtacatatatgcgcgaacaatatttaatctatctaagaaaatctcgtaatgatgcacagcttgaagca

SEQ ID NO: 17241 - DNA, 260 bp, Unknown
  Description of Unknown: LeftRegion for integrase B4242 sequence
ttattgcgtacctgttgactctttacttgcttttgatactaatgacaatgatagtttaaaggaattgatgaataacatggatgtaattagaaacgcacagagatggaatgatgaagtaggtttagctacatttacagaagaagaaatgacagagctaataaaatacgctaaatatattcttagccaaagaaagagtgatgatgaaaaagatgaaaaacaatgaattacttatgggtgaatatcttttgctgtatctacgt

SEQ ID NO: 17242 - DNA, 260 bp, Unknown; identical to SEQ ID NO: 14010
  Description of Unknown: LeftRegion for integrase B4243 sequence

SEQ ID NO: 17243 - DNA, 260 bp, Unknown
  Description of Unknown: LeftRegion for integrase B4244 sequence
caaagaataagccaaccccgccgcatccgtttaagactgcggcggggttctctttttggttgttctaaatctttttaaatcgctttcggctcttgtaaatcttttctgtgcgcggtatactatctacaaatatatatgatgttctgtgtgcatgaggcactttgcactaactgcaaaatcaaaatttcggaggtatcggcatgaacggtgaaatcaaaaatgtggtgctttatctccgctattccagcgccgcccagaac

SEQ ID NO: 17244 - DNA, 260 bp, Unknown
  Description of Unknown: LeftRegion for integrase B4245 sequence
ataaaaaaccgcccctgcgccaacaggaacggtttgcgccttggccggataccagtcaagacattactataacatctccggagatgctacagctttcaacaaaaatattgtatcatcttcggagcggctgcacaatcagaacgtttgtgtggtcgttatttttgtacccatttttacatattttaaaccgaggtgatattatggaacttttaaatgtatgtatctacctgcgtaagtcccgtgctgatcgggaggctgaa

SEQ ID NO: 17245 - DNA, 260 bp, Unknown
  Description of Unknown: LeftRegion for integrase B4246 sequence
aaaacaagcgttatctttgtcggctctatgcgttttagctggtgatattcgattgtaagggggatttgaaagacgaaaagacggcaacttaatgtgccgttttcaaagagaaaccccgcgcgggaacttggcggaacgcgcgcggggatggtcaagaagcagggcgctttaccgcgctcgctctaaggggtgattttagcatggtcaagaaccgcgctgccatatatgcgcgcttcagctcgcacaatcagcgctcagag

SEQ ID NO: 17246 - DNA, 260 bp, Unknown
  Description of Unknown: LeftRegion for integrase B4247 sequence
gccgttaaaggtgtctttaacggtgtcttgtcagaaaatattgtagagtggaacgagtttgaaatcaatggtaatcgttgccacgatgccacactattttatatgcgagcagccgcacaattatgctacacgaaaggaggcgatgcccgcaaagtacagcggcaacaccgatacaatgacatcataaggacgtgaatcatgtgacagtatttgaaaagaacagcgcggttgaatcggcactgcacccacagatggacaaa

SEQ ID NO: 17247 - DNA, 260 bp, Unknown
  Description of Unknown: LeftRegion for integrase B4248 sequence
ccttgcggtctgcatcgtgtcgctcccgatcggcttgatcattgtagccgttggagcgtaccgggcggtaaaagccggggatatttatgatgctgcagttgctcggtacgagcagcaaatctcggactatgttgactggctggatgaagtcaacgcaaaataaaaagccgccatcggtgggcggcgggaggttgctctgaatgtgcgcaaaaaagaaaccggccatgcttgagccggatatgcaggatgccgtgatctac

SEQ ID NO: 17248 - DNA, 260 bp, Unknown; identical to SEQ ID NO: 15411
  Description of Unknown: LeftRegion for integrase B4249 sequence

SEQ ID NO: 17249 - DNA, 260 bp, Unknown
  Description of Unknown: LeftRegion for integrase B4250 sequence
tattatagcaaaatatacaaaaatgtcaaataataaaaaccgccccggtgttaccagcaccaggacggcatatacctccgaagagatatgtacatcacaaatacattgtatcatcttcggagcagccatgcaagcggaacaaaagttcgctggctgttatttttgtacccaaaaatcatatcctatagagaggtgatacaatgaacacacttgaaagagactgtatctatttaagaaagtcccgtgcagatcgggaggcc

SEQ ID NO: 17250 - DNA, 260 bp, Unknown
  Description of Unknown: LeftRegion for integrase B4251 sequence
ctgcaaattactgtttttcttgtttgtcattgttactgttattatgttccttgttgcgccgcccgctgcgcttgtcgcttgcgttggtacgatttacgccgctgttttgtgggcacgctcttctaaacggtgcaaggttatccgttccgccttggccagcttctacaacggcaaggacttgcccgaaaagtggtgattttatgcgggcttttatttactgccgattttccagccataagcagcaagagcttagcatagag

SEQ ID NO: 17251 - DNA, 260 bp, Unknown
  Description of Unknown: LeftRegion for integrase B4252 sequence
atgggtgtcttttactatgtaaaaataatagaagccccggtgttaccagcaccagagcctctacctttgaatactatacaggtctcaagaacctggtacaataccaaaccgcaagtatattgtaccacattttcttagcacctgcataggtgttatttttatactctttttttcatatttttaggaaaggtggtacgtatatgcgtgaacaatatctaatctatctaagaaaatcccgtaacgatgcacagcttgaagca

SEQ ID NO: 17252 - DNA, 260 bp, Unknown
  Description of Unknown: LeftRegion for integrase B4253 sequence
cccaaacagtggacagtcacaaaaatagcagaggccccggtgttaccagcaccagagcctccatctttgaatactatacaggttccaagaacccagtacaataaccaaacgcaaatatattgtaccacattttcttagcacctgcataggtgttatttttatactctttttttcatatttttaggaaaggtggtacgtatatgcgtgaacaatatctaatctatctaagaaaatcccgtaacgatgcacagcttgaagca

SEQ ID NO: 17253 - DNA, 260 bp, Unknown
  Description of Unknown: LeftRegion for integrase B4254 sequence
ccgcaatttttaatataaagatcaattaaacatataaaaaccgccccagtacgccaataccgggacggtggtggatctccgaagagatacctcatttcgcaaaaatattgtatcatcttcggagcggctgcacaatcagaacatttgtgtggtcgttatttttgtacccatttttacatattttaaaccgaggtgatattatggaacttttaaatgtatgtatctacctgcgtaagtcccgtgctgatcgggaggctgaa

SEQ ID NO: 17254 - DNA, 260 bp, Unknown
  Description of Unknown: LeftRegion for integrase B4255 sequence
cccaaacagtggacagtcacaaaaataatagaagccccggtgttaccagcaccagagcctctatctttgaatactatacaggttccaagaacctggtacaataccaaactgcaagtatattgtaccacattttcttagcacctgcataggtgttatttttatactctttttttcatatttttaggaaaggtggtacgtatatgcgtgaacaatatctaatctatctaagaaaatcccgtaacgatgcacagcttgaagca

SEQ ID NO: 17255 - DNA, 260 bp, Unknown; identical to SEQ ID NO: 15411
  Description of Unknown: LeftRegion for integrase B4256 sequence

SEQ ID NO: 17256 - DNA, 260 bp, Unknown
  Description of Unknown: LeftRegion for integrase B4257 sequence
cactatacatacaaaataaaatctacttttcccctcggtggaattgtatataaaattttaatttattatatttaaacaaaaaaatccccaactgctaccaacagttgaggattttatataggtgctatgatacacaccaaaacaacatatatattgtatcatagcaccgattaaaaatcaagttaagaggtgttatttttatgaaaaaaactaaaaattcagtgcaaagggctgttatatatgcacgttattcgtgtagt

SEQ ID NO: 17257 - DNA, 260 bp, Unknown
  Description of Unknown: LeftRegion for integrase B4258 sequence
atcgataaggatacgtaccaaaaagcacaagaagaacgcaaacgtcgagcaataaagctcggacgaaataataagcaaacacagatgaggaagctacagatccctacccatttccgtatgggtgaggttgctgtcctttatgacaatcccgtcaaacaggcagcatacctgtacagcctcatagaaagcgagagtaaataatgggaaatgtaatgttaattcctgcaaggcgacaagtcggaaacaacgcccgaaagcag

SEQ ID NO: 17258 - DNA, 260 bp, Unknown
  Description of Unknown: LeftRegion for integrase B4259 sequence
ttggatcattgacatggttatgatctgctgtaacaaattcaccgacagcaccggtgcggtggtcggtctgaaggttgcggagtataccagacagccggatcccaatcttgcagaggcttctctggaggagcagcgggaggcagcggccgagactgccagagcatacggctatacagtgatagactcaggcaatcaggataatgtcaacgaataaaaacacggctcgaaaatacgccgcaggaggtggctcggataattcc

SEQ ID NO: 17259 - DNA, 260 bp, Unknown
  Description of Unknown: LeftRegion for integrase B4260 sequence
tttttatgataaagccttcgaccgaggccttataactatcactccttccatgaaaatctatgtttctccgataattttgaatagccctcaggacgcttttacagcccgctggctggcttctcttgacggaatggttttacccccccgccgcgtagagagcttctggagtaccataacgacgaaatttttaggagggtcacatgaatacagtaatttatgctcggtattctgccggcccgagacagaccgaccagagtatc

SEQ ID NO: 17260 - DNA, 260 bp, Unknown
  Description of Unknown: LeftRegion for integrase B4261 sequence
attttatcatactaaaaaaaaaaatccaacccaaatcacttctccatcaatactaagaatcataaaaaatggccccgctgtcatatagacaacggggcaccgaccgaccacgtatggtaacggtccatacatctgattatattttatcgtacttatcactaaaaatcaatacgtcaaacaaatagttaggagttgtttttatgtcaaatgccgttatatacgcccgctattcttccgggcatcagcgtgaagaaagtatt

SEQ ID NO: 17261 - DNA, 260 bp, Unknown
  Description of Unknown: LeftRegion for integrase B4262 sequence
aagacccccgttctatcggcggcaaacccccgaaatcgggcacctttggtcgagagaacggggctgtccgccagaatcaggccgttctggcggacaagtcgggttgtcgtccgcacgcggcggacaaaaaatggcccacgcgccgggttgggcgcgggggccgccgtccacaccttgggattgggagggaccaccacattatgccacgcaggaggaagttcgcggccaaggacaggggccgctgcgtcatatacgcgagg

SEQ ID NO: 17262 - DNA, 260 bp, Unknown
  Description of Unknown: LeftRegion for integrase B4263 sequence
ctccatattgcaagactcgctaccaacgaaccttgcgcccgtaatcaatacggacactcatttcaagactactgctccgaagaatacagtaatacgctcatataatattgtatcatcttcggagcggctgcacaatcagaacatttgtgtggtcgttatttttgtacccatttttacatattttaaaccgaggtgatattatggaacttttaaatgtatgtatctacctgcgtaagtcccgtgctgatcgggaggctgaa

SEQ ID NO: 17263 - DNA, 260 bp, Unknown
  Description of Unknown: LeftRegion for integrase B4264 sequence
actttatctttaattgaatctgaatcaaaataaataaaaaaccgccccagtacgccaataccgggacggtggtggatctccgaagagatacctcattcgcaaaaatattgtatcatcttcggagcggctgcacaatcagaacatttgtgtggtcgttatttttgtacccatttttacatattttaaaccgaggtgatattatggagcttttaaatgtatgtatctacctgcgtaagtcccgtgccgatcgagaggctgaa

SEQ ID NO: 17264 - DNA, 260 bp, Unknown
  Description of Unknown: LeftRegion for integrase B4265 sequence
aaaacaggcagtttatcgcttagcttcaaagctgtgaactggtgttattcggttttagttgtgttgggaagtggtgaaaaacggcaacataaagtgctgctttcagagagaaaccccgcgcgggaacttggcggaacgcgcgcggggctggtcaagaagcagagcgctttaccgcgctcgctctaaggggtgattttagcatggtaaagaaccgcgccgccatatatgcgcgcttcagctcgcacaatcagcgctcagag

SEQ ID NO: 17265 - DNA, 260 bp, Unknown; identical to SEQ ID NO: 14872
  Description of Unknown: LeftRegion for integrase B4266 sequence

SEQ ID NO: 17266 - DNA, 260 bp, Unknown; identical to SEQ ID NO: 17252
  Description of Unknown: LeftRegion for integrase B4267 sequence

SEQ ID NO: 17267 - DNA, 260 bp, Unknown
  Description of Unknown: LeftRegion for integrase B4268 sequence
gccaacgggtccatcgccgtggtggagaccgaggactaccgcgcggtcatgcgccgctggtacaagggcagcaccaagctgatgctgtcggcggacagcttcgaggactacgaggacatgatcttcggcatggacgacggacccgtgcgcgtgatcggcacggtggtgtggttccaggccgccgacgagatggagtagccgtgggcgggcgcgcggcgatatacgcccgcttctcgagccacaaccagcgcggcgagtcc

SEQ ID NO: 17268 - DNA, 260 bp, Unknown; identical to SEQ ID NO: 17217
  Description of Unknown: LeftRegion for integrase B4269 sequence

SEQ ID NO: 17269 - DNA, 260 bp, Unknown; identical to SEQ ID NO: 15411
  Description of Unknown: LeftRegion for integrase B4270 sequence

SEQ ID NO: 17270 - DNA, 260 bp, Unknown
  Description of Unknown: LeftRegion for integrase B4271 sequence
atcgcgtcacggatgaaaccgggcatctcataagtaacaatgaagacctttttaggaacgccagagaaaaaagcgaagccgatttgatatgtaggctgttttgaaaaaagaaaaccccgcacgggaacttggcggaacgcgcgcggggctggtcaagaagcagagcgctttaccgcgcttgctctaggggtgattttagcatggtgaagaaccgagccgctatatacgcgcgctttagctcgcacaatcagcgttcggaa

SEQ ID NO: 17271 - DNA, 260 bp, Unknown
  Description of Unknown: LeftRegion for integrase B4272 sequence
gtagtttacggttattatgttttttgataaataaaaaccgccccggtgttaccagcaccaggacggcccatatctccgaagagataaatgtacatcgcaaatacattgtatcatcttcggagcagccatgcaagcggaacaaaagttcgctggctgttatttttgtacccaaaaatcatatcctatagagaggtgatacaatgaacacacttgaaagagactgtatctatttaagaaagtcccgtgcagatcgggaggcc

SEQ ID NO: 17272 - DNA, 260 bp, Unknown
  Description of Unknown: LeftRegion for integrase B4273 sequence
actaatccgatagaaatagaactggaagatgccgtaaaaaaaggatattgtccttgtaaaagatgcactagtcaaactaaataaaaagtccccggtgctaccaacaccgaggacaagcattgctccgaagatgcaatctctatacattcatattgtatcacgttggagtatatcattacaagtaataaggaggtattccaatgcttacatctgctaatgtcattatctatttacgaaaatcaagatctgatgatccatcc

SEQ ID NO: 17273 - DNA, 260 bp, Unknown
  Description of Unknown: LeftRegion for integrase B4274 sequence
attgatcaggaaacctacgataaagctgccgccatccgtctggaacgtgccgggaaacttggcaggctgaacaggaaaaagaacgtggagcctgcagcgtctcctaccagctttcgcatggctgcggcagagcaacactatgaagatccgaggctgcaggcagaatacctctacagcctcattgaaagcgaggtaagctaatgggaaatgtaatggtgattccggccagacggcaggtcggaaatacagtaaagcaatca

SEQ ID NO: 17274 - DNA, 260 bp, Unknown
  Description of Unknown: LeftRegion for integrase B4275 sequence
ttggatcattgacatggttatgatctgctgtaacaaattcaccgacagcaccggtgcggtggtcggtctgaaggttgccgagtataccggacggccggatcctgaccttgcagaggcttctctggaggagcagcgggaggcagcggccgagactgccagagcatacggctatacagtgatagactcaggcaatcaggataatgtcaacgaataaaaacacggctcgaaaatacgccgcaggaggtggctcggataattcc

SEQ ID NO: 17275 - DNA, 260 bp, Unknown
  Description of Unknown: LeftRegion for integrase B4276 sequence
tattatgctagagtaactgaagtctatacataatttccaaacgacaaacatatttatttctgatgccagtagaaatagtggtctagttaaagtttgtctattttaacacttgtatagatgtgaacttataaatttacctgttgatttttgttagcaggtttttgtacctatttttacatattttacagagaggtgatacaatgaacacacttgaaagagactgtatctatttaagaaagtcccgtgcagaccgggaagcc

SEQ ID NO: 17276 - DNA, 260 bp, Unknown
  Description of Unknown: LeftRegion for integrase B4277 sequence
cgcaatttttaatataaaaatcaattaaacatataaaaaccgccccagtacgccaataccgggacggtggtggatctccgaagagatatccgttttcagcaaaaatattgtatcatcttcggagcggctgcacaatcagaacatttgtgtggtcgttatttttgtacccatttttacatattttaaaccgaggtgatattatggaacttttaaatgtatgtatctacctgcgtaagtcccgtgctgatcgggaggctgaa

SEQ ID NO: 17277 - DNA, 260 bp, Unknown
  Description of Unknown: LeftRegion for integrase B4278 sequence
cagaaagctgttaggcatcaaggcttccaggaaaagtaaagcaaaataaaaaagcccctgccatatcgcgaaatatgacagggaatgcagccaggcattaccagtaccggactgcggttataatccactcttgtaggaggcagattatgtgtatattatatcatgaaagcctccaatcaccatagaaggaggctttttttatgcctaaaacagaagaaaagcaaaccataaaggctgtcatatatgccagatattcgtcc

SEQ ID NO: 17278 - DNA, 260 bp, Unknown
  Description of Unknown: LeftRegion for integrase B4279 sequence
ctcggcggaatcaatgccgacagcgttacaaagaaaaccaacttccttgttttgggaaataatgacctgtgttcctcaatcaaagacggcaaaagttccaagcataaaaaagccgaaaagtatattttgggcggcgcagacttgtctattatcccggaaaatgttttttatgatatgttagacgaataaagggtgattgtatgcgggcttttatttactgccgattttccagccataagcagcaagagcttagcatagaa

SEQ ID NO: 17279 - DNA, 260 bp, Unknown
  Description of Unknown: LeftRegion for integrase B4280 sequence
acaggtcttttgattgtgtgtagtgacccggcgcaaaagaaaattgacagagccgatgccttgaatattccaatcatttcagagcagcaatggtatgaactcatgccagaacttgaagccgttggaatgtggaacggaaagcaaattctgtttgcggacaatgatggaatctaccgtgttgaagtggacggtgaaagctgatggccagaaaaaagaatattgctgctggcctcgatgccgtcatctatgcccggtactcg

SEQ ID NO: 17280 - DNA, 260 bp, Unknown
  Description of Unknown: LeftRegion for integrase B4281 sequence
tcgactcggacacgtttacagccgctgaagcggagcgtatcaggcgggctgagaaactcggtcgtatttatgaaccaaatgaagaaacaacggtcgtctatcccattgcctttcacgtaatagaaggaagagaagaattcgacgacccttcgcacaggcggaatacgcctacagtttaatagaaacgtaggtgaacaagaatggcagtaagtaaaagcgtcaccgtgattccggcaaggaagcatgttcgaaagagtggg

SEQ ID NO: 17281 - DNA, 260 bp, Unknown
  Description of Unknown: LeftRegion for integrase B4282 sequence
gccaacgggtccatcgccgtggtggagaccgaggactaccgcgcggtcatgcgccgctggtacaagggcagcaccaagctgatgctgtcggcggacagcttcgaggactacgaggacatgattttcggcatggacgacggacccgtgcgcgtgatcggcacggtggtgtggttccaggccgccgacgagatggagtagccgtgggcgggcgcgcggcgatatacgcccgcttctcgagccacaaccagcgcggcgagtcc

SEQ ID NO: 17282 - DNA, 260 bp, Unknown
  Description of Unknown: LeftRegion for integrase B4283 sequence
tatgggtgtcttttactatgtaaaaataatagaagccccggtgttaccagcaccagagcctctacctttgaatactatacaggtctcaagaacctggtacaataccaaaacacaaatatattgtaccacattttcttagcacctgcataggtgttatttttatactcttttttacatatttttaaggaaaggtggtacatatgaacgaacaatatttaatctatcttagaaaatcccgtaacgatgcacaacttgaagca

SEQ ID NO: 17283 - DNA, 260 bp, Unknown
  Description of Unknown: LeftRegion for integrase B4284 sequence
ttttcagacgtgttttaacgcatcgcaagccttctagctggtgttattcggttttagttgtgttgggaagtggtgaaaaacggcaatataaagtgctgttttcagagagaaaccccgcgcgggaactttggcggaacgcgcgcggggctggtcaagaagcagggcgctttaccgcgctcgctctaaggggtgattttagcatggtaaagaaccgcgccgccatatatgcgcgcttcagctcgcacaatcagcgctcagag

SEQ ID NO: 17284 - DNA, 260 bp, Unknown; identical to SEQ ID NO: 13539
  Description of Unknown: LeftRegion for integrase B4285 sequence

SEQ ID NO: 17285 - DNA, 260 bp, Unknown
  Description of Unknown: LeftRegion for integrase B4286 sequence
acgacaaagaataagccaaccccgccgcatccgtttaagactgcggcggggttctcttttgggttgttctaaatctttttaaatcgctttcagctcttgtaaatcttttctgtgcgcggtatactatttatatatatgatgctctgtgtgcgtgaggcactttgcactaactgcaaaatcaaaatttcggaggtatcggcatgaacggtgaaatcaaaaatgtggtgctctatctccgctattccagcgccgcccagaac

SEQ ID NO: 17286 - DNA, 260 bp, Unknown
  Description of Unknown: LeftRegion for integrase B4287 sequence
aatagtgggtgatgcaaacatggggaaaagcaaaaaatccttcacgattaggtatcacaaggtgtgtgatcaggaaaaatcagatgaaatcattcgagcctttgccaaaagagcgatcatgaaagcactagaaaataacggggctgtagcgtacaatgtggatgatgttttgcataaatacatttcgggggaaatgcgtaatggtcatgaaagatgatagagcatatgtccgtgtatccacgttaaaagattcgcagaag

SEQ ID NO: 17287 - DNA, 260 bp, Unknown
  Description of Unknown: LeftRegion for integrase B4288 sequence
gtcacaatctacttttctaaaaacagaaataaccatgttgaaaggaatattctcgaaaatcttttggatacatttgagaacagaatgaaaactcagattggatgctgaatttatttcaatttattttttggatttcgctggatattataggaattatgtagtattgttggtttgcaaaaatcgtatgaaagggtgataaaatgaaaagagtatattgcttgtacagagtatcaaccaaaggtcaggttgataaagatgat

SEQ ID NO: 17288 - DNA, 260 bp, Unknown
  Description of Unknown: LeftRegion for integrase B4289 sequence
caaagaaaacaaattttcttattttaggaaataccgattatcaaaaaaccggtggcggcaaaagttcgaagcacaaaaaggcggaagaatataaattaaacggtattgatattgaaataatcccggaaaatgttttttacgatatgttagagaattaaaaaagccgctcgacgaatcgaacggctgaaaggcggtgaaatatgaacggcgtaatttatgcccgctattcttcggatagacaaacggaacaaagtatcgaa

SEQ ID NO: 17289 - DNA, 260 bp, Unknown
  Description of Unknown: LeftRegion for integrase B4290 sequence
gccgttaaaggtgtctttaacggtgtcttgtcagaaaatattgtagagtggaacgagtttgaaatcaatggtaatcgttgccacgatgccacactattttatatgcgagcagccgcacaattatgctacacgaaaggaggcgatgcccgcaaagtacagcggcaacaccgatacaataacatcataaggacgtgaatcaagtgacagcattagaacaaaacagcgctggtgaatcggcgctgcaaccacagatggacaaa

SEQ ID NO: 17290 - DNA, 260 bp, Unknown
  Description of Unknown: LeftRegion for integrase B4291 sequence
atcgcgtcacggatgaaaccgggcatctcataagtaacaacgaagacctttttaggaacgccagagaaaaaagcgaagccgatttgatatgtaggctgttttgaaaaaagaaaaccccgcacgggaacttggcggaacgcgcgcggggctggtcaagaagcagagcgctttaccgcgcttgctctaggggtgattttagcatggtgaagaaccgagccgctatatacgcgcgcttcagctcgcacaatcagcgttcggaa

SEQ ID NO: 17291 - DNA, 260 bp, Unknown
  Description of Unknown: LeftRegion for integrase B4292 sequence
atgggtgtcttttactatgtaaaaataatagaagccccggtgttaccagcaccagagcctctatctttgaatactatacaggttccaagaacctggtacaataccaaaccgcaagtatattgtaccacattttcttagcacctgcataggtgttatttttatactctttttttcatatttttaggaaaggtggtacgtatatgcgtgaacaatatctaatctatctaagaaaatcccgtaacgatgcacagcttgaagca

SEQ ID NO: 17292 - DNA, 260 bp, Unknown; identical to SEQ ID NO: 15411
  Description of Unknown: LeftRegion for integrase B4293 sequence

SEQ ID NO: 17293 - DNA, 260 bp, Unknown
  Description of Unknown: LeftRegion for integrase B4294 sequence
attgataaggaaacctaccagaaagcacaagaagaacgtaaacgccgagccacagcgctcggacgaaataataagcaaacacagatgaggaagctacagatacctacacatttccatatgggtgaggttgctgccctgcatgacaatcctatgaaacaggcagaatatctgtacagtctcatagaaagcgagagtcaataatgggaaatgtaatgttgattcctgcacggcgacaagttggaaacaacgctcgcaagcag

SEQ ID NO: 17294 - DNA, 260 bp, Unknown
  Description of Unknown: LeftRegion for integrase B4295 sequence
gtcttttacgttatctaaaataaaataacagaagccccggtgttaccagcaccagagcctctatctttgaatactatacaggttccaagaacccagtacaataaccaaacgcaaatatattgtaccacattttcttagcacctgcataggtgttatttttatactcttttttacatatttttaggaaaggtggtacatatatgcgtgaacaatatctaatctatctaagaaaatcccgtaacgatgcacagcttgaagca

SEQ ID NO: 17295 - DNA, 245 bp, Unknown
  Description of Unknown: LeftRegion for integrase B4296 sequence
aaaaaaaaatccaacccaaatcacttctccatcaatactaagaatcataaaaaatggccccgctgtcatatagacaacggggcaccgaccgaccacgtatggtaacggtccatacatctgattatattttatcgtacttatcactaaaaatcaatacgtcaaacaaatagttaggagttgtttttatgtcaaatgccgttatatacgcccgctattcttccgggcatcagcgtgaagaaagtatt

SEQ ID NO: 17296 - DNA, 260 bp, Unknown
  Description of Unknown: LeftRegion for integrase B4297 sequence
gccttcgaccgaggccttataactatcactccttccatgaaaatctatgtttctccgataattttggatagccctcaggacgcttttacagctcgctggctggcttctcttgacggaatggttttacccccccccccccgatttccgccgcgtagagagcttctggagtaccataacgacgaaatttttaggagggtcacatgaatacagtaatttatgctcggtattctgccggcccgagacagaccgaccagagtatc

SEQ ID NO: 17297 - DNA, 260 bp, Unknown
  Description of Unknown: LeftRegion for integrase B4298 sequence
ccgatgaccgggaaactgtaacaatccctattcaggaatctattcagctttctgaggaagaacgtattttgatttccgcatttaggagtgcttctatagaaggacgcatgagaattatccaagtctgtatgaacgaaaaggattcaaaaggggaaactatcattgcaggataataagcattgaggaatggaggaagaatcatgtacgaagagattaagactgcttgtctatatctacgatattcaagtagcaaccaaact

SEQ ID NO: 17298 - DNA, 260 bp, Unknown
  Description of Unknown: LeftRegion for integrase B4299 sequence
gttttcatttctgtaaattatataaaaactatattgtactgccaagtaattttataaaaatcaaaaaaaatggccccgctgtcatatagacaacggggcaccgaccggccacgtatggtaacggtccattcacctgattacattttatcgtacttatcactaaaaatcaatacgtcaaaaaatagttaggagttgtttttatgtcaaatgcagttatatacgcccgctattcttccgggcatcagcgcgaagaaagtatt

SEQ ID NO: 17299 - DNA, 260 bp, Unknown
  Description of Unknown: LeftRegion for integrase B4300 sequence
gccgttaaaggtgtctttaacggtgtcttgtcagaaaatattgtagagtggaacgagtttgaaatcaatggtaatcgttgccacgatgccacactattttatatgcgagcagccgcacaattatgctacacgaaaggaggcgatgcccgcaaagtacagcggcaacaccgatacaataacatcataaggacgtgaatcaagtgacagcattagaacaaaacagcgctggtaaatcggcgctgcaaccacagatggacaaa

SEQ ID NO: 17300 - DNA, 260 bp, Unknown
  Description of Unknown: LeftRegion for integrase B4301 sequence
tctattgaaaacaggtactgtttttgaaccattcatgcagctttctaatttcaagcgagtttaccttgatgatgccggatgtgtcgcatgggatattgatccgaatgttgacagtaataaagtctggaataacaaagtagatctgagttcagacagctgctatgttgacagtgttcctgtctaatggaaaaggagattctatgattgctatctacacccgacagagcattgaaaagaaagattctctgtctattgatgcg

SEQ ID NO: 17301 - DNA, 260 bp, Unknown
  Description of Unknown: LeftRegion for integrase B4302 sequence
atgctttaatgcataatgataaattaataaatcagtttaaagatgaacataatggaaattatgaatttgaagcaaatttatttgcagtagcattactatttaatgaagaagactttaatattaagtttaataaattagataattacatcctacagggaattcttgatagtaatatagaattagtctaaggagatgataaattgaacaccattgctatttatactcgtaaatctaaattcactggaaaaggtgaatctatt

SEQ ID NO: 17302 - DNA, 260 bp, Unknown
  Description of Unknown: LeftRegion for integrase B4303 sequence
ggaggatgaattcgtggagactctccccggattgcgtgcgttaattaagaaatgtaaataaaaaaatcgcccagtgctgcgaacaccaggcgacctgttcttccttgcggaagctgtaaactctactaataaattttacagcgtttccgataaatccgcaagggtttattttttatactctttttttgggaggtgagacgatgaggttcttttcctacggacgaaaatccgtattttctgataaatcagattcaatcgat

SEQ ID NO: 17303 - DNA, 260 bp, Unknown
  Description of Unknown: LeftRegion for integrase B4304 sequence
accaactgccggttgctaaaaatgtcaaataataaaaaccggcccctgcgccaacagagaccggccatacatccgaagatgtacactattacccaaacactaatattgtatcatcttcggagcagccatgcaagcggaacaaaagttcgctggctgttatttttgtacccaaaaatcatatcctatagagaggtgatacgatgaatacacttgaaagagactgtatctatttaagaaagtcccgtgcagatcgggaggca

SEQ ID NO: 17304 - DNA, 260 bp, Unknown
  Description of Unknown: LeftRegion for integrase B4305 sequence
aagattaattttaaacgaagaaaatatacgttatataataaagcagcaacttgggcaaagtgcatccgattctcctaagattatagattactacgaatcattaaataattcaggaaaacaggaagccactaagagagttaaggaacttacgtatatttcagaatatatataatatattaattcatatcggagttgattttatggaaaatatcataatctatctaaggaaatcaagatcagatgaccccgcactttccgta

SEQ ID NO: 17305 - DNA, 260 bp, Unknown
  Description of Unknown: LeftRegion for integrase B4306 sequence
cctgtaatttaatcaaataacgcaaaaaccgccccggtattggcgtaccgaagcggagttgctaagattgtaacctacaaatcccgaaggactgcgtgatataatcttccttaagcaagagcattataccacacatccttccaatttgcatagggtgtattttttataccctttttacataatttagagaaggtgattctatgaaaaatgggaattatgctatgtacctgagaaagtcccgtgccgatcgggaagccgaa

SEQ ID NO: 17306 - DNA, 260 bp, Unknown
  Description of Unknown: LeftRegion for integrase B4307 sequence
aaaaaataaactagtaaaaagtcacatatactcatattatgtgacttttttactgtttttttatctaaatatttgtatattattgacacaataacttgttagatttataattcatttattatatgtgtaacaaaaatgggcgtgaaaatgagtgaacaacaagcatttttgaaaatataacataataggagcgtaatacgatgtcaacaaatagagccgtaatatatgcccgatattcaagtaataagcaaacagagcaa

SEQ ID NO: 17307 - DNA, 260 bp, Unknown
  Description of Unknown: LeftRegion for integrase B4308 sequence
tttagaggctatgatagcgctaggcaacgcccaacgcataggcaagtttacaccgccagcagccaaataaaaaaagagcccctattaaggggctttatttatacctaaaaccaaaaaccgccgagcataaacttcggcggttatggttatcacatctttacttcttgataagattataccattgaaaggaacatcacacaatgacaaataataaagatttacaaacaggggttatatacgctcgttattcatctgataaa

SEQ ID NO: 17308 - DNA, 260 bp, Unknown
  Description of Unknown: LeftRegion for integrase B4309 sequence
atagacaatgaaatttttaatgctgccaaaatggaattgagtgaacgatcctcaaggttaggtagaaacaatcgctacaagcctgaaaaaataaaaaagccaccaatagcatttaggcttggcagcataactgaaaattttgataatccaatcagacaggcagagtacatatatagtctgatagaaagtggggacatttgatgggaaatgttatgattattcctgcaaaacgacaggttggaaatacctcacgacggcag

SEQ ID NO: 17309 - DNA, 260 bp, Unknown
  Description of Unknown: LeftRegion for integrase B4310 sequence
tcaattttgacaccaagcaaaaacaattacttattcctgatgaaagtaaaaacttcacacgtcattacataaatgatattaatgatatatattcttttaaggatgacatcattaacgttattaagctttatatgtaattgaaaatacgcaggtatggcataccagtaattatcctaataattaacattggagatgaccttatggaaaatataataatatatttacgaaaatcaagatctgatgaccccgcactttccgta

SEQ ID NO: 17310 - DNA, 260 bp, Unknown
  Description of Unknown: LeftRegion for integrase B4311 sequence
aaataaaagcccctgtgctaccaacacaagagcttttacccgcgacttacaattaagctgtgctcaatgatacaatcgccctgaacaagccatattatatcatttgaaacaccgcttttgcaagtaggtgtattttttatacccatttttagagttgcaccggtgcaattcgcatatattttacagaaaggatggttaatatggctgaatttgaaaacataataatatatttaagaaagtctcgctctgatgatccaatg

SEQ ID NO: 17311 - DNA, 260 bp, Unknown
  Description of Unknown: LeftRegion for integrase B4312 sequence
agctgtaattcttataaacggtgatgaagctacagtaaaaaaagttataaaaacaaatgaaggaatagaattacatgcaatgaatccatattaccctataaaaaaattcacctatgatgaaatgaactctgtaccagtaaaaataataggtagagtaaaagaagcaaaaataaagggtatttttgaatagaggtgttagtatgatagcaatatatgcaagacaatctatagaaaaaaaagatagcgttagtattgaagct

SEQ ID NO: 17312 - DNA, 260 bp, Unknown
  Description of Unknown: LeftRegion for integrase B4313 sequence
aatgcaaatgaaactcttactcttgtggatgttgattttgatgcttatagaaaaatgcttgagaatcgtacagtaagaaaaaattgtactattccaagttggctaaatgaaaaagctgagcaagctggaatcaatttttctgcggtgttgcaaaaaggcttaaaagaagaacttaatcttgcttaattggaggtttttcaatgaaaggtgtgatatatgctcgatatagtccgggaccaaatcaaaccgaccagagcata

SEQ ID NO: 17313 - DNA, 260 bp, Unknown
  Description of Unknown: LeftRegion for integrase B4314 sequence
caaggattcggagctaatataggtaaaaacgtaaccagaaaaaccgacattctcgttgtcggaatacaggatttggtaaaaacaaaaggatatgaaaagagttcgaagcacagaaaggccgaagagctgatcagcgaaggccgggacattttgataatagatgaatcagagtttatgcgtttgataaatgagggttaattatgccttattgtatgtatctgcgtaagagccgcaaggattttgaggcagaaagcgccggg

SEQ ID NO: 17314 - DNA, 260 bp, Unknown
  Description of Unknown: LeftRegion for integrase B4315 sequence
cataaaggatgtaattccgcaagtcttcgtgatgatttgctgcgtactatggcagcacaggttctcagcattgatgcatttaatgaagaggagtttgaacggagaattgaccatatcgatgtggaagaagacagactgaagttctattttcgagatggtcattctgtaacggagcattggccaataccaaggaggaaaaaatgccaaaaataacgaaaatacctgcatcaatcagccgatacacatcagcaccgattgat

SEQ ID NO: 17315 - DNA, 260 bp, Unknown
  Description of Unknown: LeftRegion for integrase B4316 sequence
cctatcgactttgaaatgacacctgtactagctttttcaaacgataaattagagaaaaaatttacaatcgcataataaaaaaacgcccctaccctgcgccaacaggataggggcaatgcctatagtatatacaggcaaatcaacacaataacattatacctgtatatcctataaatttcaatacttataggagaatttttatgagcattaaagcagtaagctattgcagatatagcacagacaaccaaacggaaaacagc

SEQ ID NO: 17316 - DNA, 260 bp, Unknown
  Description of Unknown: LeftRegion for integrase B4317 sequence
gccgccgacaagatgatgaaagtgctggaagcagaaagcagcctgcccggaagcaggcgggaagccccacaaggaaaactggcgttttgacggcgcataaggaagcattttgacgcttttgccgctatacagacagccgccccatgtggtacaatcaaggtacggaatagtggggctggctgtcggaaacggaggaatttatgttaagacagaccacccagcaacttattaccgccctctacccaagactatcccatgag

SEQ ID NO: 17317 - DNA, 260 bp, Unknown
  Description of Unknown: LeftRegion for integrase B4318 sequence
ggtcctcgtaataatttgacaaaattataaataaaaaccgcccctgttaccagcagagacggctttcaagaaaatctttgcagtgtgttggcactgtgttattttctttcctcgcagttagaattatagcacagtttccagcacctgcaaaggtgtattttttatacccttttttaatattatttacaggaggttgtgctatgagtcttgaaaatgtatgtatctatctgaggaaatcccgcgccgatcgcgaagctgag

SEQ ID NO: 17318 - DNA, 260 bp, Unknown
  Description of Unknown: LeftRegion for integrase B4319 sequence
caaggattcggagctaatataggtaaaaacgtaaccagaaaaaccgacattctcgttgtcggaatacaggatttggtaaaaacaaaaggatatgaaaagagttcgaagcacagaaaggccgaagagctgatcagcgaaggccgggacattttgataatagatgaatcagagtttatgcgtttgataaatgagggttaattatgccttattgtatgtatctgcgtaagagccgcaaggattttgaagcagaaagcgccggg

SEQ ID NO: 17319 - DNA, 260 bp, Unknown
  Description of Unknown: LeftRegion for integrase B4320 sequence
atttaatggaacaaacaatatgtcaatacatggaattaaatatacctttaactaaaaatgattatatcttacttgaaaatgctatgttaaaagccttaaaaaatataaaaataagcaaaaatatacgcctaaaaatataggcattaatttttcaatttaaaacgaacatatgtacgcaaaaaaaggaagtgagtaaataagtgaaagccgcaatatatgcaagatattcttctgataatcaaagagaagaaagtattgaa

SEQ ID NO: 17320 - DNA, 260 bp, Unknown
  Description of Unknown: LeftRegion for integrase B4321 sequence
aattttgaaatttaattaaataacaaaaaccgccccgatgttaccagcaccgaagcggagttgcaaagattgtaacctacgaaccccgaaggattgtgtggcataatctccataagcaagagcattataccacatatccttctgatttcatagggtgtattttttatactctttttacataatatcaagaaggtgatttcatgaaaaacggtaattatgctatgtacctgagaaagtcccgtgccgatcgggaaaacgaa

SEQ ID NO: 17321 - DNA, 260 bp, Unknown
  Description of Unknown: LeftRegion for integrase B4322 sequence
gcttataaacatggtgtaaaagacaaatatgaacttgctgaatttctagaagttacaattgaatttttagaagaatccatagaatattatagaggcaaatatgggacatactataaaattaataactacataatatactttactccaacctttggaataatggaatttttttaagtcaataatgttattgaggtgatttaatgaatgttgcaatttatgcaagaaaatctaaagcaactaaaaaaggtgaatccattgca

SEQ ID NO: 17322 - DNA, 260 bp, Unknown
  Description of Unknown: LeftRegion for integrase B4323 sequence
gattttgactatgagatggcacagaagataacgaaaaatctaattgatgaggggctgatttccagtgacgaatacgacagaatatcggcattaaatgctcagaaattctctccgttttatggggatttgatggatatataacttgataattacacccttcagagtgatatatagtactgccaaaacaaggaggtgagacaatggcaaggataaccaagattgaggccacaaagagtttcatagaaaaaaagaaaatacga

SEQ ID NO: 17323 - DNA, 260 bp, Unknown
  Description of Unknown: LeftRegion for integrase B4324 sequence
tcctataggtgattattacctttatttagagccacatttagatattgccttaaataaagataaaaaaaataataaagtaaatgtttttaacggaaaagaacaacaatgatttatttcgattaatgactaaaatatatgaaaaattcaataaatatttaaagtaaaatacatattaaataatattaaggagatgattctatatgcgtaaagtcgctatttattcacgtaaaagtagatttactggaaaaggtgaatcaata

SEQ ID NO: 17324 - DNA, 260 bp, Unknown
  Description of Unknown: LeftRegion for integrase B4325 sequence
attacaatcactaagacaggcataccaccagcgccgcttatccgcaaggcgcagaaatcggacgagcgtcccagatatgggatttacgacaaaaagccgcctgtttcgcgtaccgttttccggccagacagtcctgggaatgcttgtatatcaacgttttacgcaaaaaatcaaaaaccaaaaacgggaaaggacgaaaaatgatgaaagctgttatctacgcccgctactcctccgaaaagcagcaggagatcagcatt

SEQ ID NO: 17325 - DNA, 260 bp, Unknown
  Description of Unknown: LeftRegion for integrase B4326 sequence
cgaaggaatatgagaaagcttttaacgagattatgggcgttgaaaaataaaaagaatataaaacaaaaccctctgttggcgcagagggtgatgctcaggtcgcgatgacgcaaacctaaattcgcaactttattgtatcatcacgacctcaaaaaatcaagttttggggtatttttatgcctaaaaaacgggaggatacaatgagaatagcaatctacgcacgcaaatctgtctttgcagaaaacagcgacagcgtaaag

SEQ ID NO: 17326 - DNA, 260 bp, Unknown
  Description of Unknown: LeftRegion for integrase B4327 sequence
cgaaggaatatgagaaagcttttaacgagattatgagcgttgaaaaataaaaagaatataaaacaaaaccctctgttggcgcagagggtgatgctcaggtcgcgatgacgcaaacctaaattcgcaactttattgtatcatcacgacctcaaaaaatcaagttttggggtatttttatgcctaaaaaacgggaggatacaatgagaatagcaatctacgcacgcaaatctgtatttgcagaaaacagcgacagcgtaaag

SEQ ID NO: 17327 - DNA, 260 bp, Unknown
  Description of Unknown: LeftRegion for integrase B4328 sequence
aaataaaagctcctgtgctaccaacacaagagcctttaccacgatacttacataagcagtgcctatgatataataccgccctgaacaagccatattatatcatttcgaacaccgcttttgcaagtaggtgtattttttatacccatttttagagttgcaccggtgcaattcgcatatattttacagaaaggatggttaatatggctgaatttgaaaacgtaataatatatttaagaaagtctcgctctgatgatccaatg

SEQ ID NO: 17328 - DNA, 260 bp, Unknown; identical to SEQ ID NO: 17313
  Description of Unknown: LeftRegion for integrase B4329 sequence

SEQ ID NO: 17329 - DNA, 260 bp, Unknown
  Description of Unknown: LeftRegion for integrase B4330 sequence
gcttggatcgttaggatgtagtctttctttttcatttcgggacactcctttttcatttggttgcccatctcgggcggcaagtggctcgcgctcagcaccgccataaagcgaacatttgttctgttttcattctacacccgtcggtgtccattaaacaacccacaatatcttttaacagataaagaaacaaggtgatttgattgacggaatgggagaaaaccggatccggcgtggagccctacgccatctatctccgaaaa

SEQ ID NO: 17330 - DNA, 260 bp, Unknown
  Description of Unknown: LeftRegion for integrase B4331 sequence
cgaaggaatatgagaaagcttttaacgagattatgggcgttgaaaaataaaaaaaatataaaacaaaaccctctgttggcgcagagggtgatgctcaggtcgcgatgacgcaaacctaaattcgcaactttattgtatcatcacgacctcaaaaaatcaagttttggggtatttttatgcctaaaaaacgggaggatacaatgagaatagcaatctacgcacgcaaatctgtatttgcagaaaacagcgacagcgtaaag

SEQ ID NO: 17331 - DNA, 260 bp, Unknown
  Description of Unknown: LeftRegion for integrase B4332 sequence
ggaatttctgattttgatgaagatatttttcaatctgaaattcagcagatcatcgttcctgcaccgaatcggcttgagtttattttccacaacggcacaacaaaaactgtggaatggcaggatcgttcacgctcggaaagttggacagctgaaaagcgtaaacaggcaggtcagatttcaaaagagaggagatggcacagatgcccgtagtaaccaaaattccagcaaggctgcaccctgcgacctttgtacctcttgaa

SEQ ID NO: 17332 - DNA, 260 bp, Unknown; identical to SEQ ID NO: 17309
  Description of Unknown: LeftRegion for integrase B4333 sequence

SEQ ID NO: 17333 - DNA, 260 bp, Unknown
  Description of Unknown: LeftRegion for integrase B4334 sequence
cgaaggaatatgagaaagcttttaacgagatcatgggcgttgaaaaataaaaagaatataaaacaaaaccctctgttggcgcagagggtgatgctcaggtcgcgatgacgcaaacctaaattcgcaactttattgtatcatcacgacctcaaaaaatcaagttttggggtatttttatgcctaaaaaacgggaggatacaatgagaatagcaatctacgcacgcaaatctgtatttgcggaaaacagcgacagcgtaaag

SEQ ID NO: 17334 - DNA, 260 bp, Unknown
  Description of Unknown: LeftRegion for integrase B4335 sequence
atgagcactgttatgaacagttgacggaaaaagacatttggcaaaaatgccaaacctccctgaagcattgccaaaataacgggcaataaggctcacaaaactttcaaatgaaggctggataacaaatccggccttcattgactttaacaacctgacaaaccattaatataaaaaactgacagattaaaaggataaaaaatatgccaagacaaacaaagaaacttcaaactaaagcaacaaaaggtgtcatttgggcacgt

SEQ ID NO: 17335 - DNA, 260 bp, Unknown
  Description of Unknown: LeftRegion for integrase B4336 sequence
agttttaatcgtaacccaaataattaaactataaaaaaccgccccagtgttaccagcaccaggacggcctatacctccgaagagatacgtacatcgcaaatacattgtatcatcttcggagcagccatgcaagcggaacaaaagttcgctggctgttatttttgtacctatttttacatattttacagagaggtgatacaatgaacacacttgaaagagactgtatctatttaagaaagtcccgtgcagatcgggaagcc

SEQ ID NO: 17336 - DNA, 260 bp, Unknown
  Description of Unknown: LeftRegion for integrase B4337 sequence
attgataaaaaaacctttgatgaagtagaaaatgaactgaaccgaagattagaaaaacttgaaagaaattgtaaggcaaaagaaatgccaaagaaaaaggttcctatactctttcattttggagatatttcagaatattatgataatccaattaaacaagctgagtatttgtatagccttatagaaagcgaggtcatttaatgggaaatgtaatggttattcctgcaaaaagaaaaataggcaacactaatcgtaaaaag

SEQ ID NO: 17337 - DNA, 260 bp, Unknown
  Description of Unknown: LeftRegion for integrase B4338 sequence
gaaggaatacgagaaagcttttaacgagattatgggcgttgaaaaataaaaagaatataaaacaaaaccctctgttggcgcagagggtgatgctcaggtcgcgatgacgcaaacctaaattcgcaactttattgtatcatcacgacctcaaaaaatcaagttttggggtattttttatacccaaaaatcgggaggatacaatgagaatagcaatctacgcacgcaaatctgtctttgcagaaaacagcgacagtgtaaag

SEQ ID NO: 17338 - DNA, 260 bp, Unknown
  Description of Unknown: LeftRegion for integrase B4339 sequence
ctggatcattgacatggttatgatctgttgcaataaattcaccgacagcaccggtgcggtggttggtctgaaggttgccgagtatacaagacagccggatcccgatcttgcagaggcttctctggaggagcagcgggaggcagcggccgagactgccagagcttacggctatactgtaatagagtcaggcgctcaggataatgccggcaagtaaaaacacggctcgaaaatatgccgcaggaggtggctcggataattcc

SEQ ID NO: 17339 - DNA, 260 bp, Unknown
  Description of Unknown: LeftRegion for integrase B4340 sequence
cgaaggaatatgagaaagcttttaacgagattatgggcgttgaaaaataaaaagaatataaaacaaaaccctctgttggcgcagagggtgatgctcaggtcgcgatgacgcaaacctaaattcgcaactttattgtatcatcccgacctcaaaaaatcaagttttggggtatttttatgcctaaaaaacgggaggatacaatgagaatagcaatctacgcacgcaaatctgtatttgcagaaaacagcgacagtgtaaag

SEQ ID NO: 17340 - DNA, 260 bp, Unknown
  Description of Unknown: LeftRegion for integrase B4341 sequence
aaaaaataaactagtaaaaagtcacatatactcatattatgtgacttttttactgtttttttatctaaacatttgtatattattgacataataactcgttagacttataattcatttattgtatgtgtaataaaaatgggcgtgaaaatgagtgaacaacaagcatttttgaaaatataacataataggagcgtaatacgatgtcaacaaatagagccgtaatatatgcccgatattcaagcaataagcagacagaacaa

SEQ ID NO: 17341 - DNA, 260 bp, Unknown
  Description of Unknown: LeftRegion for integrase B4342 sequence
atcgataaggataccttcattgccgcaggtagagaaatcaggcgcaggtcagcaaaacttggtcgcaacgacagattcaaagaaatacctgagaagaaggctccgatactcttccgcttcggcgacatcacagagtattttgacaatccagtaaaacaggctgagtacttatacagccttatagaaagcgaggctatttgatgggaaatgtaatggtcatccctgccaaacgacaaattggtaataccggtcgtaagcag

SEQ ID NO: 17342 - DNA, 260 bp, Unknown
  Description of Unknown: LeftRegion for integrase B4343 sequence
cagcgaggagatgttcaatgctgcagcagaggagcttcaaagccgtgctgaacggctcggcagaaacggtcatgtaagaaaagaacggtcggtgaatgtccctgtgcggttcacttttataagcgcagaggattatttcgaggatcctgttcagcaggcagaatatatgtatggattgataaagacagaggtgacgaacattgagtaacataacgataatcccggcaagaccccagcgggctaactcacagcagaatgaa

SEQ ID NO: 17343 - DNA, 260 bp, Unknown
  Description of Unknown: LeftRegion for integrase B4344 sequence
gtgatttcgattattatatggcacagcgcatagcagaaaagctgaaatccgagggacttatcacagttgacgaattcaacaaactgaccgctcttaaccgcagtacttttttacctatgaatgtcgagatattaccgaaaatacgttgattatatctcggtttagagttaatatgtcaacaccgaagagaggtgaaaaaagtgaaaactgtaacaaaaattgaagccaaccaacgtactacgggttctgagaaaaagctc

SEQ ID NO: 17344 - DNA, 260 bp, Unknown
  Description of Unknown: LeftRegion for integrase B4345 sequence
tgctgtggttcttataaatggtgatgaagctacagtaaaaaaagttataaagacaaacgatggaatcgaattacacgcaatgaacccatattatccagtcaaaaaatttacttatgatgaaatgaatacagtaccagtaaaaattataggtagagtaaaagaagctaaaataaaaggtgcttttgaataggagtgataatatgatagctatttatgcaagacaatctatagaaaaaaaagatagtgttagtattgaaaca

SEQ ID NO: 17345 - DNA, 260 bp, Unknown
  Description of Unknown: LeftRegion for integrase B4346 sequence
ttcggtttcgccacccatgcccagtaacggcatcaggtttttaaacgccagtgcgatgtccagatcgttaccgccaatacggcaaccactgtgacccagcaggctggcttcacgatcgagacgcgaacgccactgcggccccatcagcagcaatgaacagttatgttatgatgtacaccacagttaatggaggtaagtaaatgaaagttcccgtatggtgttatgcaaggatctcgacgctcaagcaaattgatggtttt

SEQ ID NO: 17346 - DNA, 260 bp, Unknown
  Description of Unknown: LeftRegion for integrase B4347 sequence
tttagccagtacgtcgatgatacaacgtcggcttaaactaggctatgcccgcgctgcaagactaatagatgccatggaagaaatggggtttattggccccttccaaggttcacggccccgtgcaatattagtgactaaggaacagtggcacaaaatgaaatccctcagccaagctgagggaaaaggatggagggatatatgtgaactccgacaaccaaatgtctgaacgaacaaatgccgttatatacgcccgctattcc

SEQ ID NO: 17347 - DNA, 260 bp, Unknown
  Description of Unknown: LeftRegion for integrase B4348 sequence
atctgtaatttaactaaataacaaaaaccgccccggtgctggtaacaccgaagcggagttgcaaagattgtaacctacaaatcccgaaggactgcgtgatataatcttccttaagcaagagcattataccacacatccttccaatttgcatagggtgtattttttataccctttttacataatttagagaaggtgattctatgaaaaatgggaattatgctatgtacctgagaaagtcccgtgccgatcgggaagccgaa

SEQ ID NO: 17348 - DNA, 260 bp, Unknown
  Description of Unknown: LeftRegion for integrase B4349 sequence
cagcgataaagagttcatagcaaactggctcgcggcgaataacgcgaagttgtacaaaacgcccgcaaaaggtgttcgctccgtcataattcaaggttctatggaatacgagcggtattacgattacagaagcaagggcaagaagctgtatcgggcagaagatgttatcgagtttataagagaaagaaaggtgggcagcaatgccgaaaaacaaaataatgacccctaaccgcaacggcaaaatagctgttgtgtacgcg

SEQ ID NO: 17349 - DNA, 260 bp, Unknown
  Description of Unknown: LeftRegion for integrase B4350 sequence
aaataaaagcccctgtgctaccaacacaagagcttttaccacgatacttacataagcagtgcctatgatataataccgccctgaacaagccatattatatcatttgaaacaccgcttttgcaagtaggtgtattttttatacccatttttagagttgcaccggtgcaatttgcatatattttacagaaaggatggttaatatggctgaatttgaaaacgttataatatatttaagaaaatctcgctctgatgatccaatg

SEQ ID NO: 17350 - DNA, 260 bp, Unknown
  Description of Unknown: LeftRegion for integrase B4351 sequence
attaaagatatgtgaggccgatgatggcaaaagctatgaggttttatttgacggtgaacccatcggcaaattgcccggtaaaattgcaaagagatatgatgccgaaggttgttatggcgtttttgtcgaagatttgcaggaagagtataaggacaatggggatatggtgaccatccccatattgaggatatattggtaatatgccttattgtatgtatctgcgtaagagccgcaaggattttgaggcagaaagcgccggg

SEQ ID NO: 17351 - DNA, 260 bp, Unknown
  Description of Unknown: LeftRegion for integrase B4352 sequence
ctgagcgcaattttgtcgtgcgggcttataacgcgcaagggcgccgcagtttgttggtcaatgagctcgataagtacagcggcaaagtcgtggcgaaagacccgattattttccatatttccgctgtcggcgattggagcataacattaaattaagcacatttcagagccccggacggggcccttactataggaggtcatatgccttattgtatgtatctgcgcaagagccgcaaggattttgaggcagagagcgccggg

SEQ ID NO: 17352 - DNA, 260 bp, Unknown
  Description of Unknown: LeftRegion for integrase B4353 sequence
aaatagattcgagtctctaaaggctatccttccctattgtgacgaagctgtcttttttgataatgataacggttttgcagaaatcgccgaatacaaaaatggagaattaattttaaaaggttctgaacatcctgaatggattaaagagtttcacgaatacattacaaaataaaaaaaacgcctaaaacggaggtatatttgtgagcaagcataaattagcggtggtttatgcccgttattcaagtcatagacaaggagaa

SEQ ID NO: 17353 - DNA, 260 bp, Unknown
  Description of Unknown: LeftRegion for integrase B4354 sequence
ctgtaatttaaccaaataacgcaaaaaccgccccggtgctagtaacaccgaagcggaattgctaagattgtaacctacaaatccctaaggactgcgtgatataatcttccttaagcaagagcattataccacacatccttccaatttgcatagggtgtattttttttaccctttttacataatttagagaaggtgattctatgaaaaatgggaattatgctatgtacctgagaaagtcccgtgccgatcgggaagccgaa

SEQ ID NO: 17354 - DNA, 260 bp, Unknown; identical to SEQ ID NO: 17313
  Description of Unknown: LeftRegion for integrase B4355 sequence

SEQ ID NO: 17355 - DNA, 260 bp, Unknown
  Description of Unknown: LeftRegion for integrase B4356 sequence
caaggattcggagctaatataggtaaaaacgtaaccagaaaaaccgacattctcgttgtcggaatacaggatttggtaaaaacaaaaggatatgaaaagagttcgaagcacagaaaggccgaagagctgatcagcgaaggccgggatattttgataatagatgaatcagagtttatgcgtttgataaatgagggttaattatgccttattgtatgtatctgcgtaagagccgcaaggattttgaggcagaaagcgccggg

SEQ ID NO: 17356 - DNA, 260 bp, Unknown
  Description of Unknown: LeftRegion for integrase B4357 sequence
gtgattttgattactatatggcgcagtgcatagcagaaaagctgaaatccatgggtcttatcacagttgacgaattcgacaaactgaccgctcttaaccgccgtacttttttacctatgaatgtcgagatattaccgaaaatacgttgattatatctcggtttagagttaatatgtcaacactgaagagaggtgaaaaaagtgaaaactgtaacaaaaatcgaatccaaccaacgtactgcgggctctgagaaaaagctc

SEQ ID NO: 17357 - DNA, 260 bp, Unknown
  Description of Unknown: LeftRegion for integrase B4358 sequence
cagcgaggagatgttcaatgctgcagcagaggagcttcaaagccgtgccgaacggctcggcagaaacggtcatgtaagaaaagaacggtcggtgaacgtccctgtgcggttcacttttataagcgcagaggattatttcgagggccctgttcagcaggcagaatatatgtatggattgataaagacagaggtgacgaacattgagtaacataacgataatcccggcaagaccccagcgggctaactcacagcagaatgaa

SEQ ID NO: 17358 - DNA, 260 bp, Unknown
  Description of Unknown: LeftRegion for integrase B4359 sequence
ccgtcgaggcttggctgaccggttcgcgctcttgcccgctcagcacgagaatgatgtttcagcagttactcggcctcctgccggtagccgttgagttaggaggcggcaatggctgaggagttcaaaagctcccagcccttgacaaaaaacccgtttgcggttactatagccgcaaacggtttttttgtgaggtggttttgatgcatggcgcatatatccttgcgcgctactccacggacaggcaaaacgaggacagcata

SEQ ID NO: 17359 - DNA, 260 bp, Unknown
  Description of Unknown: LeftRegion for integrase B4360 sequence
attataacttctttcaggcgcagaagatcgctaaaaatatgctggagcttggacttatttccttgtcagaattcaacaaattaactgagataaaccgtaaaacattctccccgttttgggttgagattatgcccaaaattccttgatatataagggattcagagctaatatgtgacactaacgaagggaggtgaactaccgtgaaaaagataactaaaatcgatggtgtacagaataatagcaccgtaaataaggagctc

SEQ ID NO: 17360 - DNA, 260 bp, Unknown
  Description of Unknown: LeftRegion for integrase B4361 sequence
cgacagagagcgttttgacaaggcagaagaaattagaatgtcgagggcatcctctttgggcagggtcagagaactgcaggatgcaccaaaaccaatggcagatacaatgtttaccatgccgtttgttgagagaaaatttacagatccatttgaacaggcagaatatgcctacagcttaattgaaagtgaggtgacgatacatgaataagagtatcacagttatcccggcacgaaggcgtgtgggaaataccgtaaataaa

SEQ ID NO: 17361 - DNA, 260 bp, Unknown; identical to SEQ ID NO: 17333
  Description of Unknown: LeftRegion for integrase B4362 sequence

SEQ ID NO: 17362 - DNA, 260 bp, Unknown
  Description of Unknown: LeftRegion for integrase B4363 sequence
attataacttctttcaggcgcagaaagtggctgaaaacatgttggagcttggacttatttccttgtcagagttcaacaaattatcgctgaaaaatcgtgagacattctctccattttgggtggagattatgcccgaaatccgttgatatataaggctttcagagctaatatgtgacactaacgaagggaggtgaactaccgtgaagaaggtaacaaaaatcgaaggtgcacagaataacatcaccataaaaaagaaactc

SEQ ID NO: 17363 - DNA, 260 bp, Unknown; identical to SEQ ID NO: 16689
  Description of Unknown: LeftRegion for integrase B4364 sequence

SEQ ID NO: 17364 - DNA, 260 bp, Unknown
  Description of Unknown: LeftRegion for integrase B4365 sequence
ggatccattagttcaaaaaccaattttctcgttccagcccccgaaagtatcgatcctggacgtagctctaataaaaagtacagaatggccctggtagcaatatctgaaggtcaagatataaagataatatctcccgatgaatgtcttgaattagtaaatgccgcaatgccatatattaaagctgaatagagggaggtcatatgccatattgtatgtatctgcgcaagagccgtaaggattttgaggcagaaagcgccggg

SEQ ID NO: 17365 - DNA, 260 bp, Unknown; identical to SEQ ID NO: 13018
  Description of Unknown: LeftRegion for integrase B4366 sequence

SEQ ID NO: 17366 - DNA, 260 bp, Unknown
  Description of Unknown: LeftRegion for integrase B4367 sequence
cgccgcggagatcgaggcgcgggagcagcacctccgcgccgaagtaaagcagatgcgcgtctggcgcgtggtggcgctggccttgcttgtgatcttggtcgtcatctgtctatggtttgcttgggacgtgaccggcggggatcgtggattgatccgctacggccacgcggcgatcggctcgccggtcagagggtgagcgtatgaaagctgtgatttacgcccgctactccagtgagaagcagcaggagatcagcatcgag

SEQ ID NO: 17367 - DNA, 260 bp, Unknown
  Description of Unknown: LeftRegion for integrase B4368 sequence
ctcataaagctggtgttagaggaagatatgaacttgcagaatttttagaaattccagaatggtttttacttgatgctatcgaatattataagagtaagtatgggacatgctataaaattgataactatttaatatacttctctcctaattttggaataatggaatttttttagtcaataatatacagcgaggtgatataaatgaatgttgctatttatgcaagaaaatcaaaagccactaaaaaaggtgaatccatttct

SEQ ID NO: 17368 - DNA, 260 bp, Unknown
  Description of Unknown: LeftRegion for integrase B4369 sequence
acaggtcttttgattgtgtgtagtgacccggcacaaaagaaaattgacagagccgatgccttgaatattccaatcatttcggagcagcaatggtatgaactcatgccagaacttgaagccgttggaatgtggaacggaaagcaaattctgtttgcggacaatgatggcatctaccgtgttgaagtgggcggtgaaagctgatggccagaaaaaagaatattgctgccggcctcgatgccgtcatctatgcccggtactca

SEQ ID NO: 17369 - DNA, 260 bp, Unknown
  Description of Unknown: LeftRegion for integrase B4370 sequence
aaatattacctattcaattataacactgcatttatcaaaaagcaacaggaatatgtacaaacaatgtaagaatattttgttgcgaggtgatattatggaaataaccgaagcagagatagaaatcattacaaggcagattgttaaaatcatcataaatcatcaacgtgacgcatcagctgtgggtcccgaggatgcagacgatgaataagctcagagccgcagcctattgccgtgtttcgaccgaccgtgccgagcaatcc

SEQ ID NO: 17370 - DNA, 260 bp, Unknown
  Description of Unknown: LeftRegion for integrase B4371 sequence
tggcacaatcacgcctacgcctatagttccaatcgtcgagggttccgacgagtataaaacagcaatatatgctttcaatttcgccgttcaaagtggcaaaatggccgaggtgcaagcaaaatataatagtaaacataagaaataaaaaaagccccctatcaagggggctatacttatacaatttgaaaggaaatcacacaatgaataataccgacttacaaacaggcgtgatatatgcacgctactcgtctgataagcaa

SEQ ID NO: 17371 - DNA, 260 bp, Unknown
  Description of Unknown: LeftRegion for integrase B4372 sequence
acgttatataataatttcataaataaaaaccgcccctgctaccaacaggaacggtctattgaatactatacagtgccgaggcacgatataacattccgtgaacaagagtattatatcacatttccccggcaccgtgtaggtgttatttttatacgcaaaattaagctacctcacacatatactaaggaaaggtgatacatatgcaatatgaagaatatcttatctatctccggaagtcccgaagtgacgcttctctggaa

SEQ ID NO: 17372 - DNA, 260 bp, Unknown
  Description of Unknown: LeftRegion for integrase B4373 sequence
acgaacatttgttcgatgcaagtggaggatccggataaaataaaaactgccccctgcgccaacagggggctctggaccatgcctctaaagatggcacagcacattccaaaaatattgtaccatcttttaggggcaggcggcaagtcggaacaaccgttcgaccggctgttatttttgtacctaaaaaggaggctggtgcaatgaattttgcaatttatgggaggaaatctgtctattctgatcattctgattccgtagat

SEQ ID NO: 17373 - DNA, 260 bp, Unknown
  Description of Unknown: LeftRegion for integrase B4374 sequence
cgccgcggagatcgaggcgcgggagcagcacctccgcgccgaagtaaagcagatgcgcgtctggcgcgtggtggcgctggccttgcttgtgatcttggtcatcatctgtctatggtttgcctgggacgtgaccggcggggatcgtggattgatccgctacggccacgcggcgatcggctcgccggtcagagggtgagcgtatgaaagcagttatctacgcccgttactccagtgagaagcagcaggagatcagcatcgag

SEQ ID NO: 17374 - DNA, 260 bp, Unknown
  Description of Unknown: LeftRegion for integrase B4375 sequence
cgccgcagagatcgaggcgcgggagcagcacctccgcgccgaagtaaagcaaatgcgcgtctggcgtgtggtggcgctggccttgcttgtgatcttggtcgtcatctgtctatggttttcctgggacgtgaccggcggggatcgtggattgatccgctacggccacgcggcgatcggctcgccggtcagagggtgagcgtatgaaagctgttatctacgcccgctactccagcgagaagcagcaggagatcagcatcgag

SEQ ID NO: 17375 - DNA, 260 bp, Unknown
  Description of Unknown: LeftRegion for integrase B4376 sequence
caaactttaataaataaacaagaatttagagcaaataaatgggcttttaaacaacttatatctccatctaaaattaaggacttaatttcaaaaggtataagtactaaatatgaaattgctgaagaattgggagttacagaaaatttattatgcttagcctatcaatattatacagaaaataattatatttaggaggaaatatgttagcttatggatattgtagatattcttctgacttgcagaatgaaaaatcaatagaa

SEQ ID NO: 17376 - DNA, 260 bp, Unknown
  Description of Unknown: LeftRegion for integrase B4377 sequence
ctcataaagctggtgttaggggcagatatgaacttgcagaatttttagaaattccagaatggtttttactagaagctatcgaatattataagagtaagtatggtacatgctataaaattgataactatttaatatacttctctcctaattttggaataatggaatttttttagtcaataatatacagcgaggtgatataaatgaatgttgctatctatgcaagaaaatcaaaagccactaaaaaaggtgaatctatttct

SEQ ID NO: 17377 - DNA, 260 bp, Unknown
  Description of Unknown: LeftRegion for integrase B4378 sequence
cgccgcggagatcgaggcgcgggagcagcacctccgcgccgaagtaaagcaaatgcgcgtctggcgcgtggtggcgctggccttgcttgtgatcttggtcgtcatctgtctatggtttgcttgggacgtgaccggcggggatcgtggattgatccgctacggccacgcggcaatcggctcgccggtcagagggtgagcgtatgaaagctgttatttacgcccgttactccagtgagaagcagcaggagatcagcatcgag

SEQ ID NO: 17378 - DNA, 109 bp, Unknown
  Description of Unknown: LeftRegion for integrase B4379 sequence
ataaatcatcaacgtgacgcatcagctgtgggttctgaggatgcagacgatgaataagctcagagccgcagcctattgccgtgtttcaaccgaccgtgccgagcaatcc

SEQ ID NO: 17379 - DNA, 260 bp, Unknown; identical to SEQ ID NO: 13018
  Description of Unknown: LeftRegion for integrase B4380 sequence

SEQ ID NO: 17380 - DNA, 260 bp, Unknown
  Description of Unknown: LeftRegion for integrase B4381 sequence
cgccgcggagatcgaggcgcgggagcagcacctccgcgccgaagtaaagcaaatgcgcgtctggcgcgtggtggcgctggccttgcttgtgatcttggtcgtcatctgtctatggtttgcttgggacgtgaccggcggggatcgtggattgatccgctacggccacgcggcgatcggctcgccggtcagagggtgagcgtatgaaagctgttatctacgcccgttactcctcggagaagcagcaggagatcagcatcgag

SEQ ID NO: 17381 - DNA, 260 bp, Unknown
  Description of Unknown: LeftRegion for integrase B4382 sequence
agaattacagtaaaatactaaaaaatccccggtgttaccagcaccagggaaaacgagaaaactatagggtgtttggaacacagtacaattctctccatcacaaagattattgtatcacaaaaatccggcaccgtataggtgttattttttatacgcaaaattaagcgacctcacacatatactaaggaaaggtgatacatatgcaatatgaagaatatcttatctatctccggaagtccagaagtgatgcttctctggaa

SEQ ID NO: 17382 - DNA, 260 bp, Unknown
  Description of Unknown: LeftRegion for integrase B4383 sequence
gtcctcaacgcgcttcaagataagggccttgggattatcagggtagaaaccaactctgttcctgaccaaggtatcagcggcgcagaccgttacgacacgctcataacgtacagatagcaaaatgccctgtatccatccgccaagaccagatacagggcgcgccattccgtagacaactgaaaaggcaaggtgataataccatggcaaagggtaaccgtgcggccatttacgcacgtttcagctcgcacaaccagcgagac

SEQ ID NO: 17383 - DNA, 260 bp, Unknown; identical to SEQ ID NO: 13029
  Description of Unknown: LeftRegion for integrase B4384 sequence

SEQ ID NO: 17384 - DNA, 260 bp, Unknown
  Description of Unknown: LeftRegion for integrase B4385 sequence
tagaattacagtaaaatattaaaaaatccccggtgttaccagcaccagggaaaacgagaaaactataaggtgtttggaacacagtacaattctctccatcacaaagattattgtatcacaaaaatccggcaccgtataggtgttatttttatacgcaaaattaagcgacctcacacatatactaaggaaaggtgatacatatgcaatatgaagaatatcttatctatctccggaagtcccgaagtgatgcttctctggaa

SEQ ID NO: 17385 - DNA, 260 bp, Unknown
  Description of Unknown: LeftRegion for integrase B4386 sequence
tctttccatgcgttgcctgcccttacagcataacacgctttttggatatgggcaagcaaaagccccggcgctggtacgatgcagcgccggggaaacatggagtacagcacaaaaccggacaaaggaaattttatgcttgcaggggtcagtataccacactccctgcatatgggcaaatcgcccggaaaggaagtgttttcatgccccgcaaaaaagctcctgcggccgaggcgccgcgcctggtggcttactaccgttac

SEQ ID NO: 17386 - DNA, 260 bp, Unknown
  Description of Unknown: LeftRegion for integrase B4387 sequence
agatataataaatgcatatagatatggtgtaagaaataaacatgaattagctgaatatttagatgttacagaagattttttatacgaagcaattgagtattataagtgcaaatatggaatttgttacaaaatagatacttacattatttattttgaaccattaggtgtaatgaaaatattttaaataggagaatttaaaaatgaataaaattgcaatttacacaagaaaatcaaagtttactggaaaaggtgaatctatt

SEQ ID NO: 17387 - DNA, 260 bp, Unknown; identical to SEQ ID NO: 13434
  Description of Unknown: LeftRegion for integrase B4388 sequence

SEQ ID NO: 17388 - DNA, 260 bp, Unknown
  Description of Unknown: LeftRegion for integrase B4389 sequence
ctttccatgcgttgcctgcccttacagcatagcacgctttttggatatgggcaagcaaaagccccggcgctggtacgatgcagcgccggggataacatggagtgcagcacaaaaccggacaaagaaaattttatgcttgcaggggtcagtataccacactccctgcatatgggcaaatcgcccggaaaggaagtgttttcatgccccgcaaaaaaaccactgcagccgatgcaccgcgcctggtggcttactaccgctac

SEQ ID NO: 17389 - DNA, 260 bp, Unknown
  Description of Unknown: LeftRegion for integrase B4390 sequence
cactggcaagtatcagacgggacttgatattgctgacgatgtttcgagcgcgataaaagatttaagctaaataaaaaagaacccccggtgcgggaacaccgagggttaagacatcaaaacacaccacgcgaatagagtgaattgatatacatattatatcagctcgctctcttaaatgcaagaaagcgaggcttttttatatggaaaacgcagtaatttacgcgagatattcatcggacaagcagacggagcagagcatc

SEQ ID NO: 17390 - DNA, 260 bp, Unknown; identical to SEQ ID NO: 13018
  Description of Unknown: LeftRegion for integrase B4391 sequence

SEQ ID NO: 17391 - DNA, 260 bp, Unknown
  Description of Unknown: LeftRegion for integrase B4392 sequence
aataagaaaaccgcccctgctaccaacaggaacggcttttcataggcaataccgaagatggtatcaaccaaacttttgacctacatattgtatcatcttcgaacagctatcgcaagcagaacgctagttctctgctggctgttatttttatactcatttttagtgcgacgtcgcacatatactaaggaaaggtgatacatatgcaatatgaagaatatcttatctatctccggaagtcccgaagtgatgcttctctggaa

SEQ ID NO: 17392 - DNA, 260 bp, Unknown
  Description of Unknown: LeftRegion for integrase B4393 sequence
aaaagacacaggtatttctgtgggacagagatgtgttggaaaaattaattcaaaatgcgaatatgtgataaaaagccggctcctgccactaacaggaaccggttttaataaataagataattccggagaaaaatcttacctacacactaagtatatcatctcctggattatcacacaagtaaaaaaaggagaatgataaaatgaatgaatcagtatgtatctatttgagaaaatccagagccgacagggaagctgaagcc

SEQ ID NO: 17393 - DNA, 260 bp, Unknown
  Description of Unknown: LeftRegion for integrase B4394 sequence
tgctacactttttctcgaatttacacgaaatcgcatggttattctcggttgaaaatggtatgttatagatttacatttttccatatttttacgaccgtgcagctaaacttgacagattgcttttttcgtggtgcaataatctcatctttgttgcactggtgcaactttatcatttttagccgttggggaggcttatcattatgcttacaaactatttaatctatttgagaaaatcccgcgcagacaatccagatatgacc

SEQ ID NO: 17394 - DNA, 260 bp, Unknown
  Description of Unknown: LeftRegion for integrase B4395 sequence
ataaaataagggggatattatgagaaagttaaattacttagataatatcagttatataaaaataaataataaaaacatatatataaaatcgaataaaaatatacatatattaaataaattattgcaagaaataaaaaataaagaaaaattaaaatgctaagcattaccttaaataaatgaaatatagagaggtgatataaatgaatgttgctatttatgcaagaaaatcaaaagcaactaaaaaaggagaatccatttct

SEQ ID NO: 17395 - DNA, 260 bp, Unknown
  Description of Unknown: LeftRegion for integrase B4396 sequence
attggtgttttggttgcgtgcagcaatccaatgcagaagaaaatcgatcaggccaaagctctaaatattccggtcatttcagaacaacagtggtttgagcttatgccagagctggaagcactcggaatgtggaacggaaagcaaattcagtttgcagatgataatggaatttaccatattgatgtgggcggtgatggttgatggcccgaaaaaagaatatcgctgcgggtcaagatgccgttatctacgcccgctactct

SEQ ID NO: 17396 - DNA, 260 bp, Unknown
  Description of Unknown: LeftRegion for integrase B4397 sequence
aaaagatagatagatttttattgaaagcttttatatttacttatgttttgttgcatgttattatatttttacacaaaaaaaccgactcctgctaccaacaggaaccggttttaaaataagataatccgtagaaaatcttgcctacacactaagtatatcattttccggattatcgcacaagtaaaaaaggagaatgataaatgaatgaatcagtatgtatctatctaaggaaatccagagccgatcgggaagctgaagaa

SEQ ID NO: 17397 - DNA, 260 bp, Unknown
  Description of Unknown: LeftRegion for integrase B4398 sequence
aggtcacaatctacttttctaaaaacagaaataaccatgttgaaagaaatgttcttgaaaatcttttggatacatttgagaacagaatgaaagctcagattggatgctgaatttctttaagttgtttttcagatttgctggatattataggaattatgtagtattgttggtttgcaaaaatcgtatgaaagggtgataaaatgaaaagagtatattgcttgtacagagtatcaactaaatgtcaggttgataaagatgat

SEQ ID NO: 17398 - DNA, 260 bp, Unknown
  Description of Unknown: LeftRegion for integrase B4399 sequence
ctcataaagctggtgttaaaggaagatatgaacttgctgaatttttagaagttccagaatggtttttagtagaagttatagagcactatagtcataagtatgggacatgctataagattgataactatattatatacttttctcctaattttggaataatggagtttttttagttaataatatacagcgaggtgatataaatgaatgttgcaatttatgctagaaaatcaaaagcaactaaaaagggtgaatctatttct

SEQ ID NO: 17399 - DNA, 260 bp, Unknown
  Description of Unknown: LeftRegion for integrase B4400 sequence
ggtaaaagatttaataagaattttagtaatataacttctctatctgatatagaatcagcattgttagacttatctgcatatgcttgtgtatttttttctgaaaatgatattaatataaacacttatattattcaagaatatacaatagaatttatatcaaaattagagcatttatcggactaaaatagaaaggtaattctatgaacgctgtaatatatgctagattctctagccacaaccaacaggaacaaagcattgaa

SEQ ID NO: 17400 - DNA, 260 bp, Unknown
  Description of Unknown: LeftRegion for integrase B4401 sequence
ctcataaagctggtgttagaaacagatatgaacttgcagaatttttagaaattccagaatggtttttactagaagctatcgaatattataagagtaagtatggtacatgctataaaattgataactatttaatatacttctctcctaattttggaataatggaatttttttagtcaataatatacagcgaggtgatataaatgaatgttgctatctatgcaagaaaatcaaaagccactaaaaaaggtgaatctatttct

SEQ ID NO: 17401 - DNA, 260 bp, Unknown; identical to SEQ ID NO: 16679
  Description of Unknown: LeftRegion for integrase B4402 sequence

SEQ ID NO: 17402 - DNA, 260 bp, Unknown
  Description of Unknown: LeftRegion for integrase B4403 sequence
cgccgcggagatcgaggcgcgggagcagcacctccgcgccgaagtaaagcagatgcgcgtctggcgcgtggtggcgctggccttgcttgtgatcttggtcgtcatctgtctatggtttgcttgggacgtgaccggcggggatcgtggattgatccgctacggccacgcggcggttggctcgccggtcagagggtgagcggatgaaagcagttatctacgcccgttactcctcggagaagcagcaggagatcagcatcgag

SEQ ID NO: 17403 - DNA, 260 bp, Unknown
  Description of Unknown: LeftRegion for integrase B4404 sequence
gagtcgcgccgatatactttactacgccaaataactttatacaccataacattttcaataaaaacgcccccggtgttggcgcaccgagagcgtttatatagatcagcttgccccatagtggtgggaacaataccgacccgacatctgtattgtaccaccttcgggcaggctttgacaagtgtaccccggaggtgttttttatgacagcagatattttggcccgctattccaccgatcaccagaacccggtcaccatcgac

SEQ ID NO: 17404 - DNA, 260 bp, Unknown
  Description of Unknown: LeftRegion for integrase B4405 sequence
ttgcggatttgttgagataaaataagaaaaccgctcctgcgccaacagaaacggtctctcgaatactatacagtgccgaggcacgatataacattccctgaacaagagtattatatcacattttcccggcaccgtgtaggtgttatttttatacgcaaaattaagcaacctcacacatatactaaggaaaggtgatacatatgcaatatgaagaatatcttatctatctccggaagtcccgaagtgatgcttctctggaa

SEQ ID NO: 17405 - DNA, 260 bp, Unknown
  Description of Unknown: LeftRegion for integrase B4406 sequence
aggttactaaaataaaaaaccgcccctgtattaccggcacagagataatttaatctttaaatatttaaaagaaaaaaccggctcctgcgaccaacaggaaccggttttaataaataagatagtctcggagaaaatcttacctacactataattatatcatctcctggattatcgcacaagtaaaaaaaggagaatgataaatgaatgaatcagtatgcatctatttaaggaaatccagagccgatcgggaagctgaagca

SEQ ID NO: 17406 - DNA, 260 bp, Unknown
  Description of Unknown: LeftRegion for integrase B4407 sequence
ctcataaagctggtgttagaggaagatatgaacttgcagaatttttagaaattccagaatggtttttacttgatgctatcgaatattataagagtaagtatggtacatgctataaaattgataactatttaatatacttctctcctaattttggaataatggaatttttttagtcaataatatacagcgaggtgatataaatgaatgttgctatctatgcaagaaaatcaaaagccactaaaaaaggtgaatctatttct

SEQ ID NO: 17407 - DNA, 260 bp, Unknown
  Description of Unknown: LeftRegion for integrase B4408 sequence
agatataataaatgcatatagatatggtgtaagaaataaacatgaattagctgaatatttagatgttacagaagattttttatgcgaagcaattgagtattataagtgcaaatatggaatttgttacaaaatagatacttacattatttattttgaaccattaggtgtaatgaaaatattttaaataggagaatttaaaaatgaataaaattgcaatttacacaagaaaatcaaaatttactggaaaaggtgaatctatt

SEQ ID NO: 17408 - DNA, 260 bp, Unknown
  Description of Unknown: LeftRegion for integrase B4409 sequence
aaaccaccgaattggttgaagataataaaaccgtccctgcgctaacaggaacggtctattgaatactatacagtgccgaggcacgatataataatccctgaacaagaatattatatcacatttccccggcaccgtgtaggtgttatttttatacgcaaaattaagcaacctcacacatatactaaggaaaggtgatacatatgcaatatgaagaatatcttatctatctccggaagtcccgaagtgatgcttctctggaa

SEQ ID NO: 17409 - DNA, 260 bp, Unknown; identical to SEQ ID NO: 17406
  Description of Unknown: LeftRegion for integrase B4410 sequence

SEQ ID NO: 17410 - DNA, 260 bp, Unknown; identical to SEQ ID NO: 13421
  Description of Unknown: LeftRegion for integrase B4411 sequence

SEQ ID NO: 17411 - DNA, 260 bp, Unknown; identical to SEQ ID NO: 17376
  Description of Unknown: LeftRegion for integrase B4412 sequence

SEQ ID NO: 17412 - DNA, 260 bp, Unknown
  Description of Unknown: LeftRegion for integrase B4413 sequence
ctttccatgcgtcgcctgcccttacagcatagcacgctttttcgatatgggcaaataaatgccccggcgctggtacgatgcagcgccggggataacatggagtgcagcacaaaaccggacaaagaaaattttatgcttgcgggggtcagtatatcacactccctgcatatgggcaaaccgcccggaaaggaagtgttatcatgccccgtaaaaaagctcctgcggccgaagcgccgcgcctggtggcttactaccgctac

SEQ ID NO: 17413 - DNA, 260 bp, Unknown
  Description of Unknown: LeftRegion for integrase B4414 sequence
tacggtttaaggaatggtctaaagaattcggtcatataaaattcactgatgaagaatataagaagatctttgaatactgcaaattcctagtctatttgagagatataaaatagcgaataaaatctacataaaggaggtgatttaagtgtaatcgatcagctattcaacttagaatatacaacgaaggaaaggtggaacaaatgtcaacttttgatatgaacgagtctgagggcagcacaaaaatagataaatatgcaatt

SEQ ID NO: 17414 - DNA, 260 bp, Unknown
  Description of Unknown: LeftRegion for integrase B4415 sequence
ttatataaaaataaataataaaaacatatatataaaatcgaataaaaatatacatctattagatattttcagaattttaaaattattcaaatcttgattcacatatatattaaataaattattgcaagaaataaaaaataaagaaaaattaaaatgctaagcattaccttaaataaatgaaatatagagaggtgatataaatgaatgttgctatttatgcaagaaaatcaaaagcaactaaaaaaggagaatccatttct

SEQ ID NO: 17415 - DNA, 260 bp, Unknown
  Description of Unknown: LeftRegion for integrase B4416 sequence
ataaaaaaagggggatattatgagaaagttaaattacttagataatatcagttatataaaaataaataataaaaacatatatataaaatcgaataaaaatatacatatattaaataaattattgcaagaaataaaaaataaagaaaaattaaaatgctaagcattaccttaaataaatgaaatatagagaggtgatataaatgaatgttgctatttatgcaagaaaatcaaaagcaactaaaaaaggagaatccatttct

SEQ ID NO: 17416 - DNA, 260 bp, Unknown
  Description of Unknown: LeftRegion for integrase B4417 sequence
aaggttacaatatattttataaacaaccgaaatgatcaggttgaaagaaatgttttggaaaatcttttagatacatttgaaaacagaatgaaagcacaaataaattgctgattttcttagatttatttttgatttcgctggatattatgaaaaatatgtagtattgttggtttgcgaaaatcgtatgaaaggttgataggatgaaaagagtatattgtttgtacagagtgtcaacaaaaggtcaggtagataaagacgat

SEQ ID NO: 17417 - DNA, 260 bp, Unknown
  Description of Unknown: LeftRegion for integrase B4418 sequence
gcgcccgcgtcccccggctctattgatattgacgcggaggtcgcctattaccgttcccagctggaggaacagaaaaaagcggcggacggatcatctgcttccgctgggcacagctccagcggcacaaaaatggcatgacaaataaaaagagccgcccgtaaaaaggcggctcttgaaataatcacaaatggagggattttatggcagtgtttgctcaggctgtgcggccggattttaacgacgatgtggccgatgtcgtg

SEQ ID NO: 17418 - DNA, 260 bp, Unknown
  Description of Unknown: LeftRegion for integrase B4419 sequence
taccattatcgagaaaaggcgcaaagccatgtccaccacggcgctttttgaaacggaagacggcaataggatactgctggaaatacccagagcggcggcggagtatatgaccgttggcgacgttgggatgctggattattacaaaaaaatattcagatcgtttgtcaggttgagggattaagggcgtgaaggagcctgccatgcaaaagagaagaacgaaatacgcaaacagccaaggggataacgccgtcatatacgca

SEQ ID NO: 17419 - DNA, 260 bp, Unknown
  Description of Unknown: LeftRegion for integrase B4420 sequence
ggtcacaatctacttttctaaaaacagaaataaccatgttgaaaggaatattctcgaaaatcttttggatacatttgagaacagaatgaacgcacagattggatgctgaatttctttaagttcattttcagatttcgctggatattatagaaattatgtagtattgttggtttgcaaaaatcgtatgaaagggtgataaaatgaaaagagtatattgcttgtacagagtatcaaccaaaggtcaggttgataaagatgat

SEQ ID NO: 17420 - DNA, 260 bp, Unknown
  Description of Unknown: LeftRegion for integrase B4421 sequence
atgggtgtagaaatcgctatgaaatggctgaatatctaaatgttacagttgaatatctaaatgaagctatcgaatattatgcaagtaaatatggtgtaatgcatagaatagatgactatataatctactttacccctaatctttgtattggtaaggcttttaattactaaaaaataatattatctatatgaggtataaaaatgaatgttgctatttatgctagaaaatcaaaagctactaaaaaaggagaatctatttct

SEQ ID NO: 17421 - DNA, 260 bp, Unknown; identical to SEQ ID NO: 17395
  Description of Unknown: LeftRegion for integrase B4422 sequence

SEQ ID NO: 17422 - DNA, 260 bp, Unknown
  Description of Unknown: LeftRegion for integrase B4423 sequence
tagaattacagtaaaatactaaaaaatccccggtgttaccagcaccagggaaaacaagaaaactatagggtgtttggaacacagtacaattctctctatcacaaagattattgtatcacaaaaatccggcaccgtataggtgttatttttatacgcaaaattaagcaacctcacacatatactaaggaaaggtgatacatatgcaatatgaagaatatcttatctatctccggaagtcccgaagtgatgcttctctggaa

SEQ ID NO: 17423 - DNA, 260 bp, Unknown
  Description of Unknown: LeftRegion for integrase B4424 sequence
cgctacactttttctcgaatttacgcaaaatcgcatggttattctcgtcggaaaatggtatgttataattttacatttttccatatttttacgaccgtgcagctacacttgacagattgcatttttcgtggtgcaataatctcatctttgttgcaccggtgcaactctatcatttttagccgttggggaggcttatcattatgcttacgaactatttaatctatttgcgcaaatcccgcgcagacaatccagatatgacc

SEQ ID NO: 17424 - DNA, 260 bp, Unknown; identical to SEQ ID NO: 14512
  Description of Unknown: LeftRegion for integrase B4425 sequence

SEQ ID NO: 17425 - DNA, 260 bp, Unknown
  Description of Unknown: LeftRegion for integrase B4426 sequence
gtgctacactttttctcaaatttacgcgaaatcgcatggttattctcggcgaaaaatggtatgttataaatttacatttttccatatttttacgaccgtgcagctacacttgacagattgcttttttcgtggtgcaataatctcatctctgttgcaccgatgcaactctatcatttttagccgttggggaggcttatcatatgcttacaaactatttaatctacttgcgcaaatcgcgcgctgacaatccagatatgacc

SEQ ID NO: 17426 - DNA, 260 bp, Unknown
  Description of Unknown: LeftRegion for integrase B4427 sequence
tcggtttgggggtggcagtagatgagtcaggaagaaggaaagcgtgagatcgtctttcagatgactatgagtgccgcccgtcagatgctcgaaaaggggctgatttcggtggatgactacaagcagtttgatacaaagatgcaacaaaaataccgcccgatattcggcacattattctccaaggatgggacggtaaagacatggcaaagaaagtaagaaaaatacctgctaccctcaatcagttcacatcggagccggtg

SEQ ID NO: 17427 - DNA, 260 bp, Unknown
  Description of Unknown: LeftRegion for integrase B4428 sequence
aaaaagctgagattatatcatttttgcgggtaaaatgcccggaatatgaaaaaagcctaataaatgagtttaatgaaaaatgctatattttaaatttagctgctaacatagaaaaatatagaataggtttacaaagaaatattacaccgtataaaggtgtagaacatagttatatattttaattgtagggaggccccataatggcacctaaaaagaaacaagccagcgcggacgctggtgcatataatcgcgctgttatc

SEQ ID NO: 17428 - DNA, 260 bp, Unknown
  Description of Unknown: LeftRegion for integrase B4429 sequence
cgcggggcgcgacttcaaggcggcggcttacgcagacccgaggcaggctgtgatgaacgacgactacgcccgcctctccgatgccgggaaggacgcggccgccggggcagtgaggggcatccgcgcatccgagggcgcgcgagctcaagcggcggggctggaagatcgtcagatcgcagcgtccgcgtaaaggttgagcgatgcagtcggtaccctgcgacaacccgagacccggcaggcgtgtggcctcctacgcccgc

SEQ ID NO: 17429 - DNA, 260 bp, Unknown
  Description of Unknown: LeftRegion for integrase B4430 sequence
acaggtcttttgattgtgtgtagtgacccggcgcaaaagaaaattgatagagccgattccctgaatattccgattgtttcggagcagcaatggtttgaacttatgccggaacttgaggccgttggaatgtggaacggaaagcaaattctgtttgcggacaatgatggcatctaccgtgttgaagtgggcggtgaaagctgatggccagaaaaaagaatattgctgctggcctcgatgccgtcatctatgcccggtactcg

SEQ ID NO: 17430 - DNA, 260 bp, Unknown
  Description of Unknown: LeftRegion for integrase B4431 sequence
acagaatatgccacaggacgtataccagttcttattagaacacaacggaatatctcaaacagatatttataaggcatttgagcctattttaaaaaatgatatccaagaactattatatcgttgggataaatctgggacaataaaaagagaaaagaatggtaaaacctacaacgtatttatagtgaaataaaggagttcttatgctggaaaaaaatataataatatatttacgaaaatcaagatctgatgacccaggaatg

SEQ ID NO: 17431 - DNA, 260 bp, Unknown
  Description of Unknown: LeftRegion for integrase B4432 sequence
aaatattacctatttaattataacactgcatttatcaaaaagcaacaggaatatgtacaaacaatgtaagaatattttgttgcgaggtgatattatggaaataaccgaagcagagatagaaatcattacaaggcagattgttaaaatcatcataaatcatcaatgtgacgcatcagctgtgggtcctgaggacgcagacgatgaataagctcagagccgcagcctattgccgtgtttcaaccgaccgtgccgagcaatcc

SEQ ID NO: 17432 - DNA, 260 bp, Unknown
  Description of Unknown: LeftRegion for integrase B4433 sequence
tctgcattgcggatttactgaattaaaaaaccgcccctgctaccaacaggaacggcctcttgaatactatacagtgccggagcacgtacaatactccctgaacaagagtattatatcacatttccccggcaccgtgtaggtgttatttttatacgcaaaattaagcaacctcacacatatactaaggaaaggtgatacatatgcaatatgaagaatatcttatctatctccggaagtcccgaagtgatgcttctctggaa

SEQ ID NO: 17433 - DNA, 260 bp, Unknown
  Description of Unknown: LeftRegion for integrase B4434 sequence
ctttccatgcgtcgcctgcccttacagcatagcacgctttttggatatgggcaagcaaaagccccggcgctggtacgatgcagcgccggggataacatggagtgcagcacaaaatcggacaaaggaaattttatgcttgcaggggtcagtataccacactccctgcatatgggcaaaccgcccggaaaggaagtgttatcatgccccgcaaaaaagctcctgcggccgaagcgccgcgcctggtggcttactaccgctac

SEQ ID NO: 17434 - DNA, 260 bp, Unknown
  Description of Unknown: LeftRegion for integrase B4435 sequence
aggttaccatttgcttttccaaaaacagaaatttacaggttgaaagaaatgttcttgaaaatcttttggatacatttgaaaacagaatgaaagctcagattggatgctgaatttctttaagttatttttcagatttgctggatattataggaattatgtagtattgttggtttgcaaaaatcgtatgaaagggtgataaaatgaaaagagtatattgcttgtacagagtatcaactaaaggtcaggttgataaagatgat

SEQ ID NO: 17435 - DNA, 260 bp, Unknown
  Description of Unknown: LeftRegion for integrase B4436 sequence
gcactggttctttgtgtgctgcttgggtatatggggatccaccgcttttatgttggaaagataggcaccggcatcctttggttgttgactcttggatgtttcgggatcggctggatcgtcgacattgtgatgctctgctgcaataagttcgcagacaagagcggcgccatcatcggtttgccagaaacgaggtgatccggatggcaaaaaggatgccagcggcagcgtcggattgtgatggaatgatcggcgtcatttat

SEQ ID NO: 17436 - DNA, 260 bp, Unknown
  Description of Unknown: LeftRegion for integrase B4437 sequence
ggtaaaagatttaataagaattttagtaatataacttctctatctgatatagaatcagcattgttagacttatctgcatatgcttgtgtatttttttctgaaaatgatattaatataaacacttatattattcaagaatatacaatagaatttatatcaaaattagagcatttatcggactaaaatagaaaggtaattctatgaacgttgtaatatatgctaggttctctagtcacaatcaacaggaacagagcattgaa

SEQ ID NO: 17437 - DNA, 260 bp, Unknown
  Description of Unknown: LeftRegion for integrase B4438 sequence
ttcaaggactgccaacaaaagcaatgggatatggttttgttttcgtcaattacaattttagggcgaagaataaacgatacgataaagttcttatcggagctttccgaatatgtcgattataaagttatcgaccaagaaaacgacaagttcctgaaagaagtaggaaaaatacttcaaacattgtataaggaaggacgcttatgaaaacagcagtcatttacgcgagatttagtagcgacaggcaaactgaacagtctatc

SEQ ID NO: 17438 - DNA, 260 bp, Unknown; identical to SEQ ID NO: 15083
  Description of Unknown: LeftRegion for integrase B4439 sequence

SEQ ID NO: 17439 - DNA, 260 bp, Unknown
  Description of Unknown: LeftRegion for integrase B4440 sequence
cgccgcagagatcgaggcgcgggagcagcacctccgcgccgaagtaaagcaaatgcgcgtctggcgcgtggttgcgctggccttgcttgtgatcttggtcgtcatctgtctatggtttgcttgggacgtgaccggcggggatcgtggattgatccgctacggccacgcggcggttggctcgccggtcagagggtgatcgtatgaaagctgttatctacgcccgctactccagcgagaagcagcaggagatcagcatcgag

SEQ ID NO: 17440 - DNA, 260 bp, Unknown
  Description of Unknown: LeftRegion for integrase B4441 sequence
atgtttttgatgatatggtaagactcagtcccgtgaatccggaatatcaacccaaagagctaaggggtgttgatatggaaacatatcacattctcggcgtaccacgtatgcttattcgcgaaataagttaaaaagcccgctcccgtgagaacaggaacgagtgagaaagtgccacagaaaagtaagaaagcggagagagtatgacaaatgcagtgatatatgcccggtatagcccgggaccaaatcaaacggatcaatca

SEQ ID NO: 17441 - DNA, 260 bp, Unknown
  Description of Unknown: LeftRegion for integrase B4442 sequence
taaaaaaaagggggatattatgagaaagttaaattacttagataatatcagttatataaaaataaataataaaaacatatatataaaatcgaataaaaatatacatatattaaataaattattgcaagaaataaaaaataaagaaaaattaaaatgttaagcattaccttaaataaatgaaatatagagaggtgatataaatgaatgttgctatttatgcaagaaaatcaaaagcaactaaaaaaggagaatccatttct

SEQ ID NO: 17442 - DNA, 260 bp, Unknown
  Description of Unknown: LeftRegion for integrase B4443 sequence
acagaatatgccacaggacgtataccagttcttattagaacacaacggaatatctcaaacagatatttataaggcatttgagcctattaaaaaaaatgatatccaagaactattatatcgttgggataaatctgggacaataaaaagagaaaagaatggtaaaacctacaacgtatttatagtgaaataaaggagttattatgctggaaaaaaatataataatatatttacgaaaatcaagatctgatgacccaggaatg

SEQ ID NO: 17443 - DNA, 260 bp, Unknown; identical to SEQ ID NO: 15667
  Description of Unknown: LeftRegion for integrase B4444 sequence

SEQ ID NO: 17444 - DNA, 260 bp, Unknown; identical to SEQ ID NO: 17415
  Description of Unknown: LeftRegion for integrase B4445 sequence

SEQ ID NO: 17445 - DNA, 260 bp, Unknown
  Description of Unknown: LeftRegion for integrase B4446 sequence
gtgattataaatattgtatggcacagaaaatgacaaaaacactgctcgataagggcctgatttccgtggatgaattcaccaaaatcagcgcaagaaaccgccaaactttctccccatatttagcggagattatgccctaaatgacttgatatatatcgattagtacgggaatatgtccatactgaaagtgaggtgagttgatgaaaaggataacaaaaattgaagaaaatagagccttatctattaagaagaaaacccgt

SEQ ID NO: 17446 - DNA, 260 bp, Unknown; identical to SEQ ID NO: 17395
  Description of Unknown: LeftRegion for integrase B4447 sequence

SEQ ID NO: 17447 - DNA, 260 bp, Unknown
  Description of Unknown: LeftRegion for integrase B4448 sequence
gattttgactattacagggcacagaaagtgttggaaaccatgtttatgttcggtatgatttctgtgaatgaattccacaaaatatcggctgtaaaccgcaaaactttctcaccgtttctggcggagattatgggctaaatgacttgctatttctgcgatagtacgggaatatgtcactgcccaaaaagtgaggtgagttgatgaaaaagataacaaaaatcgggacaaatgaacccctggctgagaagaaaaaattgaag

SEQ ID NO: 17448 - DNA, 260 bp, Unknown
  Description of Unknown: LeftRegion for integrase B4449 sequence
gcgcccgcttcccccggctctattgatattgaggcagaggtcgcctattaccgttcccagctggaggaacagaaaaaagcggcggacggatcatctgcttccgctgggcacagctccagcggcacaaaaatggcatgacaaataaaaagagccgcccgtaaaaaggcggctcttgaaataatcacaaatggagggattttatggcagtgtttgctcaggctgtgcggccggactttaacaacgatgtggccgacgtcgtg

SEQ ID NO: 17449 - DNA, 260 bp, Unknown
  Description of Unknown: LeftRegion for integrase B4450 sequence
tcaagacaacgatagccaaggcgacgggggatgcgtctttggatgttataaaggcgctggcagagaagatttcaaccaacatgctgctaagcagcgtgtagctatgggctttaagcataaagaagccccgtggcagtcggcaaactcacacggggcaaagccaatccccataggcaaggaataggcaaggtgattctatcatggccaagaggcgtgccgccatatacgcccgcttttcgtcgcacaatcaacggtcggaa

SEQ ID NO: 17450 - DNA, 260 bp, Unknown
  Description of Unknown: LeftRegion for integrase B4451 sequence
gaaggaatttgacttcattctcgctgaaaggatagtctgtaagatggctgaaaagggccttatttctgatgatgaattacacaaaatctccgagaaaaatcgacttattttctctccttatttaagcgagatttatctttaaatgacttgatatatatcgttatctacgggaatatgtccatacgagagaggtgatataagtgaagaatgtaacgaaaatcaatcaggttgatttctccgtttttaagaagacaagagtg

SEQ ID NO: 17451 - DNA, 260 bp, Unknown
  Description of Unknown: LeftRegion for integrase B4452 sequence
tagttacaacaatatcagcttagaaaagagtgtcattgatgattttgtagaaagtatatttaatgcaataaacaatttagaatataaaataatatatgaagatgaattaagagaagcttgttaaaggcttctttttttgttgtggataaaccttaaaaatgttaaaattaatataagaaattttgaggaggttgaactagatgttagaagaaggacaaaagttaaaatgtgctttatatgttagaacatcaacgacagaa

SEQ ID NO: 17452 - DNA, 260 bp, Unknown
  Description of Unknown: LeftRegion for integrase B4453 sequence
ataaaacaaataaatggtttactgattcccttaaaaaagaaagtaatggtaagtgtgttgttaacaccgctgtaagtagagcaaagaaaaaattagtattgttttgtgatacagactattggtcaactcaggacaaacaattaattggaaaaatcataaataatgcaacagaaattaatcttctataaaggagttaaattatgaacgcagtaatatatgctaggttctctagccacaatcaacaggaacagagcattgaa

SEQ ID NO: 17453 - DNA, 260 bp, Unknown
  Description of Unknown: LeftRegion for integrase B4454 sequence
aatattattttttgctttaattatatatattatatttttctaaccaaaaaaagcgtccagtgctaccaacactgaacgcttagctgatggaggacgccatcaacatgttgtattctcctacccaataaggctgaatacgttatcattataacatatatcagccttcttttttagtattttaaaaagaaaggttgttttttatgcgtaaaaataaaaaagaaattaaaaaagcggttatttatgctcgattttcatgtgat

SEQ ID NO: 17454 - DNA, 260 bp, Unknown; identical to SEQ ID NO: 17247
  Description of Unknown: LeftRegion for integrase B4455 sequence

SEQ ID NO: 17455 - DNA, 260 bp, Unknown
  Description of Unknown: LeftRegion for integrase B4456 sequence
agggtaaaaataaaaagcccctgtttgcagacagagactttttatccgaccaagcataagaggtatctaaaaacaaaaagatttcccttatggtataatcgccttaagcaagctatattataccattttagacaccttccatgcaaggtgttatttttatacccttttttcaatatatttaattaaggagtggttataatatggctgattttgaacatgtaattatctatttgagaaagtcccggtcagatgatccggca

SEQ ID NO: 17456 - DNA, 260 bp, Unknown
  Description of Unknown: LeftRegion for integrase B4457 sequence
ctcattaataaaaactaatttttttacattaaaaagccgcccggctgcaaccaggcggaataaaaagaaaactacttgcatctattggctagatgtgtacttttccccgacagttaaagtataccatttttagcctacactttgcaagaagtgtattttttgtacccaaataatcaaaatatggaaaggaacgatggtatatgaacataggaaatcagttaggaaaactaaaaaaatcagatcaattctgcatttactta

SEQ ID NO: 17457 - DNA, 260 bp, Unknown
  Description of Unknown: LeftRegion for integrase B4458 sequence
aaatggtatgctgaggtggatgcatcttcatataacgtactcaacgcctctatagataatgaatagccatacaacataaaaatcccgctatcgtacggcaatacgatagcgggaagatgtaatatacccaaccacgggctgattactattatattataacatgatcagcccattttaaacaaaggagctgatttttttttatgcttagagccgctttatacgccagattttcttctgaaaaccaacgtgaagaatctatt

SEQ ID NO: 17458 - DNA, 260 bp, Unknown
  Description of Unknown: LeftRegion for integrase B4459 sequence
ttatttcggctgcacaaaagctgacttaatagaaaagcaatcagaaacatatgcagcatacaaggaagtaaaaaatttattagataataacggtgcaagtgcagaaaaacacgaattgatagagttgattatagcaatggatgataaagacgttacaatgcttcttacacttgcaaaacaactgaaaggaagaagttaatatgaaagcaagtaatatgaatcaaattgatattatgtatcttcgtaaaagtcgtgaagat

SEQ ID NO: 17459 - DNA, 260 bp, Unknown
  Description of Unknown: LeftRegion for integrase B4460 sequence
agggtaaaaataaaaagcccctgtttgcagacagagactttttatccgaccaagcataagaggtatctaaaaacaaaaagatttcccttatggtataatcgccttaagcaagctatattataccattttagacaccttccatgcaaggtgttatttttatacccttttttcaatatatttaattaaggagtggttataatatggctgattttgaacatgtaattatctatttaagaaagtcccggtcagatgatccggca

SEQ ID NO: 17460 - DNA, 260 bp, Unknown
  Description of Unknown: LeftRegion for integrase B4461 sequence
tattcatcttggcattttctacaatatcaaacgcgtttgggaatccaggccggaccccagtatataatcagcccctctatatgaggaagtacgggcccattctttccatcattgagaacggcctgctgcttattggccttgtctggatgatatattccggtatcactagttttatgagtctgttttaagagggaattgtcatggctcaaagatgtgtcatatacgcgcgctattcgtccgatagacagcgtgaagaatcc

SEQ ID NO: 17461 - DNA, 260 bp, Unknown; identical to SEQ ID NO: 17459
  Description of Unknown: LeftRegion for integrase B4462 sequence

SEQ ID NO: 17462 - DNA, 260 bp, Unknown
  Description of Unknown: LeftRegion for integrase B4463 sequence
atcaaagacttagatagctataaactatctagcttgtgcgaggagcagaatatacaatgtagtaactatcatactgcacttgctgatgcactagcgtgtggaatactctttgtcgacattattaagattgtcaaagaagttaaaaatgtagaagaattataaacgttaaaaatactcaaaaataaaaaggtgaattaaaaatgaatgaaaaaattaatgcggtgatttatgctaggttttctagtcacaatcagcaagaa

SEQ ID NO: 17463 - DNA, 260 bp, Unknown
  Description of Unknown: LeftRegion for integrase B4464 sequence
actacaactattttatggcgcagaggttagctaaggatatgcttgaaaaaagacttatctcgttggaagaattcaacaaattaacaaagaaaaatcgtgatacattctctccatttttagccgagattatgccgaaaacaacttgacaattgtgacatttagagtgatgtatatacaagtgaaagtggaggtgagttatcatgaaaaaggttacgaaaattgacaaaattcaacctgcaaaaaatgccgagaataaactg

SEQ ID NO: 17464 - DNA, 260 bp, Unknown
  Description of Unknown: LeftRegion for integrase B4465 sequence
tgaaaatggaaatataacttataattacaacaaataacaaaaaagtcccctgctaccaacagaggacaaaaactaacctatcaaggcaagtgccaagatataatcagcctagacaactgtattatatcacacaaaacacctgccttgcaaggtgttatttttatacccaaaaacatattttttataaggagtgatataatatgtcatattgtatttatttaagaaaatctcgagcagataaagaactttgctcagaggaa

SEQ ID NO: 17465 - DNA, 260 bp, Unknown; identical to SEQ ID NO: 13412
  Description of Unknown: LeftRegion for integrase B4466 sequence

SEQ ID NO: 17466 - DNA, 260 bp, Unknown
  Description of Unknown: LeftRegion for integrase B4467 sequence
actgatgaaaaagaaactgtaaattttgacactaaagaacgaaacgagataatctcaaaaattttagccagaatgattttagataaaacgaaaaagtaatttttaagctgtaatttttaaccgtacaaaataaaggggtcaagcatatattatcatcttgataagggcttgaccctaacttattgaagaaaggaaaaaccatgaacacaaatcagataccagtagtaagttacagccgattcagctcggatatgcagcac

SEQ ID NO: 17467 - DNA, 260 bp, Unknown; identical to SEQ ID NO: 17459
  Description of Unknown: LeftRegion for integrase B4468 sequence

SEQ ID NO: 17468 - DNA, 260 bp, Unknown
  Description of Unknown: LeftRegion for integrase B4469 sequence
ccaacattttactaaatctgtaaaaaagacgcttactattcctcaatggttaaacgatgaagcaaaacgtagaagcataaatttttctaaagttctgcaggttgctttaatgaatgaaattaaaatcaataatatacaataaataaaatgcaaaaagaggtaatagtttattctattacctcttttttaggaggaaaatcatgagaaatgtagccatatatgtaagagtttctactatgcatcaagctgaacaaggatac

SEQ ID NO: 17469 - DNA, 260 bp, Unknown; identical to SEQ ID NO: 17468
  Description of Unknown: LeftRegion for integrase B4470 sequence

SEQ ID NO: 17470 - DNA, 260 bp, Unknown
  Description of Unknown: LeftRegion for integrase B4471 sequence
cgatcatttcagcgctgattgaccgaataacggtctatgacgattgttcactggacatccacttcaggatttccgcggaacagttccttggaaaagccgcgtaacgcaaatgtcgacaactcccattggaaagaatgatataatcaatcaagccaatcatccgggtgaggtggttggctcttttaatgggaggattgaatatgaaacgagtctattgtctttaccgcgtttctacagttggacaggtggatcatgacgat

SEQ ID NO: 17471 - DNA, 260 bp, Unknown
  Description of Unknown: LeftRegion for integrase B4472 sequence
gccaacattttactaaatctgtaaaaaagacgcttactattcctcaatggttaaacgatgaagcaaaacgtagaaacataaatttttctaaagttctgcaggttgctttaatgaatgaaattaaaatcaataatatacaataaataaaatacaaaaagaggtaatagtttattctattacctctttttaggaggaaaatcatgagaaatgtagccatatatgtaagagtttctactatgcatcaagctgaacaaggatac

SEQ ID NO: 17472 - DNA, 260 bp, Unknown; identical to SEQ ID NO: 17455
  Description of Unknown: LeftRegion for integrase B4473 sequence

SEQ ID NO: 17473 - DNA, 260 bp, Unknown
  Description of Unknown: LeftRegion for integrase B4474 sequence
ccaacattttactaaatctgtaaaaaagacgcttactattcctcaatggttaaacgatgaagcaaaacgtagaaacataaatttttctaaagttctgcaggttgctttaatgaatgaaattaaaatcaataatatacaataaataaaatgcaaaaagaggtaatagtttattctattacctcttttttaggaggaaaatcatgagaaatgtagccatatatgtaagagtttctactatgcatcaagctgaacaaggatac

SEQ ID NO: 17474 - DNA, 260 bp, Unknown
  Description of Unknown: LeftRegion for integrase B4475 sequence
acgatacgttcaatgccgtggaggcggaacggctgaagcgggagaaaaagctcggcagagacaacattccgccaaaggaaaagcccgttcccgttatattcacggagttcagaacaaaaaaggcagcacagaaatttaccgaccctatcacgcaggctgagtacgcatacggtcggatagaaggcaaggtgaacgaataaatggcaatggctcagaacatcacattcattccggcggtaaaaactgtgggaacgcagaag

SEQ ID NO: 17475 - DNA, 260 bp, Unknown
  Description of Unknown: LeftRegion for integrase B4476 sequence
gccaacattttactaaatctgtaaaaaagacgcttactattcctcaatggttaaacgatgaagcaaaacgtagaaacataaatttttctaaagttctgcaggttgctttaatgaatgaaattaaaatcaataatatacaataaataaaatgcaaaaagaggtaatagtttattctattacctctttttaggaggaaaatcatgagaaatgtagccatatatgtaagagtttctactatgcatcaagctgaacaaggatac

SEQ ID NO: 17476 - DNA, 260 bp, Unknown
  Description of Unknown: LeftRegion for integrase B4477 sequence
acagccacattccgcttcttgaccgtgtgtctgctgccggtattgttatggatatctaccggatgcgccgtgccagagatgagcttaccggccccgatgaccctctgcctgatgaggatattgtccaaaaagcagttgattctggaagagaatccgtgtatgttaaaaaagagaattattaaacttagggggaattaaatatgtatcgagaactttcttatcgttctgatgagatcatcgagtacctgcgaaaatccagg

SEQ ID NO: 17477 - DNA, 260 bp, Unknown
  Description of Unknown: LeftRegion for integrase B4478 sequence
tagaattacagtaaaatacaaaaaaatccccggtgttaccagcaccagggaaaacgagaaaactatagggtgtttggaacacagtacaattctctccctcacaaagattattgtatcacaaaaatccggcaccgtataggtgttatttttatacgcaaaattaagcaacctcacacatatactaaggaaaggtgatacatatgcaatacgaagaatatcttatctatctccggaagtcccgaagtgatgcttctctggaa

SEQ ID NO: 17478 - DNA, 260 bp, Unknown; identical to SEQ ID NO: 17473
  Description of Unknown: LeftRegion for integrase B4479 sequence

SEQ ID NO: 17479 - DNA, 260 bp, Unknown
  Description of Unknown: LeftRegion for integrase B4480 sequence
ttttgctgacatcagaaaaatagataaactaaaaaccgtccagttgcagctggacggaataaaaagaaaaactacttgcatctataggttagatgtgtacttttccccgacagttaaagtataccatttttaacctacactttgcaagaagtgtattttttgtacccaaataatcaaaatatggaaaggaacgatggtatatgaacataggaaatcagttaggaaaactaaaaaaatcagatcaattctgcatttactta

SEQ ID NO: 17480 - DNA, 260 bp, Unknown; identical to SEQ ID NO: 17475
  Description of Unknown: LeftRegion for integrase B4481 sequence

SEQ ID NO: 17481 - DNA, 260 bp, Unknown
  Description of Unknown: LeftRegion for integrase B4482 sequence
aacaactaaaaaaactaaaaaacaaagaaaacgcataaaaaaagtcccctgctaccaacagaggacaaagatactatagccttaggtgtttaaagcagatataatatccatacgcaagtttattatatcacgcttttcaacacctttcaaggtgttatttttatatccaaaaacatattttttataaggagtgatataatatgtcatattgtatttatttaagaaaatctcgagcagataaagaactttgctcagaggaa

SEQ ID NO: 17482 - DNA, 260 bp, Unknown
  Description of Unknown: LeftRegion for integrase B4483 sequence
gcgggatttttaaaaataacgttaccaaaaaaacaaactatctgattgtcggcaacgaagggaatccgtgctgggcgtattcctgctacggccgcaaggtggatgctgcgatcaagttgcgcaaatccggtgtcccgattgtgattgtgaacgaaacggatttctgggatatcctcgaagatctatagcgaggtgctagcatgagaattgctatctatgcgcgaaagagcgcattttcagaaaaaagtgagagtgtaaac

SEQ ID NO: 17483 - DNA, 260 bp, Unknown; identical to SEQ ID NO: 17479
  Description of Unknown: LeftRegion for integrase B4484 sequence

SEQ ID NO: 17484 - DNA, 260 bp, Unknown
  Description of Unknown: LeftRegion for integrase B4485 sequence
taatggcattacttaaaataactatatataaaggtacaaaaaaagaaataaaagaattggaagtaaatgataaattaaccgatgaagagttagaagaaatagcaaaagatgaatttttaagtgaatgtaactatgaatggaagatttataagaaaaggtaatagatttaatgctattaccttttttagtggaggaaaaatatgagaaatatagccatatatgtaagagtttctactatgcatcaagctgaacaaggatac

SEQ ID NO: 17485 - DNA, 260 bp, Unknown
  Description of Unknown: LeftRegion for integrase B4486 sequence
ccaacattttactaaatctgtaaaaaagacgcttactattcctcaatggttaaacgatgaagcaaaacgtagaaacataaatttttctaaagttctgcaggttgctttaatgaatgaaattaaaatccataatatacaataaataaaatacaaaaagaggtaatagtttattctattacctcttttttaggaggaaaatcatgagaaatgtagccatatatgtaagagtttctactatgcatcaagctgaacaaggatac

SEQ ID NO: 17486 - DNA, 260 bp, Unknown; identical to SEQ ID NO: 17459
  Description of Unknown: LeftRegion for integrase B4487 sequence

SEQ ID NO: 17487 - DNA, 260 bp, Unknown
  Description of Unknown: LeftRegion for integrase B4488 sequence
acataaaatctcccacaaattgatatgtgtatatttatattataccatatattttattacatatcaagaggtgaataaaaaaacgccccgctcgatgcgccaacaccgaacggggagagggatatgtataaaatacacactccacaacatctgtattttatcatatcctggcaaaaaaatcaataggagtgataaaaaatatgcaaaccgccgtgatatacgcccggtattcgtccgacaagcaaacggagcagtccatc

SEQ ID NO: 17488 - DNA, 260 bp, Unknown
  Description of Unknown: LeftRegion for integrase B4489 sequence
taatggcattacttaaaataactatatataaaggtacaaaaaaagaaataaaagaattggaagtaaatgataaattaaccgatgaagagttagaagaaatagcaaaagatgaatttttaagtgaatgtaactatgaatggaagatttataagaaaaggtaatagatttaatgctattaccttttttagtggaggaaaaatatgagaaatgtagccatatatgtaagagtttctactatgcatcaagctgaacaaggatac

SEQ ID NO: 17489 - DNA, 260 bp, Unknown; identical to SEQ ID NO: 15738
  Description of Unknown: LeftRegion for integrase B4490 sequence

SEQ ID NO: 17490 - DNA, 260 bp, Unknown
  Description of Unknown: LeftRegion for integrase B4491 sequence
cagggtaaaaataaaaagcccctgtttgcagacagagactttttatccgaccaagcataagaggtatctaaaaacaaaaagatttcccttatggtataatcgccttaagcaagctatattataccattttagacaccttacatgcaaggtgttatttttataccctttttcaatatatttaattaaggagtggttataatatggctgattttgaacatgtaattatctatttgagaaagtcccggtcagatgatccggca

SEQ ID NO: 17491 - DNA, 260 bp, Unknown
  Description of Unknown: LeftRegion for integrase B4492 sequence
ataactgtggtgcagactggaacgaacaggcagtaaagaaagcaaaggaatatttggactattcttctttctctcgttccgggctgattggtcagctgaaatatgaaggctttacaactgagcaggccgaatacggtgtaacccagaacggcctataattgtaatttcctgccacagcgggggcaaaggggtgaaatgcagtgcgggcgtttatctatggccgcttttccagccataagcagcaggaattaagcatagag

SEQ ID NO: 17492 - DNA, 260 bp, Unknown
  Description of Unknown: LeftRegion for integrase B4493 sequence
cttttgaaatattaaacaaaaataaaaccgcccctgcttatagcaggaacggcttaatgaatactatacagtgccgagggcacgtacaatactccctgaacaagaatattgtatcacacttccttggcacctgtacaggtgttatttttatacgcaaaattgtgcgacgtcgcacatatatactaaggagggtgatacatatgcaacaatatgaagaatatcttatctatctccggaaatcccgaagtgatgcctcactg

SEQ ID NO: 17493 - DNA, 260 bp, Unknown
  Description of Unknown: LeftRegion for integrase B4494 sequence
ataactgtggtgcagactggaacgaacaggcagtaaagaaagcaaaggaatatttggactattcttctttctctcgttccgggctgattagtcagctgaaatatgaaggctttacaactgagcaggccgaatacggtgtaacccagaacggcctataattgtaatttcccgccacagcgggggcaaaggggtgaaatgcagtgcgggcgtttatctatggccgcttttccagccataagcagcaggaattaagcatagag

SEQ ID NO: 17494 - DNA, 260 bp, Unknown; identical to SEQ ID NO: 17455
  Description of Unknown: LeftRegion for integrase B4495 sequence

SEQ ID NO: 17495 - DNA, 260 bp, Unknown; identical to SEQ ID NO: 17488
  Description of Unknown: LeftRegion for integrase B4496 sequence

SEQ ID NO: 17496 - DNA, 260 bp, Unknown; identical to SEQ ID NO: 13002
  Description of Unknown: LeftRegion for integrase B4497 sequence

SEQ ID NO: 17497 - DNA, 260 bp, Unknown
  Description of Unknown: LeftRegion for integrase B4498 sequence
gtagaaattgggcgggtagaccagaaagaaagcaaattaaaaagtcatcaaaatcgcattcaagcgaagcctcatgccaacagcaacatgatctaaacgaaaagcattttgatttctggaatttaaaatagccgcttccaacatggtcgaaatcgactagtttagaagcggctattttactaattaaaggagatgttattatgttaaatgcagtaatctatgctcgcttctcgtcagatatgcagcgtgaagaaagcata

SEQ ID NO: 17498 - DNA, 260 bp, Unknown; identical to SEQ ID NO: 17479
  Description of Unknown: LeftRegion for integrase B4499 sequence

SEQ ID NO: 17499 - DNA, 260 bp, Unknown
  Description of Unknown: LeftRegion for integrase B4500 sequence
taatggcattgcttaaaataactatatataaaggtacaaaaaaagaaataaaagaattggaagtaaatgataaattaaccgataaagagttagaagaaatagcaaaagatgaatttttaagtgaatgtaactatgaatggaagatttataagaaaaggtaatagatttaatgctattaccttttttagtggaggaaaaatatgagaaatgtagccatatatgtaagagtttctactatgcatcaagccgaacaaggatat

SEQ ID NO: 17500 - DNA, 260 bp, Unknown; identical to SEQ ID NO: 17456
  Description of Unknown: LeftRegion for integrase B4501 sequence

SEQ ID NO: 17501 - DNA, 260 bp, Unknown
  Description of Unknown: LeftRegion for integrase B4502 sequence
gaattactagatgctggtattatgacacaagaagaatttgacttgaagaaaaaagaattattaaatttataaactaaaaaatcacccactggcggcaaccagtaagtgatcggtgcaaaataaaattaaccgctcagttaatgtcttttttgcacccttagtatatcaaatttcataagatagtacaagggagtgatgatatggaacagtattgcctgtatcttagaaaatcaagaagtgatcaggaagctgaagcgcgc

SEQ ID NO: 17502 - DNA, 260 bp, Unknown; identical to SEQ ID NO: 17455
  Description of Unknown: LeftRegion for integrase B4503 sequence

SEQ ID NO: 17503 - DNA, 260 bp, Unknown; identical to SEQ ID NO: 17488
  Description of Unknown: LeftRegion for integrase B4504 sequence

SEQ ID NO: 17504 - DNA, 260 bp, Unknown; identical to SEQ ID NO: 17488
  Description of Unknown: LeftRegion for integrase B4505 sequence

SEQ ID NO: 17505 - DNA, 260 bp, Unknown
  Description of Unknown: LeftRegion for integrase B4506 sequence
actgatgaaaaagaaactgtaaattttgacactaaagaacgaaacgagataatctcaaaaattttagccagaatgattttagataggacgaagaagtaatttgtaagctgtaaattttaaccgtacaaaataaaggggtcaagcatatattatcatcttgataagggcttgacccccaattattgaagaaaggaaaaaccatgaacacaaatcagataccagtagtaagttacagccgattcagctcggatatgcagcat

SEQ ID NO: 17506 - DNA, 260 bp, Unknown
  Description of Unknown: LeftRegion for integrase B4507 sequence
attatgattatttcagagcacaggaagttgcaaaatcaatgctagattctggacttatttccttgttggaattcaacaaattaacgctccttaaccgtcaaacattctctccgctatatgtagaaataatgccggaaataacttgataaatacagcttttagagtgatgtatatacactgacgaagggaggtgaactaccgtgaagaaggttacaaaaatcgacaaaatccagaatgtaacaagcaaaaaacagaagctt

SEQ ID NO: 17507 - DNA, 260 bp, Unknown; identical to SEQ ID NO: 17456
  Description of Unknown: LeftRegion for integrase B4508 sequence

SEQ ID NO: 17508 - DNA, 260 bp, Unknown
  Description of Unknown: LeftRegion for integrase B4509 sequence
tgtcacttttgaaaaaattcgctgatttttacggtgtgacgcttgattatttcggtgtaacgacaaacgatgaaatatttgaattattaagccgtgcgcgtgaggtattcaacaatgacgctatttcaacgcaaacaaaagaggaattatacaaagaatttatgcgtttatatcttaatttgaacaaggaatgatgcatcatgaaaaacaaacacgatataaaagacatacgcgctgccgtttatatccgatattcttct

SEQ ID NO: 17509 - DNA, 260 bp, Unknown; identical to SEQ ID NO: 17455
  Description of Unknown: LeftRegion for integrase B4510 sequence

SEQ ID NO: 17510 - DNA, 260 bp, Unknown; identical to SEQ ID NO: 17476
  Description of Unknown: LeftRegion for integrase B4511 sequence

SEQ ID NO: 17511 - DNA, 260 bp, Unknown; identical to SEQ ID NO: 17455
  Description of Unknown: LeftRegion for integrase B4512 sequence

SEQ ID NO: 17512 - DNA, 260 bp, Unknown; identical to SEQ ID NO: 13018
  Description of Unknown: LeftRegion for integrase B4513 sequence

SEQ ID NO: 17513 - DNA, 260 bp, Unknown
  Description of Unknown: LeftRegion for integrase B4514 sequence
attatttattctgtttatctgattctccatatccaaaagtagagatttccctaacagaagaagagcaattactgcttgacgcattccgttccgctaccccacaaggtagattcaacattattactacctgtatgtgtgagaagcgaaaaggggacaacgaaagtgccgggtgattgattttgtagagtggaggaagaaccatgtatgaggatataaaaacagcctgcctatacgttagattctcaagccataaccagact

SEQ ID NO: 17514 - DNA, 260 bp, Unknown
  Description of Unknown: LeftRegion for integrase B4515 sequence
agggtaaaaataaaaagcccctgtttgcagacagagactttttatccgaccaagcataagaggtatctaaaaacaaaaagatttcccttatggtataatcgccttaagcaagctatattataccatttcagacaccttctatgcaaggtgttatttttatacccttttttcaatatatttaattaaggagtggttataatatggctgattttgaacatgtaattatctatttaagaaagtcccggtcagatgatccggca

SEQ ID NO: 17515 - DNA, 260 bp, Unknown
  Description of Unknown: LeftRegion for integrase B4516 sequence
cgatctggactaccgcagagcacagacaatcgcaaagaagatgctcgatgacggcctcatttctgtggctgaattcaacaaattaaccgccatcaatcgggaaactttctctcccttgttcgcggaaataatgccgaaaatcccttgatatgtagtccctttagagtgatgtatagacgtacggaaaggaggtacttcccttgaaaaaagttacgaaaatcgcggaaacaacgagcgcaaacgttaaactcaagaagatc

SEQ ID NO: 17516 - DNA, 260 bp, Unknown; identical to SEQ ID NO: 13422
  Description of Unknown: LeftRegion for integrase B4517 sequence

SEQ ID NO: 17517 - DNA, 260 bp, Unknown
  Description of Unknown: LeftRegion for integrase B4518 sequence
attatgattatttcagagcacaggaagtcgtaaaatcgatgctggattctggacttatttccttgttggaattcaacaaattaacgctccttaaccgccaaacattctcaccgctatatgtagaaataatgccggaaataacttgataaatacagcttttagagtgatgtatatacactgacgaagggaggtgaactaccgtgaagaaggttacaaaaatcgacaaagtaccgaatgtaacaagcaaaaaacagaagctt

SEQ ID NO: 17518 - DNA, 260 bp, Unknown; identical to SEQ ID NO: 17456
  Description of Unknown: LeftRegion for integrase B4519 sequence

SEQ ID NO: 17519 - DNA, 260 bp, Unknown; identical to SEQ ID NO: 17488
  Description of Unknown: LeftRegion for integrase B4520 sequence

SEQ ID NO: 17520 - DNA, 260 bp, Unknown
  Description of Unknown: LeftRegion for integrase B4521 sequence
gcggtattattactcaagaagaatttgaccagaaaaaatcagaacttttataaaaagaaccggctcctgctaccaacgggaaccggttttttgaaaaataagacaatctcggtgataatcttacctacacattaagtatatcatctccgggattgccgtacaagtgtaaaaaaggagaatgatgaaatgaatgaatcagtatgcatctatttaaggaaatccagagcgatcgggaagctgaagcacatggagagggcgaa

SEQ ID NO: 17521 - DNA, 260 bp, Unknown; identical to SEQ ID NO: 14232
  Description of Unknown: LeftRegion for integrase B4522 sequence

SEQ ID NO: 17522 - DNA, 260 bp, Unknown; identical to SEQ ID NO: 17492
  Description of Unknown: LeftRegion for integrase B4523 sequence

SEQ ID NO: 17523 - DNA, 260 bp, Unknown; identical to SEQ ID NO: 17479
  Description of Unknown: LeftRegion for integrase B4524 sequence

SEQ ID NO: 17524 - DNA, 260 bp, Unknown
  Description of Unknown: LeftRegion for integrase B4525 sequence
tgttctgtttatccgattcaccttacccaaaagtagagatttccctaacaggaaaagagaaaatccttattgacgcataccgtgctgctgatgacatgggacagttgaacataatctatgtctgcctggatgaaatgaaaaaagcaaaaggggacagcgaaagtgccgtgtgattgattttgtagagtggaggaagaaccatgtatgaggatataaaaacagcctgcctatatgttagattctcaagccataaccagact

SEQ ID NO: 17525 - DNA, 260 bp, Unknown; identical to SEQ ID NO: 17488
  Description of Unknown: LeftRegion for integrase B4526 sequence

SEQ ID NO: 17526 - DNA, 260 bp, Unknown; identical to SEQ ID NO: 17455
  Description of Unknown: LeftRegion for integrase B4527 sequence

SEQ ID NO: 17527 - DNA, 260 bp, Unknown; identical to SEQ ID NO: 17455
  Description of Unknown: LeftRegion for integrase B4528 sequence

SEQ ID NO: 17528 - DNA, 260 bp, Unknown
  Description of Unknown: LeftRegion for integrase B4529 sequence
catcgtcaataaaacttaaattaaaaaccgctcctgcgccaacagaaacggtcttaaatgtacatccgaagatatacacttttactttggtcggtaatattgtatcatctttggaacagtcacgcaagcggaacacttgttctttgctggctgttatttttgtaccttattttgcgtacacttaaaaggaggatgatattatgtatgaattaggggaatatcttatctatcttcgaaagtcaagaagtgattccgaacta

SEQ ID NO: 17529 - DNA, 260 bp, Unknown
  Description of Unknown: LeftRegion for integrase B4530 sequence
tatgaaaaagttaattgttgctgcattgttggctttgtgtattatgccagcagccaaataaaaaaagcccctatcaaggggctttatttctacctaaaacaaaaataaccgccatggatagcggcctcggcggttattttaagatatacattttattatttttactaaattaattatatcactaaaaggaacattacacaatgacaaaagacttacaaacaggcgttatatacgccagatattcaagcgataaacaaaga

SEQ ID NO: 17530 - DNA, 260 bp, Unknown
  Description of Unknown: LeftRegion for integrase B4531 sequence
acagccacattccgcttcttgaccgtgtgtctgctgccggtattgttatggatatctaccggatgcgccgtgccagagatgagcttaccggtcccgatgaccctctgcctgatgaggatattgtccaaaaggcagttgattctggaagagaatccgtgtatgttaaaaaagagaattattaaacttagggggaattaaatatgtatcgagaactttcttatcgttctgatgagatcatcgagtacctgcgaaaatccagg

SEQ ID NO: 17531 - DNA, 260 bp, Unknown
  Description of Unknown: LeftRegion for integrase B4532 sequence
tgttctgtttatctgattcaccttacccaaaagtagagatttccctaacagaaaaagagaaaatccttattgacgcataccgtgctgctaatgacatgggacagttgaacataatctatgtctgcctggatgaaatgaaaaaagcaaaaggggacaacgaaagtgccgtgtgattgatttagtagagtggaggaagaaccatgtatgaggatataaaaacagcctgcctatacgttagattttcaagccataaccagact

SEQ ID NO: 17532 - DNA, 260 bp, Unknown; identical to SEQ ID NO: 13171
  Description of Unknown: LeftRegion for integrase B4533 sequence

SEQ ID NO: 17533 - DNA, 260 bp, Unknown
  Description of Unknown: LeftRegion for integrase B4534 sequence
cgaacaatagataccctatggatatggtatctataccgtatctatagggtagcgatacatcgcgtgcgcgcgtgcgtgtgcgcgcgatcgtgcgcgcactgtctctgtacctgtatctgtatctgagactgtatctgtaatctgtttctgattctgaatatctactactgcaaatctatcgttagaagggggtggcgctgttgccgagaaaacctgcaaagcacccggcgaagccgaagcggggcaagaagctggaaatc

SEQ ID NO: 17534 - DNA, 260 bp, Unknown; identical to SEQ ID NO: 13377
  Description of Unknown: LeftRegion for integrase B4535 sequence

SEQ ID NO: 17535 - DNA, 260 bp, Unknown; identical to SEQ ID NO: 17473
  Description of Unknown: LeftRegion for integrase B4536 sequence

SEQ ID NO: 17536 - DNA, 260 bp, Unknown
  Description of Unknown: LeftRegion for integrase B4537 sequence
tgcgcttcattgtaagggaggacttaaatggaagcggaagagaacggcgcgaataatgaattattatatctttcggcgtggagtattatgagaaaagcctataaagcagggaatatcgaatattccgtgttgaaagaattgaacgaaagagtagcaaaaaggctgtcggtgcgagtaataagtttaagggacgtaagaaaatgagtttggctaatgattataaaggtatatccgatagagtaacggtaattgcggcaacc

SEQ ID NO: 17537 - DNA, 260 bp, Unknown
  Description of Unknown: LeftRegion for integrase B4538 sequence
ccctgacaaagattaggacgactattccaatagttacttaaaccgcccctgcgtaagcaggaacggtctttaagatgctatacagaccaaaggtcaatatagtctaccctgaacaagtagattatatcacaaacctttggcacctgtacaggtgtattttttatactcttttttcataaatttacaaaggaagtgatagaatgtcatattgtatttatttaagaaaatcccgaaaggatttagaagcggaacagcacgga

SEQ ID NO: 17538 - DNA, 260 bp, Unknown
  Description of Unknown: LeftRegion for integrase B4539 sequence
ctcctgaatcttgtaacgacaagaaaatgcgttttaaagatgcacttcttgctttaaaagatgaatctatgcccccaaaagaaaaaaatcatttattaaagaaatgtatagaaagaattgattatgatatagagggagtaagatatcactcaaaagtcaaattggatgtttattttaaattttaagcgaggtgtttcaaaatgcaggaaaatgaaacttatgtaatctatttgagaaagtctcgtgcagatagcgaaaaa

SEQ ID NO: 17539 - DNA, 260 bp, Unknown
  Description of Unknown: LeftRegion for integrase B4540 sequence
aggatgctttgatccaaaaggtcggtaatcagtaaaataaaatctgccccggtattggcgtaccggagcagatcaggaatcatatcgggagtaccgatataactcacctcgcaagtgaaattgtatcattctcccggtaaaattacaagcaccgggtatttttatgccctgctgccataaaatatacgggaggaatggatatgttcactgtaggaatctatgcccggaagtccgtttaccgtgacaactcggactctgtc

SEQ ID NO: 17540 - DNA, 260 bp, Unknown
  Description of Unknown: LeftRegion for integrase B4541 sequence
ttttgctgacatcagaaaaatagataaactaaaaaccgtccagttgcagctggacggaataaaaagaaaaactacttgcatctataggttagatgtgtacttttccccgacagttaaagtataccatttttaacctacactttgcaagaagtgtattttttgtacccaaataatcaaaatatggaaaggaacgatggtatatgaacataggaaatcagttaggaaaactaaaaaaatcagatcaattctgcatttaccta

SEQ ID NO: 17541 - DNA, 260 bp, Unknown
  Description of Unknown: LeftRegion for integrase B4542 sequence
aaagcccttgtgctggtaacacaagagcctttatataacgacacttacataagcataaagctccaatgataaatatcgccctaagcaagcatattatatcacctggagcaccgcttatgcaagtggtgttatttttgtactcatttttaaggttgtattgttgcagcttatatattcaagagaaagaaggttgaaataatatgctatcttttaataatattattatttatcttaggaaatcacgctctgatgaccctacg

SEQ ID NO: 17542 - DNA, 260 bp, Unknown
  Description of Unknown: LeftRegion for integrase B4543 sequence
gacagattccgaatatttgcggaggttattatggaattacggaacgacgatgccagggaatggatcgcccgggcggagcggaactggatcaaagcgtgcgccctgtacggtgaagaccatccgatctcaaaggcatacctgaaagatctggaaaaccgggagaacgctgatcgaattttaaaagagttggaggactagatatgagaatcgcaatctatgctcgaaaaagcgctttttccgataaaagcgaaagcgtgcac

SEQ ID NO: 17543 - DNA, 260 bp, Unknown
  Description of Unknown: LeftRegion for integrase B4544 sequence
aaaaaacaaactatctgatcgtcgggaacgaagggaatccgtgttgggcgtattcctgctacggccgcaaggtggatgctgcgatcaagctgcgcaaatccggcatcccgattgtgattgtgaacgaaacggatttctgggatatcctcgaagatctgtagcaacgctgatcgaattttaaaagagttggaggactatatatgagaattgcaatctacgctcgtaaaagcgcgttttccgataaaagcgaaagcgtgcac

SEQ ID NO: 17544 - DNA, 260 bp, Unknown
  Description of Unknown: LeftRegion for integrase B4545 sequence
taaaaagactatgttttgacattgattttggaacaaaagtgctaaaaaagaaaggtgcaaattatcatatagctattagcagcattctcagcgcatatcaaagaataagaaagctatgcggatatacagatcccataagaataaattggagtttttctttatcgctcgatcaagtccttccagattatgaggggtaatatatggcgcgtaaaacagataaaccattgtcaaatattgcagttatatacgctcggttctcc

SEQ ID NO: 17545 - DNA, 260 bp, Unknown
  Description of Unknown: LeftRegion for integrase B4546 sequence
aatgccccggcgttttcgtgtttagctacgaattaaacgaagtgcgcgacacggacacataccagttaagccccgtttggcgcggttatctcaataggcaccgccgatacttggaatagatagaaaaatgccctgcaacgggcacaaccattgcagggctgtttgtccgctaccaacgaacaaagcaaggtgattttaacatggaaaagaaacgcgccgctatatacgcccgcttttcgtcgcacaatcaacgttccgaa

SEQ ID NO: 17546 - DNA, 260 bp, Unknown
  Description of Unknown: LeftRegion for integrase B4547 sequence
ctcctgaatcttgtaacgacaagaaaatgcgttttaaagatgcgcttcttgctttaaaagatgaatctatgcccccaaaagaaaaaaatcatttattaaagaaatgtatagaaagaattgattatgatatagagggagtaagatatcactcaaaagtcaaattggatgtttattttaaattttaagcgaggtgtttcaaaatgcaggaaaatgaaacttatgtaatctatttgagaaagtctcgtgcagatagcgaaaaa

SEQ ID NO: 17547 - DNA, 260 bp, Unknown
  Description of Unknown: LeftRegion for integrase B4548 sequence
gcaccatcaattgcctgcgggccaaccaaatggccgtggcgctctttgatgccggacttattacggctgatgagctgactgctttgaaggctgctaaccagcgcagttttgccgcatatttatcagatttatattgatattcgacttgctatatcagttcgtttattggatatatacgtatggaaagtaggtgaaaactgatgaaaacagtaacaaaaatcatgccggacaaaccgaagaaaaagaagctccgtgtggca

SEQ ID NO: 17548 - DNA, 260 bp, Unknown
  Description of Unknown: LeftRegion for integrase B4549 sequence
gcaataaggaacataagaagctgaaacagctccgaatatgtaaccatagcaccacctcccttcatcagggatggtgggaataaccgccaaccgcggacgcggctgcgccttattttaagaatattataatagccgacaaaatacaagaaaaaatcccgcccctttcccgggcgggaatattactatctgagggtgaaaccatgtcttacgcaatatacctccgaaaatcacaggctgatttagaggcggaagcctccggc

SEQ ID NO: 17549 - DNA, 260 bp, Unknown
  Description of Unknown: LeftRegion for integrase B4550 sequence
atttacaaatggggacattgagtccacataacgaaagctgtcggtcatatcagctaaataattcacatctcttctcgattatcatacacctcgaagatctaccaaattcgctctaatcaatgataaaacagttgaattcggttgaaatttgatcaattttatccactacattgtattgaatcatccatgaggtttcgtgcatggctagcgaaaatgacaaaaatcatagagttagggtcgcgcagtacttgaggatgtct

SEQ ID NO: 17550 - DNA, 260 bp, Unknown
  Description of Unknown: LeftRegion for integrase B4551 sequence
ttttgctgacatcagaaaaatatataaactaaaaaccgtccagttgcagctggacggaataaaaagaaaaactacttgcatctataggttagatgtgtacttttccccgacagttaaagtataccatttttaacctacactttgcaagaagtgtattttttgtacccaaataatcaaaatatggaaaggaacgatggtatatgaacataggaaatcagttaggaaaactaaaaaaatcagatcaattctgcatttaccta

SEQ ID NO: 17551 - DNA, 260 bp, Unknown
  Description of Unknown: LeftRegion for integrase B4552 sequence
tgataggggtaaaaaaatctataccgaataccttaaaaataaggagtgtgaaaaatcgggaaccccttaattcctgctggctgttttctaatcataaaaaatgcgatttagcactttaaagcgttgacaaattgttttaaaagtggtatactattaaatatagaaggcaattgacaaagcagtaagacaggaggtatataatgataaaggcagtaatttatgcacgatactcttgtgacaaccagagagaagagagtatt

SEQ ID NO: 17552 - DNA, 260 bp, Unknown
  Description of Unknown: LeftRegion for integrase B4553 sequence
ttttgctgacatcaggaaaatggataaaataaaaaaccgcccagctacaactggacggaataaaaagaaaaactacttgcatctataggttagatgtgtacttttccccgacagttaaagtataccatttttaacctacactttgcaagaagtgtattttttgtacccaaaaatcacaatatagaaaggaaaaatggtatatgaacttagcagaacaattagggttaactgaatcagatcagttttgcatttatttaaga

SEQ ID NO: 17553 - DNA, 260 bp, Unknown
  Description of Unknown: LeftRegion for integrase B4554 sequence
aaaaaacaaactatctgatcgtcggcaacgaagggaatccgtgctgggcgtattcctgctacggccgcaaggtggatgatgcgatcaagctgcgcaaatccggtattccgattgtgattgtaaacgaaacggatttctgggatatcctcgaagatctgtagcaacgctgatcgaattttaaaagagttggaggactatatatgagaattgcgatctatgctcgaaaaagtgctttttccgacaaaagcgaaagcgtgcac

SEQ ID NO: 17554 - DNA, 260 bp, Unknown
  Description of Unknown: LeftRegion for integrase B4555 sequence
atttacgaatcgataccttgaggccacataacgaaagctgtcggtcatatcagctaaataattcacatctcttctcgattatcatacaccttgaagatttactaaattcgctctaatcaatgataaaacagttgaatttggttaaaaattgatcaattttatcctctacattgtattgaatcatccatgaggtttcgtgcatggctagcgaaaatgataaaaatcataaagttagggtcgcacagtacttgaggatgtct

SEQ ID NO: 17555 - DNA, 260 bp, Unknown
  Description of Unknown: LeftRegion for integrase B4556 sequence
gtccgacgacccatccgctcctgataatgatataatcgacagaagtgaagttgcgggcacatcaagctatcctcaaaaaacagaaaagaagtcctggatttactccgataatgttggcttattagtctttcttttggttggtgttatcgccctgtttctgtggctattggacaaactgattcaaaaaaggagataattccgtgaaaacctatacgcccaccgactacgccctgtacctccgcaaatcccgtgccgacctc

SEQ ID NO: 17556 - DNA, 260 bp, Unknown
  Description of Unknown: LeftRegion for integrase B4557 sequence
tctcattaataaaaactaattttttacattaaaaagccgcccggctgcaaccaggcggaataaaaagaaaactacttgcatctattggctagatgtgtacttttccccgacagttaaagtataccatttttagcctacactttgcaagaagtgtattttttgtacccaaataatcaaaatatggaaaggaacgatggtatatgaacataggaaatcagttaggaaaactaaaaaaatcagatcaattctgcatttaccta

SEQ ID NO: 17557 - DNA, 260 bp, Unknown
  Description of Unknown: LeftRegion for integrase B4558 sequence
aaacgattaccttttgaatatcgagatatacaataatctgattcttgcaagatacaatataattcacttctgcttccataatatcctccctatatatggcggttattatgaaatttgttgggtgtgtgatcacgattatattgtaaggcaaatattggtaattttaaactggtatttaattccagtgcggaggtttatgtatgaaaacagcgtatggatatggtaggttcagcactgatcggcagcgtgaagaatcaatc

SEQ ID NO: 17558 - DNA, 260 bp, Unknown
  Description of Unknown: LeftRegion for integrase B4559 sequence
caagtccgacgccagagaacggcaggaatacatcgaaagcgtatgggaagacggcgggctcctgcatcaggatcagtatatctaccgcgccgggacggctcttctgcgtgtaacctatcagatcacgccggatcaggctgcagcctatgaaaaagcgttctatgagatcatgggcgtggattctgggaagtaggcgcatcatgagaatcgcaatctacgctcgtaaaagcgcgttctccgataaaagcgaaagcgttcac

SEQ ID NO: 17559 - DNA, 260 bp, Unknown
  Description of Unknown: LeftRegion for integrase B4560 sequence
ctgaataaaaaaagaaatcgccaccccgttggctcagggtggctcgcatatccgaagatatactatatctgattgttcaagtcatattgtatcatcttcggagcagtcttgcaagcggaactgttgttctgtgcttggctgttatttttatacccatttttgtgcgacgtcgcgcatatatactaaggaaggtgatacatatgcaatacgaagaatatcttatctatctccggaaatcccgaagtgatgcctcactggaa

SEQ ID NO: 17560 - DNA, 260 bp, Unknown
  Description of Unknown: LeftRegion for integrase B4561 sequence
aatttcataaataaaaccgctcctgcgccaacaggaacggcttaaagactaatgccccgaaggatacaccagtacgttcaataattagtgtatcatcttcgggcagctatcgcaagcggaacacttgttcctcgctggctgttatttttatacgcaaaattgtgcgacgtcgcacatatatactaaggagggtgatacatatgcaatatgaagaatatcttatctatctccggaaatcccgaagcgatgcctcactggaa

SEQ ID NO: 17561 - DNA, 260 bp, Unknown; identical to SEQ ID NO: 17546
  Description of Unknown: LeftRegion for integrase B4562 sequence

SEQ ID NO: 17562 - DNA, 260 bp, Unknown
  Description of Unknown: LeftRegion for integrase B4563 sequence
tgaacaaaaataacgcagaaaaccgcccggtgctaccaacaccgaacggctttccatagatcatctcttcccggatcgctccaaaaagatacaatcagcttgaacacctgaattatatcatctctggagcgccccggtcaagaggcgtattttttgcacccaaaaacatatttttataacacagggtatcaggtgatataatggaaaatcaaatcaaaacggcagctctctacatccgggtctccaccgacaaacaggaa

SEQ ID NO: 17563 - DNA, 260 bp, Unknown
  Description of Unknown: LeftRegion for integrase B4564 sequence
tatctattctcaggacacatgcaaaaatacatagacagcggcaaggaaaagcactacagctctgccatgaaagatctgtctgccgcttcatctgcaaaatctgacattgatacagcgcgcaaggcttttttgaagtcggccggattttctgcggatgaaatttctgaaatcgttgattctgaaaaatagaggtggtatgtatgagaatcgcaatctatgctcgaaaaagtgctttttccgataaaagcgaaagcgtgcac

SEQ ID NO: 17564 - DNA, 260 bp, Unknown
  Description of Unknown: LeftRegion for integrase B4565 sequence
gatgccttgatccaaaaggtcggtaaccagtaaaataaaatctgccccggtacgccaataccggagcagagctggaactatatcgggagtaccgatataactcaccgtaagcaagtgaattatatcatactttccggtgaaaatacaagcaccgggtatttttatgccctgctgccatagaatatacgggaggaatggatatgttcactgtaggaatctatgcccggaagtccgtttaccgcgacaactcggactccgtc

SEQ ID NO: 17565 - DNA, 260 bp, Unknown
  Description of Unknown: LeftRegion for integrase B4566 sequence
taaaaaaatgctgtcggacggagttattaacgaaagggtttttatgaggctcaacgagaaaatagcaagcaggcagaattgcccgtcattttctcattaacctaaaatgccggggttccggcattctacataatcgcacatttcacaaatatcggattatgccgtacaattttgaaaagaaacatcagggagtgaaacaaatgcaggaagcaattaaaaaggatgtaaagataattcgtccgacaaaggggttgtgcggt

SEQ ID NO: 17566 - DNA, 260 bp, Unknown
  Description of Unknown: LeftRegion for integrase B4567 sequence
ggcaagaacgataacggctcgcacggcaccgtgtcgtaccttcgcgacgggtcgatggggaaggccgttatccattactggcgcaaccatgtgtactatggcgcgtatttcaagattatcgacggcgctatagccttgaatgtgctgaattacagggcaacgcctaacgatgaccccgtagagctgtacagggcgtagccatgggcggacgtgcggcgatatacgcccgcttctccagccacaaccagcgcggcgagtcc

SEQ ID NO: 17567 - DNA, 260 bp, Unknown
  Description of Unknown: LeftRegion for integrase B4568 sequence
caactatatttatatccccttttattgacacactttctgtcatccactaatatatatatataatattctattttactataaaataaatgatatttacatacctttttgagtaaaaacacttttaatagttattgtagcaaattacgatatttttttcaaatcaataattttatcaaataaaaatcaaaggaggtcaccacatggtagccatatatgtccgccaatcactcgacaaaaaagactccctctccatcgagtca

SEQ ID NO: 17568 - DNA, 260 bp, Unknown
  Description of Unknown: LeftRegion for integrase B4569 sequence
aaggtttccacgccgggaaactataagcatttgtcggcacgccggcaaaagaagttgcccgaaggcgaatcatagccgcgcctgcggaacggcgaacgctcctcgggcattgccgttcccatttcgtccccagcgactgcatagaatctatcaatcacttgcttccgctacggcgggaaaccgagaaaccaggaggccctatgtccaagctctattgcatgtatctccgcaagtcccgcgccgatctggaggccgaggca

SEQ ID NO: 17569 - DNA, 260 bp, Unknown
  Description of Unknown: LeftRegion for integrase B4570 sequence
acaatataaagaagttgattcgtttcaatacatttagcgaagctcaggattataaaagtagtaattatcaataaataaattttgtgaattccaacttagaagaatatctctaaggattcaacctttggaaaagccatttagggctttttctatttattctaatgtgtattgcttgtttaattatgtatagaggtgatgtaatgaattatcgtagtttcgaaatgcgattattggtctaccttagaaaaagccgttctgac

SEQ ID NO: 17570 - DNA, 260 bp, Unknown
  Description of Unknown: LeftRegion for integrase B4571 sequence
atttacggatgggtaacttgaggccacataccgaaagctgttggtcatatcagctacataattcacatatcttctcgattatcatacacctcgaagatttactaaattcgctctaatcaatgataaaacagttgaaattggttagaaattgatcaattttatcatctacattgtattgaatcatccatgaggtttcgtgcatggctagcgaaaatgataaaaatcataaagttagggtcgcacagtacttgcggatgtct

SEQ ID NO: 17571 - DNA, 260 bp, Unknown
  Description of Unknown: LeftRegion for integrase B4572 sequence
ctacaataaaatagaaatcgccaccccgttggctcagggtggctcgcatatccgaagatatactatatctgattgttcaagtcatattgtatcattttcggagcagtcttgcaagcggaactgttgttctgtgcttggctgttatttttatacccatttttgtgcgacgtcgcacatatatactaaggaaggtgatacatatgcaatacgaagaatatcttatctatctccggaagtccagaagtgacgcctcgcttgaa

SEQ ID NO: 17572 - DNA, 260 bp, Unknown
  Description of Unknown: LeftRegion for integrase B4573 sequence
gtacgacgacccatccgctcctgataatgatatcatcgacagaagtgaagttgcgggcacatcaagctatcctcaaaaaacagaaaagaagtcctggatttactccgataatgttggcttattagtctttcctttggttggtgttatcgccctgtttctgtggctattggacaaactgattcaaaaaaggagataattccgtgaaaacctatacgcccaccgactacgccctgtacctccgcaaatcccgcgccgacctc

SEQ ID NO: 17573 - DNA, 260 bp, Unknown
  Description of Unknown: LeftRegion for integrase B4574 sequence
ctcctgaatcttgtaacaacaagaaaatgcgttttaaagatgcacttcttgctttaaaagatgaatctatgcccccaaaagaaaaaaatcatttattaaagaaatgcatagaaagaattgattatgatatagagggagtaagatatcactcaaaagtcaaattggatgtttattttaaattttaagcgaggggtttcaaaatgcaggaaaatgaaacttatgtaatctatttgagaaagtctcgtgcagatagcgaaaaa

SEQ ID NO: 17574 - DNA, 260 bp, Unknown
  Description of Unknown: LeftRegion for integrase B4575 sequence
accaggaagaattgctagattatataagaaattaaataaattgggataaaaagagaattatgttccaaagtttgcgacacggtacataattctcactataaaaaatccttgaataaggtctttttatgttatttattataacatattaaaaacccttttttcaagagattatttaaaaaaatgaaagaaggtatttttatatggaaaaattaataaataataatatggaatattattgtgcatacttgagaaaatcaaga

SEQ ID NO: 17575 - DNA, 260 bp, Unknown
  Description of Unknown: LeftRegion for integrase B4576 sequence
tctcctttatatatatgtatatattatatccgagagccaagaaattatacaatataataaaaggttgtcgcctgtgggtagcaagcaacaacctttgtgtccttgtagagtaaacaaggaatatgaacaccttgctattatagcacttttcttttgtttactctactattttattaaacaagaaaggaaactaaagtgttatgtctattatgtcttttagtaatattattatctatcttagaaagtccagagcagacgac

SEQ ID NO: 17576 - DNA, 260 bp, Unknown
  Description of Unknown: LeftRegion for integrase B4577 sequence
caagtccgacgccagagaacggcaggaatacatcgaaagcgtatgggaagacggcgggctcctgcatcaggatcagtatatctaccgcgccgggacggctcttctgcgtgtaacctatcagatcacgccggatcaggctgcagcctatgaaaaagcgttctatgagatcatgggcgtggattctgggaagtaggcgcatcatgagaatcgcaatctatgctcgaaaaagtgctttttccgataaaagcgagagcgtgcac

SEQ ID NO: 17577 - DNA, 260 bp, Unknown
  Description of Unknown: LeftRegion for integrase B4578 sequence
ctttgttactcaaaaataaaacggaaaaaccgctcctgctaccaacaggaacggcttaatgaatactatacagtgccaagacacgtacaataccccgtgacaagagtattgtatcacatttccttggcacctgtacaggtgtattttttatacccatttttgtgcgacgtcgcacatatattacaaggaaggtgatacatatgcaatacgaagaatatcttatctatctccggaaatcccgaagtgatgcctcactggaa

SEQ ID NO: 17578 - DNA, 260 bp, Unknown
  Description of Unknown: LeftRegion for integrase B4579 sequence
ctcctgaatcttgtaacaacaagaaaatgcgttttaaagatgcacttcttgctttaaaagatgaatctatgcccccaaaagaaaaaaatcatttattaaagaaatgtataaaaagaattgattatgatatagagggagtaagatatcactcaaaagtcaaattggatgtttattttaaattttaagcgaggtgtttcaaaatgcaggaaaatgaaacttatgtaatctatttgagaaagtctcgtgcagatagcgaaaaa

SEQ ID NO: 17579 - DNA, 260 bp, Unknown
  Description of Unknown: LeftRegion for integrase B4580 sequence
cttttgttctaccaatacaagagctcggactttgtctatagtcaaaaagcaggggaattccctgctttttgattttatctgattatttgttaccgcgtttcatgtttttcttttcttcgacaagtttttattgactttttttattccgttgcagataatcaagtaggaagtgagaaagttctatttaaggaggttaaactatggatttatatgcccaatatttaagaaaatcccgtgctgatgttgaagccgaacagcat

SEQ ID NO: 17580 - DNA, 260 bp, Unknown
  Description of Unknown: LeftRegion for integrase B4581 sequence
aaagcccttgtgctggtaacacaagagcctttatataacgacacttacataagcataaagctccaatgataaatatcgccctaagcaagcatattatatcacctggagcaccgcttatgcaagtggtgttatttttgtacttatttttaaggttgtattgttgcaacttatatattcaagagaaagaaggttgaaataatatgctatcttttaataatattattatttatcttaggaaatcacgctctgatgaccctacg

SEQ ID NO: 17581 - DNA, 260 bp, Unknown
  Description of Unknown: LeftRegion for integrase B4582 sequence
cttttttggtaatgtatttgacagtgatacggcttcgtgcttcgtaagtgaggccttagcccaagagctgtcagtgtatgctggcggctctttttgttttaagcaggtagtttatcgagtgaaaaaaagaaagggccccttgctctaaatcttggcggattcgcaagggaccgaagcaccgacccaaaaggagtcgatagatggattctatcatgaattcggcagatcgccgtacatgggcatgctgcgcatacttgcgc

SEQ ID NO: 17582 - DNA, 260 bp, Unknown; identical to SEQ ID NO: 17538
  Description of Unknown: LeftRegion for integrase B4583 sequence

SEQ ID NO: 17583 - DNA, 260 bp, Unknown
  Description of Unknown: LeftRegion for integrase B4584 sequence
caagtccgacgccagagaacggcaggaatacatcgaaagcgtatgggaagacggcgggctcctgcatcaggatcagtatatctaccgcgccgggacggctcttctgcgtgtaacctatcagatcacgccggatcaggctgcagcctatgaaaaagcgttctatgagatcatgggcgtggattctgggaagtaggcgcatcatgagaatcgcaatctatgctcgaaaaagtgctttttccgataaaagcgaaagtgtgcac

SEQ ID NO: 17584 - DNA, 260 bp, Unknown
  Description of Unknown: LeftRegion for integrase B4585 sequence
tatagataccctatctatacggggaaactcaaacgctgataccgtatcgatacatcgcgtgcgcgcgtgcgtgtgcgcgcgatcgcgcgcgcactgtctctgtatctgtttctgtatctgtttctgtttctgtttctgtttctgtaatctgtttctgagactatcttaggaagactatcttgtagaaggaggtggcgctgttgccgaaaaaggctccgaagcatcccgcgaagccaaagcggggaaagaagctggaaatc

SEQ ID NO: 17585 - DNA, 260 bp, Unknown
  Description of Unknown: LeftRegion for integrase B4586 sequence
ggaagccatgcaaaactaagcataattcataataaaaaccgcccagctaccaactggacggaatttagaagcctatcaactactttgcagtgtatgatataacttctgcctcaacaccagaattatatcatacatcctgcaaaaacacaatttgatgagggtgtattttttgtaccctttttagaaaggaatgatgatatatgactttagctgaacaattaagactgactgaatcagatcagttctgtatttatcttaga

SEQ ID NO: 17586 - DNA, 260 bp, Unknown
  Description of Unknown: LeftRegion for integrase B4587 sequence
agcccttgtgctaccaacacaagagcctttatataacgacatttacataagcagtgctgctcacgatataatatcgccctaagcaagcatattatatcacctggagcaccgcttatgcaagtggtgttatttttgtacccatttttaaggttgcattcttgcagcttatatatttataagagaaagaaggttgaaataatatgctatcttttaataatattattatttatcttaggaagtcacgctctgatgaccctacg

SEQ ID NO: 17587 - DNA, 260 bp, Unknown
  Description of Unknown: LeftRegion for integrase B4588 sequence
atttataaataaaaaccgcccctgttggcgcaaggacggctcaaagactaatgccccgaaggatacaccagtacgttcaataattagtgtatcatcttcgggcagctatcgcaagcagaacatctgttctttgctggctgttatttttgtactcatttttagtgcgacgtcgcacatatatactaaggaaggtgatacatatgcaatacgaagaatatcttatctatctccggaaatcccgaagtgatgcctcactggaa

SEQ ID NO: 17588 - DNA, 260 bp, Unknown; identical to SEQ ID NO: 16547
  Description of Unknown: LeftRegion for integrase B4589 sequence

SEQ ID NO: 17589 - DNA, 260 bp, Unknown
  Description of Unknown: LeftRegion for integrase B4590 sequence
aaaaaacaaactatctgatcgtcggcaacgaagggaatccgtgctgggcgtattcctgctacggccgcaaggtggatgctgcgatcaagctgcgcaaatccggtatcccgattgtgattgtaaacgaaacggatttctgggatatcctcgaagatctgtagcaacgctgatcgaattttaaaagagttggaggactatatatgagaattgcaatctacgctcgtaaaagcgcgttttccgacaaaagcgaaagcgtgcac

SEQ ID NO: 17590 - DNA, 260 bp, Unknown
  Description of Unknown: LeftRegion for integrase B4591 sequence
atttacaaatggggacattgagtccacataacgaaagctgtcggtcatatcagctaaataattcacatctcttctcgattatcatacacctcgaagatctaccaaattcgctctaatcaatgataaaacagttgaattcggttaaaatttgatcaattttatccactacattgtattgaatcatccatgaggtttcgtgcatggctagcgaaaatgaaaaaaatcatagagttagggtcgcgcagtacttgaggatgtct

SEQ ID NO: 17591 - DNA, 260 bp, Unknown
  Description of Unknown: LeftRegion for integrase B4592 sequence
ccatgtcatcgctgccgataaaacgcaccatcggatggtgggccgtcaccagcgcatggacggggacttttggcttctttctttgcgcgtcgagcatcgccgggctgcgggcgacggcgctatgaaccggacggctatccaggattacacctttcttatgatacacttgttcaatctcttcataacccatcataaaccccatgccaaaagcaatctcatacatacgattttctacaaaaattcaatcggttggtgattct

SEQ ID NO: 17592 - DNA, 260 bp, Unknown
  Description of Unknown: LeftRegion for integrase B4593 sequence
atttacgaatgggtaccttgaggccacataacgaaagctgtcggtcatatcagctaaataattcacatctcttctcgattatcatacacctcgaagatttactaaattcgctctaatcaatgataaaacagttgaatttggttaaaaattgatcaattttatcctctacattgtattgaatcatccatgaggtttcgtgcatggctagcgaaaatgataaaaatcataaagttagggtcgcacagtacttgaggatgtct

SEQ ID NO: 17593 - DNA, 260 bp, Unknown; identical to SEQ ID NO: 16880
  Description of Unknown: LeftRegion for integrase B4594 sequence

SEQ ID NO: 17594 - DNA, 260 bp, Unknown
  Description of Unknown: LeftRegion for integrase B4595 sequence
ctgcgtaatatggggtttaaatatacacaccgcaaaagacatacaagatgtgtttgatgtaagttacacagccgccaaaatacgtgctgaacgaatgcaaatattgtacgaaagaaatagatttttgacgagcccgttggaaaaacgggtatatgataggtttgaaccatatataaaagcaaacaggagggcataaggccatgaatgttgttctatatatgagatacagtagcgatagacaaacggagcagtctatagag

SEQ ID NO: 17595 - DNA, 260 bp, Unknown
  Description of Unknown: LeftRegion for integrase B4596 sequence
accatgcaaaaacaagcataattcataattaaaaaaccgcccagctaccaactgggcggaatctcagaagtttatcaactactttgcagctatgatatcacttctccctaaccaagagaattatatcatacatcctgcaaaattacaatttgataagggtgtattttttgtaccctttttttagaaaggaatgatggtatatgaacataggaaatcagttaggaaaactaaaaaaatcagatcaattctgcatttactta

SEQ ID NO: 17596 - DNA, 260 bp, Unknown
  Description of Unknown: LeftRegion for integrase B4597 sequence
tccaacggctccatagccgtggtggagaccgaggactaccgcgcggtcatgcgccgctggtacaagggcagcaccaagctgatgctgtcggcggacagcttcgaggactacgaggacatgattttcggcatggacgacggccccgtgcgcgtgatcggcacggtggtgtggttccaggccgccgacgagatggagtagccgtgggcgggcgcgcggcgatatacgcccgcttctcgagccacaaccagcgcggcgagtcc

SEQ ID NO: 17597 - DNA, 260 bp, Unknown
  Description of Unknown: LeftRegion for integrase B4598 sequence
atgaccgccagcttgttgccggacgggaatccgggaaggattgaaagcgagtacgcgcttttcgaaaacggtgccgcgttcggccactattggaaagtgacttcaaaggtcgttaacggagaactcgtcgtctcccgaatcagcgaaacgagtccgacaggcgatactccgccaactctttacacattaggtaggtagccatgggcggacgtgcggcgatatatgcccgcttctccagccacaaccagcgcggcgagtcc

SEQ ID NO: 17598 - DNA, 260 bp, Unknown
  Description of Unknown: LeftRegion for integrase B4599 sequence
atttacaaatggggacattgagtccacataacgaaagctgtcggtcatatcagctaaataattcacatctcttctcgattatcatacacctcgaagatctaccaaattcgctctaatcaatgataaaacagttgaattcggttaaaatttgatcaattttatcctctacattgtattgaatcacccatgaggtttcgtgcatggctagcgaaaatgacaaaaatcatagagttagggtcgcgcagtacttgaggatgtct

SEQ ID NO: 17599 - DNA, 260 bp, Unknown
  Description of Unknown: LeftRegion for integrase B4600 sequence
caagtccgacgccagagaacggcaggaatacatcgaaagcgtatgggataagggcggctcactgcatcaggatcagtatatctaccgcgccgggacggctctgctgcgtgtaacctatcagatcacgccggatcaggctgcagcctatgaaaaagcgttctatgagatcatgggcgtggattccgggaagtaggcgcatcatgagaatcgcaatctatgctcgaaaaagcgcgttctctgataaaagcgagagcgtgcac

SEQ ID NO: 17600 - DNA, 260 bp, Unknown
  Description of Unknown: LeftRegion for integrase B4601 sequence
ataaaaaccgccctgctaccaacagagacggctatagactaatgtcccgaaggttacactagtacattccaacaaacagtgtatcatcttcgggcagctatcgcaagcagaacaatcgttctatgctagctgttatttttatacccttttttacagatttctgtgtaacatcgcacatatacttacaggaaggtgatatcatgaaaaacgaatattgtatctatctcagaaaatccagaggtgattcccagctagaatct

SEQ ID NO: 17601 - DNA, 260 bp, Unknown
  Description of Unknown: LeftRegion for integrase B4602 sequence
gtggtgtggattggcagcaaaagtctatgacgaggacggcgataagaaagtcaaaccgatttcacccaaattgctggagcagttttgcaaaacagcaccacttatggacagcacagaggttaattatttcagaggcgtatctgaggactgtgaaatgattgatttgaaagacattgaatatatattctaggaggcgctttatggttgctatatatgtaaggcagtcgcttgataaaaaggactctctctctatcgactct

SEQ ID NO: 17602 - DNA, 260 bp, Unknown
  Description of Unknown: LeftRegion for integrase B4603 sequence
atttacaaatggggacattgagtccacataacgaaagctgtcggtcatatcagctaaataattcacatctcttctcgattatcatacacctcgaagatctaccaaattcgctctaatcaatgataaaacagttgaattcggttaaaatttgatcaattttatcctctacattgtattgaatcatccatgaggtttcgtgcatggctagcgaaaatgacaaaaatcatagagttagggtcgcgcagtacttgaggatgtct

SEQ ID NO: 17603 - DNA, 260 bp, Unknown
  Description of Unknown: LeftRegion for integrase B4604 sequence
ttacttttgaaatattaaacaaaaataaaaccgctcctgctgccaacaggaacggcttaatgaatactatacagtgccaagacacgtacaataccccgtgacaagagtattgtaccacatttccttggcacctgtacaggtgttatttttgtactcattttttgtgcgacatcgcatatatactaaggagggtgatacatatgcaatatgaagaatatcttatctatctccggaaatcccgaagtgatgcctcactggaa

SEQ ID NO: 17604 - DNA, 260 bp, Unknown
  Description of Unknown: LeftRegion for integrase B4605 sequence
tctcctttatatatatgtatatattatatccgagagccaagaaattatacaatataataaaaggttgtcgcctgtgggtagcaagcaacaacctttgtgtccttgtagagtaaacaaggaatatgaacaccttgctattatagcacttttcttttgtttactctactattttattaaacaagaaaggaaactaaagtgttatgtctattatgtcttttaataatattattatctacttaagaaagtccagagcagacgac

SEQ ID NO: 17605 - DNA, 260 bp, Unknown
  Description of Unknown: LeftRegion for integrase B4606 sequence
ttaaaaaaagaaatcgccgcccctgttggcgcaaggacggctcaaagactaatgccccgaaggatacaccagtacgttcaataattagtgtatcatcttcggacagctatcgcaagcggaacatccgttctttgctagctgttatttttatacgcaaaattgtgcgacgttgcacatatatactaaggaaggtgatacatatgcaatacgaagaatatcttatctatctccggaaatcccgaagtgatgcctcactggaa

SEQ ID NO: 17606 - DNA, 260 bp, Unknown; identical to SEQ ID NO: 17603
  Description of Unknown: LeftRegion for integrase B4607 sequence

SEQ ID NO: 17607 - DNA, 260 bp, Unknown
  Description of Unknown: LeftRegion for integrase B4608 sequence
gtccgccgacccatccgctcctgataacgatataatcgaccgaagcgaagttgcgggcacatcaagctatcctcaaaaaacagaaaagaagtcctggatttactccgataatgttggcttattagtctttcctttggttggtgttatcgccctgtttctgtggctattggacaaactgattcaaaaaaggagataattccgtgaaaacctatacgcccaccgactacgccctgtacctccgcaaatcccgtgccgacctc

SEQ ID NO: 17608 - DNA, 260 bp, Unknown
  Description of Unknown: LeftRegion for integrase B4609 sequence
gtacgacgacccatccgctcctgataatgatatcatcgacagaagtgaagttgcgggcacatcaagctatcctcaaaaaacagaaaagaagtcctggatttactccgataatgttggcttattagtctttcctttggttggtgttatcgccctgtttctgtggctattggacaaactgattcaaaaaaggagataattccgtgaaaacctatacgcccaccgactacgccctgtacctccgcaaatcccgtgcggacctc

SEQ ID NO: 17609 - DNA, 260 bp, Unknown
  Description of Unknown: LeftRegion for integrase B4610 sequence
aaagtttccacgccgggaaactataagcatttgtcggcacgccggcaaaagaagttgcccgaaggcgaatcatagccgcgcctgcggaacggcgaacgctcctcgggcattgccgttcccatttcgtccccagcgactgcatagaatctatcaatcacttgcttccgctacggcgggaaaccgagaaaccaggaggccctatgtccaagctctattgcatgtatctccgcaagtcccgcgccgatctggaggccgaggca

SEQ ID NO: 17610 - DNA, 260 bp, Unknown
  Description of Unknown: LeftRegion for integrase B4611 sequence
ttgctggccgcaccgagttcgtcggcaccttctcagatcagcgccaagccgttatgaatgacgatttcgcccacctatcggatgccgggaaggacgcggccgccggggcagtgaggggcatacgcgcatccgaaggcgcgcgagttcaagcggcggggctggaagatcatccgatcgccgcatccgcgtaaggcagacccgtgcagctagttccatgtgacagaccaaggcccggcaggcgcgccgtatcctatgcgcgc

SEQ ID NO: 17611 - DNA, 260 bp, Unknown
  Description of Unknown: LeftRegion for integrase B4612 sequence
cggggagattggttctgtagtagcgacaattatattcggcgtcttattcattgcggttttaggttttctaaaatagtaaccgtttttcagccattaaacgcaattttgagagtttttgcatctaatttagccttttaagcataaaattggagccttaattacaaatttaggctcattttcgttagataagaggtgatacgttgagttcggttgataaaatcgccgttatttacgcgcgttattcgtctcacggccagacc

SEQ ID NO: 17612 - DNA, 260 bp, Unknown
  Description of Unknown: LeftRegion for integrase B4613 sequence
cttcgattatcaatacactcgcgcaatgaagacagccacattgatggccgtgagcaagatgttcaggctgataagggcaacggcgactttggtagacatggcggctccttccttctggtcgcaggatatggaaggtgtcgcaaagaaaaagcccccggcagtgtcttggcggacgcagggggctacctcgaaaggatggcatggagtatagcatctgcaagaacccaaggctaggcaagcgcggcgtgtcctatgcccgc

SEQ ID NO: 17613 - DNA, 260 bp, Unknown
  Description of Unknown: LeftRegion for integrase B4614 sequence
cctccagaatcttgtaatgacaagaaaatgcgttttaaagatgcacttcttgctttaaaagatgaatctatgcccccaaaagaaaaaaatcgtttattaaagaattgcatagaaagaattgattatgatatagagggagtaagatatcactcaaaagtcaaattagatgtttattttaaattttaagcgaggtgtttcagatgcaagaaaatgaaacttatgtaatctatttgagaaagtctcgtgcagatagcgaaaaa

SEQ ID NO: 17614 - DNA, 260 bp, Unknown
  Description of Unknown: LeftRegion for integrase B4615 sequence
ctttatatatatgtatatattatatccgagagccaagaaattatacaatataataaaaggttgtcgcctgtgggtagcaagcaacaacctttgtgtccttgtagagtaaacaaggaatatgaacaccttgttattatagcacttttctttagtttactctactgttttaacaattaaataagaaaggaaactaaagtgttatgtctattatgtcttttaataatattattatctacttaagaaagtccagagcagacgac

SEQ ID NO: 17615 - DNA, 260 bp, Unknown; identical to SEQ ID NO: 17540
  Description of Unknown: LeftRegion for integrase B4616 sequence

SEQ ID NO: 17616 - DNA, 260 bp, Unknown
  Description of Unknown: LeftRegion for integrase B4617 sequence
aaagcccttgtgctaccaacacaagagcctttatataacgacatttacataagcataaagctccaatgataaatatcgccctaagcaagcatattatatcacctggagcaccgcttatgcaagtggtgttatttttgtacccatttttaaggttgcattcttgaagcttatatgtttaggagaaagaaggttgaaataatatgctatcttttaataatattattatttatcttaggaagtcacgctctgatgaccctacg

SEQ ID NO: 17617 - DNA, 260 bp, Unknown; identical to SEQ ID NO: 15083
  Description of Unknown: LeftRegion for integrase B4618 sequence

SEQ ID NO: 17618 - DNA, 260 bp, Unknown; identical to SEQ ID NO: 17613
  Description of Unknown: LeftRegion for integrase B4619 sequence

SEQ ID NO: 17619 - DNA, 260 bp, Unknown
  Description of Unknown: LeftRegion for integrase B4620 sequence
caattgttagacactattgaagatgctcaaattcttgtaataaatactgatcgtataacaagagatattcaggaaatgcaaaaaatcttggaaaaatataatgtaataacacccaatatgacttatgagcagcttgtaagcgatattaatgacttaatgggaaatccgctggtataagataactaacatcaatttgtaatatggatattactaacaacttaaaagctgctgctgcatacggaaggtattcaagccactta

SEQ ID NO: 17620 - DNA, 260 bp, Unknown
  Description of Unknown: LeftRegion for integrase B4621 sequence
gaccattaaatcactatgatggagaagatcatgatttaaattaaaaaataagagaaatatgctacaagtttgcgacaaggtacatatttctcacaatataaaaaatccttgaataaggtctttttatgctatttattataacataattaaatgccttttttcaagtgattacaaaaatttttgaaagaaggtatttttatatgaaaaatttaataaataataatatggaaaattattgtgcatacttgagaaagtcaaga

SEQ ID NO: 17621 - DNA, 260 bp, Unknown
  Description of Unknown: LeftRegion for integrase B4622 sequence
atttacaaatgggtaccttgaggccacataacgaaagctgtcggtcatatcagctaaataattcacatctcttctcgattatcatacacctcgaagaactaccaaattcgctctaatcaatgataaaacagttgaattcggttaaaatttgatcaattttatcctctacattgtattgaatcatccatgaggttttgtgcatggctagcggaaatgaaaaaaatcatagagttagggtcgcacagtacttgaggatgtct

SEQ ID NO: 17622 - DNA, 260 bp, Unknown; identical to SEQ ID NO: 17605
  Description of Unknown: LeftRegion for integrase B4623 sequence

SEQ ID NO: 17623 - DNA, 260 bp, Unknown
  Description of Unknown: LeftRegion for integrase B4624 sequence
taaaaagactatgttttgacattgattttggaacaaaaatgctaaaaaagaaaggtgcaaattattatatagctattagcagcattctcggcgcatatcaaagaataagaaagctatgcggatatacagatcccataagaataaattggagtttttctttatcgctcgatcaagtccttccagattatgaggggtaatatatggcgcgtaaaacagataaaccattgtcaaatattgcagttatatacgctcggttctcc

SEQ ID NO: 17624 - DNA, 260 bp, Unknown
  Description of Unknown: LeftRegion for integrase B4625 sequence
atatgcctttcaaataaaaaccgcccctgctggtaacagagacggttgagactaatgccccgaaggatacactagtacgttcgaataatattgtatcatcttcgggcagctatcgcaagcggaacacccgttcctcgctggctgttatttttatacccatttttgtgcgacgtcgcacatatacttaggaaggtgatgttatgaaaaatgaatactgtatctatctgagaaaatcccgtggtgattccgctcttgaagct

SEQ ID NO: 17625 - DNA, 260 bp, Unknown
  Description of Unknown: LeftRegion for integrase B4626 sequence
ccttgcggtctgcgtcgtgtcgttcccggtcggcttgatcgttgtggccattggagcgtaccgggtagcaaaggccggggatatttatgacgctgcggtcgctcggtacgagcagcaaatctcggactatgttgactggctggatgaagtcaacgcaaaataaaaagccgccctcggtgggcggcgggaggttgctctgaatgtgtgcaaaaaagaaaccggccatgcttgagccggatatgcaggatgccgtgatctac

SEQ ID NO: 17626 - DNA, 260 bp, Unknown; identical to SEQ ID NO: 14669
  Description of Unknown: LeftRegion for integrase B4627 sequence

SEQ ID NO: 17627 - DNA, 260 bp, Unknown; identical to SEQ ID NO: 15711
  Description of Unknown: LeftRegion for integrase B4628 sequence

SEQ ID NO: 17628 - DNA, 260 bp, Unknown
  Description of Unknown: LeftRegion for integrase B4629 sequence
acaccacaatagaatattttctaacaggaaaacgccctatatctaatctgactgatatggaaaatcttctattagaagcatacagatcagcagatgtaaaaggacaagctacaatcatccaagtctgcatgaatgaaaaggatgcaaaaggggaaactatcattgcaggataataggcattgaagaatggaggaagaaccatgtacgaagagattaagactgcctgtctatatctgcgatattcaagcagcaaccaaact

SEQ ID NO: 17629 - DNA, 260 bp, Unknown
  Description of Unknown: LeftRegion for integrase B4630 sequence
ctgcgtcatatggggtttaaatatacacaccgcaaaagatatacaagatgtatttgatgtaagttacacagccgccaaaatacgtgctgaacgaatgcaaatattgtacgaaagaaatagatttttgacgagcccgttggaaaaacgggtatacgataggtttgagccatatatacaagcaaacaggagggtataaggcaatgaatgttgttctatatatgagatacagtagcgatagacaaacggagcagtctatagaa

SEQ ID NO: 17630 - DNA, 260 bp, Unknown
  Description of Unknown: LeftRegion for integrase B4631 sequence
ctgcgtcatatggggcttaaatttacacaccgcaaaagacatacaagatgtatttgacgtaagttacacagccgccgaaatacgtgctgaacgaatgcaaatattgtacgaaagaaatagatttttgacgagcccgttggaaaaacgggtatacgataggtttgagccatatatacaagcaaacaggagggtataaggcaatgaatgttgttctatatatgagatacagtagcgatagacaaacggagcagtctatagaa

SEQ ID NO: 17631 - DNA, 260 bp, Unknown; identical to SEQ ID NO: 15711
  Description of Unknown: LeftRegion for integrase B4632 sequence

SEQ ID NO: 17632 - DNA, 260 bp, Unknown
  Description of Unknown: LeftRegion for integrase B4633 sequence
tttctgtaccttgttttctatgcacagcccctttggcttgcagtgatttatgcagccattcgcattcttcctgttctttcctgtattgagattgtccagaaacaaaaacttcgttctggtaagtagtgcttatatttcgtttcgttctgttacaacgtttcagctgtggaaacattctaattttctgaaaggtggtatttatgcctcgcaaaaagaaactgcaagaggtaggcggtcggcgtctggtggcatactatcgc

SEQ ID NO: 17633 - DNA, 260 bp, Unknown
  Description of Unknown: LeftRegion for integrase B4634 sequence
tattatcccgcaatcgtcagccgacagactttttcaaaggcaaatgcagaactgattcgcagagctgagaagcatggcagaggaaagcggctgaaagcaccaacgatctatacggaatttacgcttgctgaaccggaaatgcaatatgacgatccgattgcgcaggcagaatatatgtacagcttgattggggtgataaaatgaatgttatcaaaattcctgccaaaccgcagaaaggtaatactgctgctaaaacggag

SEQ ID NO: 17634 - DNA, 260 bp, Unknown
  Description of Unknown: LeftRegion for integrase B4635 sequence
ttatagtcattttcaagaatttagagatgctacgttcgagggagcatttatgagattcaaaaaagcacttcttggatatggttttaaaaaataataacttgacttttcgcctgaaaactgttgccaactttacttttaaaagtcaagttggcgttacttttttgtgcaaaagtcaagtgtcaagttaaggagatgaacacatgcaaagagcagttatctacgcgcgcttctcttccgacatgcagcgcgaggaaagtatc

SEQ ID NO: 17635 - DNA, 260 bp, Unknown
  Description of Unknown: LeftRegion for integrase B4636 sequence
atttcgagtatgagatggcgcaaaaacttaccagaaacctttatgaaaaaggcatcatttctgttgatgaaatgcacagaatttttgcattgaacaaagaaaacttctccccattttatgcggaaattctggactaattaacttgatattatcgcccgtcagagtgatatatagtactgaccaaactaggaggtgaaacggtggcaaagataacaaaaattgaagctacacaagcgataaaaaagaagatacgagttgct

SEQ ID NO: 17636 - DNA, 260 bp, Unknown
  Description of Unknown: LeftRegion for integrase B4637 sequence
tctgtttggatcgacatccttgaggcggcgcaggcggaaaagctggggtatcaggacggtgacaagtacacgcagaatgacggcgttgtttacatcaacgggtttgacagcccgtctgccctgaacacctttatcgaagacctgcatggctgcgtgaaccgcagcgaagcgatggctgcccaccagcgggaggaacgctgatggctacggtaaaagagattgcgccacacgcactccaaccggaacacctgcgtgtcgcc

SEQ ID NO: 17637 - DNA, 260 bp, Unknown
  Description of Unknown: LeftRegion for integrase B4638 sequence
ggaaaaatgccgtccttcgtccatagactacgatgcgggtattgccatttttgagggttcaggtaaaaagccttacgaaaccacggtaaattcctgcacctgcagagatttctttgtccgccgtttgccgtgcaagcatatctaccggcttcggatggagcttgaaaacagagaagctcgttaaaaatggggggtgttatatggctcgatcaaagaaaactgaatgcttgccacttgagcggatcggcgtgatctatgcc

SEQ ID NO: 17638 - DNA, 260 bp, Unknown
  Description of Unknown: LeftRegion for integrase B4639 sequence
ctgccagttccttttcagctgacaattcattaaacaaatcatctacttcttttttccacttaattatctctaaatctttatttttggctacatttttatagtagtatgctactgcgatagctataacagctactgctgataaaattattaatgtatcacccatattaaacacctcaataattttcaaaggagatgactacatgcaaagagcagtaatctatgcacgcttttcgtctgatatgcagcgcgaagaaagcatt

SEQ ID NO: 17639 - DNA, 260 bp, Unknown
  Description of Unknown: LeftRegion for integrase B4640 sequence
ctctacggaatcaagcggcttttcctcattgatgctggcgtgcaggtcagcaatgaaatcggaatcgccggtaatcgagagcgtcgacgggccgcccttgcgccgcgtcatccgcacccctttttccggtaagatagtgtacaaagatacatcacaagtgttacacttgtgtggaagatcactagaaaggagagtcaaaaatgactcgaaaagtagctatttacctacgaatgagcctcgatatggacggcaagggagcc

SEQ ID NO: 17640 - DNA, 260 bp, Unknown
  Description of Unknown: LeftRegion for integrase B4641 sequence
agataatgaaggtgacaaaatcactagcgatgaacgtgaaatcgtcgataactaccgtgacagctcgccggaatggcaacagaacatttcgatgaccgccagagctgctgcatctgaatcaaaaagaaaataaaaaagccccagcgctaccgtccaaagtctcgcaggggcatacctagaaaaggcaaggtgattttatcatgccaaagggcacgcgtgccgccatctatgcacgttttagctcgcataaccagcgaagc

SEQ ID NO: 17641 - DNA, 260 bp, Unknown
  Description of Unknown: LeftRegion for integrase B4642 sequence
tcatgagcaggagcgctccgaccggtctatcgagcgcgaaacccgccgcgccaatcgcgcaacgctcgccgcctgcattatcggcgcgctgttcatcatttttatttttgttgaccttctctggccgactcgcggctggtttatccactgattgccaaaaataaaaaaagcggccttctggccgtatgggaggtttttctatggttgccgccgcttatgcccgctattcgacggagcggcagaacgaaacgtctatcctc

SEQ ID NO: 17642 - DNA, 260 bp, Unknown; identical to SEQ ID NO: 17636
  Description of Unknown: LeftRegion for integrase B4643 sequence

SEQ ID NO: 17643 - DNA, 260 bp, Unknown
  Description of Unknown: LeftRegion for integrase B4644 sequence
caaaatgtttgtgaaaatgacgatgttataattgtgaaaccaaaagaactcgatcacgctattatccgtagaatcgtaaggaaagaacatttcacggtcttacaatctattgatagtgcttatgattcatttgtttatatcgatgaaagcgaatttaaaataataggtgttgtaacaggaatgtatagaagtttttagttatgaaaaaagccgtaatctatgctcgatattcgagccacaagcagaatgaagaatccatt

SEQ ID NO: 17644 - DNA, 260 bp, Unknown
  Description of Unknown: LeftRegion for integrase B4645 sequence
cttggaatgttggaggactggccgaaggtcagtcgtagtggaagcaaggctgcgctggaagacgcacaggctgaaattgagcggtggaggcaagagttccttgccgggaacatctcggcaaagaaatacgtcaaaatcgcggacgctctcatgtccaaataaaaaagccgccctcggtgggcggcgggaggttgctctgaatgtgtgcgaaaaagaaaccggccacgcttgagccggatatgcaggatgccgtgatctac

SEQ ID NO: 17645 - DNA, 260 bp, Unknown
  Description of Unknown: LeftRegion for integrase B4646 sequence
gcgaatttgattattatagggcacagcaggtgcttgaaaccatgtttatgcttggcatgatttcagtggaggaataccacaaaatatcggactataatcgcaaatctttctatccttttttatctgatattatgagttaaattacttgatatatatacaatagtatgggaatatgtcattgataaaaaagaggtgatcttatgaaaaagttaacaaaaataaagataagggatgctgtgcatcaaaagaaaaagttaaaa

SEQ ID NO: 17646 - DNA, 260 bp, Unknown
  Description of Unknown: LeftRegion for integrase B4647 sequence
aacgaggtgcttaacgccctgcaagataaggggcttgaaatcattcgagtagaaacaaactcggtgcctaaccaaggtattagcggtgctgatcgttacgacacgttgattacgtatagaaaaacagccctgcacacatccgccaagaccagtgcagggcttgccaatccacacaactgaaaaggcaaggtgattttatcatgccaaaaggcacacgtgccgcgatttacgcgcggtttagttcgcataaccaacgaagc

SEQ ID NO: 17647 - DNA, 260 bp, Unknown
  Description of Unknown: LeftRegion for integrase B4648 sequence
agcaggagcttgcctttcgccgtgagaatatgaggagcactgccgagcagatagcgcaggaaacccagcttagacatatctgtcaggagaatcgggacgaatgccctgaaactgcctgagtactgccaaagcttctgatgtacttattttatcacaattcaggggcttttgcaaggcttagttgaaaggaagtgaaatcaatgctttacgcaatatatctcaggaaatcccgggcagaccttgaagcagaagccatggga

SEQ ID NO: 17648 - DNA, 260 bp, Unknown; identical to SEQ ID NO: 13134
  Description of Unknown: LeftRegion for integrase B4649 sequence

SEQ ID NO: 17649 - DNA, 260 bp, Unknown
  Description of Unknown: LeftRegion for integrase B4650 sequence
tgacttgcactaccatcaagcccaagccatcgcagaagattttctagctcgcggactaatcaatcaaagtcagtttgaagaaattgaaaaattaaaccggcaatcattcccaccactattagctgagttaatggtctgaatcgttgctatatcaaggttttagagctaacatcacacactgatgaaaggaggtacataaaatggcaagcgtaactaaacttactaaaccacaatcaaaagtccaggcaaccttacaagta

SEQ ID NO: 17650 - DNA, 260 bp, Unknown; identical to SEQ ID NO: 15711
  Description of Unknown: LeftRegion for integrase B4651 sequence

SEQ ID NO: 17651 - DNA, 260 bp, Unknown; identical to SEQ ID NO: 15240
  Description of Unknown: LeftRegion for integrase B4652 sequence

SEQ ID NO: 17652 - DNA, 260 bp, Unknown
  Description of Unknown: LeftRegion for integrase B4653 sequence
gtgaagaaaacgaagatgaccagatcactagtgacgagcgcgaaatagtagataactatcgcgaaagctcgccagagtggcagcagaacatttcgatgaccgccagggcggcagcatcggaatcaaaaaggaaataaaaaagccccgcgcaaccgtccaaagtctcgcagggcaataccaaaaggcaaggtgattttatcatgccaaagggcacacgtgccgctatctatgcgcgtttcagctcgcataaccagagaagc

SEQ ID NO: 17653 - DNA, 260 bp, Unknown
  Description of Unknown: LeftRegion for integrase B4654 sequence
tcgtttgtaatcttttttactttcttcccattgagtatacagattatcattttgtgatatgagattgtcaatcattccatctttttcttttgatttttctcgatacccgtacgctgccattacagatatcaaaagcactgttattataacaaaatccatacaaaacacctcattactatttgatcaaaggagatgattttatgcaaagagcagtaatctatgcacgcttttccagcgatatgcagcgtgaagaatccatt

SEQ ID NO: 17654 - DNA, 260 bp, Unknown
  Description of Unknown: LeftRegion for integrase B4655 sequence
taaaggaacaaccgcatataaagaagtcattaactttatataatataaaaataaccccttaactgcgccaacagtcaagaggtttgaataagcagagtgtgtgtacactcaaccgcaaatagattgtaccacacctgctgcaattttgcaacgggtatttttatacccttttatcaatataccttaaaaggggcgatatagtggaacaattcgatgttaatgaaataataatgtatctgcgaaaaagccgtgccgatgcg

SEQ ID NO: 17655 - DNA, 260 bp, Unknown
  Description of Unknown: LeftRegion for integrase B4656 sequence
gcagatgtaaaggcttggaaaaagtttattccctactcaaaaataaaagagcttttaaataatggtgtttctacaatagcagagctatcagattcttttgatgtagaagctccatatatggctagatgtatacattattattcaaatgaaagtgatagatttacaaaagaagatatagcataaaaaataggagggaaaatatgtatttagtagcttatgctagatactctagcgataaccaaagagaagagtctataact

SEQ ID NO: 17656 - DNA, 260 bp, Unknown
  Description of Unknown: LeftRegion for integrase B4657 sequence
tttttagagttttataccacaaaaattgccccggtgttggcgcaccagggcaataaaagtaataatatctccgaagagataccatcctttggacaagaattattgtatcatcttcggacagccaaagcaagagaacgaaagttcgctggctgttatttttgtacccatttttcacatacaatacataaggagatgatattatgtcgtattgtatctatctacgaaaatccaggaaagacctggaggcagaacaagccggg

SEQ ID NO: 17657 - DNA, 260 bp, Unknown
  Description of Unknown: LeftRegion for integrase B4658 sequence
attggttcggtaatgattttgaagctgttctaaaacagcttttgagagttttttattgtcagaaaaaacaataatcttgaagttatttttacaccatttctggtaaattttagtattagacattttatttcctttcgttaatagttaacgagaaatggtataatgccattgataaaaaatgatatattgaagagaataatatgctatttaattacacacaacctgaggagaaaattaaggcagcagcctatgtcagaatg

SEQ ID NO: 17658 - DNA, 260 bp, Unknown; identical to SEQ ID NO: 14669
  Description of Unknown: LeftRegion for integrase B4659 sequence

SEQ ID NO: 17659 - DNA, 260 bp, Unknown
  Description of Unknown: LeftRegion for integrase B4660 sequence
ctgcgtcatatggggtttaaatatacacaccgcgaaagacatacaagatgtatttgatgtaagttacgcatccgccaaaatacgtgctgaacgaatgcaaatattgtacgaaagaaatagatttttgacgagcccgttggaaaaacgggtatatgataggtttgaaccgtatatacaagcaaacaggagggtttgaggtaatgaatgttgttctatatatgagatacagtagcgatagacaaacggagcagtctatagaa

SEQ ID NO: 17660 - DNA, 260 bp, Unknown
  Description of Unknown: LeftRegion for integrase B4661 sequence
cttttgtagcaaagccattatcatcattattgctcctgagaaacgcaaaaagccccgcgtcctgctggaacaggatacggggcacgccgacggtattcgcagtaccgtatcggcaatttgtaaatctactgtgcgaggctgatttactatattattataccataaatcagtctcctatatagggaaggactgatttttttatgacaaaaaacaaaaaaactgatactgtaagcgaaaaatgcaaagccgttatctatgcc

SEQ ID NO: 17661 - DNA, 260 bp, Unknown
  Description of Unknown: LeftRegion for integrase B4662 sequence
acctttcgtctgacgagcgcgaaatgattgatcattaccgcgaaagttcgcccgagtggcagcaaaacatcgccatgacagccaaggcagctgcaagggaatcaaaagaagattagacataaaaatgccccgcacctatccgccaagaccagtgcagggcttgccaatccgttcaaatgaaaaggcaaggtgattttatcatgccaaaaggcacacgtgccgccatctatgcacgtttcagttcgcataaccagcgaagt

SEQ ID NO: 17662 - DNA, 260 bp, Unknown; identical to SEQ ID NO: 17634
  Description of Unknown: LeftRegion for integrase B4663 sequence

SEQ ID NO: 17663 - DNA, 260 bp, Unknown
  Description of Unknown: LeftRegion for integrase B4664 sequence
gaaatatatgcaaataatggggtttaaaaggataaaaaaataaaaaaacaccccctgctggaacagggggctgcattaaaaacaagagtacgaaaatgacactgtacgaactcacgccgttttcaatgctacatttattatagcattgaaacccatactccgcaagtgtatttttgtacacagaaggaggatataaggcaatgaatgttgttctatatatgagatacagtagcgacaggcaaacggagcagtctatagaa

SEQ ID NO: 17664 - DNA, 260 bp, Unknown
  Description of Unknown: LeftRegion for integrase B4665 sequence
cttgggatgctggaggactggccgaaggtcagtcgtagtggaagcaaggctgcgctggaagacgcacaggctgaaattgagcggtggaggcaagagttccttgccgggaacatctcggcaaagaaatacgtcaaaatcgcggacgctctcatgtccaaataaaaaagccgccctcggtgggcggcgggaggttgctctgaatgtgcgcaaaaaagaaaccggccatgcttgagccggatatgcaggatgccgtgatctac

SEQ ID NO: 17665 - DNA, 260 bp, Unknown
  Description of Unknown: LeftRegion for integrase B4666 sequence
ctgtaattttcttctcatctgacaattcattaaacaaatcatctacttcttttctccatctaagtatttctaaatctttatttttagctatatttttatagtagtatgctgttgcgatagctataacagctactgctaataaaattattaatgtatcacccatattttacacctcaataattttaaaaggagatgactctatgcaaagagcagttatctacgcgcgcttctcttccgacatgcaacgcgaggaaagtatc

SEQ ID NO: 17666 - DNA, 260 bp, Unknown
  Description of Unknown: LeftRegion for integrase B4667 sequence
aaaacacaaaatatttcaaaagataattacccgcttcaaaataaaaaaaatcccgtgccctgctggaaacaggaacacgggacgcgccggcggtattcgcagtaccgtatcggcaatttgtaaatctactgtgcgaggctgatttactatattattataccataaatcagtctcctatatagggaaggactgatttttttatgacaaaaaacaaaaaaactgatactgtaagcgaaaaatgcaaagccgttatctatgcc

SEQ ID NO: 17667 - DNA, 260 bp, Unknown
  Description of Unknown: LeftRegion for integrase B4668 sequence
aggaaaaatgccgtccttcgtccatagactacgatgcgggtattgctatttttgagggttcaggtaaaaagccttacgaaaccacggtaaattcctgcacctgcagagatttctttgtccgccgtttgccgtgcaagcatatctaccggcttcggatggagcttgaaaacagagaagctcgttaaaaatgggggcattatatggctcgatcaaagaaaactgaatgcttgccacttgagcggatcggtgtgatctatgcc

SEQ ID NO: 17668 - DNA, 260 bp, Unknown
  Description of Unknown: LeftRegion for integrase B4669 sequence
aaaggaatccgagcaagtcggcccaacagtcacctcatttcaacgagaggggtggctgttgggtcaattgttcaaaaagaaaaactgaagataataaaaagtcttgatttctccatcaaaacatggtatatacattatacgaaacaatgctttgaaagaacgtttcaccgttcaatgatgtggaatgagaggtgtccgccatgaccgccgtgatttacgcccgctattccagtgataaccagcgcgaagaatccattgag

SEQ ID NO: 17669 - DNA, 260 bp, Unknown
  Description of Unknown: LeftRegion for integrase B4670 sequence
gtggtggtgctcatcatgagcaccaccacacctgtgattttggatattaagggcagacgaaatcttacctatgctttcagcaaaacaattgctcaaatttccccttgcaatctcacttaagttgtggtatatacattatacgaaagctgcttttaaagaacgttccaccgttcaatgatgtgtaaagtgaggtgcctgccatgaccgccgtaatctatgctcgctattcctcggataaccagcgcgaagaatccattgaa

SEQ ID NO: 17670 - DNA, 260 bp, Unknown
  Description of Unknown: LeftRegion for integrase B4671 sequence
cttggaatgctggaggactggccgaaggtcagccgcagtggaagcaaggctgcgctggaagatgcacaggctgaaattgagcggtggaggcaagagttccttgccgggaacatctcggcaaagaaatacgtcaaaattgcggacgctctcatgtccaaataaaaaagccgccctcggtgggcggcgggaggttgctctgaatgtgcgcaaaaaagaaaccggccatgcttgagccggatatgcaggatgccgtgatctac

SEQ ID NO: 17671 - DNA, 260 bp, Unknown; identical to SEQ ID NO: 17636
  Description of Unknown: LeftRegion for integrase B4672 sequence

SEQ ID NO: 17672 - DNA, 260 bp, Unknown; identical to SEQ ID NO: 16986
  Description of Unknown: LeftRegion for integrase B4673 sequence

SEQ ID NO: 17673 - DNA, 260 bp, Unknown
  Description of Unknown: LeftRegion for integrase B4674 sequence
acgagcgcgaaatgattgatcattaccgcgaaagttcacccgagtggcagcaaaacatagccatgacagccaaggctgctgcaagggaatcaaaagaagattaggagatatagacataaaaaaatgccctgcatctatccgccaagaccagatgcagggcttgccaatccgttcaaatgaaaaggcaaggtgattttatcatgccaaagggcacacgtgccgctatctatgcgcgtttcagctcgcataaccagcgaagc

SEQ ID NO: 17674 - DNA, 260 bp, Unknown
  Description of Unknown: LeftRegion for integrase B4675 sequence
catcttctcaaaagaaaagacagggcattttgaaatgagttgaacctaaatgtgcaactccacttatataaatagctcccagatatgatatttcggaaatgaatttaactttttgactgttgaaagtgtggaaagatttattttccccagaacttgcaacggcttgcaacaaacttaaaactacttgaaaggtggtatttatgcctcgtaaaaagaaactgcaagaggtaggtggactgcggctggtggcgtactaccgc

SEQ ID NO: 17675 - DNA, 260 bp, Unknown
  Description of Unknown: LeftRegion for integrase B4676 sequence
attattaaatgctgcgttaaacgacataaattcaaagattgaaaagggctatgtatataagtccagaggaaagagtaggaaataaaaaatccccgcccggcgctggaacaccgaacggggaagaagctgtgatacaatcacaaccttagacaagtttattgtatcatagctccctgaaaatgtcaaggagtgatttaaatttgaaaaccgccgtaatatacgcccggtattcgtccgacaagcaaacggagcagtccatt

SEQ ID NO: 17676 - DNA, 260 bp, Unknown
  Description of Unknown: LeftRegion for integrase B4677 sequence
attgcgccgataatgctctgcgagcatttttttcagcgcttcagataaatccccgttgtttgtaaaaacaatgacgtcaagtgtttttttgcaccacttctggtgctttttagtattagacattttatatcctttcattaacaattaaaaagaaatggtacaatgccattgaaaatttttaatgttaagaagagaaaaatatgctgttaaactatacaaaaatggaggagaaaacaaaagcggccgcatatgtgcgtatg

SEQ ID NO: 17677 - DNA, 260 bp, Unknown
  Description of Unknown: LeftRegion for integrase B4678 sequence
ccttgcggtctgcattgtgtcgctcccggtcggcttgatcattgcgtccgttggagtgtaccgggtggcaaaggccggggatatttatgacgctgcggtcgctcggtacgagcagcaaatctcggactatgttgactggctggatgaagtcaacgcaaaataaaaagccgtcctcggtgggcggcgggaggttgctctgaatgtgtgcaaaaaagaaaccggccatgcttgagccggatatgcaggatgccgtgatctac

SEQ ID NO: 17678 - DNA, 260 bp, Unknown
  Description of Unknown: LeftRegion for integrase B4679 sequence
gcaaggacaacttcattgtgttcatctgcgaacaggatcatgctgtacggatcatccggcagacgttctttgttgagctgttccaattcttcttcggtcagctcgatgcacacttcctgttccagcatggtttcttcctccgaaaatcaatattttactatattatagcacatcattttccattgtgaaaggatattcccatggcgagaaagaagatcaaaaaaggagacggccagcggctcgttgcctactaccgatac

SEQ ID NO: 17679 - DNA, 260 bp, Unknown
  Description of Unknown: LeftRegion for integrase B4680 sequence
aaaataaaaaaccgctcctgcgccaacaggaacggtcaactggggaagcacactccaatgtgctttagtaactccgaagagatactgtcttaccaaagaatattgtatcatcttcggtgcagtcgcacaatcagaacttacgttctatgtatgactgttatttttgtacttttttacataatatatacggaggtgatatcatgtcgtattgtatttatttgaggaaatcaagaaaggatcttgaggccgagcagcatggt

SEQ ID NO: 17680 - DNA, 260 bp, Unknown
  Description of Unknown: LeftRegion for integrase B4681 sequence
cgtgcatttgatgatcgtaaattgaatatgattaacaaacgtcgtgaatttttccatgttacattggatgaaatcaaggaagtagttcgccaaaactatgataaaacagttgagtttgtggatattcctgacgcttcgcaatatcgtgaaagcctaaaaattaaagaagctatgtaaacaccatacgagggagggttagcatgaaagctatctacgtaagacagtcacttgataaaaaggattcgttatccatcgatgcg

SEQ ID NO: 17681 - DNA, 260 bp, Unknown
  Description of Unknown: LeftRegion for integrase B4682 sequence
caacactgataaatttaaaaactaaaaaaatcagccccagcgttggcacgccagagctgatccgatcttaccgggaaacccgataaaaatcatcctgaacaaatgaattttatcattttcccggacaaattgcaatgcgaacatatgtccgggcatttttatgcccatttttccgtacatttacttaggaggaatgtgcaatgtctaagaaagtgatgcgtaagtctacggagtccacggaccggatccgcaccggtgct

SEQ ID NO: 17682 - DNA, 260 bp, Unknown
  Description of Unknown: LeftRegion for integrase B4683 sequence
tcatttgtatgaaaaaatgaagattgaatgtaagcctttccggcaatcttacaatcaaagttcctttttcttcaaatctatcataagtaaaatcaagcacagcctcacctcctaaaacaatgtacttattcattattatataattagaatccactatttgtccatatttttcattagataaactataaggagttgattttatgcaaagagcagttatctacgcgcgcttttcctcggacatgcagcgcgaagagtctatt

SEQ ID NO: 17683 - DNA, 260 bp, Unknown
  Description of Unknown: LeftRegion for integrase B4684 sequence
caacactgataaatttaaaaactaaaaaatcagccccagtgcgccaacaccagagctgatccgatcttaccggggaatcccgtataaaatcaccttgaacaagtgcattttatcattttcccgggcagattgcaatgcaaacatatgtccgggcatttttatgcccatttttccatacatttacttaggaggaatgtgcaatggcaaagaaagtgatgcgtaaatctgctgagtccacggaccggatccgtaccggggct

SEQ ID NO: 17684 - DNA, 260 bp, Unknown
  Description of Unknown: LeftRegion for integrase B4685 sequence
acccggtctgcacttttattgtagcatgatccccctcagaacacaatccgacaaaaaagaatccccggcagctctgtacgatagagccgccggggccagatggggaatctgtctgtcggagaataatcataggataagaaaacacgcctgctgagcaagttcattgtaccatgatcctgctcagcgcacaaggagcaatcatggcaagaagaaagaaagtatctcccgggaaccgtctggttgcctactaccgttacagc

SEQ ID NO: 17685 - DNA, 260 bp, Unknown
  Description of Unknown: LeftRegion for integrase B4686 sequence
tgccccaccagataattaataataataaaatcagccccagtgcgccaacaccggagctgatccgatcttaccgggataaccgataaaaatcatcctaaacaaatgaattttatcatttttccgggcagattgcaatgcgaacatatgtccgggcatttttatgcccatttttccgtacatttacttaggaggaatgtgcaatgtctaagaaagtgatgcgtaagtctacggagtccacggaccggatccgtaccggtgct

SEQ ID NO: 17686 - DNA, 260 bp, Unknown
  Description of Unknown: LeftRegion for integrase B4687 sequence
aaatgatcagttttgtcaaatacataaaatcagccccagtgttggagcaccggagctgatccgatcttaccgggaaatcccgtataaaatcaccttagacaagtgcattttatcattttcccggacagattgcaatgcaaacatatgtccgggcatttttatgcccatttttccgtacatttacttaggaggaatgtgcaatgtctaagaaagtgatgcgtaagtctacggagtccacggaccggatccgtaccggtgct

SEQ ID NO: 17687 - DNA, 260 bp, Unknown
  Description of Unknown: LeftRegion for integrase B4688 sequence
ttcccataataatattttcataaatagtattataggcgaatttcattaactttagccctattttcttggtaatttatcatttacaattctgacagctattgctatacttacattgtcgaatgaggagtcatgaaaatttatctagaatgtaacaaatgttatttacttatctattaactaccatacgagggagggttagcatgaaagctatctacgtgagacagtcacttgataaaaaggattcgttatccatcgatgcg

SEQ ID NO: 17688 - DNA, 260 bp, Unknown
  Description of Unknown: LeftRegion for integrase B4689 sequence
aaatgatcagttttgtcaaatacataaaatcagccccagtgttggagcaccggagctgatccgatcttaccgggaaatcccgtataaaatcaccttagacaagtgcattttatcattttcccggacaaattgcaatgcgaacatatgtccgggcatttttatgcccatttttccgtacatttacttaggaggaatgtgcaatgtctaagaaagtgatgcgtaagtctacggagtccacggaccggatccgcaccggtgct

SEQ ID NO: 17689 - DNA, 260 bp, Unknown
  Description of Unknown: LeftRegion for integrase B4690 sequence
ttaaataaaaaccgctcctgcgccaacaggaacggtcaactggggaagcacacgccaatgtgctttagtaactccgaagagatactgtcttaccaaagaatattgtatcatcttcggcgcagtcgcacaatcagaacttacgttctatgtatgactgttatttttgtacttttttacataatatatacggaggtgatatcatgtcatattgtatttatttaaggaaatcgagaaaggatcttgaagccgagcagcatggt

SEQ ID NO: 17690 - DNA, 260 bp, Unknown
  Description of Unknown: LeftRegion for integrase B4691 sequence
ataaacggttcacgccaaccaataagtaaaaaaatcagccccagtgcgccaacaccggagctgatccgattaccgggtaaaccgataaatcaccttgaacaagtgcattttatcattttcccggacggattgcaatgcaaacatatgtccgggcatttttatgcccatttttccgtacatttacttaggaggaatgtgcaatgtctaagaaagtgatgcgaaaatctccggaagtcacggagcagatccgcaccggtgcc

SEQ ID NO: 17691 - DNA, 260 bp, Unknown
  Description of Unknown: LeftRegion for integrase B4692 sequence
actgtagcgattgcgggtttagctttgactttacaacgcaaaaagatatcgatgacaagtgtaaatcattgttaaatggcggaataggctctattgtagttgcggttattttggggattgctatgtttgctataaatggatatctgcattgaaagcgaataaaagtgttatgtgttgattaaaaggttaggggtgacagtttgagttcagttgacaaaatcgccgttgtttacgcgcggtattcgtcccacggtcagacc

SEQ ID NO: 17692 - DNA, 260 bp, Unknown
  Description of Unknown: LeftRegion for integrase B4693 sequence
gcgaggtgcagcgcttgatcgaatccgaaaagcgcccgtgatcttctttgcgccatccttggcaaaatagccattaaaaaacgccccgcccatgttactagcatggacgagacgaagtattcaattcacactctttttctttatgcggctcatcaagggattcattcaactgttatcactatttaagggggtgatccaatttgaaagccgtcatatatgcacgcttctccagccacaaccagcgcgaagaatccatcgaa

SEQ ID NO: 17693 - DNA, 260 bp, Unknown
  Description of Unknown: LeftRegion for integrase B4694 sequence
aatgatcagttttgtcaaattacataaaatcagccccagtgttggagcaccggagctgatccgatcttaccggggaatcccgtataaaatcaccttgaacaagtgcattttatcattttcccgggcagattgcaatgcaaacatatgtccgggcatttttatgcccatttttccgtacatttacttaggaggaatgtgcaatgtctaagaaagtgatgcgtaagtctacggagtccacggaccggatccgcaccggtgct

SEQ ID NO: 17694 - DNA, 260 bp, Unknown
  Description of Unknown: LeftRegion for integrase B4695 sequence
gcacctattaagccagatctgtttgaacatatagatggactgcgtacctgcgataaacggttcacgccaaccaataagtaaaaaaatcagccccagtgcgccaacaccggagctgatccgattaccgggtaaaccgataaatcaccttgaacaagtgcattttatcattttcccgtacatttacttaggaggaatgtgcaatggccaagaaagtgatacgtaaatctgccgagtccacggaccggatccgtaccggtgct

SEQ ID NO: 17695 - DNA, 260 bp, Unknown
  Description of Unknown: LeftRegion for integrase B4696 sequence
cttttacgtttataaaattacataaaaaatcagccccagtgttgacgcaccggagctgatccgatcttaccgggaatccccgtataaaatcaccttagacaagtgcattttatcattttcccggacagattgcaatgcaaacatatgtccgggcatttttatgcccatttttccgtacatttacttaggaggaatgtgcaatggcaaagaaagtgatacgtaaatctgccgagtccacggaccggatccgtaccggtgct

SEQ ID NO: 17696 - DNA, 260 bp, Unknown
  Description of Unknown: LeftRegion for integrase B4697 sequence
tgttgcaccgatgcaatttacaataaaaaatcagccccagtgcgccaacaccagagctgatccgatcttaccgggaaatccgataaaaatcaccttgaacaagtgcattttatcattttcccggacagatttcaatgcaaacatatgtccgggcatttttatgcccatttttccgtacatttacttaggaggaatgtgcaatggccaagaaagtgatacgtaaatctgccgagtccacggaccggatccgtaccggtgct

SEQ ID NO: 17697 - DNA, 260 bp, Unknown
  Description of Unknown: LeftRegion for integrase B4698 sequence
gatgaactaaactattacagagcgcagaaaatcactgaaatgctctatgaacagggtatgatttcctttgtagagtatgacaaattaaccgaactgaaccgcagatctttctctccgatgtttgcggacttattaccgaaaacacttgataaatcaacagtgcagagttaatatggtgtactgacaaaggaggtaatgacatgcttatcagaaaaattgatgcacagaagcccactgtatcaaagaaacttcgtgtggct

SEQ ID NO: 17698 - DNA, 260 bp, Unknown
  Description of Unknown: LeftRegion for integrase B4699 sequence
tttatcaaattttctttgtcttttcgtcaactcacgctccgcacaatctcttgcataagaatccccggcagctctgtacgatagagccgccggggccagatggggaatctgtctgtcggagaataatcataggataagaaaacacgcctgctgagcaatttcattgtaccatgatcctgctcagcgcacaaggagcaatcatggcaagaaaaaagaaagtatctcccgggaaccgtctggttgcctactaccgttacagc

SEQ ID NO: 17699 - DNA, 260 bp, Unknown
  Description of Unknown: LeftRegion for integrase B4700 sequence
tgttgcaccgatgcaattaacaataaaaaatcagccccagtgcgccaacaccagagctgatccgatcttaccgggaaatccgataaaaatcaccttgaacaagtgcattttatcattttcccggacagatttcaatgcaaacatatgtccgggcatttttatgcccatttttccgtacatttacttaggaggaatgtgcaatggccaagaaagtgatacgtaaatctgccgagtccacggaccggatccgtaccggtgct

SEQ ID NO: 17700 - DNA, 260 bp, Unknown
  Description of Unknown: LeftRegion for integrase B4701 sequence
cagcgcttgatcgaatccgaaaagcgcccgtgaccttcttcgtgccccttttgccacccttggcaaaatagccatcaaaaacgccccgcccatgtttccagcatggacgagacgaagtattcaattcacactctttttctttatgcggctcatcaagggattcattcaactgttatcactatttaagggggtgatccaatttgaaagccgtcatatatgcacgcttctccagccacaaccagcgcgaagaatccatcgaa

SEQ ID NO: 17701 - DNA, 260 bp, Unknown
  Description of Unknown: LeftRegion for integrase B4702 sequence
gttacagcatcattgtagactattctctacctcattgtcaaggtctaacggcaaaaaagaatccccggcagctctgtacgatagagccgccggggccagatggggaatctgtctgtcggagaataatcataggataagaaaacacgcctgctgagcaatttcattgtaccatgatcctgctcagcgcacaaggagcaatcatggcaagaaaaaagaaagtatctcccgggaaccgtctggttgcctactaccgttacagc

SEQ ID NO: 17702 - DNA, 260 bp, Unknown
  Description of Unknown: LeftRegion for integrase B4703 sequence
tgatgccccaccagataattaataataaaatcagccccagtgcgccaacaccggagctgatccgatcttaccgggataaccgataaaaatcatcctgaacaagtgaattttatcatttttccgggcagattgcaatgcgaacatatgtccgggcatttttatgcccatttttccgtacatttacttaggaggaatgtgcaatggcaaaaaaagtgatgcgtaaatctgccgagtccacggaccggatccgtaccggtgct

SEQ ID NO: 17703 - DNA, 260 bp, Unknown
  Description of Unknown: LeftRegion for integrase B4704 sequence
caacactgataaatttaaaaactaaaaaatcagccccagtgcgccaacaccggagctgatccgatcttaccgggaatccccgtataaaatcaccttgaacaagtgcattttatcattttcccgggcagattgcaatgcaaacatatgtccgggcatttttatgcccatttttccgtacatttacttaggaggaatgtgcaatgtctaagaaagtgatgcgtaagtctacggagtccacggaccggatccgcaccggtgct

SEQ ID NO: 17704 - DNA, 260 bp, Unknown
  Description of Unknown: LeftRegion for integrase B4705 sequence
acggttcacgccaaccaataagtaaaaaatcagccccagtgcgccaacaccggagctgatccgatcttaccgggaattcccgtataaaatcaccttgaacaagtgcattttatcatttttccgggcagattgcaatgcgaacatatgtccgggcatttttatgcccatttttccgtacatttacttaggaggaatgtgcaatgtctaagaatgtgatacgtaaatctgccgagtccacggaccggatccgtaccggtgct

SEQ ID NO: 17705 - DNA, 260 bp, Unknown
  Description of Unknown: LeftRegion for integrase B4706 sequence
tgccccaccagataattaataataataaaatcagccccagtgcgccaacaccggagctgatccgatcttaccgggataaccgataaaaatcatcctgaacaagtgaattttatcattttcccggacagattgcaatgcaaacatatgtccgggcatttttatgcccatttttccgtacatttacttaggaggaatgtgcaatgtctaagaaagtgatgcgaaaatcttcggaagtcacggagcagatccgcaccggtgcc

SEQ ID NO: 17706 - DNA, 260 bp, Unknown
  Description of Unknown: LeftRegion for integrase B4707 sequence
aagcaaagatggaattatgctaacagcgtttaatcaagatgtttttccgccaaaatttttttctaacgaggagatagaacaactgcccgtgagaatcgttggaaaggttatagaagttcgcagaaaaatgtagctagaagtccgcttagcggacttcttcgcatgtcaagataaatttatagtgtgctatggagacgaaaatgaaagacgccgttatctatgcccgctactcatctgaccgtcagcgggaagaatccatc

SEQ ID NO: 17707 - DNA, 260 bp, Unknown
  Description of Unknown: LeftRegion for integrase B4708 sequence
tgttgcaccgatgcaatttacaataaaaaatcagccccagtgcgccaacaccagagctgatccgatcttaccgggaaatccgataaaaatcaccttgaacaagtgcattttatcattttcccggacagatttcaatgcaaacatatgtccgggcatttttatgcccatttttccgtacatttacttaggaggaatgtgcaatggccaagaaagtgatgcgtaaatcagctgagtccatggaccggattcgtaccggtgcc

SEQ ID NO: 17708 - DNA, 260 bp, Unknown
  Description of Unknown: LeftRegion for integrase B4709 sequence
ttgagtttattatgtgaaggtctcgtagcaatacgggaccttttacgttatataaaaaaccgccccggtgcgccaacaccaggacggcaaccgcactccgaaaagctacggccgtacaagtcatagtataccacacggagcgcgggaaaatcaatgaaaccgcgctatttttgcgcccattttcagattggaggtacactatgaatgctgtaatttacgccagatactctcccggcccccggcagaccgatcagagcatt

SEQ ID NO: 17709 - DNA, 260 bp, Unknown
  Description of Unknown: LeftRegion for integrase B4710 sequence
caacactgataaatttaaaaactaaaaaatcagccccagtgcgccaacaccggagctgatccgatcttaccggggaatcccgtataaaatcaccttgaacaagtgcattttatcattttcccgggcagattgcaatgcaaacatatgtccgggcatttttatgcccatttttccgtacatttacttaggaggaatgtgcaatggcaaagaaagtgatgcgtaaatctgctgagtccacggaccggatccgtaccggtgct

SEQ ID NO: 17710 - DNA, 260 bp, Unknown
  Description of Unknown: LeftRegion for integrase B4711 sequence
cgtgcatttgatgatcgtaaattgaatatgattaacaaacgtcgcgaatttttccatgttacattggatgaaatcaaggaagtagttcgccaaaactatgataaaacagttgagtttgtggatattcctgacgcttcgcaatatcgtgaaagcctaaaaattaaggaagctatgtaaacaccatacgagggagggttagcatgaaagctatctacgtaagacagtcacttgataaaaaggattcgttatccatcgatgcg

SEQ ID NO: 17711 - DNA, 260 bp, Unknown; identical to SEQ ID NO: 17680
  Description of Unknown: LeftRegion for integrase B4712 sequence

SEQ ID NO: 17712 - DNA, 260 bp, Unknown
  Description of Unknown: LeftRegion for integrase B4713 sequence
ttaaataaaaaccgctcctgcgccaacaggaacggtcaactggggaagcacacgccaatgtgctttagtaactccgaagagatactgtcttaccaaagaatattgtatcatcttcggtgcagtcgcacaatcagaacttacgttctatgtatgactgttatttttgtacttttttacataatatatacggaggtgatatcatgtcatattgtatttatttaaggaaatcgagaaaggatcttgaagccgagcagcatggt

SEQ ID NO: 17713 - DNA, 260 bp, Unknown
  Description of Unknown: LeftRegion for integrase B4714 sequence
agcgcaagcaaagacatgctccaatccgcatcacgacctagccgccatttttccagtgacggaaaaatagccatcaaaaaacgccccgcccatgttaccagcatgagcgagacgaagtattcaattcacactctttttctttatgcggctcatcaagggattcattcaactgttatcactatttaagggggtgatccaatttgaaagccgttatatatgcccgcttctccagccacaaccagcgcgaagaatccatcgaa

SEQ ID NO: 17714 - DNA, 260 bp, Unknown
  Description of Unknown: LeftRegion for integrase B4715 sequence
ggcttctttcgttgtgtagctacaaaaaatcagcccctgtgttggcgcaccggagctgatccgatcttaccgggaattcccgtataaaatcaccttgaacaagtgcattttatcattttcccgggcagattgcaatgcaaacatatgtccgggcatttttatgcccatttttccgtacatttacttaggaggaatgtgcaatggccaaaaaagtgatgcgtaaatctgctgagtccacggacccgattcgtaccggtgcc

SEQ ID NO: 17715 - DNA, 260 bp, Unknown
  Description of Unknown: LeftRegion for integrase B4716 sequence
aaaataaaaaaccgctcctgcgccaacaggaacggtcaactggggaagcacacgccaatgtgctttagtaactccgaagagatactgtcttgccaaagaatattgtatcatcttcggtgcagtcgcacaatcagaacttacgttctatgtatgactgttatttttgtacttttttacataatatatacggaggtgatatcatgtcatattgtatttatttaaggaaatcgagaaaggatcttgaagccgagcagcatggt

SEQ ID NO: 17716 - DNA, 260 bp, Unknown
  Description of Unknown: LeftRegion for integrase B4717 sequence
gcccctccagataattaataataataaaatcagccccagtgcgccaacaccggagctgatccgatcttaccgggaattcccgtataaaatcaccttgaacaagtgaattttatcattttcccggacagattgcaatgcaaacatatgtccgggcatttttatgcccatttttccgtacatttacttaggaggaatgtgcaatggcaaaaaaagtgatgcgtaaatctgccgagtccacggaccggatccgtaccggtgct

SEQ ID NO: 17717 - DNA, 260 bp, Unknown
  Description of Unknown: LeftRegion for integrase B4718 sequence
gtaaaagtacatgcaatagtggttgttgcaaattacgcaacaactaaaaaagtcccgtgccctgctggaacaggtacacgggacgcgccgtcggtattggcgtaccgtatcggcaatttgtaaatctactgtgcgaggctgatttactctattattataccataaatcagtctcttatatagggaaggactgatttttttatgccaaaaaacaaaaaatctgataatgtaaacgaaaaatgcaaagcagttatctatgcc

SEQ ID NO: 17718 - DNA, 260 bp, Unknown; identical to SEQ ID NO: 15842
  Description of Unknown: LeftRegion for integrase B4719 sequence

SEQ ID NO: 17719 - DNA, 260 bp, Unknown; identical to SEQ ID NO: 17714
  Description of Unknown: LeftRegion for integrase B4720 sequence

SEQ ID NO: 17720 - DNA, 260 bp, Unknown
  Description of Unknown: LeftRegion for integrase B4721 sequence
tttttttatgcaattatataaatttataaacttgaataacttaaaaaagtataaatgataaagcaaagaaattctagaaattttaaaattaacagagagcctttaaagcaagtgtttacctagtgttcacctaattaaaacttggaatttattgatgaaaatggtataatcactctagaaaataaggaggatggaattgtatgagtcaagaaacaaaagagaaggtttatttatatgctagagtatctactactagtgag

SEQ ID NO: 17721 - DNA, 260 bp, Unknown; identical to SEQ ID NO: 13020
  Description of Unknown: LeftRegion for integrase B4722 sequence

SEQ ID NO: 17722 - DNA, 260 bp, Unknown
  Description of Unknown: LeftRegion for integrase B4723 sequence
gaccccgccgcgcctctcaacgatgcgtaccatggtggggtcgtttttattgcaaaaagaatccccggcagctctgtacgatagagccgccggggccagatggggaatctgtctgtcggagaataatcataggataagaaaacacgcctgctgagcaatttcattgtaccatgatcctgctcagcgcacaaggagcaatcatggcaagaagaaagaaagtatctcccgggaaccgtctggttgcctactaccgttacagc

SEQ ID NO: 17723 - DNA, 260 bp, Unknown
  Description of Unknown: LeftRegion for integrase B4724 sequence
aaataaaaaaaccgctcctgcgccaacaggaacggtcaactggggaagcacacgccaatgtgctttagtaactccgaagagatactgtcttaccaaagaatattgtatcatcttcggtgcagtcgcacaatcagaacttacgttctatgtatggctgttatttttgtacttttttacataatatatacggaggtgatatcatgtcgtattgtatttatttaagaaaatcgagaaaggatcttgaagccgagcagcatggt

SEQ ID NO: 17724 - DNA, 260 bp, Unknown; identical to SEQ ID NO: 17712
  Description of Unknown: LeftRegion for integrase B4725 sequence

SEQ ID NO: 17725 - DNA, 260 bp, Unknown
  Description of Unknown: LeftRegion for integrase B4726 sequence
taagttgcaccagtgcaatttgcaataaaatcagccccagtgttggcgcaccggagctgattcgatcttaccgggtaaaccgaataaaatcaccttgaacaagtgcattttatcattttcccgggcggattgcaacgcaaacatatgtccgggcatttttatgcccatttttccgtacatttacttaggaggaatgtgcaatgtctaagaaagtgatgcgtaagtctacggagtccacggaccggatccgcaccggtgct

SEQ ID NO: 17726 - DNA, 260 bp, Unknown
  Description of Unknown: LeftRegion for integrase B4727 sequence
ttaaataaaaaccgctcctgcgccaacaggaacggtcaactggggaagcacacgccaatgtgctttagtaactccgaagagatactgtcttaccaaagaatattgtatcatcttcggtgcagtcgcacaatcagaacttacgttctgtgtatggctgttatttttgtacttttttacataatatatacggaggtgatatcatgtcatattgtatttatttaaggaaatcaagaaaggatcttgaggccgaacagcatggt

SEQ ID NO: 17727 - DNA, 260 bp, Unknown; identical to SEQ ID NO: 17686
  Description of Unknown: LeftRegion for integrase B4728 sequence

SEQ ID NO: 17728 - DNA, 260 bp, Unknown
  Description of Unknown: LeftRegion for integrase B4729 sequence
cgtgcatttgatgatcgtaaattgaatatgattaacaaacgtcgtgaatttttccatgttacattggatgaaatcaaggaagtagttcgccaaaactatgataaaacagttgaatttgtggatattcctgacgcttcgcaatatcgtgaaagcctaaaaattaaggaagctatgtaaacaccatacgagggagggtaagcatgaaagctatctacgtaagacagtcacttgataaaaaggattcgttatccatcgatgcg

SEQ ID NO: 17729 - DNA, 260 bp, Unknown
  Description of Unknown: LeftRegion for integrase B4730 sequence
tttatcaaattttctttgtcttttcgtcaactcacgctccgcacaatctcttgcataagaatccccggccgctctgtacgatagagccgccggggccagatggggaatctgtctgtcggagaataatcataggataagaaaacacgcctgctgagcaatttcattgtaccatgatcctgctcagcgcacaaggagcaatcatggcaagaagaaagaaagtatctcccgggaaccgtctggttgcctactaccgttacagc

SEQ ID NO: 17730 - DNA, 260 bp, Unknown
  Description of Unknown: LeftRegion for integrase B4731 sequence
agagcaaaagaaaaaattgaaataaaaaatcagccccagtgcgccaacaccggagctgatccgatcttaccgggaattcccgtataaaatcaccttgaacaagtgaattttatcattttcccggacagattgcaatgcaaacatatgtccgggcatttttatgcccatttttccgtacatttacttaggaggaatgtgcaatggccaagaaagtgatacgtaaatctgccgagtccacggaccggattcgtaccggtgct

SEQ ID NO: 17731 - DNA, 260 bp, Unknown
  Description of Unknown: LeftRegion for integrase B4732 sequence
cggttcacgccaaccaataagtaaaaaaatcagccccagtgcgccaacaccggagccgatccgatcttaccgggaaatcccgtataaaatcaccttagacaagtgcattttatcattttcccggacagattgcaatgcaaacatatgtccgggcatttttatgcccatttttccgtatatttacttaggaggaatgtgcaatgtctaagaaagtgatgcgaaaatcttcggaagtcacggagcagatccgcaccggtgcc

SEQ ID NO: 17732 - DNA, 260 bp, Unknown; identical to SEQ ID NO: 17709
  Description of Unknown: LeftRegion for integrase B4733 sequence

SEQ ID NO: 17733 - DNA, 260 bp, Unknown
  Description of Unknown: LeftRegion for integrase B4734 sequence
ctgaacttggttttccctctaactggcatgagcttatcaaataatcatcatctataaagaatccccggcagctctgtacgatagagccgccggggccagatggggaatctgtctgtcggagaataatcataggataagaaaacacgcctgctgagcaatttcattgtaccatgatcctgctcagcgcacaaggagcaatcatggcaagaaaaaagaaagtatctcccgggaaccgtctggttgcctactaccgttacagc

SEQ ID NO: 17734 - DNA, 260 bp, Unknown
  Description of Unknown: LeftRegion for integrase B4735 sequence
gtgaagagaacgaagatgacaagatcactagcgatgagcgcgaaatagtagataactaccgcgacagctcgccagagtggcaacaaaacatttcgatgaccgccagagcggcggcttctgaatcgaaaaggaaataaaaaagccccgcgcaaccgtccaaagtctcgcagggcaataccaaaaggcaaggtgattttaacatgccaaaaggcacacgtgccgcgatttacgcgcggtttagttcgcataaccaacgaagc

SEQ ID NO: 17735 - DNA, 260 bp, Unknown
  Description of Unknown: LeftRegion for integrase B4736 sequence
aaataaaaaaaccgctcctgcgccaacaggaacggtcaactggggaagcacactccaatgtgctttagtaactccgaagagatactgtcttaccaaagaatattgtatcatcttcggtgcagtcgcacaatcagaacttacgttctatgtatgactgttatttttgtacttttttacataatatatacggaggtgatatcatgtcgtattgtatttatttgaggaaatcaagaaaggatcttgaggccgagcagcatggt

SEQ ID NO: 17736 - DNA, 260 bp, Unknown
  Description of Unknown: LeftRegion for integrase B4737 sequence
actggataggcgttagtttcagaaggaggtccgtcattcgtggcgggctttctgagccgatattcgttacatagcgctatgctttaagatgagaatcgttggaaaggttatagaggttcgcagaaaaatgtaactagaagtccgcttagcggacttcttctcatgccaagataaattcacagtgtgctatggagacaaaaatgaaagacgccgttatctatgcccgctactcgtctgaccggcagcgggaagaatccatc

SEQ ID NO: 17737 - DNA, 260 bp, Unknown
  Description of Unknown: LeftRegion for integrase B4738 sequence
tgtaagaaatgttttcggaaataataagcattttgtgtcgatggagcaccagtgtatttatacaggcaatactaaaaatggcagcttgggaagatcgcctgacctaatccaccgaagttcctagccataaaaatgcgatatgcagaacgcttacaaaataagttgcaccggtgcaactcaaattatttggaggtatcgtgatgtctggtaaaaagaaactagctgaagatgctgaaccgctgcgcacaggtgcagcctat

SEQ ID NO: 17738 - DNA, 260 bp, Unknown
  Description of Unknown: LeftRegion for integrase B4739 sequence
ctttaattcattattcaatttgcaattcttttcttcgctgcgttctaaattgtattggcttaaagccaactcttttgtgcattgaattagtttcgtcctaatattatcgtagtcaaacattttagtcaccttaccaactctaattattttattcaattattgtcttgcttaaatactattttatcaaaggagatgactctatgcaaagagcagttatctacgcgcgcttttcctcggacatgcagcgcgaagagtctatt

SEQ ID NO: 17739 - DNA, 260 bp, Unknown
  Description of Unknown: LeftRegion for integrase B4740 sequence
ccacagccgtatcccttgaccaagcaattgcagcgggctatactgcatgtgaaaaatgttgttaaaataaaaaaacgcctcggcgtgggagcaccgaagcgtttatagaacagcttacccttggaggataatccgccccaacaatcggattataccacctccggggtaggcttggcaagtcatactttggaggtattacagtgaatcgagcggtaatctatgcccgatacagcagtgacatgcagcgtgaagaaagcgtg

SEQ ID NO: 17740 - DNA, 260 bp, Unknown
  Description of Unknown: LeftRegion for integrase B4741 sequence
ttaaataaaaaccgctcctgcgccaacaggaacggtcaactggggaagcacacgccaatgtgctttagtaactccgaagagatactgtcttaccaaagaatattgtatcatcttcggtgcagtcgcacaatcagaacttacgttctgtgtatggctgttatttttgtacttttttacataatatatacggaggtgatatcatgtcgtattgtatttatttgaggaaatcaagaaaggatcttgaagccgagcagcatggt

SEQ ID NO: 17741 - DNA, 260 bp, Unknown
  Description of Unknown: LeftRegion for integrase B4742 sequence
aaccaaagatggaattatgctaacagcgtttaatcaagatgtttttccgccaaaatttttttctaacgaggagatagaacaactgcccgtgagaatcgttggaaaggttatagaagttcgcagaaaaatgtagctagaagtccgcttagcggacttcttagcatgtcaagataaatttatagtgtgctatggagacgaaaatgaaagacgccgttatctatgcccgctactcatctgaccgtcagcgggaagaatccatc

SEQ ID NO: 17742 - DNA, 260 bp, Unknown
  Description of Unknown: LeftRegion for integrase B4743 sequence
aaaattgcaccagtgcaactttcaataaaaaaatcagccccagtgcttccaacaccagagctgatccgattaccgggtaaaccgataaatcaccttgaacaagtgcattttatcattttcccggacagattgcaatgcaaacatatgtccgggcatttttatgcccatttttccgtacatttacttaggaggaatgtgcaatggtcaagaaagtgatacgtaaatctgccgagtccacggaccggatccgtaccggtgct

SEQ ID NO: 17743 - DNA, 260 bp, Unknown; identical to SEQ ID NO: 17742
  Description of Unknown: LeftRegion for integrase B4744 sequence

SEQ ID NO: 17744 - DNA, 260 bp, Unknown
  Description of Unknown: LeftRegion for integrase B4745 sequence
gcaaggacaacttcattgtgttcatctgcgaacaggatcatgctgtacggatcatccggcagacgttctttgttgagctgttccaattcttcttcggtcagctcgatgcacacttcctgttccagcatggtttcttcctccgaaaatcaatattttactatattatagcacatcattttccattgtgaaagggtattcccatggcgagaaagaagatcaaaaaaggagacggccagcggctcgttgcctactaccgatac

SEQ ID NO: 17745 - DNA, 260 bp, Unknown
  Description of Unknown: LeftRegion for integrase B4746 sequence
tgtattgaaacgttgtatagctataaaaaatcagccccagtgcgccaacaccggagctgatccgatcttaccgggaaacccgataaaaatcatcctgaacaaatgaattttatcattttcccggacagattgcaatgcaaacatatgtccgggtatttttatgcccatttttccgtacatttacttaggaggaatgtgcaatggcaaagaaagtgatgcgtaaatctgctgagtccacggaccggatccgtaccggtgct

SEQ ID NO: 17746 - DNA, 260 bp, Unknown
  Description of Unknown: LeftRegion for integrase B4747 sequence
gaccccgccgcgcctctcaacgatgcgtaccatggtggggtcgtttttattgcaaaaagaatccccggcagctctgtacgatagagccgccggggccagatggggaatctgtctgtcggagaataatcataggataagaaaacacgcctgctgagcaatttcattgtaccatgatcctgctcagcgcacaaggagcaatcatggcaagaaaaaagaaagtatctcccgggaaccgtcttgttgcctactaccgttacagc

SEQ ID NO: 17747 - DNA, 260 bp, Unknown
  Description of Unknown: LeftRegion for integrase B4748 sequence
gggatgatattatcctacactgcttcgtgcggtgccgccgtgaatttcagcgatgagtggtatataaactccagcgagcaggagcttgcctttcgttgtgagaacatgagaagcactgccgagcagatagcgcaggaattgcagctccgacaactccggggagatctgcagagaagtcgtgaaacgtctgtgtgctagcaatgtacgctgtttacctgcggaaatcccgggcagacctggaagcggaggctatgggtcag

SEQ ID NO: 17748 - DNA, 260 bp, Unknown
  Description of Unknown: LeftRegion for integrase B4749 sequence
aaattgcaccagtgcaactttcaataaaaaaaatcagccccagtgcttccaacaccagagctgatccgattaccgggtaaaccgataaatcaccttgaacaagtgcattttatcattttcccggacagattgcaatgcaaacatatgtccgggcatttttatgcccatttttccgtacatttacttaggaggaatgtgcaatggccaagaaagtgatacgtaaatctgccgagtccacggaccggatccgtaccggtgct

SEQ ID NO: 17749 - DNA, 260 bp, Unknown
  Description of Unknown: LeftRegion for integrase B4750 sequence
aaaataaaaaaccgctcctgcgccaacaggaacggtcaactggggaagcacacgccaatgtgctttagtaactccgaagagatactgtcttgccaaggaatattgtatcatcttcggtgcagtcgcacaatcagaacttacgttctatgtatgactgttatttttgtacttttttacataatatatacggaggtgatatcatgtcatattgtatttatttaaggaaatcgagaaaggatcttgaagccgagcagcatggt

SEQ ID NO: 17750 - DNA, 260 bp, Unknown; identical to SEQ ID NO: 16402
  Description of Unknown: LeftRegion for integrase B4751 sequence

SEQ ID NO: 17751 - DNA, 260 bp, Unknown; identical to SEQ ID NO: 17689
  Description of Unknown: LeftRegion for integrase B4752 sequence

SEQ ID NO: 17752 - DNA, 260 bp, Unknown
  Description of Unknown: LeftRegion for integrase B4753 sequence
cttttacgtttataaaattacataaaaaatcagccccagtgttggcgcaccggagctgattcgatcttaccgggaaatcccgtataaaatcaccttagacaagtgcattttatcattttcccggacggattgcaatgcaaacatatgtccgggcatttttatgcccatttttccgtacatttacttaggaggaatgtgcaatggcaaaaaaagtgatacgtaaatctgccgagtccacggaccggatccgtaccggtgct

SEQ ID NO: 17753 - DNA, 260 bp, Unknown; identical to SEQ ID NO: 17733
  Description of Unknown: LeftRegion for integrase B4754 sequence

SEQ ID NO: 17754 - DNA, 260 bp, Unknown
  Description of Unknown: LeftRegion for integrase B4755 sequence
ataattttaaaggtgtcgaaattgacccctttgataaaaaaaagaattagaaagtgtttgagttttcgcacagcacaaccacttatctaattccacaaaaaaatccttgaaataaggtttctttatgttataaattataacataaaaaagtaccttttttcaagagattaaattaattttagaaagaaggtatttttattatgctagaaaatataaatactaatatggaatattatgcagcttatttaagaaaatcacgt

SEQ ID NO: 17755 - DNA, 260 bp, Unknown
  Description of Unknown: LeftRegion for integrase B4756 sequence
cgtgcatttgatgatcgtaaattgaatatgattaacaaacgtcgtgaatttttccatgttacattggatgaaatcaaggaagtagttcgccaaaactatgataaaacagttgagtttgtggatattcctgacgcttcacaatatcgtgaaagcctaaaaattaaggaagctatgtaaacaccatacgagggagggttagcatgaaagctatctacgtaagacagtcacttgataaaaaggattcgttatccatcgatgcg

SEQ ID NO: 17756 - DNA, 260 bp, Unknown
  Description of Unknown: LeftRegion for integrase B4757 sequence
acccggtctgcatttttattgtagcatgatccccctcagaacacaatccgacaaaaaagaatccccggcagctctgtacgatagagccgccggggccagatggggaatctgtctgtcggagaataatcataggataagaaaacacgcctgctgagcaatttcattgtaccatgatcctgctcagcgcacaaggagcaatcatggcaagaaaaaagaaagtatctcccgggaaccgtctggttgcctactaccgttacagc

SEQ ID NO: 17757 - DNA, 260 bp, Unknown; identical to SEQ ID NO: 17735
  Description of Unknown: LeftRegion for integrase B4758 sequence

SEQ ID NO: 17758 - DNA, 260 bp, Unknown
  Description of Unknown: LeftRegion for integrase B4759 sequence
aaataaaaaaaccgctcctgcgccaacaggaacggtcaactggggaagcacactccaatgtgctttagtaactccgaagagatactgtcttaccaaagaatattgtatcatcttcggtgcagtcgcacaatcagaacttacgttctatgtatgactgttatttttgtacttttttacataatatatacggaggtgatatcatgtcatattgtatttatttaagaaaatcgagaaaggatcttgaagccgagcagcatggc

SEQ ID NO: 17759 - DNA, 260 bp, Unknown
  Description of Unknown: LeftRegion for integrase B4760 sequence
ttaaataaaaaccgctcctgcgccaacaggaacggtcaactggggaagcacacgccaatgtgctttagtaactccgaagagatactgtcttaccaaagaatattgtatcatcttcggtgcagtcgcacaatcagaacttacgttctgtgtatggctgttatttttgtacttttttacataatatatacggaggtgatatcatgtcatattgtatttatttaaggaaatcgagaaaggatcttgaagccgagcagcatggt

SEQ ID NO: 17760 - DNA, 260 bp, Unknown
  Description of Unknown: LeftRegion for integrase B4761 sequence
cgtgcatttgatgatcgtaaattgaatatgattaacaaacgtcgtgaatttttccatgttacattggatgaaatcaaggaagtagttcgccaaaactatgataaaacagttgagtttgtggatattcctgacgcttcgcaatatcgtgaaagcctaaaaattaaggaagctatgtaaacaccatacgagggagggttagcatgaaagctatctacgtaagacagtcacttgataaaaaggattcgttatccatcgatgcg

SEQ ID NO: 17761 - DNA, 260 bp, Unknown
  Description of Unknown: LeftRegion for integrase B4762 sequence
cggttcacgccaaccaataagtaaaaaaatcagccccagtgcgccaacaccggagctgatccgatcttaccggggaatcccgtataaaatcaccttgaacaagtgcattttatcattttcccgggcagattgcaatgcaaacatatgtccgggcatttttatgcccatttttccgtacatttacttaggaggaatgtgcaatggtcaagaaagtgatacgtaaatctgccgagtccacggaccggatccgtaccggtgct

SEQ ID NO: 17762 - DNA, 260 bp, Unknown
  Description of Unknown: LeftRegion for integrase B4763 sequence
caatagaaaaaccgctcctgcgccaacaggaacggtcaactggggaagcacacgccaatgtgctttagtaactccgaagagatactgtcttaccaaagaatattgtatcatcttcggtgcagtcgcacaatcagaacttacgttctatgtatgactgttatttttgtacttttttacataatatatacggaggtgatatcatgtcatattgtatttatttgaggaaatcaagaaaggatcttgaagccgagcagcatggt

SEQ ID NO: 17763 - DNA, 260 bp, Unknown
  Description of Unknown: LeftRegion for integrase B4764 sequence
ttgacggtgaagtagttcaaggaacttatcaataattaaaaccgccccacggcaatggagcggttctgaagagcagcacggcaatgctgcgtaggttagaaaaagatttatccaccacgataatgctttttctatacccaattctatcaaattcacaaacttttctcaagtatgcataaatttgaatggagggtattactatgaaagctgaagaagtactcatctacttaagaaaatccagatcagacagtccagatgaa

SEQ ID NO: 17764 - DNA, 260 bp, Unknown
  Description of Unknown: LeftRegion for integrase B4765 sequence
aagcaaagatggaattatgctaacagcgtttaatcaggatgttttcccaccaaaatttttttctaacgaggagatagaacaactgcccgtgagaatcgttggaaaggttatagaggttcgcagaaaaatgtagctagaagtccgcttagcggacttcttagcatgtcaagataaatttatagtgtgctatggagacgaaaatgaaagacgccgttatctatgcccgctactcgtctgaccggcagcgggaagaatccatc

SEQ ID NO: 17765 - DNA, 260 bp, Unknown
  Description of Unknown: LeftRegion for integrase B4766 sequence
caattaaaaaccgttcctgcgccaacaggaacggtcaactggaagcacacaccaatgtgcttttgaaatacctccgaagagatactctactaccaaggaatattgtatcatcttcggtgcagtcgcacaatcagaacttatgttctatgtatgactgttatttttgtacttttttacataatatatacggaggtgatatcatgtcgtattgcatttatttgaggaaatcaagaaaggatcttgaagccgagcagcatggt

SEQ ID NO: 17766 - DNA, 260 bp, Unknown; identical to SEQ ID NO: 17762
  Description of Unknown: LeftRegion for integrase B4767 sequence

SEQ ID NO: 17767 - DNA, 260 bp, Unknown
  Description of Unknown: LeftRegion for integrase B4768 sequence
aactcttgtaacttggatgatatatgcgtaatccgtagcaacaaaacatccaaagctgttgttcgaaaatttgtaaagatagataatcaaaccgctttatttcaagctttgaacacgagttatcaatcatttgttttcacaaatcccgatcaatacgaaattgtaggtgttgttgtaggattacacagggagttttagctgtgaaagctgtaatatatgctcgatattcgagccacaagcagaatgaagaatccattgaa

SEQ ID NO: 17768 - DNA, 260 bp, Unknown
  Description of Unknown: LeftRegion for integrase B4769 sequence
cgctgccaagacgaagggcttgactattacatgcaagatggtgaggttttgaaaaaagcgcaataaaaaaatcccgccccctgcgccaacaggaaacgggaaaagtagaacagcttatccttggaggataatccgccccaacaattggattataccacctcctgggtaggcttggcaagtcatactttggaggtattacagtgaatcgagcggtaatctatgcccgatacagcagtgacatgcagcgtgaagaaagcgtg

SEQ ID NO: 17769 - DNA, 260 bp, Unknown
  Description of Unknown: LeftRegion for integrase B4770 sequence
actaaaataaaaaccgctcctgcgccaacaggaacggtcaactggaagcacacgccaatgtgctttagtaactccgaagagatactgtcttaccaaagaatattgtatcatcttcggttcagtcgcacaatcagaacttacgttctgtgtatggctgttatttttgtactcttttacataatatatacggaggtgatatcatgtcgtattgtatttatttaagaaaatcaagaaaggatcttgaagccgagcagcatggt

SEQ ID NO: 17770 - DNA, 260 bp, Unknown
  Description of Unknown: LeftRegion for integrase B4771 sequence
ccgtcatcatatgctattgcggtttctgatccgacaatatcttttactaaaatagtcatttcgcacctctcatattttaaatgtcattaagggatatactgtcaactttcttgttgtcagcataacattttataattatataattagaatccactatttgtccatatttttcattgaataacctataaggagttgattttatgcaaagagcagttatctacgcgcgcttttcctcggacatgcagcgcgaagaatctatt

SEQ ID NO: 17771 - DNA, 260 bp, Unknown
  Description of Unknown: LeftRegion for integrase B4772 sequence
aacttctgaatacggagaacagttcaccgctgaagaagctcagtatgctattgataatcttgaataaataaaaaacgccccggcgtgggagcaccgaagcgtttatagaacagcttacccttggaggataatccgccccaacaattggattataccacctccgggttaggcttggcaagtcatactttggaggtattacagtgaatcgagcggtaatctatgcccgatacagcagtgacatgcagcgtgaagaaagcgtg

SEQ ID NO: 17772 - DNA, 260 bp, Unknown
  Description of Unknown: LeftRegion for integrase B4773 sequence
aaaatctttaatggcagcttgctcttgttgattgagctgcttgtacatattgataaattcgttatccatatagcttcccctatatacaatttatggttgtttaacttgcctatactatacaactataaaattggaaagtcaatagatgtactattgaaaattgtaataacatttggaaaaactaaccaagaggttctattatgaaagcctgtctttatctccgatattccagcagctctcaaacggagcagtccattgag

SEQ ID NO: 17773 - DNA, 260 bp, Unknown
  Description of Unknown: LeftRegion for integrase B4774 sequence
gttgcaccgatgcaatttacaataaaaaatcagccccagtgcgccaacaccggagctgatccgatcttaccgggaatccccgtataaaatcaccttgaacaagtgcattttatcattttcccgggcagattgcaatgcaaacatatgtccgggcatttttatgcccatttttccgtacatttacttaggaggaatgtgcaatgtctaagaaagtgatgcgtaagtctacggagtccacggaccggatccgcaccggtgct

SEQ ID NO: 17774 - DNA, 260 bp, Unknown
  Description of Unknown: LeftRegion for integrase B4775 sequence
aagcaaagatggaattatgctaacagcgtttaatcaagatgttttcccgccaaaatttttttctaactcagagatagaacaactgccagtgagaatcattggaaagattatagaggttcgcagaaaaatgtagctagaagtccgattagcggacttcttcgcatgtcaagataaatttatagtgtgctatggagacgaaaatgaaagacgccgttatctatgcccgctactcatctgaccgtcagcgggaagaatccatc

SEQ ID NO: 17775 - DNA, 260 bp, Unknown; identical to SEQ ID NO: 15878
  Description of Unknown: LeftRegion for integrase B4776 sequence

SEQ ID NO: 17776 - DNA, 260 bp, Unknown
  Description of Unknown: LeftRegion for integrase B4777 sequence
attattaaatgctgcgttaaacgacataaattcaaagattgaaaagggctatgtatataagcccagaggaaagagtaggaaataaaaaatccccgcccggcgctggaacaccgaacggggaagaagctgtgatacaatcacaaccttagacaagtttattgtatcatagctccctgaaaatgtcaaggagtgatttaaatttgaaaaccgccgtaatatacgcccgatattcatcggacaagcagacggagcagtccatt

SEQ ID NO: 17777 - DNA, 260 bp, Unknown; identical to SEQ ID NO: 17736
  Description of Unknown: LeftRegion for integrase B4778 sequence

SEQ ID NO: 17778 - DNA, 260 bp, Unknown
  Description of Unknown: LeftRegion for integrase B4779 sequence
agcgcaagcaaagacatgctccaatccgcatcacgacctagccgccatttttccagtgacggaaaaatagccatcaaaaaacgccccgcccatgtttccagcatggacgagacgaagtattcaattcacactctttttctttatgcggctcatcaagggattcattcaactgttatcactatttaagggggtgatccaatttgaaagccgtcatatatgcccgcttctccagccacaaccagcgcgaagaatccatcgaa

SEQ ID NO: 17779 - DNA, 260 bp, Unknown
  Description of Unknown: LeftRegion for integrase B4780 sequence
gttccggtagcaaaggaatacagagatactttagcgatggcataattatattttatttaacaaacaaaaaagccgcccgatgctgcaacatcaggcgacacaccttaaaaggcttatgtaagttattacacaacaagtatatcataagtctatctattttgataggcttatttttatgcatttttgaaaggatgatgattatgaaagctatctatgttagacaatctctcgataaaaaagattctctttctattgctgca

SEQ ID NO: 17780 - DNA, 260 bp, Unknown; identical to SEQ ID NO: 17773
  Description of Unknown: LeftRegion for integrase B4781 sequence

SEQ ID NO: 17781 - DNA, 260 bp, Unknown
  Description of Unknown: LeftRegion for integrase B4782 sequence
attatctattctgtttatctgattcaccttgcccaaaagtagagatttccctaacggaagaagagcaattactgcttgacgcatttcgttccgctaccccacaaggcagattcaacattattaccacctgtatgtgtgagaagcgaaaaggggacaacgaaagtgtcgggtaattgatttcatagaatggaggaagaaccatgtatgaggatataaaaacagcctgcctatacgttagattctcaagccataaccagact

SEQ ID NO: 17782 - DNA, 260 bp, Unknown; identical to SEQ ID NO: 17740
  Description of Unknown: LeftRegion for integrase B4783 sequence

SEQ ID NO: 17783 - DNA, 260 bp, Unknown
  Description of Unknown: LeftRegion for integrase B4784 sequence
ttaccgtatttagatatgttataagtataaaaaatcagccccagtgcgccaacaccggagctgatccgattaccgggtaaaccgataaatcaccttgaacaagtgcattttatcattttcccggacggattgcaatgcaaacatatgtccgggcatttttatgcccatttttccgtacatttacttaggaggaatgtgcaatgtctaagaaagtgatgcgtaagtctacggagtccacggaccggatccgtaccggtgct

SEQ ID NO: 17784 - DNA, 260 bp, Unknown
  Description of Unknown: LeftRegion for integrase B4785 sequence
gtctataccggcatggaaaccgtattagataaatcaggggcagaactgcccgaaagcgtgataaagctgctctacagaatttacgtagaaacagcagaaaaaccggaagaaatggatgaagcatattttgtctgaagggtgcggtaaagcaccttcagcttaatatagataagatgttttttgagaaaggaatgatcgctatgacgatggatcgatctgcacattcccggctcgctgtgacgtaccgcaggatcagttct

SEQ ID NO: 17785 - DNA, 260 bp, Unknown
  Description of Unknown: LeftRegion for integrase B4786 sequence
gaccccgccgcgcctctcaacgatgcgtaccatggtggggtcgtttttattgcaaaaagaatccccggcagctctgtacgatagagccgccggggccagatggggaatctgtctgtcggagaataatcatagaataagaaaacacgcctgctgagcaatttcattgtaccatgatcctgctcagcgcacaaggagcaatcatggcaagaaaaaagaaagtatctcccgggaaccgtctggttgcctactaccgttacagc

SEQ ID NO: 17786 - DNA, 260 bp, Unknown
  Description of Unknown: LeftRegion for integrase B4787 sequence
cgtgcatttgatgatcgtaaattgaatatgattaacaaacgtcgtgaatttttccatgttacattggacgaaatcaaggaagtagttcgccaaaactatgataaaacagttgaatttgtggatattcctgacgcttcgcaatatcgtgaaagcctaaaaattaaggaagctatgtaaacaccatacgagggagggttagcatgaaagctatctacgtaagacagtcacttgataaaaaggattcgttatccatcgatgcg

SEQ ID NO: 17787 - DNA, 260 bp, Unknown
  Description of Unknown: LeftRegion for integrase B4788 sequence
ttgcaccagtgcaactttcaataaaaaaatcagccccagtgcgccaacaccggagctgatccgatcttaccgggaatccccgtataaaatcaccttgaacaagtgaattttatcattttcccgggcagattgcaatgcaaacatatgtccgggcatttttatgcccatttttccgtacatttacttaggaggaatgtgcaatgtctaagaaagtgatgcgtaagtctacggagtccacggaccggatccgcaccggtgct

SEQ ID NO: 17788 - DNA, 260 bp, Unknown
  Description of Unknown: LeftRegion for integrase B4789 sequence
tttgctaatgagtagtattatagtatttttaattttattgtggatctactttacgtacgtgaaagaaaaatagcagcataaaaatcccgctaccgtactgccatacgatagcgggaaaatgtaataacccacctcgggctgattacgcttatagtatagcataatcagcccattttcaaaaaggagctgattttttttttatgcttagagccgctttatacgcacgtttttcttccgaaaaccagcgtgaagaatctatt

SEQ ID NO: 17789 - DNA, 260 bp, Unknown; identical to SEQ ID NO: 13002
  Description of Unknown: LeftRegion for integrase B4790 sequence

SEQ ID NO: 17790 - DNA, 260 bp, Unknown; identical to SEQ ID NO: 17762
  Description of Unknown: LeftRegion for integrase B4791 sequence

SEQ ID NO: 17791 - DNA, 260 bp, Unknown; identical to SEQ ID NO: 17678
  Description of Unknown: LeftRegion for integrase B4792 sequence

SEQ ID NO: 17792 - DNA, 260 bp, Unknown
  Description of Unknown: LeftRegion for integrase B4793 sequence
ttgggatttcccgaggattgggccaatatcttgaagcgtccataattccagtcataaagaatccccggcagctctgtacgatagagccaccggggccagatggggaatctgtctgtcggagaataatcataggataagaaaacacgcctgctgagcaatttcattgtaccatgatcctgctcagcgcacaaggagcaatcatggcaagaaaaaagaaagtatctcccgggaaccgtctggttgcctactaccgttacagc

SEQ ID NO: 17793 - DNA, 260 bp, Unknown; identical to SEQ ID NO: 17679
  Description of Unknown: LeftRegion for integrase B4794 sequence

SEQ ID NO: 17794 - DNA, 260 bp, Unknown; identical to SEQ ID NO: 16037
  Description of Unknown: LeftRegion for integrase B4795 sequence

SEQ ID NO: 17795 - DNA, 260 bp, Unknown
  Description of Unknown: LeftRegion for integrase B4796 sequence
aaataatcagttttgtcaaattacataaaatcagccccagtgttggagcaccggagctgatccgatcttaccgggtaaaccgaataaaatcagcttgaacaagtgcattttatcattttcccgggcagattgcaacgcaaacatatgtccgggcatttttatgcccatttttccgtacatttacttaggagggatgtgcaatgtctaagaaagtgatgcgaaaatcttcagaagtcacggagcagatccgcaccggtgcc

SEQ ID NO: 17796 - DNA, 260 bp, Unknown
  Description of Unknown: LeftRegion for integrase B4797 sequence
acggttcacgccaaccaataagtaaaaaaatcagccccagtgttggcgcaccggagctgatccgatcttaccgggtaaaccgaataaaatcaccttgaacaagtgcattttatcattttcccggacggattgcaatgcaaacatatgtccgggcatttttatgcccatttttccgtacatttacttaggaggaatgtgcaatggcaaagaaagtgatgcgtaaatctgccgagtccacggaccggatccgtaccggggct

SEQ ID NO: 17797 - DNA, 260 bp, Unknown
  Description of Unknown: LeftRegion for integrase B4798 sequence
ggtatccagcgtgaatttcttataagtatcgtctgatttaaagtaaaaaattccccggccatcgtcacgacacgatgccggggatacgcaggacgccattcctgcgcaggtgtaaaacacgcttgaaagggttgtgcttactgtatcattatagcatacacagcccattcgtagccatacgaaaggactgatttttttatatggaagaaagagcaaaagccgtcatctatgcccgtttttcctcggacaaacaacgggaa

SEQ ID NO: 17798 - DNA, 260 bp, Unknown; identical to SEQ ID NO: 17690
  Description of Unknown: LeftRegion for integrase B4799 sequence

SEQ ID NO: 17799 - DNA, 260 bp, Unknown
  Description of Unknown: LeftRegion for integrase B4800 sequence
atgggatttcccgaggattgggccaatattttgaagcgtacataattccagtcataaagaatccccggcagctctgtacgatagagccgccggggccagatggggaatctgtctgtcggagaataatcataggataagaaaacacgcctgctgagcaatttcattgtaccatgatcctgctcagcgcacaaggagcaatcatggcaagaaaaaagaaagtatctcccgggaaccgtctggttgcctactaccgttacagc

SEQ ID NO: 17800 - DNA, 260 bp, Unknown
  Description of Unknown: LeftRegion for integrase B4801 sequence
tgccccaccagataattaataataataaaatcagccccagtgcgccaacaccggagctgatccgatcttaccgggaaacccgaataaaatcaccttgaacaagtgaattttatcattttcccgggcagattgcaatgcaaacatatgtccgggcatttttatgcccatttttccgtacatttacttaggaggaatgtgcaatgtcaaagagaataaggtacaacatccctgattctgaggatcaagtacgtaccggagct

SEQ ID NO: 17801 - DNA, 260 bp, Unknown
  Description of Unknown: LeftRegion for integrase B4802 sequence
ggaaacaaattatataaaacaaaacaatattggattgataaatggaaaataatgcgtgataaagaatgtatggaaaatgaaatagataatttatcggtgaagtctttatagaaattgtaataaaattcatataatattttttaatgaatattagttgcaaaaagttttaatgagcgttacaatgcgggtgaggtgatgatatgaacggtgtaatttatgcaagatattcgagtgaaaatcagcgagaagagtctattgac

SEQ ID NO: 17802 - DNA, 260 bp, Unknown
  Description of Unknown: LeftRegion for integrase B4803 sequence
tgttgcaccgatgcaatttacaataaaaaatcagccccagtgcgccaacaccggagctgatccgatcttaccgggaaatcccgtataaaatcaccttgaacaagtgaattttatcatttcccggacagattgcaatgcaaacatatgtccgggcatttttatgcccatttttccgtacatttacttaggaggaatgtgcaatggccaagaaagtgatgcgtaaatctgccgagtccacggaccggatccgtaccggtgct

SEQ ID NO: 17803 - DNA, 260 bp, Unknown
  Description of Unknown: LeftRegion for integrase B4804 sequence
atcccgaggctatcggcgtatttaccaccaaaggaaagcagctcggaaacgtaaatgcagagttagcaagcgatttgatacataaatatcctaacaacaaaatgaaagttacaatttcagatataacaggcggcggagacaagaattacggttgtaatcttcacgtcgttatctacaaggcataattaaggaggcggacaatggcaagagccgcaaagcaagacaataattcggaaataattgacggcgtgatatatgcc

SEQ ID NO: 17804 - DNA, 260 bp, Unknown
  Description of Unknown: LeftRegion for integrase B4805 sequence
ccccgccgcgcctctcaacgatgcgtaccatggtggggtcgtttttttattgcaaaaagaatccccggcagctctgtacgatagagccgccggggccagatggggaatctgtctgtcggagaataatcataggataagaaaacacgcctgctgagcaatttcattgtaccatgatcctgctcagcgcacaaggagcaatcatggcaagaaaaaagaaagtatctcccgggaaccgtctggttgcctactaccgttacagc

SEQ ID NO: 17805 - DNA, 260 bp, Unknown; identical to SEQ ID NO: 17742
  Description of Unknown: LeftRegion for integrase B4806 sequence

SEQ ID NO: 17806 - DNA, 260 bp, Unknown; identical to SEQ ID NO: 17774
  Description of Unknown: LeftRegion for integrase B4807 sequence

SEQ ID NO: 17807 - DNA, 260 bp, Unknown
  Description of Unknown: LeftRegion for integrase B4808 sequence
taaagtaaaaccgcccctgcgccaacaggaacggtcaactgggagcacacgccaatgtgcttttgaaatacctccgaagagatactcacttaccaaagaatattgtatcatcttcggtgcagtcgcacaatcagaacttacgttctatgtatgactgttatttttgtacttttttacataatatatacggaggtgatatcatgtcatattgtatttatttaaggaaatcgagaaaggatcttgaagccgagcagcatggt

SEQ ID NO: 17808 - DNA, 260 bp, Unknown; identical to SEQ ID NO: 17692
  Description of Unknown: LeftRegion for integrase B4809 sequence

SEQ ID NO: 17809 - DNA, 260 bp, Unknown; identical to SEQ ID NO: 13967
  Description of Unknown: LeftRegion for integrase B4810 sequence

SEQ ID NO: 17810 - DNA, 260 bp, Unknown
  Description of Unknown: LeftRegion for integrase B4811 sequence
actggataggcgttagtttcagaaggaggtccgtcattcgtggcgggctttctgagccgctatgcgttacatagcgctatgctttaagatgagaatcgttggaaatgttatagaggttcgcaaaaaaatgtaactagaagtccgcttagcggacttcttcgcatgtcgagataaattcacagtgtgctatggagacaaaaatgaaagacgccgttatctatgccagatattcatcagacaggcagcgggaagaatccatc

SEQ ID NO: 17811 - DNA, 135 bp, Unknown
  Description of Unknown: LeftRegion for integrase B4812 sequence
ttattcattattatataattagaatccactatttgtccatatttttcattagataaactataaggagttgattttatgcaaagagcagttatctacgcgcgcttttcctcggacatgcagcgcgaagagtctatt

SEQ ID NO: 17812 - DNA, 260 bp, Unknown
  Description of Unknown: LeftRegion for integrase B4813 sequence
tgccccaccagataattaataataataaaatcagccccagtgcgccaacaccagagctgatccgatcttaccgggaaatccgataaaaatcaccttgaacaagtgcattttatcattttcccggacggattgcaatgcaaacatatgtccgggcatttttatgcccatttttccgtacatttacttaggaggaatgtgcaatgtctaagaaagtgatgcgtaagtctacggagtccacggaccggatccgtaccggtgct

SEQ ID NO: 17813 - DNA, 260 bp, Unknown
  Description of Unknown: LeftRegion for integrase B4814 sequence
gtgaggtgcagcgcctgatcgaatccgaaaagcgcccgtgatcttctttgcgccatccttggcaaaatagccattaaaaaacgccccgcccatgttaccagcatggacgagacgaagtattcaattcacactctttttctttatgcggctcatcaagggattcattcaactgttatcactatttaagggggtgatccaatttgaaagccgtcatatatgcccgcttctccagccacaaccagcgcgaagaatccatcgaa

SEQ ID NO: 17814 - DNA, 260 bp, Unknown
  Description of Unknown: LeftRegion for integrase B4815 sequence
aacaaagcgtattggaaatgaaataatgttctacagtaatgcaataaatatgtaaaaaaacaccccgtgctaccaacacggagtgatcgggcggtactaccaataccacccagcatagaaaaatgacctcaccagtcatatctttttctatgcctctattttaccacatcacaacataaaatgtaaatggaggtatcaacatgcaatatttaatttatctaaggaagtcccgcgctgaccaggaagcggagctgcgtggt

SEQ ID NO: 17815 - DNA, 260 bp, Unknown
  Description of Unknown: LeftRegion for integrase B4816 sequence
cgacatatgccttcaaattcgctgttgaaagcggcaagatggcaaaagcaaaattacggaaataaaaaaagaggcccatttagggcctctatttgcatataaaaagaaaaaaccgccatgaattggcagcatggcggaatttctttgatttacatttgataattcttatttaattatatcaccgacaaggaaaccacacaatgaacaatttaaaagctgtaatatatgcgagatactcctcagataagcaacgagatgaa

SEQ ID NO: 17816 - DNA, 260 bp, Unknown
  Description of Unknown: LeftRegion for integrase B4817 sequence
gcagactatttcacgttgggaaagcgggaaacgtgcgcccaatggtgaggaaatcaggttgctagttaacctgcttcattgctccgctgatttcattcttggtctgtcggacacaatcacgattcccgaacaatagaaaaaccccgcgcaggtttgacggctggcgcggggcaataccaaataggcaaggtgattttatcatggtcaaacgtagagcggctatatacgcccgcttttcgtcacacaaccaacggtcggaa

SEQ ID NO: 17817 - DNA, 260 bp, Unknown
  Description of Unknown: LeftRegion for integrase B4818 sequence
ccgtatatgccgctttttcaaaaagaacttgatatatcctccgaatggttggaaaactcatacacatacacgccaaggccgtataagccttcaaagcgcgcactccaaatggaggcggacatcaaagaaaccgctcacaagtacataacaaacgaaaaagcccttctgctgggcgcagaagggcgtaacgggtaacagatatgtcagtagatattaaatggcaggtgccaaaggcacagccggaggccagcgagctggcc

SEQ ID NO: 17818 - DNA, 260 bp, Unknown
  Description of Unknown: LeftRegion for integrase B4819 sequence
aagcatcacaagctgaagaatatcagaaaatttttaatgacattataagcaaataaaaaaacactccctgcgccaacagagagtgtccgatatcagcgccaactgatatcaagcatagaaaaatgacctcaccagtcatatctttttctatgcctctattttaccacatcggaacataaaatgtaaatggaggtatcaacatgcaatatttaatttatctaaggaagtcccgcgctgacagggaagcggagctgcgtggt

SEQ ID NO: 17819 - DNA, 260 bp, Unknown
  Description of Unknown: LeftRegion for integrase B4820 sequence
aaaagctttatagcactctcaaaaacgcaaattaacttgtaaattagcagaaaaaatatataatatgtcaaacattcttgaaaatagcattaaccaaacgatcgggcgttctctttcaacgcaagaaatgtctttggctatttcaagaattagtgaatacgtccaatgcctaattatacttgataaggaacaaaaaaacaatgaaagctgtgattctggccagagtaagctcaaaagaacaagaggacgggtacagtcta

SEQ ID NO: 17820 - DNA, 260 bp, Unknown
  Description of Unknown: LeftRegion for integrase B4821 sequence
cggggtatattcgcaagctcctcgtagatggattgttgaccgaagccgaataccgcacagccgaaaacaggctggcggagcgctataacccgctgcgaaggcttgaataaagccttcgcagtgtgcatgaattgccgtggatattggggtaacgttgtggtatcgtgtgttgctaataagagcgggaaggagtgagatagatgcccgaaatacgctatataccagcggttggcgctccagaaaacgccaagctgcccgtt

SEQ ID NO: 17821 - DNA, 260 bp, Unknown
  Description of Unknown: LeftRegion for integrase B4822 sequence
tattacgccctctccgtacaacagagataggacgatttaactataacacctccggagatgctacagcatttcaccaaatatattgtatcatcttcggacagctatcgcaatcggaacgtatattcgatggctgttatttttgtactcatttttaatataatttacaaagtttaatataatttacaaaggagactgatataatgtcttatttaatttatttacgtaagagtcgtaaggatctagaaaatccacttatgacc

SEQ ID NO: 17822 - DNA, 260 bp, Unknown
  Description of Unknown: LeftRegion for integrase B4823 sequence
tctgcttaccctcgggctttgcggtgtaggaatcatagtagacctgattctgatactactgaagccggatccatattacgtatagaaaaagtccaggtgcttcaacgcctggactttttgcacaccggaattaatcacaatgcacctactacacttgcattgtatcattctggaataaaaatatcaaggaggaatgtacagtgtatcaatcttacgaattcaaaccagaggagatccttgtctatctccgaaaatccaga

SEQ ID NO: 17823 - DNA, 260 bp, Unknown
  Description of Unknown: LeftRegion for integrase B4824 sequence
atcactaaacactacgccaatagtgtttaatcctcgtaatcaatacgaggtcgtatataacgcacacatctcgaagatgcgtacaatactcaccacatatattgtatcatcttcgagcagtcatcgcaatcgaaacatattttcggtggctgttatttttgtactcatttttaatataatttacaaaggagattgatataatgtcttatttaatttatttacgtaagagtcgtaaggatctcgaaaacccttttatgacc

SEQ ID NO: 17824 - DNA, 260 bp, Unknown
  Description of Unknown: LeftRegion for integrase B4825 sequence
gcgatttatgcgactgcatcgtggccttgggcggtgatgatcaggcgatcatcgtatatatcgaccttgaggatgacgctctgctcgacctgcaaggcgagctgcgcgattgcatcgcctccagcatccggtacaccggtcaataacttgctccccagcccgcaggtgcgggcattatcatatacagaggtggtgatcctatggccttttgcatgtatctgcgcaagtcccgcgcagatatggaggcggaggcgcacggc

SEQ ID NO: 17825 - DNA, 260 bp, Unknown
  Description of Unknown: LeftRegion for integrase B4826 sequence
tattttgctgacatcagaaaaatagataaactaaaaaccgtccagttgcagctggacggaataaaaagaaaaactacttgcatctataggttagatgtgtacttttccccgacagttaaagtataccatttttaacctacactttgcaagaagtgtattttttgtacccaaatttacaatatggaaaggaacgatggtatatgaacataggaaaactaaaaaaatcagatcaattctgcatttacttaagaaaaagtcgt

SEQ ID NO: 17826 - DNA, 260 bp, Unknown
  Description of Unknown: LeftRegion for integrase B4827 sequence
tgcaatactagatttattataaaaaacaaaaccgcccctgcgccaacaggaacggttttgaatatacatccgaagatgtacagttatcctaaacaaatatattgtatcatcttcgagcagctatcgcaatcggaacatactttcgatggctgttatttttgtactcatttttaatataatttacaaaggagattgatataatgtcttatttaatttatttacgtaagagtcgtaaggatctcgaaaacccttttatgacc

SEQ ID NO: 17827 - DNA, 260 bp, Unknown
  Description of Unknown: LeftRegion for integrase B4828 sequence
tttgcaaacgcattggccgggctgcccgtgcttacgacctctgcgatccaacgtaactgcaagtgcggaatcgaccgcgcgtactcgatactacgcaatcttcaggtctacgggcttatccatggggccggaaaagacacctatgaatggacagaaaaagcccttctgctgggcgcagaaggacgtaacgggtaacagatatgtcagtagatattaaatggcaggtgccaaaggcacagccggaggccagcgaactggcc

SEQ ID NO: 17828 - DNA, 260 bp, Unknown
  Description of Unknown: LeftRegion for integrase B4829 sequence
cgcttattgcttttttcttaaactaataaaaccgctcctgcgccaacaagaacggttttgattatacatccgaagatgtacagttatcctaaacaaatatattgtatcatcttcgaaacagccttgcaatcggaacatatattcgatggctgttatttttgtactcatttttaatataatttacaaaggagattgatataatgtcttatttaatttatttacgtaagagtcgtaaggatcttgaaaacccttttatgacc

SEQ ID NO: 17829 - DNA, 260 bp, Unknown
  Description of Unknown: LeftRegion for integrase B4830 sequence
atcactaaacactacgccaatagtgtttaatcctcgtaatcaatacgaggtcgtatataacgcacacatctcgaagatgcgtacaatactcaccacatatattgtatcatcttcgagcagtcatcgcaatcgaaacatattttcggtggctgttatttttgtactcatttttaatataatttacaaaggagattgatataatgtcttatttagtttatttacgtaagagtcgtaaggatctcgaaaatccttttatgacc

SEQ ID NO: 17830 - DNA, 260 bp, Unknown
  Description of Unknown: LeftRegion for integrase B4831 sequence
gagcgtgatctgctggatacctggcgaggtgctaccgatgctgcacgagagtcggcgatgatggtgctccgatgcaatccggcgccggttgtgaaaaaagagacggcaatttgatcgtcgtcgatttcacgcgacacaaaagaggcccgcgataaaaagcggactgactttgtgtaaatataacgaaaggaggcgattgcatggatcaagttggtgtgatctatgcgcgtttctccagccacgctcagcgtgaggagtcg

SEQ ID NO: 17831 - DNA, 260 bp, Unknown
  Description of Unknown: LeftRegion for integrase B4832 sequence
atgagatcaactactacaaggcgcaggaaatcacggaactgctctacgccagaggcatgatcacatttgacgagtatgacaaattaacggacttgaaccgccgatctttctctcccttgtatgcggacttattaccgaaaacgcttgaaaaaccagccactcagagttaatattgtatactgacaaaggagggaaaaccaatgaaaatcaagaaaattgaagcacagccgcaagaggtaaaaaagctccgcgtggctgca

SEQ ID NO: 17832 - DNA, 260 bp, Unknown
  Description of Unknown: LeftRegion for integrase B4833 sequence
acataaaattactctagacgaactatttaatttttttaaaaattacaaatagtaaaaaaacaccccgtgctaccaacacggagtgaataggcggtactaccaataccacccagcatagaaaaatgacctcgccagtcatatctttttctatgcctctattttaccacatcggaacataaaatgtaaatggaggtgtcaacatgcaatatttaatttatctgaggaagtcccgtgctgacagagaagcggagctgcgtggt

SEQ ID NO: 17833 - DNA, 260 bp, Unknown
  Description of Unknown: LeftRegion for integrase B4834 sequence
gcgcatcgaggagcgcttccgcgccgccttagacagcagggataagcaattcgccgccgagcgcgccgtctacgcccgctggctccgcgtgctggccatcgcctgcgccgcgctggtactgtttgtcatgcttctgctcgtcatcgatatcatcaaccccaacgcgggctgggtccgaacgccatgaaaggaggaatcacatggcatactgcatctatctgcgcaagtcgcgcaaggacatggaggctgaggcgcgcggc

SEQ ID NO: 17834 - DNA, 260 bp, Unknown; identical to SEQ ID NO: 17829
  Description of Unknown: LeftRegion for integrase B4835 sequence

SEQ ID NO: 17835 - DNA, 260 bp, Unknown
  Description of Unknown: LeftRegion for integrase B4836 sequence
tcgttatgtggctgggcgcaatcggaatgatttttgagggtgctggcagtgagaaactgttctccctctgggtgattttcttactggcctgtttcaacgtacctgacctgatctggctgaaactgggcaagtttcgggataacgtgggcgactatctgcggcaataaaaaaagcccgcacactggcgggcgggtgatggtatgaaaaaagagaacgaaatccgggcagttgtctatgcccggtactcatcccattcgcaa

SEQ ID NO: 17836 - DNA, 260 bp, Unknown
  Description of Unknown: LeftRegion for integrase B4837 sequence
ttattcttaaaaaatattatttcatagttaaaagtaaattattttatttatttctacattttaatttaaatacgccataataacaaaagaacatatatttcacttattgtaggcctattccacataacttcaactaaactactttccttttccccaatattccaatataataaacatataaataccaatgaggtgattttatgactatggatcgtatttgcatgtatcttcgtaagtctagggctgatgaagaagctgaa

SEQ ID NO: 17837 - DNA, 260 bp, Unknown
  Description of Unknown: LeftRegion for integrase B4838 sequence
tcacgcaggaagaattcgaagcaaaaaagaaacagcttttaaacttataaaattaaaaaacaccccgtgctaccaacacggagtgtataggcggtactaccaataccacccagcatagaaaaatgacctacccagtcatatctttttctatgcctctattttaccacaactaagcataaaatgtaaatggaggtatcaacatgcaatatctaatctatctgagaaagtcccgcgccgacagagaagcagagctgcgtggt

SEQ ID NO: 17838 - DNA, 260 bp, Unknown; identical to SEQ ID NO: 17312
  Description of Unknown: LeftRegion for integrase B4839 sequence

SEQ ID NO: 17839 - DNA, 260 bp, Unknown
  Description of Unknown: LeftRegion for integrase B4840 sequence
atcactaaacactacgccaatagtgtttaatcctcgtaatcaatacgaggtcgtatataacgcacacatctcgaagatgcgtacaatactcaccacatatattgtatcatcttcgaacagtcatcgcaatcgaaacatattttcggtggctgttatttttgtactcatttttaatataatttacaaaggagattgatataatgtcttatttaatttatttacgtaagagtcgtaaggatctcgaaaacccttttatgacc

SEQ ID NO: 17840 - DNA, 260 bp, Unknown
  Description of Unknown: LeftRegion for integrase B4841 sequence
ttatccgatttacgccgttttgctgaattttacggtgtagggcttgattatttcggcgtaacaacagaaaatgaaagttttgaattgttaagccgtgcaaaaaatatttttctcaattcagatattccaaaagaggaacgggaacggctataccgtgagattatgaaaatgtatctgcaaatgtagaaaaggggaaaagaatgtataaacgaatagggttatatgcaaggtattccgatacaaaacaagacgacggatat

SEQ ID NO: 17841 - DNA, 260 bp, Unknown; identical to SEQ ID NO: 17822
  Description of Unknown: LeftRegion for integrase B4842 sequence

SEQ ID NO: 17842 - DNA, 260 bp, Unknown
  Description of Unknown: LeftRegion for integrase B4843 sequence
actccgttagagggcatgagtaaagagcaagcctctctttatatgctcacggaatttctaagcctcatagataaagaatatcctaaaataccgccccagcagaaagccgctttaattagcgaattttataagcatgaccctataaaattgttattatctgcacttaataacgaactatccaaacaaggaagtgataaaaaatgatgcagcaggcattgaacgccgtaatatacgcccgttattcttcccacaatcaaaca

SEQ ID NO: 17843 - DNA, 260 bp, Unknown
  Description of Unknown: LeftRegion for integrase B4844 sequence
tcttttccttgcggtgagactctttgtccttcttcatgattgccttactcctttcatagagtttggcaccggtgcagttatgattatatcattttatttacggtttgtcatcaaaaagatatagtataacatgtgagcgatttcgacaaaaatctgttatataattatcttatgttcgaaaaaatcagggttagaaaggtatgcaactgaatatgcgcgacactaaaacgagcaatgaattacaagctgctcgcggcgtc

SEQ ID NO: 17844 - DNA, 260 bp, Unknown
  Description of Unknown: LeftRegion for integrase B4845 sequence
aagatgaatattacaatacagatttaagaactgcacaaaaggatagtcttgcttacctaataggtaattacatattctataaatcttatggaatgtatttttcaaaggaattacaagaccaatatggaaatcgtgatgtactaaagaaataaaaaaagagccacctacacaggtggctttattcatagaaaggattaactatggaattgtcaaaaggagttatatatgcacgttactcgtcagataagcaacgtgatgaa

SEQ ID NO: 17845 - DNA, 260 bp, Unknown
  Description of Unknown: LeftRegion for integrase B4846 sequence
tcacgcaggaagaattcgaagcaaaaaagaaacagcttttaaacttataaaattaaaaaacaccccgtgctaccaacacggagtgaataggcggtactaccaataccacccagcatagaaaaatgacctacccagtcatatctttttctatgcctctattttaccacatcggaacataaaatgtaaatggaggtatcaacatgcaatatttaatttatctgaggaagtcccgtgccgacagagaagcggagctgcgtggt

SEQ ID NO: 17846 - DNA, 260 bp, Unknown
  Description of Unknown: LeftRegion for integrase B4847 sequence
tatcgccattccgacaggcattatttccgccggattcacgtctttgatcggaaaagataaagaagaacccgacaaaaagaactattgtccatattgcggccataagctcgacgaataatagcgcaatctcgcattcaaaatagttgaaatgcgcttattttgcatttgcaatataaagtatttaacgagtaggtgattgcatgaaagcggccatatacgcccgtttttcgagccataatcagcgcgaggaatccattgaa

SEQ ID NO: 17847 - DNA, 260 bp, Unknown
  Description of Unknown: LeftRegion for integrase B4848 sequence
attgttaaacactacgccaatagtgtttaaccctcgtaataaatacaaggtcgtatataacgcacacatctcgaagatgcgtacaatactcaccgcatatattgtatcatcttcggacagctatcgcaatcggaacatactttcgatggctgttatttttgtactcatttttaatataatttacaaaggagattgatataatgtcttatttaatttatttgcgaaagagtcgcaaggatcttgaaaacccttttatgacc

SEQ ID NO: 17848 - DNA, 260 bp, Unknown
  Description of Unknown: LeftRegion for integrase B4849 sequence
aaaagctttatagcactctcaaaaacgcaaattaacttgtaaattagcagaaaaaatatataatatgtcaaacattcttgaaaatagcattaaccaaacaatcgggcgttctctttcaacgcaagaaatgtctttggctatttcaagaattagtgaatacgtccaatgcctaattatacttgataaggaacaaaaaaacaatgaaagctgtgattctggccagagtaagctcaaaagaacaagaggacgggtacagtcta

SEQ ID NO: 17849 - DNA, 260 bp, Unknown
  Description of Unknown: LeftRegion for integrase B4850 sequence
cccggcattcatcatgtcagggagaaccccggaatgtcggctattcataaggaacatagtcgaacaggtaattgtgagcaaggacaatgcggctgtcactctgagagtgacagccgtttcctgtatgcgtaatcgcaaagaccgtaaacatatattatcctctgggatagaccctaaaatatatcaggaggataaacaccatgaacgaaaacaaaaatgccgtgctgtatgcaagattcagctcagatatgcagcatgaa

SEQ ID NO: 17850 - DNA, 260 bp, Unknown; identical to SEQ ID NO: 17156
  Description of Unknown: LeftRegion for integrase B4851 sequence

SEQ ID NO: 17851 - DNA, 260 bp, Unknown
  Description of Unknown: LeftRegion for integrase B4852 sequence
atcactaaacactacgccaatagtgtttaatcctcgtaatcaatacgaggtcgtatataacgcacacatctcgaagatgcgtacaatactcaccacatatattgtatcatcttcgagcagtcatcgcaatcgaaacatattttcggtggctgttatttttgtactcatttttaatatactttacaaaggagattgatataatgtcttatttaatttatttacgtaagagtcgtaaggatctcgaaaacccttttatgacc

SEQ ID NO: 17852 - DNA, 260 bp, Unknown
  Description of Unknown: LeftRegion for integrase B4853 sequence
ttgttgacctcaacaaaatcgtagaaataataaaaccgcccggtgctaccaacaccgaacggcttatatagatgctatacaggctgcagaacagccgatataactatcccgcagatagattatatcacaaactctctgcacctgtatagggtgtattttttatacccttttataatatgattagacaggaggaatgtgatatgaaaatagggatctatccaagaaaatcagtgtaccgggataacagcgactcagttgct

SEQ ID NO: 17853 - DNA, 260 bp, Unknown
  Description of Unknown: LeftRegion for integrase B4854 sequence
tgcaattacacaggaagaatttgaaacaaagaaaaaacaacttttagacttataaaaaaacaccccgtgctaccaacacggagtgaataggcggtactgccaataccacccagcatagaaaaatgacctacccagtcatatctttttctatgcctctattttaccacatcggaacataaaatgtaaatggaggtatcaacatgcaatatttaatttatctgaggaagtcccgtgctgacagagaagcggagctgcgtggt

SEQ ID NO: 17854 - DNA, 260 bp, Unknown
  Description of Unknown: LeftRegion for integrase B4855 sequence
acttgaacgaatagcaaagtattttggggttgggttagattattttggggttcaaacaacggatgatttatttgatattgtcgcaagggcaaaagaaatattcaataatgacaatatctctattgaagtaaaagaagaattatatcttgaaatgatgaaattgtatatggcattaaaagaaaacaactaggggtgcagttatgaatatagaatattcagggcttgtggcagatgcatattgtagatattcatctaaaatg

SEQ ID NO: 17855 - DNA, 260 bp, Unknown; identical to SEQ ID NO: 17826
  Description of Unknown: LeftRegion for integrase B4856 sequence

SEQ ID NO: 17856 - DNA, 260 bp, Unknown; identical to SEQ ID NO: 13967
  Description of Unknown: LeftRegion for integrase B4857 sequence

SEQ ID NO: 17857 - DNA, 260 bp, Unknown
  Description of Unknown: LeftRegion for integrase B4858 sequence
aagcatcacaagctgaagaatatcagaaaatttttaatgacattataagcaaataaaaaaacactccctgcgccaacagagagtgtccgatatcagcgccaactgatatcaagcatagaaaaatgacctcgccagtcatatctttttctatgcctctattttaccacatcggaacataaaatgtaaatggaggtatcaacatgcaatatttaatttatctgaggaagtcccgtgctgaccaagaagcggagctgcgtggt

SEQ ID NO: 17858 - DNA, 260 bp, Unknown; identical to SEQ ID NO: 17847
  Description of Unknown: LeftRegion for integrase B4859 sequence

SEQ ID NO: 17859 - DNA, 260 bp, Unknown
  Description of Unknown: LeftRegion for integrase B4860 sequence
cgaccagttgcagtacgaaggctttacggagcaggaagcggcatacggagcagacaactgcgcagccgattggaacacccaggcggctcttgccgcacagaattatttagacattatgcccttttcgagggatggacttattgatcagctaacgcacgacggatacacaaccgagcaagcggaacacggagctgattccgttggcctgtaataagcgcggatacatatacgcacggtttagcagcgataaccagcgggaa

SEQ ID NO: 17860 - DNA, 260 bp, Unknown; identical to SEQ ID NO: 15966
  Description of Unknown: LeftRegion for integrase B4861 sequence

SEQ ID NO: 17861 - DNA, 260 bp, Unknown
  Description of Unknown: LeftRegion for integrase B4862 sequence
ttagaaccgaagaaatagttaatatgcaaagggaaataaataaatttaaacaataaaaaaacaccccctgcgccaacagagagtgtccgatatcagcgccaactgatatcaagcatagaaaaatgacctcaccagtcgtatctttttctatgcctctattttaccacaactaagcataaaatgtaaatggaggtatcaacatgcaatatctaatctatctgagaaagtcccgcgccgacagagaagcagagctgcgtggt

SEQ ID NO: 17862 - DNA, 260 bp, Unknown
  Description of Unknown: LeftRegion for integrase B4863 sequence
ttatcggatttacgccgttttgctgaattttacggtgtagggcttgattatttcggtgtaacaacagaaaatgaaagttttgaattgttaagccgtgcaaaaaatatttttctcaattcaaatattccaaaagaggaacgggaacggctataccgtgagattatgaaaatgtatctgcaaatgtagaaaaggggaaaagaatgtataaacgaatagggttatatgcaaggtattccgatacaaaacaagacgacggatat

SEQ ID NO: 17863 - DNA, 260 bp, Unknown
  Description of Unknown: LeftRegion for integrase B4864 sequence
ttatcggatttacgccgttttgctgaattttacggtgtagggcttgattatttcggcgtaacaacagaaaatgaaagttttgaattgttaagccgtgcaaaaaatatttttctcaattcagatattccaaaagaggaacgggaacggctataccgtgagattatgaaaatgtatctgcaaatgtagaaaaggggaaaagaatgtataaacgaatagggttatatgcaaggtattccgatacaaaacaagacgacggatat

SEQ ID NO: 17864 - DNA, 260 bp, Unknown
  Description of Unknown: LeftRegion for integrase B4865 sequence
cgcttattgcttttttcttaaactaataaaaccgctcctgcgccaacaagaacggttttgattatacatccgaagatgtacagttatcctaaacaaatatattgtatcatcttcgaaacagccttgcaatcggaacatatattcgatggctgttatttttgtactcatttttaatataatttacaaaggagattgatataatgtcttatttaatttatttgcgaaagagtcgcaaggatcttgaaaacccttttatgacc

SEQ ID NO: 17865 - DNA, 260 bp, Unknown
  Description of Unknown: LeftRegion for integrase B4866 sequence
caattacgcaagaaaaattcgaagcaaagaaaaaacaatttttaatcttataaactaaaaacaccccgtgctaccaacacggagtgaataggcggtactaccaataccacccagcatagaaaaatgacctcgccagtcatatctttttctatgcctctattttaccacatggaacataaaatgtagatggaggtgtcaacatgcaatatttaatttatctaaggaagtcccgtgctgaccaggaagctgagctacgtggt

SEQ ID NO: 17866 - DNA, 260 bp, Unknown
  Description of Unknown: LeftRegion for integrase B4867 sequence
cccggcattcatcatgtcagggagaaccccggaatgtcggctattcataaggaacatagtcgaacaggtaattgtgagcaaggacaatgcggctgtcactctgagagtgacagccgttttctgtatgcgtaatcgcaaagaccgtaaacatatattatcctctgggatagacccaaaaaaatatcaggaggataaaaaccatgagcgaaaacaagaatgccgtactgtatgcaagattcagctcagatatgcagcatgaa

SEQ ID NO: 17867 - DNA, 260 bp, Unknown; identical to SEQ ID NO: 13468
  Description of Unknown: LeftRegion for integrase B4868 sequence

SEQ ID NO: 17868 - DNA, 260 bp, Unknown
  Description of Unknown: LeftRegion for integrase B4869 sequence
caaaaacagaccctcaaaaatgataacagaggatgaaataaatgaaatcctgcgcaaacaccagtaaggagctgattgcatgagtccatttgtcaaggaaaccctcaccggcttgctctgtatcgccttgcttgtagtctgggtgattatccatgtcacccatgacctgaatgactggaataataaatggaagtgatcaaatgtccaccgagtatgccatctatctccgcaaatcccgtgccgacctcgaagccgaggcg

SEQ ID NO: 17869 - DNA, 260 bp, Unknown
  Description of Unknown: LeftRegion for integrase B4870 sequence
gtccgacgacccatccgctcctgataatgatataatcgacagaagtgaagttgcgggcacatcaagctatcctcaaaaaacagaaaagaagtcctggattaactccgataatgttgacttattagtctttcctttggttggtgttatcgccctgtttctgtgtctattggacaaactgattcaaaaaaggaggtgattccatgcccaccgaatacgccctgtacctgcgcaaatcccgcgccgacctcgaagccgaggcg

SEQ ID NO: 17870 - DNA, 260 bp, Unknown
  Description of Unknown: LeftRegion for integrase B4871 sequence
gaagaaaaaaccaaagacaaataaaaccgccccaccattaagcggagcggcaatgcaattgctctgaatgaacaatcgccctaagcaagcatattgtatcattcggagcagccaagtgcaagcggaacacacgttccacgctggctgttatttttatacctatttttacatacactgtacaggagcaaaggagtgatactatgcttagaatcggaatctatccacgaaaatcggtctaccgggacaacagtgactcggtg

SEQ ID NO: 17871 - DNA, 260 bp, Unknown
  Description of Unknown: LeftRegion for integrase B4872 sequence
gcgactgtacgccgcaatggaagcagaacattgcaatgacagcccgtgcggcggcgggcgaatcgaaaaagaaagccgaaaataatttacctgccgccgctgtcaggtcggcataaatagagaagccccgcgctggtcggcaaactcacgcggggcaaacacccaaccattagcaaggttataggcaaggtgattttatcatggtcaaacgtagagcggctatatatgcccgcttttcgtcacacaaccaacggtcggaa

SEQ ID NO: 17872 - DNA, 260 bp, Unknown
  Description of Unknown: LeftRegion for integrase B4873 sequence
cagcggagggcgaaccgtttactaccgtcggttagttctgcaacgcgccgcagacgagtggttgaagcgtcaccgctgaccaccatgcaaaaagaaaaagcccaccggagccgtacccggtaggctttttcttgcgtaaaaaaataatgccccatccttccgtctggaagaacagggcattttgaaaggatatactatatatgagaaagaagaaagtcaagggcggcaaccgccttgttgcctactaccgctactccggc

SEQ ID NO: 17873 - DNA, 260 bp, Unknown; identical to SEQ ID NO: 15832
  Description of Unknown: LeftRegion for integrase B4874 sequence

SEQ ID NO: 17874 - DNA, 260 bp, Unknown
  Description of Unknown: LeftRegion for integrase B4875 sequence
accgcgccggatagcgatatcatcgaccgcagcgaggtgcataccgccgttcacgatcccgatttgtccgctccggagccggaaccgaaaaagcaagccaaaatctcaatcaccgatcatatagaattgctggtgttcggcgcgctcggcatagtggtgctgctcgcactgatcgtcagcagacaaaggaggtaagataattgtcaaccgaatacgccctctatctccgcaaatcccgtgccgacctcgaagccgaggcc

SEQ ID NO: 17875 - DNA, 260 bp, Unknown
  Description of Unknown: LeftRegion for integrase B4876 sequence
atcgttctttgtccagaagatcgaagcatgagttcatgtcgatggtttacacctttgagactcaagaagaattggcaggggatacggagaacactcagtcttctattgggtgagatcaaaaagaaaaaggtcatcccttacaaggcttttgaaacctttcggagattgacccttagaaaacgagtattggagcagaagcgatgacaaaagctgtgatctatgctcggtattcgagccacaatcaaagagaagaatccatc

SEQ ID NO: 17876 - DNA, 260 bp, Unknown
  Description of Unknown: LeftRegion for integrase B4877 sequence
caaaaacagaccctcgaaaacgataacggaggatgaaataaatgaaatcctgcgcaaacaccagtaaggagctgattgcatgagtccatttatgaaagaaaccctcaccggcctgctctgtatcgccttgcttgtagtctgggtgattatccatgtcacccatgacctgaatgactggaataataaatggaagtgatcaaatgtcaaccgagtatgccatctacctccgcaaatcccgtgccgacctcgaagccgaggcg

SEQ ID NO: 17877 - DNA, 260 bp, Unknown
  Description of Unknown: LeftRegion for integrase B4878 sequence
ttttacgttgattatcttttattcttcattttcgtaaaatttgcaaaaagaaaaagctcgccgggccgaagcctgacgggctatagatgaaactgtatttatataattcagcagcgatttatgatttttcgtctcacacgttgcgctttcgtctaatctgcgggttaaatgagacgattacttgaaaggacgctcaaggtatggcaaaaagaaaattcaacaagggcggcgaggttcggctggtcgcctattacagatac

SEQ ID NO: 17878 - DNA, 260 bp, Unknown
  Description of Unknown: LeftRegion for integrase B4879 sequence
gaagacggctcatcagatgactcggcccacattattgagatcataaaagatgtttctaaattaacaaatcgttaaacaaaaaaatcccccgatgtgctgcaacacatcgagggcaatccataatcccctcccaaaagggtcgattacgctataagtatatcacatcggccctttttacaacagaaaggactgatttttttatgtcgaaaattgcagtaatctacgcacgctattcttcggaccgtcaacgagaagagtct

SEQ ID NO: 17879 - DNA, 260 bp, Unknown
  Description of Unknown: LeftRegion for integrase B4880 sequence
tatgctgttgttccgtttatggccgctgtcctctgcttcctgctcaatcatatcggctctggtaactaaggaggcaaatatgagtccatttgtaaaggaaaccctcaccggcctgctttgcatcgccctgcttgttgcctgggtgattatccatgtcacacatgatctgaataactggaataataaatggaagtgataaaatgtccaccgagtatgccatctatttgcgcaaatcccgcgcggacctcgaagccgaggcc

SEQ ID NO: 17880 - DNA, 260 bp, Unknown; identical to SEQ ID NO: 15832
  Description of Unknown: LeftRegion for integrase B4881 sequence

SEQ ID NO: 17881 - DNA, 260 bp, Unknown
  Description of Unknown: LeftRegion for integrase B4882 sequence
tctttacgttattaagcaaaataaaaccgccccaccaataagcggagcggcaatgcaactgttctgaatgaacaatcgccctcaacaagcatattgtatcattcggagcagccaagtgcaagcggaacacacgttccacgctggctgttatttttatacctatttttacatacactgtacaggagcaaaggagtgatactatgcttagaatcggaatctatccacgaaaatcggtctaccgggacaacagtgactcggtg

SEQ ID NO: 17882 - DNA, 260 bp, Unknown
  Description of Unknown: LeftRegion for integrase B4883 sequence
catgtaaacgatgttggaataaataataaaaccgccccactctaaagcaggacggttatgctcccgatgatacggtagccctagacaagcatattgtatcattcggagcagccaagtgcaagcggaacacgcgttccatgctggctgttatttttatacccatttttacatacactgtacaggaacaaaggagtgatactatgcttagaatcggaatctatccacgaaaatcggtctaccgggacaacagtgactcggtg

SEQ ID NO: 17883 - DNA, 260 bp, Unknown
  Description of Unknown: LeftRegion for integrase B4884 sequence
aaatcaattacacaatatgtaaaaaaccgccccaccattaagtggagcggcaatgcaactgttctgaatgaacaatcgccctagacaagcatattgtatcattcggagcagcccggcgcaagcggaacacccgttctttgctggctgttatttttatacctatttttacatacactgtacaggaacaaaggagtgatactatgcttagaatcggaatctatccacgaaaatcggtctaccgggacaacagtgactcggtg

SEQ ID NO: 17884 - DNA, 260 bp, Unknown
  Description of Unknown: LeftRegion for integrase B4885 sequence
aaatcaattacacaatatgtaaaaaaccgccccaccattaagtggagcggcaatgcaactattctgaatgaacaatcgccctagacaagcatattgtatcattcagagcagccaaacgcaagcggaacaccggttccatgctggctgttatttttatacccatttttacatacactgtacaagaacgaaggagtgatactatgcttagaatcggaatctatccgcgaaaatccgtctaccgggacaacagtgactcggtg

SEQ ID NO: 17885 - DNA, 260 bp, Unknown
  Description of Unknown: LeftRegion for integrase B4886 sequence
gcgaatcttcgccgcaatggcagcagaacattgcaatgacagcccgcgcggcggcgggcgaatcgaaaaagaaagccgaacatcatatacctgccgccgctgtcaggtcggcataaatagagaagccccgcgctggtcggcaaactcacgcggggcaaacacccaaccgttggcaaggttaaaggcaaggtgattttatcatggtcaagcgcagggctgctatatatgcccggttttcgtcgcacaatcaacgttcggaa

SEQ ID NO: 17886 - DNA, 260 bp, Unknown
  Description of Unknown: LeftRegion for integrase B4887 sequence
ttgcagaaacaacataataaaaaataaaaaccgccccactctaaagtaggacggtcgcgctctcgaatgatacgaaagccctagacaagcatattgtatcattcggagcagccaagtgcaagcggaacacgcgttccatgctggctgttatttttatacctatttttacatacactgtatgagagcaaaggagtgatactatgcttagaatcggaatctatccacgaaaatcggtctaccgggacaacagtgactcggtg

SEQ ID NO: 17887 - DNA, 260 bp, Unknown
  Description of Unknown: LeftRegion for integrase B4888 sequence
gaccaaggagagacaaatggcaaaaactataattaaaaaatattctaataacactacggtggttattacatacaacaacgaaccttctttagaggctatcaagcagtatgcccaaaaattaaagcagacaattgacagcaaaagtattcagagttaacatatatttataaaatcaatagagaaggtgatattcgttggaaatgcgaaatgaatacaatccaattattataaaatatgttgcagaatatttgagaaaatct

SEQ ID NO: 17888 - DNA, 260 bp, Unknown
  Description of Unknown: LeftRegion for integrase B4889 sequence
caaaaacagaccctcgaaaacgataacagaggatgaaataaacgaaatcctgcgcaaacaccagtaaggagctgattgcatgagtccatttgtcaaggaaaccctcaccggcttgctctgtatcgccttgcttgtagtctgggtgattatccatgtcacccatgacctgaatgactggaataataaatggaagtgatcaaatgtccaccgagtatgccatctatttacgcaaatcccgtgccgacctcgaagcagaggcg

SEQ ID NO: 17889 - DNA, 260 bp, Unknown
  Description of Unknown: LeftRegion for integrase B4890 sequence
gaaacggtttgcggagttttacaaagtcggtctttcttactttggcgtagaaacgcaggatgagggatttgagctgttgagccgagcaaagagtgtatttctgaatgaaggcattccaaaagaagagcgagagaggttatacaaagagataatgcgcttgtatttgcggatggaagagtaaacagcaagggagaaacataatgaacaaaaggacagggatatatggaagatattcagacacgaaacaagacgatggtttc

SEQ ID NO: 17890 - DNA, 260 bp, Unknown
  Description of Unknown: LeftRegion for integrase B4891 sequence
gtgaagataatgaaggtgaccagatcactagtgacgagcgcgaaatagtagacaactatcgcgaaagctcgccagagtggcagcagaacatttcgatgaccgccagggcagcagcatcggaatcaaaaaggaaataaaaaagccccgcgcaaccgtccaaagtctcgcagggcaataccaaaaggcaaggtgattttatcatgccaaagggcacacgtgccgctatctatgcgcgtttcagctcgcataaccagagaagc

SEQ ID NO: 17891 - DNA, 260 bp, Unknown
  Description of Unknown: LeftRegion for integrase B4892 sequence
tcaaaatcaaatcgaacagaaataaaaaaccgccctactctttcaagcaggacggtcacgctcccgatgatacggtagccctagacaagcatattgtatcattcggagcagccaagtgcaagcggaacacacgttccacgctggctgttatttttatacccatttttacatacactgtacaagaacaaaggagtgatactatgcttagaatcggaatctatccacgaaaatcggtctaccgggacaacagtgactcggtg

SEQ ID NO: 17892 - DNA, 260 bp, Unknown
  Description of Unknown: LeftRegion for integrase B4893 sequence
ttattccgttttgcttcatttattctttattttcgtaaaatttgcaaaaagaaaaagcccgccgggccgaagcctgacgggctataaatgaaactgtatttatatgatcctgcagtgatttatgatttttcgtctcacgccttgcgctttcgtctaatccgcaggccaatgagacgattacctgaaaggacgctcaaggtatggcaaaaagaaaattcaacaagggcggcgaggttcggctggtcgcctattacagatac

SEQ ID NO: 17893 - DNA, 260 bp, Unknown; identical to SEQ ID NO: 17882
  Description of Unknown: LeftRegion for integrase B4894 sequence

SEQ ID NO: 17894 - DNA, 260 bp, Unknown
  Description of Unknown: LeftRegion for integrase B4895 sequence
ggagccgccaccttttccgaagtcaatttgcctttttactccacaattttatcttattttctttttatcctttattttcgtaaaatttgccaaaagaaaaagcccgccgggccgaagcctgacgggctgagtaagacgcttatggaaaatcgttctctaaataatataattttttactgttacgcaaaaggtggtatctcatgagaagaaagaaaaactctgacgttatccgcctcgttgcctactaccggtactccggc

SEQ ID NO: 17895 - DNA, 260 bp, Unknown
  Description of Unknown: LeftRegion for integrase B4896 sequence
cgcaggactacttgctttctgtcggagtctgggcggctgtcggtgcaataatctgttttttctctcgtggcatcagtgaagcagaattcaccaggatattgggtgtcgatattgtaaaatccaaatggatcacgcccttgtttattctcgtaggtgctatcctgttcgcgctctcgtaaatccagaatggaagtgatcgtatgcgtaccgagtacgcaatttatctgagaaaatcccgtgcggacctcgaagccgaggca

SEQ ID NO: 17896 - DNA, 260 bp, Unknown
  Description of Unknown: LeftRegion for integrase B4897 sequence
tcaaaatcaaatcgaacagaaataaaaaaccgccctactctttcaagcaggacggtcacgctcccgatgatacggtagccctagacaagcatattgtatcattcggagcagccaagtgcaagcggaacacacgttccacgctggctgttatttttatacctatttttacatacactgtacaggaacaaaggagtgatactatgcttagaatcggaatctatccacgaaaatcggtctaccgggacaacagtgactcggtg

SEQ ID NO: 17897 - DNA, 260 bp, Unknown
  Description of Unknown: LeftRegion for integrase B4898 sequence
ttcaaaatcaaatcgaacagaaataaaaaaccgccccactccaaagcaggacggtcacgctcccgaataatacgaaagccctaagcaagcatattgtatcattcggagcagccaagtgcaagcggaacacccgttcttttctggctgttatttttatacccatttttacatacactgtacaagaacaaaggagtgatactatgcttagaatcggaatctatccgcgaaaatcggtctaccgggacaacagtgactcggtg

SEQ ID NO: 17898 - DNA, 260 bp, Unknown
  Description of Unknown: LeftRegion for integrase B4899 sequence
atatggtcacaaaataaaaaaatcctcctgtattagcagtacagaaggattaaggaatagcggttatgtgaaaccactacaaagaacatatttagtatatcacatgaccgctttaatttctactcttttttgaaattaggtggtcttttttttatgcaataattttgccaataatggcagcatggtcaggaggaggaaaaatgtacaatcaaaatgaactaataatgtatttaagaaaatcaagagcagaccggcccgat

SEQ ID NO: 17899 - DNA, 260 bp, Unknown
  Description of Unknown: LeftRegion for integrase B4900 sequence
caatttattgtcaatataaactttgctatttctcaataacattaagaactagcaatcatgctccagatgataccagaaccctagacaagcatattgtatcattcggagcagcccggcgcaagcggaacacccgttctttgctggctgttatttttatacctatttttacatacactgtatgagagcaaaggagtgatactatgcttagaatcggaatctatccgcgaaaatcggtctaccgggacaacagtgactcggtg

SEQ ID NO: 17900 - DNA, 260 bp, Unknown
  Description of Unknown: LeftRegion for integrase B4901 sequence
caaaaacagaccctcaaaaatgataacagaggatgaaataaatgaaatcctgcgcaaacaccagtaaggagctgattgcatgagtccatttgtcaaggaaaccctcaccggcttgctctgtatcgccttgcttgtagtctgggtgattatccatgtcacccatgacctgaatgactggaataataaatggaagtgatcaaatgtccaccgagtatgccatctatttacgcaaatcccgcgcggacctcgaagccgaggcg

SEQ ID NO: 17901 - DNA, 260 bp, Unknown
  Description of Unknown: LeftRegion for integrase B4902 sequence
gaagaaaaaaccaaagacaaataaaaccgccccaccattaagcggagcggcaatgcaactgttctgaatgaacaatcgccctagacaagcatattgtatcattcggagcagcccggcgcaagcggaacacccgttctttgctggctgttatttttatacctatttttacatacactgtacaggaacaaaggagtgatactatgcttagaatcggaatctatccgcgaaaatcggtctaccgggacaacagtgactcggtg

SEQ ID NO: 17902 - DNA, 260 bp, Unknown
  Description of Unknown: LeftRegion for integrase B4903 sequence
tccgtcgaatatgacttcgataaagaaaagtacgtcgtttcttctactttggaaatcggctacttgcccgctgccgctgctaagattgtcgaagcgcaaggcgaagaaaatgtttctgtctatatcgcaggaatcaattcagacgatgaaggaattgattttgcggatgtgtatattttcccaaaaaagggtgattgattatgtcaatgaacgctgtcatctatgcccgctattcaagtcacaaccaaaccgaacagtcg

SEQ ID NO: 17903 - DNA, 260 bp, Unknown
  Description of Unknown: LeftRegion for integrase B4904 sequence
cagcggagggcgaaccgtttactaccgtcggttagttctgcaacgcgccgcagacgagtggttgaagcgtcaccgctgaccaccatgcaaaaagaaaaagcccaccggagccgtacccggtaggctttttcttgcgtaaaaaaataatgccccatccttccgtctggaagaacagggcattttgaaaggatatactatatatgagaaggaagaaagtcaagggcggcaaccgcctcgttgcctactaccgctactccggc

SEQ ID NO: 17904 - DNA, 260 bp, Unknown
  Description of Unknown: LeftRegion for integrase B4905 sequence
accgcaccggataacgatatcatcgaccgcagcgaggtacataccaccgttcacgatcccgatctgtccgccccggagccagaaccgaaaaagcaaaccaaaatctcaatcaccgatcatatagaattgctggtgttcggcacgctcggcatagtggtgctgctcgcactgatcgtcagcagacaaaggaggtaagataattgtcaaccgaatacgccctctatctccgcaaatcccgcgcagacctcgaagctgaggca

SEQ ID NO: 17905 - DNA, 260 bp, Unknown
  Description of Unknown: LeftRegion for integrase B4906 sequence
cgcaatacccattgcattgcaaatgtctacaatgtttaccggataatgggtaatattattttgttcgcaaatttcatttgctttctgagcaatttttgcttttgtcagcataacaatacctcccctctacaataagaatatacgttaaatttgcacctgtcaaccacctgtccaaataatttgtcaaaggaagtgatcccatgcccaccgactatgccctgtacctccgcaaatcccgtgccgacctcgaagcagaggcg

SEQ ID NO: 17906 - DNA, 260 bp, Unknown
  Description of Unknown: LeftRegion for integrase B4907 sequence
catgtaaacgatgttggaataaataataaaaccgccccactctaaagcaggacggttatgctcccgatgatacggtagccctagacaagcatattgtatcattcggagcagccaaacgcaagcggaacacccgttctttgccggctgttatttttatacccatttttacatacactgtacaggagcaaaggagtgatactatgcttagaatcggaatctatccgcgaaaatcagtctaccgggacaacagtgactcggtg

SEQ ID NO: 17907 - DNA, 260 bp, Unknown
  Description of Unknown: LeftRegion for integrase B4908 sequence
tctttacgttattaagcaaaataaaaccgccccaccaataagcggagcggcaatgcaactgttctgaatgaacaatcgccctcaacaagcatattgtatcattcggagcagcccggcgcaagcggaacacccgttctttgctggctgttatttttatacctatttttacatacactgtacaggaacaaaggagtgatactatgcttagaatcggaatctatccacgaaaatcggtctaccgggacaacagtgactcggtg

SEQ ID NO: 17908 - DNA, 260 bp, Unknown
  Description of Unknown: LeftRegion for integrase B4909 sequence
tatgctgttgttccgtttatggccgctgtcctctgtttcctgctcaatcatatcggctctggtaactaaggaggcaactatgagtccatttatgaaagaaaccctcaccggcctgctctgtatcgccttgcttgtagtctgggtgattatccatgtcacccatgaccttaataactggaataataaatggaagtgataaaatgtccaccgagtatgccatctatttacgcaaatcccgcgcggacctcgaagccgaggcg

SEQ ID NO: 17909 - DNA, 260 bp, Unknown
  Description of Unknown: LeftRegion for integrase B4910 sequence
agccttcgaccgaggccttataactatcactccttccatgaaaatctatgtttctccaataattttggatagccctcaggacgcttttacagcccgctggctgacttctcttgacggaatggttttaccccccccccccgatttccgccgcgtagagagcttctggagtaccataacgacgaaatttttaggagggtcacatgaatacagtaatttatgctcggtattctgccggcccgagacagaccgaccagagtatc

SEQ ID NO: 17910 - DNA, 260 bp, Unknown
  Description of Unknown: LeftRegion for integrase B4911 sequence
ccagcggagggcgaaccgtttactaccgtcggttagttctgcaacgcgccgcagacgagtggttgaggcgtcaccgctgaccgccatgcaaaaagaaaaagcccaccgggggacagccggtaggctttttcttgcgtaaaaaaataatgccccatccttccgtctggaagaacagggcattttgaaaggatatactatatatgagaaggaagaaagtcaagggcggcaaccgccttgttgcctactaccgctactccggc

SEQ ID NO: 17911 - DNA, 260 bp, Unknown
  Description of Unknown: LeftRegion for integrase B4912 sequence
tgcttgcaggcggttttcttggcctgttctgttcgctcattatcagcggaatctgggaagcgctcgttgcacgatccgcaaacaagctgctgtccggccgcctcggaaccattctcagctatgctgttgttccgtttgtggctgctgtcctctgcttcctgctcaatcatatcggctctggtaactaaggaagtgataccatgcaaatagaatacgccatgtatttacgcaaatcccgtgccgacctcgaagcagaggcc

SEQ ID NO: 17912 - DNA, 260 bp, Unknown; identical to SEQ ID NO: 15702
  Description of Unknown: LeftRegion for integrase B4913 sequence

SEQ ID NO: 17913 - DNA, 260 bp, Unknown; identical to SEQ ID NO: 15412
  Description of Unknown: LeftRegion for integrase B4914 sequence

SEQ ID NO: 17914 - DNA, 260 bp, Unknown
  Description of Unknown: LeftRegion for integrase B4915 sequence
tttccctctattcacattgatagatgcaacaatcatctcttcaatgccatcaacgaaagccccaacgcaaccctcaatatcaacggcacagagggattcacagcgcaagaactcgaattgattgacctatatcggaacttcccgctgagaaagcaaatggagctgctgaactatgctttcagcctgaaagaaggtaagtaatgagagtagtcctttacatgagatatagcagcgaccgtcagactgagcaatccatagag

SEQ ID NO: 17915 - DNA, 260 bp, Unknown
  Description of Unknown: LeftRegion for integrase B4916 sequence
agccttcgaccgaggccttataactatcactccttccatgaaaatctatgtttctccaataattttggatagccctcaggacgcttttacagcccgctggctggcttctcttgacggaatggttttaccccccccccccgatttccgccgcgtagagagcttctggagtaccataacgacgaaatttttaggagggtcacatgaatacagtaatttatgctcggtattctgccggcccgagacagaccgaccagagtatc

SEQ ID NO: 17916 - DNA, 260 bp, Unknown
  Description of Unknown: LeftRegion for integrase B4917 sequence
cgtcagataatcctactctctctgacatggaacaattattagtaactacattccgtaatacggatacattaggacaggctaatatcatacacgcttgtttggctgagcgtgatagagttgaaaaaggtaaagtcgaacatactgaaaaagaaaagagcattgctgccgtataataaatttgtcagaatggaggaaacgccatgtatgagaatataaaaacagcctgcctatatgtcagattctcaagccataaccagact

SEQ ID NO: 17917 - DNA, 260 bp, Unknown
  Description of Unknown: LeftRegion for integrase B4918 sequence
attttctcgaaagtttggaacgacgttgttcaagaaatcgaccataagtggaaaaccgcgtaaccatctaacaagccgtctaacaagatatgttaggcggtttccttttatctaaatagtagacttgtttacaaaaactgcgaaggtcggtataatgttatcgaacaagtaaactaattttataagggggcgaaagtgaattgaacgcacttgaaaacgttccttacaacgtttatgaaagtatcaagttcgttgcaatt

SEQ ID NO: 17918 - DNA, 260 bp, Unknown
  Description of Unknown: LeftRegion for integrase B4919 sequence
ttgtcgattttttgctttctgtggtaatctggactgttatgggcagttttatttactttttcactcgtggactaagtgaagccgaatttaccagagcactgggtgttgaaatcgcaaaatccaaactggttgcacctatatgtctcgtcttagccgccattctgttctctcttgctaacttttgaaaagaggtgattcccatgtcaaccgactacgccctgtacctccgcaaatcccgcgcagacctcgaagccgaggcg

SEQ ID NO: 17919 - DNA, 260 bp, Unknown
  Description of Unknown: LeftRegion for integrase B4920 sequence
ggagccgccaccttttccgaagtcaatttgcctttttactccacaattttatcttattttctttttatcctttatttttgtaaaatttgccaaaagaaaaagcccgccgggccgaagcctgacgggctgagtaagacgcttatggaaaatcgttctctaaataatataattttttactgttacgcaaaaggtggtatctcatgagaagaaagaaaaactctgacgttatccgcctcgttgcctactaccggtactccggc

SEQ ID NO: 17920 - DNA, 260 bp, Unknown
  Description of Unknown: LeftRegion for integrase B4921 sequence
gcgactgcacgccgcaatggaagcagaacattgcaatgacagcccgtgcggcggcgggcgaatcgaaaaagaaagccgaaaataatttacctgccgccgctgtcaggtcggcataaatagagaagccccgcgctggtcggcaaactcacgcggggcaaacacccaaccattagcaaggttataggcaaggtgattttatcatggtcaaacgtagagcggctatatatgcccgcttttcgtcacacaaccaacggtcggaa

SEQ ID NO: 17921 - DNA, 260 bp, Unknown; identical to SEQ ID NO: 15839
  Description of Unknown: LeftRegion for integrase B4922 sequence

SEQ ID NO: 17922 - DNA, 260 bp, Unknown; identical to SEQ ID NO: 15830
  Description of Unknown: LeftRegion for integrase B4923 sequence

SEQ ID NO: 17923 - DNA, 260 bp, Unknown
  Description of Unknown: LeftRegion for integrase B4924 sequence
accgcaccggataacgatatcatcgaccgcagcgaggtgcataccgccgttcacgatcccgatttgtccgctccggagccggaaccgaaaaagcaagccaaaatctcaatcaccgatcatatagaattgctggtgttcggcgcgctcggcatagtggtgctgctcgcactgatcgtcagcagacaaaggaggtaagataattgtcaaccgaatacgccctctatctccgcaaatcccgcgccgacctcgaagccgaggcc

SEQ ID NO: 17924 - DNA, 260 bp, Unknown
  Description of Unknown: LeftRegion for integrase B4925 sequence
gaacctatacaaagaagatctttaaaaaaaccgccccactccaaagcaggacggtcacgctcccgaataatacgaaagccctaagcaagcatattgtatcattcggagcagccaagtgcaagcggaacacccgttctttgctggctgttatttttatacccatttttacatacactgtacaggaacaaaggagtgatactatgcttagaatcggaatctatccacgaaaatcggtctaccgggacaacagtgactcggtg

SEQ ID NO: 17925 - DNA, 260 bp, Unknown; identical to SEQ ID NO: 13468
  Description of Unknown: LeftRegion for integrase B4926 sequence

SEQ ID NO: 17926 - DNA, 260 bp, Unknown
  Description of Unknown: LeftRegion for integrase B4927 sequence
accgtgaagaattggaggggaataaagaagttcctgcgaacggagaagatagtccccatagaattgctcatgcgtaaaaaggcgttggaggtgatactacgaaagcggtaatctatgccagatattcgagccatagccaaagggaagaatccatagagggacagcttcgggagtgtcacgactttgcgctgaaaaacggaatgaccatcatcggtgagtactgcgataaggcaatctcaggaaagaccgacaatcgaccg

SEQ ID NO: 17927 - DNA, 260 bp, Unknown
  Description of Unknown: LeftRegion for integrase B4928 sequence
tgaaccaatacaaagaagatctttaaaaaaaccgccccactctaaagcaggacggttttgctccagatgataccagagccctagacaagcatattgtatcattcggagcagccaagtgcaagcggaacacacgttccacgctggctgttatttttatacctatttttacatacactgtatgagagcaaaggagtgatactatgcttagaatcggaatctatccgcgaaaatcggtctaccgggacaacagtgactcggtg

SEQ ID NO: 17928 - DNA, 260 bp, Unknown
  Description of Unknown: LeftRegion for integrase B4929 sequence
tatgctgttgttccgtttgtggctgctgtcctctgcttcctgctcaatcatatcggctctggtaactaaggaggcaactatgagtccatttatgaaagaaaccctcaccggcctgctctgtatcgccttgcttgtagtctgggtgattatccatgtcacccatgacctgaataactggaataataaatggaagtgataaaatgtccaccgagtatgccatctatttacgcaaatcccgtgccgatctcgaagccgaggcg

SEQ ID NO: 17929 - DNA, 260 bp, Unknown
  Description of Unknown: LeftRegion for integrase B4930 sequence
cagcggagggcgaaccgtttactaccgtcggttagttctgcaacacgccgcagacgagtggttgaagcgtcaccgctgaccaccatgcaaaaagaaaaagcccaccggagccgtacccggtaggctttttcttgcgtaaaaaaataatgccccatccttccgtctggaagaacagggcattttgaaaggatatactatatatgagaaagaagaaagtcaaggacggcaaccgccttgttgcctactaccgctactccggc

SEQ ID NO: 17930 - DNA, 260 bp, Unknown
  Description of Unknown: LeftRegion for integrase B4931 sequence
ttaagatatggtaatggagaaattttcattgaaaatgatagtcctttggagcaatgtttaaaagaaaataacgccactgctaatgatattgaattaattaagtgttatttgaatttagatttagaaattagaaataaaatacatgaacattttaaatgttactttagtaatattaaatgataacttaattggaggtttttatgaatcaagaactttttgcaatctatcttagaaaatcaagaaaagatttggagttaaaa

SEQ ID NO: 17931 - DNA, 260 bp, Unknown
  Description of Unknown: LeftRegion for integrase B4932 sequence
aaagccccgtctttctctgtcgaaaaaggcggggctttgatgaacgagttctgctttttaatgcaaccccacttctataaatagttgaaaactatgatatttttggaatgagtttaactttttcatctcaaatggttgctttcgtctcaaatccgtgactgattagacgaaagtttttaccgcttgaaaggtggtatagtatgccaaagaaaaatccatccggcggcaagcggcttgttgcctactaccgctacagcggc

SEQ ID NO: 17932 - DNA, 260 bp, Unknown
  Description of Unknown: LeftRegion for integrase B4933 sequence
cggagccgccaccttttccgaagtcaatttgcctttttactccacaattttatcttattttctttttatcctttattttcgtaaaatttgccaaaagaaaaagcccgccgggccgaagcctgacgggctgagtaagacgcttatagaaaatcgttctctgtataatataatttttactgttacgcaaaaggtggtatctcatgagaagaaagaaaaactctgacgttatccgcctcgttgcctactaccggtactccggc

SEQ ID NO: 17933 - DNA, 260 bp, Unknown
  Description of Unknown: LeftRegion for integrase B4934 sequence
gaggaggtattgatatgttaggatttgtaatcggactacttgtaggcggtcttgcaggcgtaatcataatgtgtctctgtactgcggcaaagcaggaaaatgaaaatatgtcaaattcggacaagtaattttgtccggtttggtgataccattctgaaaagatttatggtatccttgttggttgaaaggagagtgagaaaatgccgacagtaacggtgatacagccgacaatagcagaagaaaaagcagtcaagatacgt

SEQ ID NO: 17934 - DNA, 260 bp, Unknown; identical to SEQ ID NO: 15483
  Description of Unknown: LeftRegion for integrase B4935 sequence

SEQ ID NO: 17935 - DNA, 260 bp, Unknown; identical to SEQ ID NO: 14669
  Description of Unknown: LeftRegion for integrase B4936 sequence

SEQ ID NO: 17936 - DNA, 260 bp, Unknown
  Description of Unknown: LeftRegion for integrase B4937 sequence
cgaatcagctcttcacgaggccacgaaagaagccgcaaatacaccagacattgattggcgcgatgttgagctgatcgagaacggcgcgatgattattccgaaagacgcaccaaaatagcaattaagccccgcgcatcacagggttgccgccctagcgcgaggctcgagagaattaaccgatccatggaaggagcggtcgcatgtatgatagcatgcccgccgagtggttgtgttgcgcctacttgcgaaaatcacgcgag

SEQ ID NO: 17937 - DNA, 260 bp, Unknown; identical to SEQ ID NO: 15412
  Description of Unknown: LeftRegion for integrase B4938 sequence

SEQ ID NO: 17938 - DNA, 260 bp, Unknown
  Description of Unknown: LeftRegion for integrase B4939 sequence
cagcggagggcgaaccgtttactaccgtcggttagttctgcaacgcgccgcagacgagtggttgaagcgtcaccgctgaccaccatgcaaaaagaaaaagcccaccggagccgtacccggtaggctttttcttgcgtaaaaaaataatgccccatccttccgtctggaagaacagggcattttgaaaggatatactatatatgagaaagaagaaagtcaaggacggcaaccgccttgttgcctactaccgctactccggc

SEQ ID NO: 17939 - DNA, 260 bp, Unknown
  Description of Unknown: LeftRegion for integrase B4940 sequence
tgcttgcaggcggttttcttggcctgttctgttcgctcattatcagcggaatctgggaagcgctcgttgcacgatcctcaaacaagctgctgtccggccgcctcggaaccattctcagctatgctgttgttccgtttgtggctgctgtcctctgcttcctgctcaatcatatcggctctggtaactaaggaagtgatacaatgcaaatggaatacgccatgtatttacgcaaatcccgtgccgacctcgaagcagaggcg

SEQ ID NO: 17940 - DNA, 260 bp, Unknown
  Description of Unknown: LeftRegion for integrase B4941 sequence
acgaagattcttagaactcacttcatcgttagaaccgccgtgcaaagacgaaccggcgtatgcgcgtcttatgcaagacataagcaacggaacagttgacgcggtagtttgcggataacaagaagccccgcgctggtcggcaaactcacgcggggcaaacacccaaccattagcaaggttataggcaaggtgattttatcatggtcaaacgtagagcggccatatatgcccgcttttcgtcacacaaccaacggtcggaa

SEQ ID NO: 17941 - DNA, 260 bp, Unknown; identical to SEQ ID NO: 15832
  Description of Unknown: LeftRegion for integrase B4942 sequence

SEQ ID NO: 17942 - DNA, 260 bp, Unknown
  Description of Unknown: LeftRegion for integrase B4943 sequence
gtccgccgacccatccgctcctgataatgatataatcgacagaagtgaagttgcgggcacatcaagctatcctcaaaaaacagaaaagaagtcctggattaactccgataatgttgacttattagtctttcctttggttggtgttatcgccctgtttctgtgtctattggacaaactgattcaaaaaaggaggtgatcccatgcccaccgaatacgccctgtacctccgcaaatcccgcgcggacctcgaagccgaggcg

SEQ ID NO: 17943 - DNA, 260 bp, Unknown
  Description of Unknown: LeftRegion for integrase B4944 sequence
cgcaatacccattgcattgcaaatgtctacaatgtttaccggataatgggtaatattattttgttcgcaaatttcatttgctttctgagcaatttttgcttttgtcagcataacaatacctcccctctacaataagaatatacgttaaatttgcacctgtcaaccacctgtccaaataatttgtcaaaggaagtgatcccatgcccaccgactatgccctgtacctccgcaaatcccgtgcggacctcgaagccgaggca

SEQ ID NO: 17944 - DNA, 260 bp, Unknown
  Description of Unknown: LeftRegion for integrase B4945 sequence
ttgttgtcaatatttttttcattatgtaaaaccgccccactctaaagcaggacggttatgctcccgatgatacggtagccctagacaagcatattgtatcattcggagcagccgagtgcaagcggaacacccgttctttgctggctgttatttttatacctatttttacatacactgtatgagagcaaaggagtgatactatgcttagaatcggaatctatccacgaaaatcggtctaccgggacaacagtgactcggtg

SEQ ID NO: 17945 - DNA, 260 bp, Unknown
  Description of Unknown: LeftRegion for integrase B4946 sequence
aaaacgacgaagacgaataataaaaaccgccccaccattaagtggagcggcaatgcaactgttctgaatgaacaatcaccctcaacaagcatattgtatcattcggagcagccaagcgcaagcggaacacacgttccacgctggctgttatttttatacctatttttacatacactgtacaggaacaaaggagtgatactatgcttagaatcggaatctatccgcgaaaatcagtctaccgggacaacagtgactcggtg

SEQ ID NO: 17946 - DNA, 260 bp, Unknown
  Description of Unknown: LeftRegion for integrase B4947 sequence
tgacaatactgaaaatcagtaaataaaaaaccgccccactccaaagcaggacggtcacgctctcgaatgatacgaaagccctagacaagcatattgtatcattcggagcagccaagtgcaagcggaacacacgttccacgctggctgttatttttatacctatttttacatacactgtacaggaacaaaggagtgatactatgcttagaatcggaatctatccgcgaaaatcggtctaccgggacaacagtgactcggtg

SEQ ID NO: 17947 - DNA, 260 bp, Unknown
  Description of Unknown: LeftRegion for integrase B4948 sequence
cgtcgttttgcggaattttatggtgtgggacttgattattttggagtgtcaacagttgatgaaggatttgaactgttgagccgcgcaaaaagcgtatttttgaatgaggatattccaaaagaagaacgagagcgtttgtacaaagagataatgcgcttgtatttggaaatgcaagattaaaacaacaagggagcaacacaatgaacagaagaacggggatttacggaagatactcagatacaaaacaagacgatggtttc

SEQ ID NO: 17948 - DNA, 260 bp, Unknown
  Description of Unknown: LeftRegion for integrase B4949 sequence
gccgctttgcaggccgcgtcaagtcgctggcggctgtcctgccctactgtgacgaagcgacctttttcgataatgataacggctttgttgcggtcgctgagtaccgcaacggcgtgatcgtctgctacgagaacgcgccgcgttgggtgacattccttgccgacgccatcaatcagccgtaaccgaaaggagttcccctcatgcccaccgaatacgccctctatctccgcaaatcccgcgcggacctcgaagccgaggca

SEQ ID NO: 17949 - DNA, 260 bp, Unknown; identical to SEQ ID NO: 17905
  Description of Unknown: LeftRegion for integrase B4950 sequence

SEQ ID NO: 17950 - DNA, 260 bp, Unknown
  Description of Unknown: LeftRegion for integrase B4951 sequence
aaagccccgtctttctctgtcgaaaaaggcggggctttgatgaacgagttctgctttttaatgcaactccacttctataaatagttgaaaactatgatatttttggaatgagtttaactttttcatctcaaatggttgctttcgtctcaaatccgtgactgattagacgaaagtttttaccgcttgaaaggtggtatagtatgccaaagaaaaatccatccggcggcaagcggcttgttgcctactaccgctacagcggc

SEQ ID NO: 17951 - DNA, 260 bp, Unknown
  Description of Unknown: LeftRegion for integrase B4952 sequence
cgcatctctgcacaggcggaaatgctctcccagatgcgcgtcgatcatgaaaaagagctgcatcgcctgagaatggagcgtttctttttgtttggcacgctgcttgtctttatggccgtcatcgtctatctggtcattgacgcttcccacggcggctgggggttctttcgttattcctccgatatgctcaggacgcggtaatggaacagtatgctatctatctgcgcaagtcccgcgccgacgcggaggccgaagcgcac

SEQ ID NO: 17952 - DNA, 260 bp, Unknown
  Description of Unknown: LeftRegion for integrase B4953 sequence
acgaagattcttagaactcacttcatcgttagaaccgccgtgcaaagacgaaccggcgtatgcgcgtcttatgcaagacataagcaacggaacagttgacgcggtagtttgcggataacaagaagccccgcgctggtcggcaaactcacgcggggcaaacacccaaccattagcaaggttataggcaaggtgattttatcatggtcaagcgtagggctgctatatacgcccgcttttcgtcacacaaccaacggtcggaa

SEQ ID NO: 17953 - DNA, 260 bp, Unknown
  Description of Unknown: LeftRegion for integrase B4954 sequence
gtatcgagatgttaggatttgttattggaatatttatcggcgaaattattggagtattcacaatgtgtctgtgcagagcaacctcagaagcagacaaatgtatggattccacagattctgaggaataaatttgttgggtatggtgataccattcagtaaaaatttgtggtatccttgttagtaaaacagaggtgaataatatgcctacagtaacggtgatacagccgatcatagcagcagaacaaaacacaaagatccgt

SEQ ID NO: 17954 - DNA, 260 bp, Unknown; identical to SEQ ID NO: 17887
  Description of Unknown: LeftRegion for integrase B4955 sequence

SEQ ID NO: 17955 - DNA, 260 bp, Unknown
  Description of Unknown: LeftRegion for integrase B4956 sequence
aaagccccgtctttctctgtcgaaaaaggcggggctttgatgaacgagttctgctttttaatgcaactccacttctataaatagttgaaaactatgatatttttggaatgagtttaactttttcatctcaaatggttgcttttgtctcaaatccgtgactgattagacgaaagtttttaccgcttgaaaggtggtatagtatgccaaagaaaaatccatccggcggcaagcggcttgttgcctactaccgctacagcggc

SEQ ID NO: 17956 - DNA, 260 bp, Unknown
  Description of Unknown: LeftRegion for integrase B4957 sequence
aaatcaattacacaatatgtaaaaaaccgccccaccattaagtggagcggcaatgcaattgctctgaatgaacaatcgccctagacaagcatattgtatcattcggagcagccgagtgcaagcggaacacccgttctttgctggctgttatttttatacccatttttacatacactgtacaagaacaaaggagtgatactatgcttagaatcggaatctatccgcgaaaatcagtctaccgggacaacagtgactcggtg

SEQ ID NO: 17957 - DNA, 260 bp, Unknown
  Description of Unknown: LeftRegion for integrase B4958 sequence
aaagccccgtctttctctgtcgaaaaaggcggggctttgatgaacgagttctgctttttaatgcaactccacttctataaatagttgaaaactatgatatttttggaatgagtttaactttttcatctcaaatagttgctttcgtctcaaatccgtgactgattagacgaaagtttttaccgcttgaaaggtggtatagtatgccaaagaaaaatccatccggcggcaagcggcttgttgcctactaccgctacagcggc

SEQ ID NO: 17958 - DNA, 260 bp, Unknown
  Description of Unknown: LeftRegion for integrase B4959 sequence
acaccctttcaaatcttgtaatagcgatatgtatatatttatattatatcatatattttattacatatcaagagataaataaaaaaaacgccccaaaagatgctggaacatctctcggagcgcaggagaatgtggtacattcaccattcatacaatgtgaattataccatatcctccaagaaaagtcaaggaggaattaaatgaaaaccgccgtaatatacgcccgatactcttccgacaagcagacagagcagtccatc

SEQ ID NO: 17959 - DNA, 260 bp, Unknown; identical to SEQ ID NO: 17907
  Description of Unknown: LeftRegion for integrase B4960 sequence

SEQ ID NO: 17960 - DNA, 260 bp, Unknown; identical to SEQ ID NO: 15830
  Description of Unknown: LeftRegion for integrase B4961 sequence

SEQ ID NO: 17961 - DNA, 260 bp, Unknown
  Description of Unknown: LeftRegion for integrase B4962 sequence
tcatagttgcgctggtcggtatatgtatcttatcctttgccctcgttcatgtagaactaaagaattatcgcaccgccgataatagatgcagtcagtattattccgttttgcgcgaaattgcactgatcgcaaaaacacgccctgtaactgcggaagaaatagataatattctgaaaaagtaccaataaggatgtgatcccatgcgtaccgagtacgcaatttatctgagaaaatcccgtgccgacctcgaagcagaggcg

SEQ ID NO: 17962 - DNA, 260 bp, Unknown; identical to SEQ ID NO: 14669
  Description of Unknown: LeftRegion for integrase B4963 sequence

SEQ ID NO: 17963 - DNA, 260 bp, Unknown
  Description of Unknown: LeftRegion for integrase B4964 sequence
agcggagaaagaatcgtgtactaccgcaggttagttcttgaacgcgctgccgacgagtggttgaagcgtcaccgctgaccaccatgcaaaaaaggaaaagcccaccggagccgtacccggtaggctttttcttgcgtaaaaaaacaatgccccattcttccgtctggaagaacagggcattttgaaaggatatactatatatgagaagaaagaaagtcgagggcggcaaccgccttgttgcctactaccgctactccggc

SEQ ID NO: 17964 - DNA, 260 bp, Unknown
  Description of Unknown: LeftRegion for integrase B4965 sequence
aaagccccgtctttctctgtcgaaaaaggcggggctttgatgaatgagttctgcttttttaatgcaactccacttctataaatagttgaaaactatgatattttggaatgagtttaactttttcatctcaaatagttactttcgtctcaaatccgtgactgattagacgaaagtttttaccgcttgaaaggtggtatagtatgccaaagaaaaatccatccggcggcaagcggcttgttgcctactaccgctacagcggc

SEQ ID NO: 17965 - DNA, 260 bp, Unknown
  Description of Unknown: LeftRegion for integrase B4966 sequence
accgggcttttaatcgtgtgcagtgacccgatgcaaaagaaaatcgacagagctgccgccctaaacattccaatcatttcagaacagcaatggtttgaacttatgccggaactagaagccctcggaatgtggaatggaaagccaattccgtttgcggatgacaatggcatctaccgttttgatgtgggtggtgttggataatggcaaaaaagaagaagcccgccgggggcaatgccatcatctatgcccgctactcgtcc

SEQ ID NO: 17966 - DNA, 260 bp, Unknown
  Description of Unknown: LeftRegion for integrase B4967 sequence
cagcggagggcgaaccgtttactaccgtcggttagttctgcaacgcgccgcagacgagtggttgaagcgtcaccgctgaccaccatgcaaaaagaaaaagcccaccggagccgtacccggtaggctttttcttgtgtaaaaaaataatgccccatccttccgtctggaagaacagggcattttgaaaggatatactatatatgagaaagaagaaagtcaagggcggcaaccgccttgttgcctactaccgctactccggc

SEQ ID NO: 17967 - DNA, 260 bp, Unknown
  Description of Unknown: LeftRegion for integrase B4968 sequence
tacttgcaggcggtttcctcggcctgttctgttcgctcattatcagcggtatctgggaagcgctcgttgcacgatccgcaaacaagctgctgtccggccgcctcggaaccattctcagctatgctgttgttccgtttgtggctgctgtcctctgcttcctgctcaatcatatcggctctggtaactaaggaagtgataccatgcaaatggaatacgccatgtatttacgcaaatcccgtgccgacctcgaagccgaggcc

SEQ ID NO: 17968 - DNA, 260 bp, Unknown; identical to SEQ ID NO: 15737
  Description of Unknown: LeftRegion for integrase B4969 sequence

SEQ ID NO: 17969 - DNA, 260 bp, Unknown
  Description of Unknown: LeftRegion for integrase B4970 sequence
caaaaacagaccctcgaaaacgataacagaggatgaaataaacgaaatcctgcgcaaacaccagtaaggagctgattgcatgagtccatttgtcaaggaaaccctcaccggcttgctctgtatcgccttgcttgtagtctgggtgattatccatgtcacccatgacctgaatgactggaataataaatggaagtgatcaaatgtcaaccgagtatgccatctatttacgcaaatcccgcgccgacctcgaagccgaggcg

SEQ ID NO: 17970 - DNA, 260 bp, Unknown
  Description of Unknown: LeftRegion for integrase B4971 sequence
gaccaaggagagacaaatggcaaaaactataattaaaaaatattctaataacactacagtggttattacatacaacaacgaaccttctttagaggctatcaagcagtatgcccaaaaattaaagcagacaattgacagcaaaagtattcagagttaacatatatttataaaatcaatagagaaggtgatattcgttggaaatgcgaaatgaatacaatccaattattataaaatatgttgcagaatatttgagaaaatct

SEQ ID NO: 17971 - DNA, 260 bp, Unknown
  Description of Unknown: LeftRegion for integrase B4972 sequence
atatgaattttgataaataaaaaaccgccccggcgctaccaacaccagagcggcaaatatagctccgaaaagcatatgccctcaacaagcatattgtatcattcaaagcagcacggcgcaagcggaacaccagttccatgctggctgttatttttatacccatttttacatacactgtacaagaacaaaggagtgatactatgcttagaatcggaatctatccacgaaaatcggtctaccgggacaacagtgactcggtg

SEQ ID NO: 17972 - DNA, 260 bp, Unknown
  Description of Unknown: LeftRegion for integrase B4973 sequence
tacttgcaggcggtttcctcggcctgttttgttcgctcattatcagcggtatctgggaagcgctcgttgcacgatccgcaaacaagctgctgtccggccgcctcggaaccattctcagctatgctgttgttccgtttgtggctgctgtcctctgcttcctgcttaatcatatcggctctggtaactaaggaagtgataccatgcaaatggaatacgccatctatctccgcaaatcccgcgccgacctcgaagccgaggcg

SEQ ID NO: 17973 - DNA, 260 bp, Unknown
  Description of Unknown: LeftRegion for integrase B4974 sequence
accgcgccggatagcgatatcatcgaccgcagcgaggtgcataccgccgttcacgatcccgatttgtccgctccggatccggaaccgaaaaagcaagccaaaatctcaatcaccgatcatatagaattgctggtgttcggcgcgctcggcatagtggtgctgctcgcactgatcgtcagcagacaaaggaggtaagataattgtcaaccgaatacgccctctatctccgcaaatcccgcgccgacctcgaagccgaggcg

SEQ ID NO: 17974 - DNA, 260 bp, Unknown
  Description of Unknown: LeftRegion for integrase B4975 sequence
caaaaacagaccctcaaaaatgataacagaggatgaaataaatgaaatcctgcgcaaacaccagtaaggagctgattgcatgagtccatttgtcaaggaaaccctcaccggcttgctctgtatcgccttgcttgtagtctgggtgattatccatgtcacccatgatctgaatgactggaataataaatggaagtgatcaaatgtccaccgagtatgccatctatttacgcaaatcccgcgcggacctcgaagccgaggcc

SEQ ID NO: 17975 - DNA, 260 bp, Unknown
  Description of Unknown: LeftRegion for integrase B4976 sequence
caagtggataacacccttgtttatcattgtaggcgctatcctgttcgctctctcgtaaactcgaaacggaggaataattatgacgccatttgtcaaagaaaccctcaccggcttgctctgtatcgccttgcttgtagtctgggtgattatccatgtcacccatgatcggaataactggaataataaatggaagtgataaaatgtccaccgagtatgccatctatttacgcaaatcccgtgccgacctcgaagccgaggcc

SEQ ID NO: 17976 - DNA, 260 bp, Unknown; identical to SEQ ID NO: 17887
  Description of Unknown: LeftRegion for integrase B4977 sequence

SEQ ID NO: 17977 - DNA, 260 bp, Unknown
  Description of Unknown: LeftRegion for integrase B4978 sequence
gggcgaaccgtttactaccgtcggttagttctgcaacgcgccgcagacgagtggttgaggcgtcaccgctgaccgccatgcaaaaagaaaaagcccaccgggggacagccggtaggctttttcgtgtatgtaaaaataaaaaaatgccccatccttccgtctggaagaacagggcattttgaaaggatatactataatatatgagaagaaagaaagtcgagggcggcaaccgccttgttgcctactaccgctactccggc

SEQ ID NO: 17978 - DNA, 260 bp, Unknown
  Description of Unknown: LeftRegion for integrase B4979 sequence
gccttcgaccgaggccttataactatcactccttccatgaaaatctatgtttctccgataattttggatagccctcaggacgcttttacagcccgctggctggcttctcttgacggaatggttttacccccccccccccgatttccgccgcgtagagagcttctggagtaccataacgacgaaatttttaggagggtcacatgaatacagtaatttatgctcggtattctgccggcccgagacagaccgaccagagtatc

SEQ ID NO: 17979 - DNA, 260 bp, Unknown
  Description of Unknown: LeftRegion for integrase B4980 sequence
tgcatactgcctgcaatgcgcactgctcaacgcgactggtacggcagcggcgtaaatcacgacaatctgtcccgctcctctgctggcttgatcatagcagacagccgggcgggatgtaaagttacagttatgttaacctttgcgctgacccacagatacaaaaggatgtgcccaatttggacacacgagaggtgacagctatggcaaaacgcctgcatggggcgctcatctgcgcccgatactccaccgataaccaaaat

SEQ ID NO: 17980 - DNA, 260 bp, Unknown; identical to SEQ ID NO: 16123
  Description of Unknown: LeftRegion for integrase B4981 sequence

SEQ ID NO: 17981 - DNA, 260 bp, Unknown
  Description of Unknown: LeftRegion for integrase B4982 sequence
taacgacaaggaatatgccagggcaaagaaatactatcgcaagctcacaggcgccgatattgtgatcgcggattaaaaagatatttcttccgattttcgctggacttgtcaagttccgtagatataatctgtgttgccgacaaaaagaggtttgccccaaaatgtagggcaaacctccctaaaggaaaggaggaagacacatggctcaagcaaagctgatttcgccggtatccaggcaagcatatgagcggacgaaggtc

SEQ ID NO: 17982 - DNA, 260 bp, Unknown
  Description of Unknown: LeftRegion for integrase B4983 sequence
actccgttagagggcatgagtaaagagcaagcctctctttatatgctcacggaatttctaagcctcatagataaagaatatcctaaaataccgccccagcagaaagccgctttaattagcgaattttataagcatgaccctataaaattgttattatctgcacttaataacgaactatccaaacaaggaagtgatgaaaaatgatgcagcaggcattaaacgccgtaatatacgcccgttattcttcccacaatcaaaca

SEQ ID NO: 17983 - DNA, 260 bp, Unknown; identical to SEQ ID NO: 15838
  Description of Unknown: LeftRegion for integrase B4984 sequence

SEQ ID NO: 17984 - DNA, 260 bp, Unknown
  Description of Unknown: LeftRegion for integrase B4985 sequence
atacttttgatccgtcgtccgacgcttatctgactgccgaaaaggacggcaccgttatcatggaaggctttggctcatttcctgcttatgctcacaaaggcatggttcttatgcagaccgacaaccttccccaggaagtgattgacctgttcgatgccatgtaaagctccacattgtctttctgcaaaggtggtgtccctatgaagaaacaaccaaccggcggcaagcggcttgttgcctactaccgctacagcggcggc

SEQ ID NO: 17985 - DNA, 260 bp, Unknown
  Description of Unknown: LeftRegion for integrase B4986 sequence
tttccctctattcacattgatagatgcaacaatcatctcttcaatgccatcaacgaaagccccaatgcaaccctcaacatcaacggcacagagggattcacggcgcaggaactcgaattgattgacctgtatcggaacttcccgctgagaaagcaaatggagctgctgaactatgctttcagcctgaaagaaggtaagtaatgagagtagtcctttacatgagatatagcagcgaccgtcagactgagcaatccatagag

SEQ ID NO: 17986 - DNA, 260 bp, Unknown
  Description of Unknown: LeftRegion for integrase B4987 sequence
acaactacatcctggcagagaatctgaccaagaagctacttgaaaaagggctgatttctgtggatgaattcaacaagatcatggagaaaaatcggcgaactttctccccgttattctcccgtatctaaacagatacaacttgctattatgaccatttagagtgatatatagactaccctgaaagaaaggagaccgagactatgaaacggataacaaagattgaggcagccgataccggagcggtgcgaaaactgcgtgtg

SEQ ID NO: 17987 - DNA, 260 bp, Unknown
  Description of Unknown: LeftRegion for integrase B4988 sequence
cgcgattatgtggacgacaataagtattccagccttgaggcagtgcaaaagaacttgaaggtaattccaacggcagagcagcagtttttagactccagaaccgcgtacctgaaagaggccggttttaccgatgacgaaatcgcccagaggccgacccttgacagcggagaaaacaaataacaccaagaggtgcagcagctatgaaaccatctggcgactatgctatatatctgcgaaaatcgcgcaaggacctggaacta

SEQ ID NO: 17988 - DNA, 260 bp, Unknown
  Description of Unknown: LeftRegion for integrase B4989 sequence
atacttttgatccgtcgtccgacgcttatctgactgccgaaaaggacggcgccgttatcatggaaggctttggttcattctccgcttatgctcacaacggcatggttctcatgcagaccgacagccttccccaggaagtgattgacctgttcaacgctatgtaaaactccgcattgtctttctgcaaaggtggtatctctatgaaaaaacagccaaccggcggcaaccggcttgttgcctactaccgctacagcggcggt

SEQ ID NO: 17989 - DNA, 260 bp, Unknown; identical to SEQ ID NO: 17986
  Description of Unknown: LeftRegion for integrase B4990 sequence

SEQ ID NO: 17990 - DNA, 260 bp, Unknown
  Description of Unknown: LeftRegion for integrase B4991 sequence
cttgacggctttcttctgcattgtaacaccttctccaaaatattcctgtttaattatatcaccgaactgcaaaaaaatcaacaggaatatgtacaaaccgcatatgaataatttatgccgaggtgattttatgacaataacaaaagaggaagagaaaacaatagaacagacgatatgccgtatcataatcgagcaactgtatgacgagggtcatattgatacgttgccgcagtgctgtgaagaagcttagagcggcggct

SEQ ID NO: 17991 - DNA, 260 bp, Unknown; identical to SEQ ID NO: 17982
  Description of Unknown: LeftRegion for integrase B4992 sequence

SEQ ID NO: 17992 - DNA, 260 bp, Unknown
  Description of Unknown: LeftRegion for integrase B4993 sequence
cgcgattatgtggacgacaataagtattccagccttgaggcagtgcaaaagaacttgaaggtaattccgacggcagagcagcagtttttagactccagaacagcgtacctgaaagacgccggttttacagatgaagaaattgcccagaggccaaccctcgacagcggagaaaacaaataacaccaagaggtgcaacagctatgaaacggcctgacgactatgctatttaccttcggaaatcgcgcaaggaccttgacctt

SEQ ID NO: 17993 - DNA, 260 bp, Unknown
  Description of Unknown: LeftRegion for integrase B4994 sequence
aaggaggttcagaaatggtaggatttattattggattgcttgcaggcggtacagcgggagtattcacaatgtgtctctgtactgcggcaaagcaggcagatgaaaatatgtcaaattcggacaagtaattttgtcaggtttggtgataccattctgaaaagatttgtggtattcttgttggttgaaaggagagtgagaaaatgccgacagtaacggtgatacagcctacaatatcagaagaacaaaatacaaaaattcgt

SEQ ID NO: 17994 - DNA, 260 bp, Unknown
  Description of Unknown: LeftRegion for integrase B4995 sequence
acgcacacttttagagcaatattctgagttttgaaaattcttttgatttttttacttatttagggtgacaaaccgcaaattttgcggaatatatttaagaggataaaatcctcacgaagtcttgacttgatttttttagatgttattatggaggtaatcaattgttgcctgcgtaaaaagtgccgtaaggagatccacatatgcaggaaaacaagcaaaacatacgatttactgccctgtactgtcgcttatcgtctgat

SEQ ID NO: 17995 - DNA, 260 bp, Unknown
  Description of Unknown: LeftRegion for integrase B4996 sequence
ctctgtgtgcccttgtcaagcgatgtttaccggtgcagatatcgtattagcccgctgaaaattgtgtataaggtcaattttgcgctgttccaattgttttggtagctattcagaatagttatcagtataatgtggtttgccaaaagtggttggtatcatattatgataccaaccaaaaaacgagagaggaggacaccgaaatgcctgaagtacggctcatcaccccgatcacaagacagaacacgaagaagatgcaggtt

SEQ ID NO: 17996 - DNA, 260 bp, Unknown
  Description of Unknown: LeftRegion for integrase B4997 sequence
tgcaaaaatgaagaaatattgaaaatggcattttaacaaaaaactgcccaggtgctgttaacacctaggcggcctgatttgataacctatcaatgcataatgtatgataagcatatctcgcacatatatattatcatacatccaccaatttgaatagggtgtattttataccttaaatttcttttatatgaggtgatcgtatgataataggaatttatccccgaaaatctgtatatcgggataacagtgaatcaattaaa

SEQ ID NO: 17997 - DNA, 260 bp, Unknown; identical to SEQ ID NO: 17992
  Description of Unknown: LeftRegion for integrase B4998 sequence

SEQ ID NO: 17998 - DNA, 260 bp, Unknown
  Description of Unknown: LeftRegion for integrase B4999 sequence
tttttacaactactaattctaaaaatattttaaccaaagaactaatggataataatttagaagattataagaaaaatctatctgctacaatattaagtaatttaagagccgctactatcaattcattgtcaaacgataacaaagcgcagaatttttcaactaaaattttaatgttagagtataactaaaggggtttcaatatgttaagagcagcactatatgcacgctattccagcgataaccagcgatacgaaagcatt

SEQ ID NO: 17999 - DNA, 260 bp, Unknown
  Description of Unknown: LeftRegion for integrase B5000 sequence
cagggcgaaaaagtattatatgaagcttaccggtgcagatatcgtattagcccgctgaaaattgtgcataaggtcaattctgcgctgttccaattgttttggtagctattcagaatagttatcagtataatgtggtttgccaaaagtggttggtatcatattatgataccaaccaaaaaacgagagaggaggacaccgaaatgcctgaagtacggctcatcaccccgatcacaagacagagcacgaagaagatgcaggtt

SEQ ID NO: 18000 - DNA, 260 bp, Unknown
  Description of Unknown: LeftRegion for integrase B5001 sequence
taaaagtacatgcaatagtggttgttgcaaattacgcaacaactaaaaaaagccccgtgccctgctggaacaggtacacgggacgcgccgtcggtattggcgtaccgtatcggcaatttgtaaatctactgtgcgaggctgatttactctattattataccataaatcagtctcctatatagggaaggactgatttttttatgttaaaaaccgacatgacaaacgaaaaaagtacagcagttatctacgctcgcttttca

SEQ ID NO: 18001 - DNA, 260 bp, Unknown; identical to SEQ ID NO: 17647
  Description of Unknown: LeftRegion for integrase B5002 sequence

SEQ ID NO: 18002 - DNA, 260 bp, Unknown
  Description of Unknown: LeftRegion for integrase B5003 sequence
atacttatagagcaagatatcacagagtattaagaaaattaaaaattttttaaatttttttggattttaggggtgcgaaaacccgttttttacggaatatatatagaggaaaaaatcctcacgaagtcttgacttgattttgcaaggtggtattatggaggtaaatcaattgttgcctgcgtaaaaggagaataacagatatgcaggaaaacaaacaaaatttacgatttacagccctgtattgccgcctatcgtctgat

SEQ ID NO: 18003 - DNA, 260 bp, Unknown; identical to SEQ ID NO: 17647
  Description of Unknown: LeftRegion for integrase B5004 sequence

SEQ ID NO: 18004 - DNA, 260 bp, Unknown
  Description of Unknown: LeftRegion for integrase B5005 sequence
atactttcgatccttcgtccgacgcttatctgactaccgaaaaggacggcaccgttatcatggaaggctttggttcgttcaccgcttatgctcacaacggcatggttcttgtgcagaccgataaccttcctcaggaagtaatcgacctgttcaatgccatgtaaacctccgcattctctttctgcaaaggtggtatctctatgaaaaaacagccgaccggtggaaaccggcttgttgcctactaccgctactccggcggt

SEQ ID NO: 18005 - DNA, 260 bp, Unknown; identical to SEQ ID NO: 16123
  Description of Unknown: LeftRegion for integrase B5006 sequence

SEQ ID NO: 18006 - DNA, 260 bp, Unknown
  Description of Unknown: LeftRegion for integrase B5007 sequence
gctactcgcaggaggttgccgaggacgttgcgatgacggccaggaacaggctcttggagctttgcggggcgtagccgctccatcatcgccgaatagcaaagcgccccggtgcgtccgccaagacacatcaccggggcgagcaagatggagcgcgtggccgtagccggtcgcgctcattcccctatcagggaggtttcattatgacacagagaacggccgtgctgtatgcacgctactctagcgacaagcagcgcgaggcg

SEQ ID NO: 18007 - DNA, 260 bp, Unknown
  Description of Unknown: LeftRegion for integrase B5008 sequence
gaaacggtttgcggagttttacaaagtcggtctttcttactttggcgtagaaacgcaggatgagggatttgagctgttgagccgtgcaaagagtgtatttctgaatgaaggcattccaaaagaagagcgagagaggttatacaaagagataatgcgcttgtatttgcggatggaagagtaaacagcaagggagaaacataatgaacaaaaggacagggatatatggaagatattcagacacgaaacaagacgatggtttc

SEQ ID NO: 18008 - DNA, 260 bp, Unknown
  Description of Unknown: LeftRegion for integrase B5009 sequence
agatgtaagtgcttggaaaaatttcttaccttacacaaaagtaaaagagcttttaaataatggtgtttctacaataacggaattagcagatttctttaatgtagaagctccatatatggctagatgtatccattactatgcaaatgaaagtaatagatttactaaagaaaatatagcataaaaaaattaggaggtaaaatatgtatttagtagcttatgctagatactctagcgataaccaaagagaagagtctataact

SEQ ID NO: 18009 - DNA, 260 bp, Unknown
  Description of Unknown: LeftRegion for integrase B5010 sequence
ttcccctctgttcacattgataggtgcaacaatcatcttttcaacgccatcaatgaaagccccaacgcaaccctcaatatcaatggtacggagggatttacggctcaggagcttgaattgattgacctgtatcggaacttcccgctgagaaaacaaatggagctgctgaactatgctttcagcctgaaagaaggcaagcagtgagagtagttctttacatgaggtatagcagcgaccgtcagaccgaacagtccatagaa

SEQ ID NO: 18010 - DNA, 260 bp, Unknown; identical to SEQ ID NO: 17982
  Description of Unknown: LeftRegion for integrase B5011 sequence

SEQ ID NO: 18011 - DNA, 260 bp, Unknown
  Description of Unknown: LeftRegion for integrase B5012 sequence
cagggcgaaaaaatactatatgaagcttaccggcgcggatatcgtattagcccactgaaaattgtgcataaggtcaattctgcgctgttccaattgttttggtagctattcagaagagttatcagtataatgtggtttgccaaaagtggttggtatcataatatgataccaaccaaaaaatgagagaggaggacaccgaaatgcctgaagtacgactcatcacccctatcacaagacagaacacgaagaagatgcaggtt

SEQ ID NO: 18012 - DNA, 260 bp, Unknown
  Description of Unknown: LeftRegion for integrase B5013 sequence
cagggcgaagaagtattacatgaagctcaccggcgcagatatcgtattagcacactgaaaattgtgcataaggtcaattctgcgctgttccaattattttggtagctattcagaatagttatcagtataatgtggtttgccaaaagtggttggtatcataatatgataccaaccaaaatacgagagaggaggacaccgaaatgcctgaagtacggctcatcacccctatcacaaggcagagcacgaagaagatgcaggtt

SEQ ID NO: 18013 - DNA, 260 bp, Unknown
  Description of Unknown: LeftRegion for integrase B5014 sequence
tttccctctgttcacattgatagatgcaacaaccatctcttcaatgccatcaatgaaagccccaatgcaaccctcaacatcaacggtacagagggatttactgctcaggagcttgaattgattgacctgtatcgaaacttcccgctgagaaaacaaatggagctgctgaattatgctttcaacctgaaagaaggtaagcaatgagagtagttctttacatgaggtatagcagcgaccgtcagaccgagcaatccatagag

SEQ ID NO: 18014 - DNA, 260 bp, Unknown; identical to SEQ ID NO: 15396
  Description of Unknown: LeftRegion for integrase B5015 sequence

SEQ ID NO: 18015 - DNA, 260 bp, Unknown
  Description of Unknown: LeftRegion for integrase B5016 sequence
gaaattctaaaacagataactgaaaaaatggtctcggcaggtattattacagacgagcagaaaaaacgtctcgataagcttaatactgaagattgctatagttgtttctgcacagtattggcggcttgaatttgtcaggtttgatgataccattttgaaaaaatttgtagtatccttatgagtaaaacggaggtgatataatgccaacagtaacggtaatacagccaacattgacagaagaaaaaacagcaaaaatacgc

SEQ ID NO: 18016 - DNA, 260 bp, Unknown
  Description of Unknown: LeftRegion for integrase B5017 sequence
cagggcgaaaaagtattatatgaagcttaccggtgcagatatcgtattagcccgctgaaaattgtgtataaggtcaattttgcgctgttccaattgttttggtagctattcagaatagttatcagtataatgtggtttgccaaaagtggttggtatcatattatgataccaaccaaaaaacgagagaggaggacaccgaaatgcctgaagtacggctcatcaccccgatcacaagacagagcacgaagaagatgcaggtt

SEQ ID NO: 18017 - DNA, 260 bp, Unknown; identical to SEQ ID NO: 17647
  Description of Unknown: LeftRegion for integrase B5018 sequence

SEQ ID NO: 18018 - DNA, 260 bp, Unknown; identical to SEQ ID NO: 17982
  Description of Unknown: LeftRegion for integrase B5019 sequence

SEQ ID NO: 18019 - DNA, 260 bp, Unknown
  Description of Unknown: LeftRegion for integrase B5020 sequence
gcttcgcaatttggaaaacatctgcaagctaaaatccaagagcaagtgaacagcgaaagcaattcttctcttttacttgaacagatgaacgaattgtttaacaatgtttctaaattgtccgaaactgaacaaaaggctttttataccggacttgtaaaagggatagagcgttgggaaaatgaacagaagggggaataataatgccggaagcattaaacgcggtcatatacgcccgctattcctccgatcggcaaacagaa

SEQ ID NO: 18020 - DNA, 260 bp, Unknown; identical to SEQ ID NO: 14792
  Description of Unknown: LeftRegion for integrase B5021 sequence

SEQ ID NO: 18021 - DNA, 260 bp, Unknown
  Description of Unknown: LeftRegion for integrase B5022 sequence
actccgttagagggcatgagtaaagagcaagcctctctttatatgctcacggaatttctaagcctcatagataaagaatatcctaaaataccgccccagcagaaagccgctttaattagcgaattttataagcatgaccctataaaattgttattatctgcacttaataacgaactatccaaacaaggaagtgataaaaaatgattcagcaggcattaaacgccgtaatatacgcccgttattcttcccacaatcaaaca

SEQ ID NO: 18022 - DNA, 260 bp, Unknown
  Description of Unknown: LeftRegion for integrase B5023 sequence
gaataaaagtagagggaataattcaaggtctacttttacaagataaataccaaacaaaacaaaagttagggtaattagagaaggaaaaattatacgtataaagtttaagaaggaatagatacggcagattgtgtatgccagaactgcgtatacacctggaaagcctgagtgtgtagccgtatacagagaggaggcactgcatggcaaaagcaaaacaaaaagcagctacaaatgatataagcaaactcgctgttatatat

SEQ ID NO: 18023 - DNA, 260 bp, Unknown; identical to SEQ ID NO: 15838
  Description of Unknown: LeftRegion for integrase B5024 sequence

SEQ ID NO: 18024 - DNA, 260 bp, Unknown; identical to SEQ ID NO: 15702
  Description of Unknown: LeftRegion for integrase B5025 sequence

SEQ ID NO: 18025 - DNA, 260 bp, Unknown
  Description of Unknown: LeftRegion for integrase B5026 sequence
ccttgcggtctgcgtcgtgtcgctcccggtcggcttgatcattgtggccattggagcgtaccgggtggcaaaggccggggatatttatgacgctgcggttgctcggtacgagcagcaaatctcggactatgttgactggctggatgaagtcaacgcaaaataaaaagccgccctcggtaggcggcgggaggttgctctgaatgtgtgcaaaaaagaaaccggccatgcttgagccggatatgcaggatgccgtgatctac

SEQ ID NO: 18026 - DNA, 260 bp, Unknown
  Description of Unknown: LeftRegion for integrase B5027 sequence
ggttctagtttttctgtacttattattctatgcgaaacctatctatattgctatcgggtacggtgttattcgctgtccggctgtttattcctgtattgaaattgtcaacaaccagaaggcacgcaccgaaaaatagtccttcgggaggacatacatcttcgtgtccagcattattatctttctgcaaaggtggtatctctatgaaaaaacagccaaccggcggcaagcggcttgttgcctactaccgttacagcggcggc

SEQ ID NO: 18027 - DNA, 260 bp, Unknown; identical to SEQ ID NO: 17647
  Description of Unknown: LeftRegion for integrase B5028 sequence

SEQ ID NO: 18028 - DNA, 260 bp, Unknown; identical to SEQ ID NO: 17647
  Description of Unknown: LeftRegion for integrase B5029 sequence

SEQ ID NO: 18029 - DNA, 260 bp, Unknown
  Description of Unknown: LeftRegion for integrase B5030 sequence
ttcccctctgttcacattgatagatgcaacaaccatctcttcaatgccatcaatgaaagcccaaacgcaaccctcaatatcaacggtacagaggggtttacggctcaggagcttgaattgattgacttgtatcgaaacttcccgctgagaaagcaaatggaactgctaaactatgctttcagcctgaaagaaggtaagtaatgagagtagttctttacatgaggtatagcagcgaccgtcaaaccgagcaatccatagag

SEQ ID NO: 18030 - DNA, 260 bp, Unknown
  Description of Unknown: LeftRegion for integrase B5031 sequence
gagcgcgtgaaggtctatattgaaaagccggatgccaaggacggctttcatcacgcaacctgctatcttccctcttatgaatgggtgaatgtgttcggcttctccgatgaggagattgcacgctatcagcaggtgattgaatccaccgcacacctcatcatgaactccgctatttctgctaaacccaaaggagtgatcccatgcccaccgactacgccctgtacctccgcaaatcccgcgcggacctcgaggccgaggcg

SEQ ID NO: 18031 - DNA, 260 bp, Unknown; identical to SEQ ID NO: 15483
  Description of Unknown: LeftRegion for integrase B5032 sequence

SEQ ID NO: 18032 - DNA, 260 bp, Unknown
  Description of Unknown: LeftRegion for integrase B5033 sequence
atacttttgatccgtcgtccgacgcttatctgactgccgaaaaggacggcaccgttatcatggaaggctttggctcattccctgcttatgctcacaaaggcatggttcttatgcagaccgacaaccttccccaggaagtgattgacctgttcgatgccatgtaaagctccacattgtctttctgcaaaggtggtgtccctatgaagaaacaaccaaccgtcggcaagcggcttgttgcctactaccgctacagcggcggc

SEQ ID NO: 18033 - DNA, 260 bp, Unknown
  Description of Unknown: LeftRegion for integrase B5034 sequence
tttcgatcaagggcttatgacggtcttgcctgatcttacaattcaggtctcggactatgtgaaagacagctacgacgaccaaaatacgaaagactggctactcggcgtagagggtacaaaaatcatcaggccgaagaggttcgcgccaaatcgcgacatgctggcctatcacaatgagttcgtcttcctgaggtgattccatgcagcgagcagtgatatacgccaggtacagccctggaccaaatcagacggagcagtcg

SEQ ID NO: 18034 - DNA, 260 bp, Unknown; identical to SEQ ID NO: 15240
  Description of Unknown: LeftRegion for integrase B5035 sequence

SEQ ID NO: 18035 - DNA, 260 bp, Unknown
  Description of Unknown: LeftRegion for integrase B5036 sequence
ccgccgagacgaccgagttcgcgaggctctacatagggacggcaatagcactgaacgtccccaggcgattcatagaccggtcagtgaatacttgggagggaacagcctcgaagctggactgatacgaaagcgccccggtgagtccgccaagaccaggcaccggggcaacaagactctccataaaaggagacggatagattatggcacataagacggcggtgctctacgcccgctattcctcggacaagcagcgcgaggcg

SEQ ID NO: 18036 - DNA, 260 bp, Unknown
  Description of Unknown: LeftRegion for integrase B5037 sequence
atactttcgatccttcgtccgacgcttatctgactgccgaaaaggacggcaccgttatcatggaaggctttggctcattccctgcttatgctcacaacggcatggttcttgtgcagaccgacaatcttccccaggaagtgattgacctgtttgatgccatgtaaagctccacattgtctttctgcaaaggtggtgtccctatgaagaaacaaccaaccggcggcaagcggcttgttgcctactaccgctacagcggcggc

SEQ ID NO: 18037 - DNA, 260 bp, Unknown
  Description of Unknown: LeftRegion for integrase B5038 sequence
gcgaccaccgagatctacacgtccggcgaatcgcagccgatcaacggaaaaatcgaaacaaagaagaaattcaccctgccggaatggaaaataggcgaaacggatgcagtcgtatttccgttcgtctgcgttatcgccggcatttccattattgcacttatcattgccatcataaaaggaaaataaaaggaggtaactccatgcaaaccgaatacgccctctatctccgcaaatcccgcgcggaccttgaagccgaggcg

SEQ ID NO: 18038 - DNA, 260 bp, Unknown
  Description of Unknown: LeftRegion for integrase B5039 sequence
cttacgacctctgtgatccaacgtaactgcaagtgcggaatcaaccgcgcgtactcgatactacgcaatcttcaggtctacgggcttgttcatgaggccggaaaagacacctatgaatggacagaaaaagccctcctgctgggcgcagaagggcgtaacgggtaacagatatgtcgatagatattaaatggcaagtgccaatggcaaagccggaggtcagcgaactggccgtcgtatatgcccggtattcaagccacagt

SEQ ID NO: 18039 - DNA, 260 bp, Unknown; identical to SEQ ID NO: 17993
  Description of Unknown: LeftRegion for integrase B5040 sequence

SEQ ID NO: 18040 - DNA, 260 bp, Unknown
  Description of Unknown: LeftRegion for integrase B5041 sequence
taaaagtacatgcaatagtggttgttgcaaattacgcaacaactaaaaaaagtcccgtgccctgctggaacaggtacacgggacgcgccgtcggtattggcgtaccgtatcggcaatttgtaaatctactgtgcgaggctgatttactctattattataccataaatcagtctcctatatagggaaggactgatttttttatgttaaaaaccgatatgacaaacgaaaaaagtacagcagttatctacgctcgcttttca

SEQ ID NO: 18041 - DNA, 260 bp, Unknown
  Description of Unknown: LeftRegion for integrase B5042 sequence
atacttttgatccgtcgtccgacgcttatctgactgccgaaaaggacggcaccgttatcatggaaggctttggctcattccctgcttatgctcacaaaggcatggttcttatgcagaccgacaaccttccccaggaagtgattgacctgttcgatgccatgtaaagctccacattgtctttctgcaaaggtggtgtccctatgaagaaacaaccatccggcggcaagcggcttgttgcctactaccgctacagcggcggc

SEQ ID NO: 18042 - DNA, 260 bp, Unknown; identical to SEQ ID NO: 16483
  Description of Unknown: LeftRegion for integrase B5043 sequence

SEQ ID NO: 18043 - DNA, 260 bp, Unknown
  Description of Unknown: LeftRegion for integrase B5044 sequence
ggcggtcagatttccgatttaggggacagaatgacagcttatgcgaatagcggcggcggaatgagcgcagaggggttggaactctatcaagagttcaaaacgcttattcttcgtgctaatggccttcccgaaaatgagcgtaaagccttctttgacggccttcgcaaaggctatgagcaatacgaagaggaacacaagaaatgggaataataatgccggaagcattaaacgcggtcatatatgcccgctattcctccgat

SEQ ID NO: 18044 - DNA, 260 bp, Unknown
  Description of Unknown: LeftRegion for integrase B5045 sequence
atacttttgatccgtcgtctgacgcttatctgactgccgaaaaggacggcaccgttatcatggaaggctttggctcattccctgcttatgctcacaacggcatggttcttgtgcagaccgacaaccttccccaggaagtaatcgacctgttcaatgccatgtaaacctccgcattctctttctgcaaaggtggtatctctatgaaaaaacagccgaccggtggaaaccggcttgttgcctactaccgctactccggcggt

SEQ ID NO: 18045 - DNA, 260 bp, Unknown
  Description of Unknown: LeftRegion for integrase B5046 sequence
ggacggcagcttaaaacattcctttgaagtaaaaaatagagtaactgctatgatcggaaaatggactgcgtaccaagccgaaaaacgcctgccgctgctggaactctgtcaagacttgtccgaagatgaattaaccgaagttataaactatatcaaatacgttcaatcaaagcgcgattgaacaggaagggggaataataatgccggaagcattaaacgcggtcatatacgcccgctattcctccgatcgtcagacagaa

SEQ ID NO: 18046 - DNA, 260 bp, Unknown
  Description of Unknown: LeftRegion for integrase B5047 sequence
cgcgattatgtggacgacaataagtattccagcattgaggcagtgcaaaagaacttgaaggtaattccgacggcagagcagcagtttttagactccagaaccgcgtacctgaaagacgccggttttacagatgaagaaattgcccagaggccaaccctcgacagcggagaaaacaaataacaccaagaggtgcagcagctatgaaaagacctgacgactatgctatatacctccgaaaatcacgcaaggaccttgatctt

SEQ ID NO: 18047 - DNA, 260 bp, Unknown; identical to SEQ ID NO: 15702
  Description of Unknown: LeftRegion for integrase B5048 sequence

SEQ ID NO: 18048 - DNA, 260 bp, Unknown
  Description of Unknown: LeftRegion for integrase B5049 sequence
actccgttagatggcatgagtaaagagcaagcctctctttatatgctcacggaatttctaagcctcatagataaagaatatcctaaaataccgccccagcagaaagccgctttaattagcgaattttataagcatgaccctataaaattgttattatctgcacttaataacgaactatccaaacaaggaagtgatgaaaaatgatgcagcaggcattaaacgccgtaatatacgcccgttattcttcccacaatcaaaca

SEQ ID NO: 18049 - DNA, 260 bp, Unknown
  Description of Unknown: LeftRegion for integrase B5050 sequence
tttcgatcaagggcttatgacggtcttgcctgatcttacaattcaggtctcgaattacgtgaaggacggctacgacgaccaaaatacgagagactggctactcggcgtagagggtacaaaaatcatcaggccgaagaggttcgcaccaaattgcgacatgctggcctaccacaatgagtttgtattcctgaggtgattccatgcagcaagcagtgatatacgccaggtacagccctggaccaaatcagacagaacagtcg

SEQ ID NO: 18050 - DNA, 260 bp, Unknown; identical to SEQ ID NO: 18036
  Description of Unknown: LeftRegion for integrase B5051 sequence

SEQ ID NO: 18051 - DNA, 260 bp, Unknown; identical to SEQ ID NO: 17171
  Description of Unknown: LeftRegion for integrase B5052 sequence

SEQ ID NO: 18052 - DNA, 260 bp, Unknown
  Description of Unknown: LeftRegion for integrase B5053 sequence
gctggataagctggccagtctctttgagagcgccatgacggaggtcgccgttgtaaactacccgcgcaagagcgcgtaaagatctcgaaccaaaaaagatgcccccggcgctaccaacaccgagggcgatcaaagggcagctgactatcgacaggtcttactgcccttctatcttacaacagaataggaggtttcgcaacatgaaaatgatgcagaacgacaaccggacggccatcacctactaccgctattccagccac

SEQ ID NO: 18053 - DNA, 260 bp, Unknown
  Description of Unknown: LeftRegion for integrase B5054 sequence
cgcgattatgtggacgacaataagcattccagccttgaggcagtgcaaaagaacttgaaggtaattccaacggcagagcagcagtttttagactccagaaccgcgtacctgaaagacgccggttttacagatgaagaaatcgcccagaggccaaccctcgacagcggagaaaacaaataacaccaagaggtgcagcagctatgaaacggcctgacgactatgctatttaccttcggaaatcgcgcaaggaccttgacctt

SEQ ID NO: 18054 - DNA, 260 bp, Unknown
  Description of Unknown: LeftRegion for integrase B5055 sequence
acagggcaaaaaagtattacatgaagctcactggggcagacatcgttttagccagatgatttttgtgtaataggtcaattcttctattttgtaaatgttgtgttggctatttcactaggttcacagtataatgtggtttgccaaaagtggttggtatcataatatgataccaaccaaaatcgaggaaggaggactcggcaatgcctgatgtaagactcatcacccccattacaaagcaaaacgcacaaaagacccaggtc

SEQ ID NO: 18055 - DNA, 260 bp, Unknown; identical to SEQ ID NO: 18004
  Description of Unknown: LeftRegion for integrase B5056 sequence

SEQ ID NO: 18056 - DNA, 260 bp, Unknown; identical to SEQ ID NO: 18004
  Description of Unknown: LeftRegion for integrase B5057 sequence

SEQ ID NO: 18057 - DNA, 260 bp, Unknown
  Description of Unknown: LeftRegion for integrase B5058 sequence
actccgttagatggcatgagtaaagagcaagcctctctttatatgctcacggaatttctaagcctcatagataaagaatatcctaaaataccgccccagcagaaagccgctttaattagcgaattttataagcatgaccctataaaattgttattatctgcacttaataacgaactatccaaacaaggaagtgataaaaaatgatgcagcaggcattaaacgccgtaatatacgcccgttattcttcccacaatcaaaca

SEQ ID NO: 18058 - DNA, 260 bp, Unknown
  Description of Unknown: LeftRegion for integrase B5059 sequence
gatttgacatttagacaattatatatcaaaatatataaaacagctcccacgctaccaacgtgagagctgtcaaaaggctatacaagctattgcttatacaatatgccccaaccaagcatattgtaccataaagcacctagtttgtataggtgttatttttatactcttttacacatatttttaacaggaaggtgatttttatggaattatatgcacaatatttaaggaaatctagggctgatatggaagccgaacaacat

SEQ ID NO: 18059 - DNA, 260 bp, Unknown
  Description of Unknown: LeftRegion for integrase B5060 sequence
gtgcgctttaataacggcgaagcaaagatgtttgattttaagccgctcctgaaaacgcccgcttttgcaccgcttgcagatctggatgtctttaaaggcgtgtatatagattatggcgttccagtatggaatgacggagccattgatattgcgccggaagcgttgtatgaagagggggaagcaacgggaggtgctatgtcatgaaagaatattgtatttatttgagaaaatcccgtgcggatgcggaagcggaggcgcgc

SEQ ID NO: 18060 - DNA, 260 bp, Unknown
  Description of Unknown: LeftRegion for integrase B5061 sequence
atacttttgatccgtcgtccgacgcttatctgactgccgaaaaggacggcgccgttaccatggaagactttggctcattccctgcttatgctcacaatggcatggttcttgtgcagaccgacggccttccccaggaagtaattgacctattcgatgccatgtaaagtttcacatcgtctttctgcaaaggtggtgtccctatgaagaaacaaccaaccggcggcaagcggcttgttgcctactaccgctacagcggcggc

SEQ ID NO: 18061 - DNA, 260 bp, Unknown; identical to SEQ ID NO: 15779
  Description of Unknown: LeftRegion for integrase B5062 sequence

SEQ ID NO: 18062 - DNA, 260 bp, Unknown
  Description of Unknown: LeftRegion for integrase B5063 sequence
cgcgattatgtggacgacaataagtattccagccttgaggcagtgcaaaagaacttgaaggtaattccgacggcagagcagcagtttttagactccagaaccgcgtacctgaaagacgccggttttaccgatgacgaaatcgcccagaggccgacccttgacagcggagaaaacaaataacaccaagaggtgcagcagccatgaaaagacctgacgactatgctatatacctccgaaaatcacgcaaggaccttgatctt

SEQ ID NO: 18063 - DNA, 260 bp, Unknown
  Description of Unknown: LeftRegion for integrase B5064 sequence
actccgttagagggcatgagtaaagagcaagcctctctttatatgctcacggaatttctaagcctcatagataaagaatatcctaaaataccgccccagcagaaagccgctttaattagcgaattttataagcatgaccctataaaattgttattatctgcacttaataacgaactatccaaacaaggaagtgatgaaaaatgatgcagcaggcattaaacgccgtaatatacgcccgctattcttcacataaccagaca

SEQ ID NO: 18064 - DNA, 260 bp, Unknown
  Description of Unknown: LeftRegion for integrase B5065 sequence
cttctgaatacggagaacagttcaccgctgaagaagctcagtatgctattgataatcttgaataaataaaaaacgccccggcgtgggagcaccgaagcgtttatatagaacagcttatccttggaggataatccgccccaacaattggattataccacctcctgggtaggcttggcaagtcatactttggaggtattacagtgaatcgagcggtaatctatgcccgatacagcagtgacatgcagcgtgaagaaagcgtg

SEQ ID NO: 18065 - DNA, 260 bp, Unknown
  Description of Unknown: LeftRegion for integrase B5066 sequence
atacttatagagcaagatatcacagaatattaaaaaaattaaaaattttttaaatttttttggattttaggggtgcgaaaacccgttttttacggaatatatatagaggaaaaaatcctcacgaagtcttgacttgattttgcaaggtggtattatggagataaatcaattgttgcctgcgtaaaaggagaataacagatatgcaggaaaacaaacaaaatttacgatttacagccctgtattgccgcctgtcgtctgat

SEQ ID NO: 18066 - DNA, 260 bp, Unknown
  Description of Unknown: LeftRegion for integrase B5067 sequence
atactttcgatccttcgtccgacgcttatctgactaccgaaaaggacggcaccgttatcatggaaggctttggctcattccctgcttatgctcacaacggcatggttcttgtgcagaccgacaaccttccccaggaagtaatcgacctgttcaatgccatgtaaacctccgcattctctttctgcaaaggtggtatctctatgaaaaaacagccgaccggtggaaaccggcttgttgcctactaccgttactccggcggt

SEQ ID NO: 18067 - DNA, 260 bp, Unknown; identical to SEQ ID NO: 17813
  Description of Unknown: LeftRegion for integrase B5068 sequence

SEQ ID NO: 18068 - DNA, 260 bp, Unknown
  Description of Unknown: LeftRegion for integrase B5069 sequence
gacaaataaataaattattgtataatgaggttgcaaaaaacataaactatattgaatgaaagcagaggacggaacaggcggccgtcgccctagttggagatgtgggattgtccccccacctatttcattcaaatactaaaagaacctcgtagaaatgcgaggttcttttctgtaataaaaatgattggagtgtgattatcttgtcggaactctatttgatgtatctaagaaaatcccgcgccgacggcgaagatgaaacg

SEQ ID NO: 18069 - DNA, 260 bp, Unknown
  Description of Unknown: LeftRegion for integrase B5070 sequence
atatctattcaagaagaaaaaatgaataaggagtaggaaattaatgagggggcaaattgcttttcgataggaattattgttatataattggaatttatcttgacaaaattagtaaaatatgatataataataaagcaatcaagggataaaaacagaacattttttatttgccctctgtacacgaaaaggaggaaaataaaatgttggctgattaccttgaaaaaataagaacaaaaacaaatgtgcttgtattaaaagct

SEQ ID NO: 18070 - DNA, 260 bp, Unknown
  Description of Unknown: LeftRegion for integrase B5071 sequence
attttggaacaagcatttataatggagatagggagtgctggtacttctacgggagccagtacggataccttctccattcggaggaggtatttttttatgcccaaaccattcaaatgctcccgaaatcaatgtcgggagcatcggcaatcgcacttcattgacattaagatccttttccttttgggagagtaggagccgccatgagaaacgccgttatttatgcgagatattcgtcagataggcagagagaggaatctatc

SEQ ID NO: 18071 - DNA, 260 bp, Unknown
  Description of Unknown: LeftRegion for integrase B5072 sequence
attattttgatgaaacccttgtcaggcgcaagcctgaattgtatttggtttaacaagtcttgttttttgcgcgcggcacttccttcccgtgcgccatccgcacacctgattccagcgggcttccaccgctgtacctgcatccgccgcaagactttctccacaggctatccgtatatgatgctcctgaaaggagaatgcacatgaacgctgtcatttacgcgcgctattcaagccacaatcagacagaacagtccatcgag

SEQ ID NO: 18072 - DNA, 260 bp, Unknown
  Description of Unknown: LeftRegion for integrase B5073 sequence
aagtgtttcagaataaattaacgtattagatagtgtatcaaaatcctttattaagtctttgattacaagtgccaattttataattaaatatatgatttagtcttgactttctttaagctttatggtataattatattataatcaaatatagtaacagtagaacattttatttgccctctatacgaaggaggaaaattaaaatgttggctgagtaccttgaaaaaatcaaatcacgaaataatgtgacaatattgaaagct

SEQ ID NO: 18073 - DNA, 260 bp, Unknown
  Description of Unknown: LeftRegion for integrase B5074 sequence
cgcctacattgctgccggacagatcacgcagaaactgctcgacaagggacttatcacacccggcgaattcgacaagatcatggcgaaaaaccgcgaaaaattctcgccggcaatcgcaaagattatgccctgaatgacttgctattccgggctttcagagtgatatatactatacccctttaaggacaggaggcgagacaatgaaacggataacaaagatcgacgcggcggcgaaggaaacgaaaaaactccgcgtggca

SEQ ID NO: 18074 - DNA, 260 bp, Unknown
  Description of Unknown: LeftRegion for integrase B5075 sequence
cagcaaaggtaaaagaatatgcaaaatctcagtatggaatggagctagatatagtcgttttgcctgatagtaaaattaaaaaatcaaataaggaagaggagacctctgcataagaggtctccatttttagttaatgatacattgaaaaaaatagtgggtgttgttaaaattaactaaaaatctctagggggaatattggcttggaaacaacgaataagatcccatgtggaatttatgccagagtaagtacggacaagcaa

SEQ ID NO: 18075 - DNA, 260 bp, Unknown
  Description of Unknown: LeftRegion for integrase B5076 sequence
attatgttacttatcctgtcatatattgaagaggtcggcagaagaaaataaatcagaagtctcttctatgcacatttttctacaataaaattgcagtttcggcacaaaatgttacgaatcggtggttttaatgccgaaaaattgcgttaaatataaactacgccgccgagttgcggcgttttttagtgaggtgatacacagtgagaaacgcggttatttatgcgagatattcgtcggataggcagagagaggaatctatc

SEQ ID NO: 18076 - DNA, 260 bp, Unknown
  Description of Unknown: LeftRegion for integrase B5077 sequence
tgcggcacggcgtgtcaaccagattaccaccgccgcgtttttttgtaaaccaaaagtcttgtctttgcgctcggcactttcttcccgcgcgccatccacacatctgattccagcgggcttcaaccgctgtacctgcatcatagccgcaagactttctccacaggttatccgtatatgatgctcctgaaaggagaatgcacatgaacgctgtcatttacgcgcgctattcaagccacaatcagacagagcagtccatcgag

SEQ ID NO: 18077 - DNA, 260 bp, Unknown
  Description of Unknown: LeftRegion for integrase B5078 sequence
cattttttataacaaacattagttcgcatgtgttttataaatatattatactacaagtacaatatatttaaaaataactaaaaaatatttttttactttttactacacctatatatattcttcagtttacaaaaatattcttattttcagtctaaaaaaataattctttttataaaaagaggtaaaaaggaggaatttacatgaaagtagtcgcaatatactcacgtaaatctaaagaaagcgatacaggagaatctata

SEQ ID NO: 18078 - DNA, 260 bp, Unknown
  Description of Unknown: LeftRegion for integrase B5079 sequence
tgcagaaaaagcagaaacgtcaacaggaaatgcgtggaattaacagattattaacaaaagtcttgcctttgcgcccggcattcttgccgcgcgccatccgcacacctgattccagcgggcttccaccgctgtacctgcatccgccgcaagactttctccacaggctatccgtatatgatgctcctgaaaggagaatgcacatgaacgctgtcatttacgcgcgctattcaagccataaccagacagaacagtccattgaa

SEQ ID NO: 18079 - DNA, 260 bp, Unknown
  Description of Unknown: LeftRegion for integrase B5080 sequence
cgtgactacattgataacgaaaagcattccagccttgaggctgtacaaaagaacttgcaaatcatccccaccgcagagacccaattcctggacgcgagaacagcatacctgaaagacgcaggctttaccgatgacgagatagccaacagaccaactctcgacagcggagaagacaaataacatccagaggtgcagcagctatgaaacgacctgacgactatgctatatacctcagaaaatcgcgcaaggacttggaccta

SEQ ID NO: 18080 - DNA, 260 bp, Unknown
  Description of Unknown: LeftRegion for integrase B5081 sequence
atctcggttatcgcggcgacgcgtttgccgcggaggacgtctccatcagcgacgacctcggccccgatgaccgcatcgcctggccgaatacgcactatgtctgcatccgccggatgggcgacgacgactttgtggcaaggttcggatcgccgcaggccatcgggttctgtgcgtttttcgagggaaaggaggaataacccatgatctgcgccatgtatctgcgcaagtcccgcgcggactatgaggccgaggcccgcggc

SEQ ID NO: 18081 - DNA, 260 bp, Unknown
  Description of Unknown: LeftRegion for integrase B5082 sequence
ctgggtaacgtctcttcaaaatgcaaagatgaattttgggatttctggaacattgctaatgatctgacgagcaaataaaaaaagcccgtcccgagagttgctaagaatagccgctacattttggacgtgtgggcggctatttctttttgctctgaaacagagtaatgcaataaatcaacgagcaacgaggtgaataatttatgtattgcttatatctcagaaaatccagagcagatatagaactcgaagcgaaaggcgag

SEQ ID NO: 18082 - DNA, 260 bp, Unknown
  Description of Unknown: LeftRegion for integrase B5083 sequence
attgggctggccctctacggtatgattgtggtgagcattctggacgcggagttacacgccgccattcttcccggcatcttcatgctgctggcgttcaacgcacctgacctgatccggctgaaactgggcaagttccgggataacgtgggcgattatctgcggcaataaaaaagcccgcgcaatggcgggcgggtgatggcatgaaaaaagagaacgaaatccgggcagttgtctacgcccggtactcatcccattcgcaa

SEQ ID NO: 18083 - DNA, 260 bp, Unknown
  Description of Unknown: LeftRegion for integrase B5084 sequence
aaaaaaccctcgttgaattattccgaggaacaaccgaagaggggcgatttgagattataacagccgttatgaacatcattaaagagaaagaaaaaaaggttacggcagaaaatacagagtgtgtgggttaaacaacgcgacagaaaagtcatcccgtgggaactcgttcacctctacaagaagttgaggaaactggaaaaatgaatgtggttttatacttgaggtacagcagtgacaaacagtccgaacaatccatagaa

SEQ ID NO: 18084 - DNA, 260 bp, Unknown
  Description of Unknown: LeftRegion for integrase B5085 sequence
attatttattctgtttatctgattctccatatccaaaagtagagatttccctaacagaagaagagcaattactgcttgacgcatttcgttccgctaccccacaaggtagattcaacattattactacctgtatgtgtgagaagcgaaaaggggacaacgaaagtgccgggtaattgatttcatagaatggaggaagaaccatgtatgaggatataaaaacagcctgcctatacgttagattctcaagccataaccagact

SEQ ID NO: 18085 - DNA, 260 bp, Unknown
  Description of Unknown: LeftRegion for integrase B5086 sequence
gcttcgcaatttggaaagcatctgcaagctaaaatccaagagcaagtgaacagcgaaagcaattcttctcttttacttgaacagatgaacgaattgtttaacaatgtttctaaattgtccgaagctgaacaaaaggctttttataccggacttgtgcaagggataaagcgttgggaagatgggcagaagggggaataataatgccggaagcattaaacgcggtcatatacgcccgctattcctccgatcgtcagacagaa

SEQ ID NO: 18086 - DNA, 260 bp, Unknown
  Description of Unknown: LeftRegion for integrase B5087 sequence
catgattatgttacttatcctgtcatatattgaagaggtaggcagaagataaatcaggggtctcttctgtgcacatttttctacaataaaattgcagtttcggcacaaaatgttacgaatcggtggttttaatgccgaaaaattgcgttaatataaactacgccgccgaggtgcggcgttttttagtgaggtgatacacagtgagaaacgcggttatttatgcgagatattcgtcggacaggcagcgagaggaatctatc

SEQ ID NO: 18087 - DNA, 260 bp, Unknown
  Description of Unknown: LeftRegion for integrase B5088 sequence
attatgttacttatcctgtcatatattgaagaggtcggcagaagaaaataaatcagaggtctcttctatgcacatttttctacaataaaattgcagtttcggcacaaaatgttacgaatcggtggttttaatgccgaaaaattgcgttaaatataaactacgccgccgagttgcggcgttttttagtgaggtgatacacagtgaaaaacgcggttatttatgcgagatattcgtcggataggcagagggaggaatctatc

SEQ ID NO: 18088 - DNA, 260 bp, Unknown
  Description of Unknown: LeftRegion for integrase B5089 sequence
ttatgttacttatcctgtcatatattgaagaggtcggcagaagaagataaatcaggagtcctcttctatgcacatttttctacaataaaattgcagtttcggcacaaaatgttacgaatcggtggttttaatgccgaaaaattgagttaaatataaactacgccgccgaggtgcggcgttttttagtgaggtgatacacagtgagaaacgcggttatttatgccaggtattcgtcagataggcagcgagaggaatctatc

SEQ ID NO: 18089 - DNA, 260 bp, Unknown; identical to SEQ ID NO: 13516
  Description of Unknown: LeftRegion for integrase B5090 sequence

SEQ ID NO: 18090 - DNA, 260 bp, Unknown
  Description of Unknown: LeftRegion for integrase B5091 sequence
aaacaaagagagttttgccgtcaattagtcgtggaaatggcacatgggtaaaacgcctgtgtgccattttttttgactttaatctgtatagtaaccaaatgaaagaaacgcaaaataaagtctgttaattgggcattttgacttgactttcctgcgcctttgagtgattaatgtcatgataaaaatcaaggaggttttttatgcaaacaccacgcttaaaaaagagagcagcgagttatgttcgcgtgagtacctatcag

SEQ ID NO: 18091 - DNA, 260 bp, Unknown
  Description of Unknown: LeftRegion for integrase B5092 sequence
acactacaatagaatattttctaacaggaaaacgccctatatctaatctgactgatatggaaaatcttctattagaagcatacagatcggcagacgtaaaaggacaagctgcaatcatccaagtctgtatgaatgaaaaagatgcaaaaggggaaactatcattgcaggataataagcattgaagaatggaggaagaaccatgtacgaagagattaagactgcttgtctatatctacgatattcaagcagcaaccaaact

SEQ ID NO: 18092 - DNA, 260 bp, Unknown
  Description of Unknown: LeftRegion for integrase B5093 sequence
aagccttcgaccgaggccttataactatcactccttccatgaaaatctatgtttctccaataattttggatagccctcaggacgcttttacagcccgctggctggcttctcttgacggaatggttttacccccccccccgatttccgccgcgtagagagcttctggagtaccataacgacgaaatttttaggagggtcacatgaatacagtaatttatgctcggtattctgccggcccgagacagaccgaccagagtatc

SEQ ID NO: 18093 - DNA, 260 bp, Unknown
  Description of Unknown: LeftRegion for integrase B5094 sequence
attatgttacttatcctgtcatatattgaagaggtcggcaggagaaaataaatcagaggtctcttctatgcacatttttctacaataaaattgcagtttcggcacaaaatgttacgaatcggtggttttaatgccgaaaaattgcgttaaatataaactacgccgccgagttgcggcgttttttagtgaggtgatacacagtgagaaacgcggttatttatgcgagatattcgtcggataggcagagagaggaatctatc

SEQ ID NO: 18094 - DNA, 260 bp, Unknown
  Description of Unknown: LeftRegion for integrase B5095 sequence
aaaatcagtcaggcagagtttgaacgcatcgatgctttgaacaaggaaagtttcggtgtggggtgatatttttttatattttatctggacggcggccaatcaagttttgagtgggaaaatgtctgatatttgcggcatagtgcttgactaattcgggacgatatttaatatatgagtaccctcgaaaaaaggagatttttatggaaattcaattaaaacgggcgggttcttatgttagggttagcacctaccaagaatcg

SEQ ID NO: 18095 - DNA, 260 bp, Unknown; identical to SEQ ID NO: 13967
  Description of Unknown: LeftRegion for integrase B5096 sequence

SEQ ID NO: 18096 - DNA, 260 bp, Unknown
  Description of Unknown: LeftRegion for integrase B5097 sequence
aaaaaatgaccgccggcgcgccaacgccgaacggtcgtgtaatttgccaacctcacaagttaaggcccattacgttattattatatcataacgtaaatggccttgctatcccctgcctattttcaggagatacaaggtcaaattttttaccttttttgcctatttttgtcaaataaaatcacaccaagaggagagaaaccatggagagagccgttatttatgcccgttattcaagtgatcaacaacgcgaggaaagtatc

SEQ ID NO: 18097 - DNA, 260 bp, Unknown
  Description of Unknown: LeftRegion for integrase B5098 sequence
atgttagtaggctttttaattggcttgcttgtaggcggtacaggtggagtaatcacaatgtgtctctgcacagcagccggacaagcggataagcatgaaaactgcacaggttcggacgaataatttcgttgggtttggtgataccattctaaaaagatttgtggtatccttgttggtaaaaagtaaaggagtgtgaggaaatgcctacagtaacggtgatacagccgacaataacagaagaacaaaatataaaaatccgt

SEQ ID NO: 18098 - DNA, 260 bp, Unknown; identical to SEQ ID NO: 13096
  Description of Unknown: LeftRegion for integrase B5099 sequence

SEQ ID NO: 18099 - DNA, 260 bp, Unknown
  Description of Unknown: LeftRegion for integrase B5100 sequence
cgcattaggactcgccgcagcactgatagtgttgctcatatgcggttggcttcacgcggtcaaaaacgtccgcagaagcatcaacattttctttcgcgacatgcgtaccctcgcacgcatgagccaggacgggacgatccgaattgatgatattaacaagattttacgttctataaacgaagaacaaatgaggtgatcccatgcaaaccgaatacgccctctatctccgcaaatcccgcgcggacctcgaagccgaggca

SEQ ID NO: 18100 - DNA, 260 bp, Unknown
  Description of Unknown: LeftRegion for integrase B5101 sequence
tcgcgaaaatggtcaacaaaaaacgccccgcccatgttactagcatgaacgaggcgatggctgaccgcgttaccagcacggcaggccgctgcaaaaacaaacacctacgatagcgcgttttttgcatacccattttaacagattcgaacatgggacgcaaggcacgcgcgtaaaatccgacacatgaatggaggaaaaccatgccttacgccatccatttaagaaaatcccgcgccgatctggaagctgaagctcgcggc

SEQ ID NO: 18101 - DNA, 260 bp, Unknown
  Description of Unknown: LeftRegion for integrase B5102 sequence
ccgcgttgccgtttcggccacagcaaccgaagaacagctcttgagcgtgttcgaggaagtagtcgcgggcgacggatacccgatgcacaccgtttggttctacagcaacgtcgataaggctcaaggtggcgaccaatacgacgttgccatggtcgaggaggaaagcgccggcggcgatcccgtcgtgacgatggcgtagcatggcgaagcgggcgaaacgttctgctccaaagaagggcgctcgtgccgcgatatacgcg

SEQ ID NO: 18102 - DNA, 260 bp, Unknown
  Description of Unknown: LeftRegion for integrase B5103 sequence
attatctattctgtttatctgattcaccttgcccgaaagtagagatttccctaacagaagaagagcaattactgcttgacgcatttcgttccgctaccccgcaaggcagattcaacattattaccacctgtatgtgtgagaagcgaaaaggggacaacgaaagtgtcggataattgatttcatagaatggaggaagaaccatgtatgaggatataaaaacagcctgcctatacgttagattctcaagccataaccagact

SEQ ID NO: 18103 - DNA, 260 bp, Unknown
  Description of Unknown: LeftRegion for integrase B5104 sequence
tatattagcattgtcagttggacacagaagagaaatatacgaattttgacaatccagaacgctcgtggtaagatatttttgacaaaagaaagagctgtggaacatacttcccacgcaaaaaaagaaaaccccgagctggcactcggggtttttcaagtttcaggtgcacaaaataaattaataaatgagaggtgagaggcatgagagctgtattatatgcacgctattcatcagataatcagcgctatgaatccatatcc

SEQ ID NO: 18104 - DNA, 260 bp, Unknown
  Description of Unknown: LeftRegion for integrase B5105 sequence
gaccgaggcctcataacgatcaccccgtccatgaaaatccatgtttcgccgtcaattctcaatgcccctcaggacgcctttacagcccgctggctgacttctctcgacgggaatgttttaccccccccccgatttccgccgcgtagagagctcctggagtaccataacgacgtaatttttaagagggaggcagaaagtacatgaatacagtaatctacgcacgctattctgccggcccgagacagaccgatcagagtatc

SEQ ID NO: 18105 - DNA, 260 bp, Unknown; identical to SEQ ID NO: 16402
  Description of Unknown: LeftRegion for integrase B5106 sequence

SEQ ID NO: 18106 - DNA, 260 bp, Unknown
  Description of Unknown: LeftRegion for integrase B5107 sequence
taaagaccgtatcaaagaggccacttaaagtgacgttatctgaagagtcggaaacgtcattggggatctcaaattttcacaacaaggaaggcaactaatctagccaacaatcgacactttaacaaacaaaaagggtttcgctctcatcttggcggatcggcgaaaccccggaaggaaccgaccttgggaggtcgatctatatgcatgataccatgcatgaattaaggtgctgcgcatacctgcgcaaatcgcgcgaagac

SEQ ID NO: 18107 - DNA, 260 bp, Unknown
  Description of Unknown: LeftRegion for integrase B5108 sequence
aataaagaccgtatcgaagagaccgcttaaggtgacgctgtccgaagagtcagaaacatcgttgggcatctcaaattttcacaacaaggaaagcagcatttagccagcaatcgacactttaacaagcaaaaagggtttcgctctcatcttggcggatcggcgaaaccccggaaggaaccgaccttgggaggtcgatctatatgcatgataccatgcttgatttaacgtgctgcgcatacctgcgcaaatcgcgcgaagac

SEQ ID NO: 18108 - DNA, 260 bp, Unknown
  Description of Unknown: LeftRegion for integrase B5109 sequence
ttatttccgttccgtcaatcccgatggtcaatctcgaatcctcgattatgcccagattatttcttccaacaaagaaatgcaaaaagaccacagcgcggcaatgtgattcgctttcctgagaaaaattaaggttgctcatatattcggaatccccgccatcccgtccacatccataaatccccttgatcggaggtatccccatgccctacgccatccacctgcgcaaatcccgcgccgatctggaagccgaagcccgcggc

SEQ ID NO: 18109 - DNA, 260 bp, Unknown
  Description of Unknown: LeftRegion for integrase B5110 sequence
tcgcgaaaatggtcaacaaaaaacgccccgcccatgttaccagcatgagcgaggcgatggccgaccgcgttaccagcacggcaggccgctgcaaaaacaaacacctacgatagcgcgttttttgcatacccattttaacagattcgaacatgggacgcaaggcacgcgcgtaaaatccgacacatgaatggaggaaaaccatgccttacgccatccatttaagaaaatcccgcgccgatctggaagccgaagcccgcggc

SEQ ID NO: 18110 - DNA, 260 bp, Unknown
  Description of Unknown: LeftRegion for integrase B5111 sequence
cttcttggcatggaacttatcacgaaagaagaatacaacaagatcgtggcgatcagcgaggatcattacggcacaaagattttttccgtttgatcaaaaaacttccgattttcgctggatgtttctgaactcttgtggtatctgtttgtgttgccgaaaggcaaaaccgcgggcaagcccgcagaaaggagtagagcgcaatgaacgtaattgagatcacagccgagaaagaaacggtgcaagaaacgatccggctggca

SEQ ID NO: 18111 - DNA, 260 bp, Unknown
  Description of Unknown: LeftRegion for integrase B5112 sequence
ttcttggcatggagctgatcaccgaagatgaatacaacaagatcgtagcaatcagcgaggatcattacggcgcaaagatttattgcgtctgatcaaaaaagcttccgattttcgctggatgtttccgaactcttgtggtatctgtttgtgttgccgaaaggcaaatcagcgggcattcccgcagaaaggagtaaagctcaatgaacgttatcgagataacagccgagaaaaaaccggcacaagataccatccggctggca

SEQ ID NO: 18112 - DNA, 260 bp, Unknown
  Description of Unknown: LeftRegion for integrase B5113 sequence
tcttggcatggagctgatcaccgaagatgaatacaacaagatcgtagcaatcagcgaggatcattacggcgcaaagatttattgcgtctgatcaaaaaaacttccgattttcgctggatgtttccgaactcttgtggtatctgtttgtgttgccgaaaggcaaatcagcgggcagcccccgcagaaaggagtaaagctcaatgaacgttattgagataacagccgagaaaaaaccggcacaagaaaccatccggctggca

SEQ ID NO: 18113 - DNA, 260 bp, Unknown
  Description of Unknown: LeftRegion for integrase B5114 sequence
tgatcgaggtcgcggtgattatgtatgacgccgacggaaaagtcctcggcgtgatgaagacatataccgatgagatcgtggcgggcgcgaaggggacgtttaagacgtcaaatatcggcgacgcgaacaaggtcgcacttgcggatatcgaccactatgatgttattgcgtatcccggcatgcagatgcagttttgagcaatgagcagagccgtaatatatgcccgtttttcatcgcacaatcagcgcgaggagtcgata

SEQ ID NO: 18114 - DNA, 260 bp, Unknown
  Description of Unknown: LeftRegion for integrase B5115 sequence
cagaccttatcgctttttatgagagcgaaaacgggcaaaaagaatttgagcaatggaaaatacaacttgacgataaagaagaaaaataactttaatggcacaagggcgaaagttctcccttgtgcctatatcgccgcacaatcggcttatttacaaagcaatgctataatcagtatatatcaaaaaaggaagtgtaatttatgaatgcggtaatatacgcaagatattcatcagataatcagcgtgaagaatctatcgaa

SEQ ID NO: 18115 - DNA, 260 bp, Unknown
  Description of Unknown: LeftRegion for integrase B5116 sequence
ctacgatgaggcaatatccaaagggtacatcccctgtaaacgttgcacaaaagacaaataaaaacaaaagccctcgccgaagcaagggcatgggctgcatgatacaacctcaaattgcaatgaaattgtatcatgccagccctgaaaaatcaagcttcagggtctttttgtacccaaaaatcaggaaagaaggaacagaaatggacaaatatgcaatgtatttgagaaaaagccgcgccgacatggaggcggagaagctg

SEQ ID NO: 18116 - DNA, 260 bp, Unknown
  Description of Unknown: LeftRegion for integrase B5117 sequence
gtcgaaggcgtcatgcgagatgctgccaacggagatagctttacaacggttcagatggacaacggcaaggttgttatcataagcgaagatgaatggaacatcttgcgcgaagggtttgcccatttggtaggcgggaaaattctgaaataacgtatttaagctactgtgtctgaaacgcgcagattggaaggagtgacgggatgcccaagaaggagactgccgtatcacagggcttggttgcggcgatatacgcccgttat

SEQ ID NO: 18117 - DNA, 260 bp, Unknown
  Description of Unknown: LeftRegion for integrase B5118 sequence
tggaagcccctggagtggtttttccgctggcttcttatgatctgtacttttggtatcttaggaagaaaaagaaataaaggaatacaaggaaaaaccatctccgcaagtaagagcatcaatcgtactatggctgtatgccagaactgcggacacacctggaaagcctgagtgtgtagccgtatgcagagaggaggcactgcatggcaaaagcaaaagcagctacaaatgatataagcaaactcgctgttatatatgccagg

SEQ ID NO: 18118 - DNA, 260 bp, Unknown
  Description of Unknown: LeftRegion for integrase B5119 sequence
tgagcatggttgtataaatagatatgaaatcgctgactatttgaatgttacagtagaatacctaaatgaagcaattaattattattcaagtaaatatggagtaatgcatagaatagatgattatataatttatttttcacccactctttacatcggaaaaacatttaattaaaagttcttatattgaggtgatatagaaaatggttgataatgatatatttgcaatatatctaagaaaatctagaaaagatctagaaaac

SEQ ID NO: 18119 - DNA, 260 bp, Unknown; identical to SEQ ID NO: 18116
  Description of Unknown: LeftRegion for integrase B5120 sequence

SEQ ID NO: 18120 - DNA, 260 bp, Unknown; identical to SEQ ID NO: 16547
  Description of Unknown: LeftRegion for integrase B5121 sequence

SEQ ID NO: 18121 - DNA, 260 bp, Unknown; identical to SEQ ID NO: 16123
  Description of Unknown: LeftRegion for integrase B5122 sequence

SEQ ID NO: 18122 - DNA, 260 bp, Unknown
  Description of Unknown: LeftRegion for integrase B5123 sequence
tgattgaggttgtggtgattatgtacgacgccgacggaaaagtcctcggcgtgatgacgacatataccgacgagatcgcagcgggagcgaagggaacgtttaagatgtcaaatatcggcgacgcgaacaaagtcgcgctcgcggacatcgaccactatgacgtgatggcatatcccggaatgcagatgcagttctgaggaatgagcagagcggttatatacgccaggttctcatcgcacaatcagcgcgaggagtcgata

SEQ ID NO: 18123 - DNA, 260 bp, Unknown
  Description of Unknown: LeftRegion for integrase B5124 sequence
tcatagttgcgctggtcggtatatgtatcttgtcctttggtctcgtgcatgtagaactaaagaattatcacaatgctgataatagatgcagtcagtattattccgttttgcgtgaaattgcgctaatcgcaaaaaagcaccctgtaacagcggaggaaatagataatattctgaaaaagcaccagtaagggagtgataccatgcaaatggaatacgccatgtacctccgcaaatcccgcgcggacctcgaagccgaggca

SEQ ID NO: 18124 - DNA, 260 bp, Unknown
  Description of Unknown: LeftRegion for integrase B5125 sequence
aatgcaatcaactttaaagaaaaagaaaaaatagataacaagtagttaattaaacaaattacatatttataaaaaaaagacctgtgctggaacacaaggtcgaaaatggaaaaaatttatcaccacgataataactctttcctatgtaattatatcataggaaatcatttttatcaataaaatttaaggagatgatacctatgaatgttaatgaaattataatgtatttaagaaaatcaagaaaggattatgaattttct

SEQ ID NO: 18125 - DNA, 260 bp, Unknown
  Description of Unknown: LeftRegion for integrase B5126 sequence
tggaagcccctggagtggtttttccgctggcttcttatgatctgtacttttggtatcttaggaagaaaaagaaataaaggaatacaaggaaaaaccatctccgcaagtaagagcatcaatcgtactatggctgtatgccagaattgcggacacacctggaaagcctgagtgtgtagccgtatgcagagaggaggcactgcatggcaaaagcaaaagcagctacaaatgatataagtaaactcgctgttatatatgccagg

SEQ ID NO: 18126 - DNA, 260 bp, Unknown
  Description of Unknown: LeftRegion for integrase B5127 sequence
tggaagcccctggagtggtttttccgctggcttcttatgatctgtacttttggtatcttaggaagaaaaagaaataaaggaatacaaggaagaaccatctccgcaagtaagagcatcaatcgtactatggctgtatgccaaaactgcggacacacctggaaggcctgagtgtgtagccgtatgcagagaggaggcactgcatggcaaaagcaaaagcagctacaaatgatataagcaaactcgctgttatatatgccagg

SEQ ID NO: 18127 - DNA, 260 bp, Unknown
  Description of Unknown: LeftRegion for integrase B5128 sequence
gtcgctgaacatcctgccggaacgctgtgcgctggtggaaagcgagccggaacgcacccaagggctgcggcagatgctggtggacaactactcggtgttctacatcgtgggcgagggtgccgtgtcggtggctcgtgtgctgtacagtgcatccgaccttgtgcgccgcctgcggagaatgaagtgaaaggggtgtttgcatgaccgccgtgatttacgcccgctattccagcgataaccagcgcgaggaatccatcgaa

SEQ ID NO: 18128 - DNA, 260 bp, Unknown
  Description of Unknown: LeftRegion for integrase B5129 sequence
gcgtcaacaggagcggtcaacacgccctctccgcacagcagagataggacggcttaactataacatctccggagatgctacagcattccaaccaaaaaatattgtatcatcttcggtcagctatcgcaatcagaacatctgtttttgatagctgttatttttatacctttttacatataattacataggagtgtgatgcaatgtcttattttatttatgctcgtaaatcaaggaaggatgctgatctcgaagcgttggga

SEQ ID NO: 18129 - DNA, 260 bp, Unknown
  Description of Unknown: LeftRegion for integrase B5130 sequence
cccggttgggtaatgtttaatttcaaaataaaaaccgcccctgcgccaacagagacggtctacatatccgaagatatgcaatctgaagccaagaatattgtatcatcttcggagcagtcgcgcaagcggaacgtaagttcgcacgttgactgttatttttgtacctttttttcaatacaattacataggagtgtgatacaatgtcttattttatctacgcacgaaagtcaagaaaagacgccgaactggaagcgctaggg

SEQ ID NO: 18130 - DNA, 260 bp, Unknown
  Description of Unknown: LeftRegion for integrase B5131 sequence
ggattgcaccgtttttatgttggaaaatggggcacaggattcttgtacctcatcacttttggattctttttcattggcgccattatagactttattcatattttgcggggcactttcaaggataaaaatgggatgccgctgattgaatggtagtatattttaacagaatcagcctattttgataaatagggggtgatattttgagttcggttgataaaatcgcggtggtctatgcccggtattcctcccacggccagact

SEQ ID NO: 18131 - DNA, 260 bp, Unknown
  Description of Unknown: LeftRegion for integrase B5132 sequence
cagaaaatcgccgtgcaataaaataaaaaaccgccccagtgctaccaacactgagacggtctacatatccgaagatatgcgattaaaatccaagaatattgtatcatcttcggaaacagcttgcaagcggaacatatgttttacgctggctgttatttttgtacccaaatttaaatacaattacataggagtgtgatacaatgtcttattttatctacgcacgaaagtcaagaaaagacgccgaactggaagcgctaggg

SEQ ID NO: 18132 - DNA, 260 bp, Unknown; identical to SEQ ID NO: 18128
  Description of Unknown: LeftRegion for integrase B5133 sequence

SEQ ID NO: 18133 - DNA, 260 bp, Unknown
  Description of Unknown: LeftRegion for integrase B5134 sequence
aaaatgctgaagaaatagaggcttatgaagaaaaaatcattaaacttttagcagaaatattgatggaaatacaagaataaataaaaaacttggaatttgtacttgacaaatccaatagttttgcgatatactccataatgtaacaacgtagggtctatagaaagtatcagatgtacacacacaaaaaaggagcgtgtattatgatagaaaactatttagacaaaattaagcaaaggttgaatgttgtagttcttcacgct

SEQ ID NO: 18134 - DNA, 260 bp, Unknown
  Description of Unknown: LeftRegion for integrase B5135 sequence
caaagcagcataggcgtaaaaaaataccgccccagtgctaccaacactgagacggtctacacatccgaagatatgcacatattttgaccaagaatattgtatcatcttcggaacagctatacaatccagaacattcgttcttgtgttggctgttatttttgtaccttttttttaatacaattatataggagtgtgatacaatgtcttattttatctatgccagaaaatccagaaaagacgctgaactggaagcactcggt

SEQ ID NO: 18135 - DNA, 260 bp, Unknown
  Description of Unknown: LeftRegion for integrase B5136 sequence
aacgaagacaataatttttcataataaaaccgccccagtgctaccaacactgagacggtaatacatatccgaagatatgcgattaaaatccatgaatattgtatcatcttcggaaacagcttgcaagcggaacatatgttttgcgctggctgttatttttgtacccaaatttaaatacaataacataggagtgtgatacaatgtcttattttatctacgccagaaaatccagaaaagacgccgaactggaagcgctaggg

SEQ ID NO: 18136 - DNA, 260 bp, Unknown
  Description of Unknown: LeftRegion for integrase B5137 sequence
tctattcggaagcggcttaatgcacaaaccgcaaggctcctcagcagacactttccgaacaagtcccatgcgtcaacggaatagcagacggcgcattggcggacttctgctacaataataatatatgctatttgtttctttgtcaacactataatttataaacatagtgtaaaatcgcactctaatatcgaggtgatcccatgtcaaccaactatgccctgtacctccgcaaatcccgcgcggacctcgaagccgaggcg

SEQ ID NO: 18137 - DNA, 260 bp, Unknown
  Description of Unknown: LeftRegion for integrase B5138 sequence
ccataggaattgacggcaggcagcttatcgattgggaaaagcacactaatgtttacaatcaccttgaatcactcacaccagctgaagcagaaatactatctaaataccgcaatctcaatattgaaggtcagaaacgaattactgagtacgcagacgaccttgttgcaggtggaaggttcgcaaaatagtaaggaggcattatggaaaaaagagctgtaatatatgctcgctactcatgcgacaaacagtctgaacaatcc

SEQ ID NO: 18138 - DNA, 260 bp, Unknown
  Description of Unknown: LeftRegion for integrase B5139 sequence
ggtgtcttttgctatatacacaaataaaccgccccagtgctaccaacactgagacggtctacatatccgaagatatgctattgaaatccacgaatattgtatcatcttcggaaacagcttgcaatccagaacattcgttcatgtgctggctgttatttttgtacccaaatttaaatacaataacataggagtgtgatacaatgtcttattttatctacgccagaaaatccagaaaagacgccgaactggaagcgctaggg

SEQ ID NO: 18139 - DNA, 260 bp, Unknown
  Description of Unknown: LeftRegion for integrase B5140 sequence
ataattcaagttctaatttcacaataaaaaccgcccctgcgccaacagagacggtctacatatccgaagatatgctcttaaattaactcgggaatattgtatcatcttcggagcagtcacgcaatccagaacattcgttcatgtgctggctgttatttttgtacccaaatttaaatacaataacataggagtgtgatacaatgtcttattttatctacgccagaaaatccagaaaagacgccgaactggaagcgctaggg

SEQ ID NO: 18140 - DNA, 260 bp, Unknown
  Description of Unknown: LeftRegion for integrase B5141 sequence
ctgtagcgattgcggatttagctttgactttacaacgcaaaaagatatcgatgacaagtgtaaatcattgttaaatggcggaataggctctattgtagttgcggtcattttggggattgctatgtttgttataaatggatatctgcattgaaaacgaataaaagtgttatgtgttgattaaaaggttagggggtgatagtttgagttcagttgataaaatcgccgtcgtttacgcgcggtattcgtcccacggtcagacc

SEQ ID NO: 18141 - DNA, 260 bp, Unknown; identical to SEQ ID NO: 18133
  Description of Unknown: LeftRegion for integrase B5142 sequence

SEQ ID NO: 18142 - DNA, 260 bp, Unknown
  Description of Unknown: LeftRegion for integrase B5143 sequence
actctctcgattctttaggacaataaaataaaaaaccgcccctgcgccaacagagacggtatacatatccgaagatatgctattgaaatccacgaatattgtatcatcttcggaaacagcttgcaagcggaacatatgttttgcgctggctgttatttttatactcaaatttaaatacaattacataggagtgtgatacaatgtcttattttatctatgccagaaaatcaagaaaagacgctgaactggaagcacttggg

SEQ ID NO: 18143 - DNA, 260 bp, Unknown
  Description of Unknown: LeftRegion for integrase B5144 sequence
tacattatagcaaatgtaccataaatgtcaagaaccgcccctgcgccaacaggaacggctctggaatatatccgaagatatacacctaatcaacgaaaatattgtatcatcttcggtcagctatcgcaatcagaacatttgtttttgatagctgttatttttatacctttttacatataattacataggagtgtgatgcaatgtcttattttatttatgctcgtaaatcaaggaaggatgctgatctcgaagcgttggga

SEQ ID NO: 18144 - DNA, 260 bp, Unknown
  Description of Unknown: LeftRegion for integrase B5145 sequence
gccgctttgcaggccgtgtcaagtcgctggctgctgtcctgccctactgtgacgaagcgacctttttcgataatgataacggctttgtcgctgttgccgagtaccgcaacggcgtgatcgtctgctacgaggacgcgccgcgctgggtaatgtcccttgccgacgccatcaatcagccgtaacccaaaggagtgaccgctatgcccaccgactacgccctgtacctccgcaaatctcgtgccgacctcgaagccgaggcg

SEQ ID NO: 18145 - DNA, 260 bp, Unknown
  Description of Unknown: LeftRegion for integrase B5146 sequence
tcttgtaaaccatcactcataattcatccctcattttaacagcatgtactaattcctttttaggtaattatatcatctaaaatattttttaacaataataactagatcttacaattgtacaacaaaaaaatattttatataataagactgtatgaaatattttttataatgattaaatactttagaaaggagtcaccctattgctcaaaatagccatatacagccgtaaatcagtagaaacagacacaggagaaagcata

SEQ ID NO: 18146 - DNA, 260 bp, Unknown
  Description of Unknown: LeftRegion for integrase B5147 sequence
aagctcgtaaccggcagaacaaaaagcccgacctgggaaaaggctgtccatattgccgagaatcttggcatgactccgtcagaattcagagcagttgagattgaatatgacagtcaagagtccgaaagaaaagctcgctgagtggtcaagactccgcgagctttagtccaattccaaacggcagaacggacaatcacattatggcagaaaaagcggtaatttacgcgagatttagctcagacaagcagcgcgaggaatcg

SEQ ID NO: 18147 - DNA, 260 bp, Unknown
  Description of Unknown: LeftRegion for integrase B5148 sequence
cgggttcactccaagaaatttacatataataattgcttcatccatagataataacggtctacatatccgaagatatgctattgaaatccacgaatattgtatcatcttcggaaacagcttgcaatccagaacattcgttcatgtgctggctgttatttttgtacccaaatttaaatacaataacataggagtgtgatacaatgtcttattttatctacgccagaaaatccagaaaagacgccgaactggaagcgctaggg

SEQ ID NO: 18148 - DNA, 260 bp, Unknown
  Description of Unknown: LeftRegion for integrase B5149 sequence
gatggacgaggtgtttgatgcgaggatccgccgcattgaggaaagatactcgcgtatgctcaaaatgcaaaacaggtggcttcggtttacggttatcttgtgtctttgccttaccgtgtttatcatcgtcatgctgttgtatgatgttacgcatccgggcatcggatggatgcgagatcatcttaattagggagaaaaaaatggatacgcttgcagatgttgtcgtttatgccagatatagctccgccgggcagaacgat

SEQ ID NO: 18149 - DNA, 260 bp, Unknown
  Description of Unknown: LeftRegion for integrase B5150 sequence
aactctctcgattctttaggacaataaaacaaaaaccgcccctgcgccaacagagacggtctacatatccgaagatatgctattgaaatccatgaatattgtatcatcttcggaaacagcttgcaagtggaacatttgttttgcgctggctgttatttttgtacccaaatttaaatacaataacataggagtgtgatacaatgtcttattttatctacgccagaaaatccagaaaagacgccgaactggaagcgctaggg

SEQ ID NO: 18150 - DNA, 260 bp, Unknown
  Description of Unknown: LeftRegion for integrase B5151 sequence
gtataaaataatatataaatatatataaatataaggggcatcttgaacttgaaccgaaacgccgaaaaagcccgaaattgcgtcattttcaccggttcaagatgatttttcatcttgaaccatcttgaaccgctttcacgcatttgcgtgcttttttccactttgtatttctgaattattaacagaagggagtttttcgtatgaaacgagccgttttttacggcagatactcaagcgaccggcaaaccgaacaatcgatc

SEQ ID NO: 18151 - DNA, 260 bp, Unknown
  Description of Unknown: LeftRegion for integrase B5152 sequence
atgaggcagatagccagtaaataaaaaaagcgccgaccctctggaaagggtcagcgctggggccagtgctacaacataaaaagctgaggcggctacttcctgctggaacaggggctgcgccacaaagcacaggcagttgacatggaaaccaactgcctttattgtagcacgtcgccctgaatttgaaaaggggtgattttatgcgcgatatggattccgcccgcctgtgggtggtgtgctatgtccgcgtcagcacgaga

SEQ ID NO: 18152 - DNA, 260 bp, Unknown; identical to SEQ ID NO: 18128
  Description of Unknown: LeftRegion for integrase B5153 sequence

SEQ ID NO: 18153 - DNA, 260 bp, Unknown
  Description of Unknown: LeftRegion for integrase B5154 sequence
taccattatcgagaaaaggcgcaaggccatgtccaccacggcgctttttgaaacggaagacggcaataggatactgctggaaatacccagagcggcggcggagtatatgaccgttggcgacgttgggatgctggattattacaaaaaaatattcagatcgtttgtcaggttgagggattaagggcgtgaaggagcctgccatgcaaaagagaagaacgaaatacgcaaacagccaaggggataacgccgtcatatacgca

SEQ ID NO: 18154 - DNA, 260 bp, Unknown; identical to SEQ ID NO: 18128
  Description of Unknown: LeftRegion for integrase B5155 sequence

SEQ ID NO: 18155 - DNA, 260 bp, Unknown
  Description of Unknown: LeftRegion for integrase B5156 sequence
acgagccatttgtatatataggtgatgagctgtccgaagtacgcgtactgggcagggcgattgccttccaaagcttgataagataacttcgcccataagggcgtgaattgaaattcccactgcgagatggctgtttgatggtcgcccctcgcgcaggggcgtgaattgaaatgcaacaatcaaagttacaaacggagcggatgaaaataaaaacaccagaatacagggatggcgtaatatacgccaggtacagccccggt

SEQ ID NO: 18156 - DNA, 260 bp, Unknown
  Description of Unknown: LeftRegion for integrase B5157 sequence
caaagcagcataggcgtaaaaaaataccgccccagtgctaccaacactgagacggtctacacatccgaagatatgcacatattttgaccaagaatattgtatcatcttcggaacagctatacaatccagaacattcgttcttgtgttggctgttatttttgtacctttttttaaatacaattatataggagtgtgatacaatgtcttattttatctatgccagaaaatccagaaaagacgccgaactggaagcgctgggg

SEQ ID NO: 18157 - DNA, 260 bp, Unknown; identical to SEQ ID NO: 18128
  Description of Unknown: LeftRegion for integrase B5158 sequence

SEQ ID NO: 18158 - DNA, 260 bp, Unknown
  Description of Unknown: LeftRegion for integrase B5159 sequence
taatggataatggaattataacaccagaagaatttgaagcaaaaaagaaacagcttcttaacttatagaaaaaatataattaaaaaataaaagcccctgtgctaccaacacaagagcttttaatgcgacttacaccatgcagtacccagatgatataatcgccctgaacaagctatattatatcacctttaacactgcttatgcaagtagtgttatttttgtaccccaaaatcgcatatattgatagaaaggatgacaat

SEQ ID NO: 18159 - DNA, 260 bp, Unknown
  Description of Unknown: LeftRegion for integrase B5160 sequence
tctctcgattctttaggacaataaaataccgccccagtgctaccaacactgagacggtctacatatctgaagatatgcaatctgaagccaagaatattgtatcatcttcggaaacagcttgcaatccagaacattcgttcatgtgctggctgttatttttgtacccaaatttaaatacaataacataggagtgtgatacaatgtcttattttatctacgccagaaaatccagaaaagacgccgaactggaagcgctaggg

SEQ ID NO: 18160 - DNA, 260 bp, Unknown
  Description of Unknown: LeftRegion for integrase B5161 sequence
agaaatacggggtcttttacgttatataaagaaaaccgctcctgcgccaacaggaacggttcaagtaacattccgaagaatgataccccaattcaaaaatattgtatcatcttcggtcagctatcgcaatcagaacatttgtttttgatagctgttatttttatacttttttacatataattacataggagtgtgatgcaatgtcttattttatttatgctcgtaaatcaagaaaggacgccgatcttgaagcgttgggg

SEQ ID NO: 18161 - DNA, 260 bp, Unknown; identical to SEQ ID NO: 16395
  Description of Unknown: LeftRegion for integrase B5162 sequence

SEQ ID NO: 18162 - DNA, 260 bp, Unknown; identical to SEQ ID NO: 18128
  Description of Unknown: LeftRegion for integrase B5163 sequence

SEQ ID NO: 18163 - DNA, 260 bp, Unknown
  Description of Unknown: LeftRegion for integrase B5164 sequence
cattcatccgattatacacagagagttgatagcatttactctagtgaggatttaaatatggaaaatcctattggtcaaggttttgctacgaatgatgacgaagataatctcctatttgtctatgatcaatacaaaagctacacctacacatacggctttgactccgaaatacaattcaatattattcaggaggtatccaaatgattcctgctgttggctactgccgtttctcttctgagaaccaagcggatggattttct

SEQ ID NO: 18164 - DNA, 260 bp, Unknown
  Description of Unknown: LeftRegion for integrase B5165 sequence
gatataatatctgctatattatcaggagctaataatatctatgatctagctgaaaaattaaatgttacagaagattttttgattaaatctattaaacattataaaaataaatatggagtttattatgttggtaaaacacatttgctaacatttgattcactaaatgttataggcttttaaaatattgaggtgataaaattatggatactgatatttttgcaatatatcttagaaaatctagaaaagacttagaaaacaag

SEQ ID NO: 18165 - DNA, 260 bp, Unknown
  Description of Unknown: LeftRegion for integrase B5166 sequence
aggagtatcggcagtcgatttcaggcggcgcgaactatgaggacgtgaccgagtcggacgacgatgaggaagaggacgactcgaccgtcgcgtaaccatcatgcccgacgtccgcaaaatggtcacctacttagaaattctctaataactgaaaaagtggtcgttgcaaaaaatgcaaccaccacagaaaggagtcccacatgccaaaagccgtgatctacgcccgcttctcctcccacaaccagcgcgaggagtcgatc

SEQ ID NO: 18166 - DNA, 260 bp, Unknown
  Description of Unknown: LeftRegion for integrase B5167 sequence
gattcacttttgatttcaccacgcaaaaagacctcgacaacgagtataaaaagctcaataacggggagattggttctgtagtagcgacagttatattcggtgccttatttattgcagttttaggtttcctaaaatagtaatcgtttttcagctattaaacgcaaatttaggctcattttcgttagataggaggtgatactttgagttcagttgataaaatcgccgttgtttacgcacggtattcttcccacggtcagacc

SEQ ID NO: 18167 - DNA, 260 bp, Unknown
  Description of Unknown: LeftRegion for integrase B5168 sequence
tacaatgtttacaggataatgggtgatgtcattttgtgcacaaatttcgtttgctttctgagcgatttttgcttttgtcagcataatgatacctcccctctgttataagaatatacgctaaatttacacctgtcaactatctgttccaaaataatttctgaaacttttggaaccattctttttgaaaggagctgacccccatgcccaccgactacgccctgtacctccgcaaatcccgcgccgacctcgaagccgaggcc

SEQ ID NO: 18168 - DNA, 260 bp, Unknown
  Description of Unknown: LeftRegion for integrase B5169 sequence
caaagcagcataggcgtaaaaaaataccgccccagtgctaccaacactgagacggtctacacatccgaagatatgcacatattttgaccaagaatattgtatcatcttcggaacagctatacaatccagaacattcgttcttgtgttggctgttatttttgtacctttttttaaatacaattatataggagtgtgatacaatgtcttattttatctatgccagaaaatccagaaaagacgctgaactggaagcactcggt

SEQ ID NO: 18169 - DNA, 260 bp, Unknown; identical to SEQ ID NO: 18128
  Description of Unknown: LeftRegion for integrase B5170 sequence

SEQ ID NO: 18170 - DNA, 260 bp, Unknown; identical to SEQ ID NO: 15742
  Description of Unknown: LeftRegion for integrase B5171 sequence

SEQ ID NO: 18171 - DNA, 260 bp, Unknown
  Description of Unknown: LeftRegion for integrase B5172 sequence
aatgaaacgaagacaataatttttcgtaataaaaaccgcccctgcgccaacagagacggtctgcatacccgaagatatgcgattgaaatccaagaatattgtatcatcttcggaaacagcttgcaagcggaacgtttgttttgcgctggctgttatttttatactcaaatttaaatacaattacataggagtgtgatacaatgtcttattttatctatgctagaaaatccagaaaagatgccgaactggaagcactaggg

SEQ ID NO: 18172 - DNA, 260 bp, Unknown
  Description of Unknown: LeftRegion for integrase B5173 sequence
ttcatgcacaaatccttttataaaataaattaatatttttataactaaaaaatatattaatatataaatataaaaatatatagtatataggaaatgaacgtgaacaccacgaacaaatataaaaaacgctcattttatcagtgtttttcgtgttcacgctatgttcaaggtgttcgcataggcaaaagggagcgaagaaaatgaacatcacagatgaatacgcaatttatttgcgaaaatcccgtgcggatttggaagcc

SEQ ID NO: 18173 - DNA, 260 bp, Unknown
  Description of Unknown: LeftRegion for integrase B5174 sequence
gatataatatctgctatattatcaggtgctaataacatctatgatctagctgaaaaattaaatgttacggaagactttttaattaaatctattaagcattataaaaataaatatggagtttattatgttggtaaaacacatttacttacatttgattcactaaatgttataggcttttaaaatattgaggtgataaaattatggatactgatatttttgcaatatatcttagaaaatctaggaaagacttagaaaacaag

SEQ ID NO: 18174 - DNA, 260 bp, Unknown
  Description of Unknown: LeftRegion for integrase B5175 sequence
gccaacgggtccatcgccgtggtggagaccgaggactaccgcgcggtcatgcgccgctggtacaagggcagcaccaagctgatgctgtcggcggatagcttcgaggactacgaggacatgattttcggcatggacgacggccccgtgcgcgtgatcggcacggtggtgtggttccaggccgccgacgagatggagtagccgtgggcgggcgcgcggcgatatacgcccgcttctcgagccacaaccagcgcggcgagtcc

SEQ ID NO: 18175 - DNA, 260 bp, Unknown
  Description of Unknown: LeftRegion for integrase B5176 sequence
ctgtagcgattgcgggtttagctttgactttacaacgcaaaaagatatcgatgacaagtgtaaatcattgttaaatggcggaataggctctattgtagttgcggttattttggggattgctatgtttgctataaatggatatctgcattgaaagcgaataaaagtgttatgtgttgattaaaaggttagggggtgacagtttgagttcagttgacaaaatcgccgttgtttacgcgcggtattcgtcccacggtcagacc

SEQ ID NO: 18176 - DNA, 260 bp, Unknown
  Description of Unknown: LeftRegion for integrase B5177 sequence
cgcgtactgcgagaattgcggatacagctttgactttaccacgcaggatgacctcaatgcccaatataataaactgaacacaaacgagggatgcgccattttggtggctgtcattctcggcgttattcttataacaatttggttttacagccattaaacgcaaatttgaggccgttttcgttaaataagggggtgatagtttgagttcagttgataaaatcgccgtcgtttacgcgcggtattcgtcccacggtcagacc

SEQ ID NO: 18177 - DNA, 260 bp, Unknown
  Description of Unknown: LeftRegion for integrase B5178 sequence
taccattatcgagaaaaggcgcaaggccatgtccaccacggcgctttttgaaacggaagacggcaataggatactgctggaaataccaagagcggcggcggagtatatgaccgttggcgacgttgggatgctggattattacaaaaaaatattcagatcgtttgtcaggttgagggattaagggcgtgaaggagcctgccatgcaaaagagaagaacgaaatacgcaagcagccaaggggataacgccgtcatatacgca

SEQ ID NO: 18178 - DNA, 260 bp, Unknown; identical to SEQ ID NO: 16395
  Description of Unknown: LeftRegion for integrase B5179 sequence

SEQ ID NO: 18179 - DNA, 260 bp, Unknown
  Description of Unknown: LeftRegion for integrase B5180 sequence
gcgtggtctttggtggtaaaaacaaaagagcgctgaccctctggaaagggtcagcgctggggccagtgctacaacacaaaaaagtgaggtggccgcttcctgctggaacagggggctgcgccacaaagcacaggcagttggcatggaaccgactgcctttattgtagcacgtcgccctgaatttgaaaaggggtgattttatgcgcgatatggattccgcccgcctgcgggtggcgtgctatgtccgcgtcagcacgaga

SEQ ID NO: 18180 - DNA, 260 bp, Unknown
  Description of Unknown: LeftRegion for integrase B5181 sequence
aactcggttatcgcggcgacgcgtttgctgcggaggacgtctccatcagcgacgacctcggccccgatgaccgcatcggctggccgaatacgcactatgtctgcatccgccgtatgggcgacgacgactttgtggcaaggttcggatcgccgcaggccatcggtttctgcgcgttttttgagggaaaggaggaataacccatgatctgcgccatgtacctgcgcaagtcccgcgcggactacgaggccgaagcccgcggc

SEQ ID NO: 18181 - DNA, 260 bp, Unknown
  Description of Unknown: LeftRegion for integrase B5182 sequence
cagtacgacaaactgaacgcaaacgagggatgctccattctggtggctgtcgttctcggcattatcctcgcagtgatttggtttttcggtcattaaatgcaaattttgatgatttttgtatctgatttggctttttaagcacaaaatcaaagccttaattgcaaatccgatgccgttttcgttaaatagggggtgacagtttgagttcagttgataaaatcgccgtcgtttacgcgcggtattcgtcccacggtcagacc

SEQ ID NO: 18182 - DNA, 260 bp, Unknown; identical to SEQ ID NO: 15742
  Description of Unknown: LeftRegion for integrase B5183 sequence

SEQ ID NO: 18183 - DNA, 260 bp, Unknown
  Description of Unknown: LeftRegion for integrase B5184 sequence
cgcgtactgcgagaattgcggatacagctttgactttaccacgcaggatgacctcaatgcccaatataataaactgaacacaaacgagggatgcgccattttggtgacggtcattctcggcgttattcttataacaatttggttttacagccattaaacgcaaatttgaggccgttttcgttaaataagggggtgatagtttgagttcagttgataaaatcgccgtcgtttacgcgcggtattcgtcccacggtcagacc

SEQ ID NO: 18184 - DNA, 260 bp, Unknown
  Description of Unknown: LeftRegion for integrase B5185 sequence
ccgcgaaggaattgattttatactcgacccgatgggaaatcacatccatagcgatctaaacgagcacatagacggcattcagcagcttttgaaatttaatccggacagaattaaggacgaaaacagaacacgacggtcaagaagagagagccatgattgacccgtttcagtagcgggttttgtaaaaggaggaataacccatgatctgcgccatgtacctgcgcaagtcccgcgcggactacgaggccgaagcccgcggc

SEQ ID NO: 18185 - DNA, 260 bp, Unknown
  Description of Unknown: LeftRegion for integrase B5186 sequence
agaaaaaattatccgaaaaataataaaaccgccccagtgctaccaacaccgagacggtatacatatccgaagatatgctattgaaatccacgaatattgtatcatcttcggagcagctacacaatccagaacatttgttcatgtgctggctgttatttttgtgcccaaatttaaatacaattacataggagtgtgatacaatgtcttattttatctatgccagaaaatccagaaaagacgccgaactggaagcactgggg

SEQ ID NO: 18186 - DNA, 260 bp, Unknown
  Description of Unknown: LeftRegion for integrase B5187 sequence
aggtatcagctggtggaaagataacaatgacttaataagtagagttgcaagatttataattgcttatctaaatgagggttataattgtgatgatattattaatgctagaaatgttttagctaataaattaaatcgtaaagaaagagatagaatatattattctatacctgttatttgattaatatagaaaggatatttctatgaacgctgtaatatatgctaggttctctagccataaccaacaggaacagagcattgaa

SEQ ID NO: 18187 - DNA, 260 bp, Unknown; identical to SEQ ID NO: 16395
  Description of Unknown: LeftRegion for integrase B5188 sequence

SEQ ID NO: 18188 - DNA, 260 bp, Unknown
  Description of Unknown: LeftRegion for integrase B5189 sequence
agcagattgatttgtgctgctaatctgtaatttaacttaataacgcaaaaaccgccccggtattggcgtaccgaagcggatcagcgaatctatacaggtctgaggaccagtataatccatcattgaacaagatgattataccacaatcctccagcacctgtacaggtgtattttttatactcatttttaaggaggtacctatgaaaatcgaaaattatgcattatatctgcgaaaaagccgtgcggacatggaagcggaa

SEQ ID NO: 18189 - DNA, 260 bp, Unknown; identical to SEQ ID NO: 18128
  Description of Unknown: LeftRegion for integrase B5190 sequence

SEQ ID NO: 18190 - DNA, 260 bp, Unknown; identical to SEQ ID NO: 18175
  Description of Unknown: LeftRegion for integrase B5191 sequence

SEQ ID NO: 18191 - DNA, 260 bp, Unknown
  Description of Unknown: LeftRegion for integrase B5192 sequence
tgcggcatttgccatccaccacaataaaataaaaaccgcccctgcgccaacagagacggtctacatacccgaagatatgcgattaaaatccaagaatattgtatcatcttcggaaacagcttgcaagcggaacatatgttttgcgctggctgttatttttgtacccaaatttaaatacaataacataggagtgtgatacaatgtcttattttatctacgccagaaaatccagaaaagacgccgaactggaagcgctaggg

SEQ ID NO: 18192 - DNA, 260 bp, Unknown; identical to SEQ ID NO: 17943
  Description of Unknown: LeftRegion for integrase B5193 sequence

SEQ ID NO: 18193 - DNA, 260 bp, Unknown
  Description of Unknown: LeftRegion for integrase B5194 sequence
aaaaaccgctcctgcgccaacaggaacggtcttgcaatatctccgaagagatacattggtagacaaaaacatctactaaaaccatatctttcaaaatatattgtatcatcttcggtcagctatcgcaatcagaacatttgtttcttgatagctgttatttttatacctttttacatataattacataggagtgtgatgcaatgtcttattttatttatgctcgtaaatcgagaaaggatgccgatcttgaagcattggga

SEQ ID NO: 18194 - DNA, 260 bp, Unknown
  Description of Unknown: LeftRegion for integrase B5195 sequence
aattcgttgaattctttagggcaataaaataaaaaccgcccctgcgccaacagagacggtctacatatccgaagatatgcaatctgaagccaagaatattgtatcatcttcggaaacagcttgcaagcggaacgtttgttttgcgctggctgttatttttgtacccaaatttaaatacaataacataggagtgtgatacaatgtcttattttatctacgccagaaaatccagaaaagacgccgaactggaagcgctaggg

SEQ ID NO: 18195 - DNA, 260 bp, Unknown
  Description of Unknown: LeftRegion for integrase B5196 sequence
gtgtcttttgctatatacacaaataaaccgccccagtgctaccaacactgagacggtctacatatccgaagatatgccatatcttaccagtgaatattgtatcatcttcggaacagctacacaatccagaacattcgttcatgtgctggctgttatttttgtacccaaatttaaatacaataacataggagtgtgatacaatgtcttattttatctacgcacgaaagtcaagaaaagacgccgaactggaagcgctaggg

SEQ ID NO: 18196 - DNA, 260 bp, Unknown
  Description of Unknown: LeftRegion for integrase B5197 sequence
gatatggaggcagttgtataactaaccttgtaatttaattaaataacaaaaccgccccggtattggcgtaccgaagcggatcagcgaatctatacaggtctgaggaccagtataatccatccttgaacaagatgattataccacaatcctccagcacctgtacaggtgtattttttatactcatttttaaggaggtacctatgaaaatcgaaaattatgcattatatctgcgaaaaagccgtgcggacatggaagcagaa

SEQ ID NO: 18197 - DNA, 260 bp, Unknown; identical to SEQ ID NO: 18138
  Description of Unknown: LeftRegion for integrase B5198 sequence

SEQ ID NO: 18198 - DNA, 260 bp, Unknown
  Description of Unknown: LeftRegion for integrase B5199 sequence
cagtacgacaaactgaacgcaaacgaggggtgctccattctggtggctgtcgttctcggcgttatcctcgcagtgatttggtttttcggtcattaaatgcaaattttgatgatttttgtatctgatttggctttttaagcgcaaaatcaaagccttaattgcaaatttgaggctattttcgttaaatagggggtgatagtttgagttcagttgaaacaaccgccgttgtttacgcacggtattcatcccacggccagacc

SEQ ID NO: 18199 - DNA, 260 bp, Unknown
  Description of Unknown: LeftRegion for integrase B5200 sequence
gaagcgaaaacaataatttttcagaacacaaaaaccgcccctgcgccaacagagacggtctacatatccgaagatatgctattgaaatccacgaatattgtatcatcttcggagcagtcacgcaagcggaacatttgttcatgtgctggctgttatttttgtacccaaatttaaatacaattacataggagtgtgatacaatgtcttattttatctacgcacgaaagtcaagaaaagacgccgaactggaagcgctaggg

SEQ ID NO: 18200 - DNA, 260 bp, Unknown
  Description of Unknown: LeftRegion for integrase B5201 sequence
ggtaatttcaacaaatcttctaataaaacaatatcttgtaatgtatgctcagtatctgccatattttctcctttattaatatgctctatatcatattaattctaatttgtcaataatatatttgtataatttattataaactatttcctctatttagtaaacaataatatttataccttaaatacgaaaggatttttattatgcttaagacagttatatatgctcgttattctagtgacaaacaaaatgaacaatctatt

SEQ ID NO: 18201 - DNA, 260 bp, Unknown
  Description of Unknown: LeftRegion for integrase B5202 sequence
attatttattctgtttatctgattcaccatacccaaaagtagagatttccctaacagaagaagagcaattactgcttgacgcattccgttccgctaccccacaaggtagattcaacattattactacctgtatgtgtgagaagcgaaaaggggacaacgaaagtgccgggtgattgattttgtagagtggaggaagaaccatgtatgaggatataaaaacagcctgcctatacgttagattctcaagccataaccagact

SEQ ID NO: 18202 - DNA, 260 bp, Unknown
  Description of Unknown: LeftRegion for integrase B5203 sequence
gacatggaggcagttgtataactaaccttgtaatttaattaaatagcaaaaccgccccggtattggcgtaccgaagcggatcagcgaatctatacaggtctgaggaccagtataatccatccttgaacaagatgattataccacaatcctccagcacctgtacaggtgtattttttatactcatttttaaggaggtacctatgaaaatcgaaaattatgcattatatctgcgaaaaagccgtgcggacatggaagcagaa

SEQ ID NO: 18203 - DNA, 260 bp, Unknown
  Description of Unknown: LeftRegion for integrase B5204 sequence
actctctcgattctttaggacaataaaataaaaaaccgcccctgcgccaacagagacggtatacatatccgaagatatgctattgaaatccacgaatattgtatcatcttcggaaacagcttgcaagcggaacatatgttttgcgctggctgttatttttatactcaaatttaaatacaattacataggagtgtgatacaatgtcttattttatctatgctagaaaatccagaaaagacgccgaactggaagcactgggg

SEQ ID NO: 18204 - DNA, 260 bp, Unknown
  Description of Unknown: LeftRegion for integrase B5205 sequence
ctgtagcgattgcggatttagctttgactttacaacgcaaaaagatatcgatgacaagtgtaaatcattgttaaatggcggaataggctctattgtagttgcggttattttggggattgctatgtttgctataaatggatatctgcattgaaaacgaataaaagtgttatgtgttgattaaaaggttagggggtgacagtttgagttcagttgacaaaatcgccgttgtttacgcgcggtattcgtcccacggtcagacc

SEQ ID NO: 18205 - DNA, 260 bp, Unknown
  Description of Unknown: LeftRegion for integrase B5206 sequence
catactgcgaggattgcggatacagctttgactttaccacacaggatgacctcaatgcccaatataataaactgaacacaaacgagggatgcgccattttggtggcgatcattctcggcgttattcttataacaatttggttttacagccattaaatgcaaatttgaggccgttttcgttaaataagggggggtgacagtttgagttcagttgacaaaatcgccgttgtttacgcacggtattcttcccacgggcagacc

SEQ ID NO: 18206 - DNA, 260 bp, Unknown
  Description of Unknown: LeftRegion for integrase B5207 sequence
aagaaatagcacatgcggcaataaagcaagagaaaagccattacgacgatgggtttttctatcaagtaacagtagtgttgaaatagaagaagtccctccaccctgccgcctcgcaagcaagacagggtggaggggaccaaggggatgcggggccgtagccgaccgcgcccattccgaccgcgaagggcggtaatgacattatgccacgtaagcctaagaaaaccgaaacccgaaaaggcgtcatctacgcccgcttcagc

SEQ ID NO: 18207 - DNA, 260 bp, Unknown
  Description of Unknown: LeftRegion for integrase B5208 sequence
cagtacgacaaactgaacgcaaacgaggggtgctccattctggtggctgtcgttctcggcgttatcctcgcagtgatttggtttttcggtcattaaatgcaaattttgatgatttttgtatctgatttggctttttaagcgcaaaatcaaagccttaattgcaaatttgaggctattttcgttaaataaggggtgatagtttgagttcagttgaaacaaccgccgttgtttacgcacggtattcatcccacggccagacc

SEQ ID NO: 18208 - DNA, 260 bp, Unknown
  Description of Unknown: LeftRegion for integrase B5209 sequence
aacaaagcagcataggcgtaaaaaaataccgccccagtgctaccaacactgagacggtctacatatccgaagatatgctattgaaatccaagagtattgtatcatcttcggagcagtcacgcaatccagaacattagttcatgtgctggctgttatttttgtacccaaatttaaatacaataacataggagtgtgatacaatgtcttattttatctacgccagaaagtcaagaaaagacgccgaactggaagcgctaggg

SEQ ID NO: 18209 - DNA, 260 bp, Unknown
  Description of Unknown: LeftRegion for integrase B5210 sequence
gcttctaaacaagccgattgatttgtaatttaactgaataacgtaaaaaaccgccccggtgctggtaacaccgaagcggatctgtgaatctatacaggtctgaggaccagtataatccatccttgaacaagatgattataccacaatcctccagcacctgtacaggtgtattttttatactcatttttaaggaggtacctatgaaaatcgaaaattatgcattatatctgcgaaaaagccgtgcggacatggaagcagaa

SEQ ID NO: 18210 - DNA, 260 bp, Unknown
  Description of Unknown: LeftRegion for integrase B5211 sequence
acttactgggtcttagtgaagtcagaaaaccagaagtcttagttttgtcagaaaaagagaaaatcctcattgacgcataccgtactgctaatgacatgggacaattaaacataatctatgtctgcatggatgaaatgaaaaaagcaaaaggggaaggcgtacttgtagggtaattgatttcatagaatggaggaagaaccatgtatgaggatataaaaacagcctgcctatatgttagattctcaagccataaccagact

SEQ ID NO: 18211 - DNA, 260 bp, Unknown; identical to SEQ ID NO: 18193
  Description of Unknown: LeftRegion for integrase B5212 sequence

SEQ ID NO: 18212 - DNA, 260 bp, Unknown; identical to SEQ ID NO: 18128
  Description of Unknown: LeftRegion for integrase B5213 sequence

SEQ ID NO: 18213 - DNA, 260 bp, Unknown
  Description of Unknown: LeftRegion for integrase B5214 sequence
cagtacgacaaactgaacgcaaacgagggatgctccattctggtggctgtcgttctcggcgttatcctcgcagtgatttggtttttcggtcattaaatgcaaattttgatgatttttgtatctgatttggctttttaagcacaaaatcaaagccttaattgcaaatttgaggctattttcgttaaatagggggtgatagtttgagtacagttgaaacaaccgccgttgtttacgcacggtattcatcccacggccagacc

SEQ ID NO: 18214 - DNA, 260 bp, Unknown
  Description of Unknown: LeftRegion for integrase B5215 sequence
gatataatatctgctatattatcaggagctaataatatctatgatctagctgaaaaattaaatgttacagaagattttttgatcaaatctattaaacattataaaaataaatatggagtttattatgttggtaaaacacatttgctaacatttgattcactaaatgttataggcttttaaaatattgaggtgataaaattatggatactgatatttttgcaatatatcttagaaaatctaggaaagacttagaaaacaag

SEQ ID NO: 18215 - DNA, 260 bp, Unknown; identical to SEQ ID NO: 18137
  Description of Unknown: LeftRegion for integrase B5216 sequence

SEQ ID NO: 18216 - DNA, 260 bp, Unknown
  Description of Unknown: LeftRegion for integrase B5217 sequence
tttaattataaccgaacttatcgatatattttaatactatttatgaaagattgctatcagcttaatatattctaactagtattttttcataaatgtattaatagattttttataatcgcatacctttaattaataaactctatacaaaattaatataatttaatatcttaattaaaataaatttataaaggtgaatgactatgataaaaacctgtatttacttaagaaaatcacgttctgatgaagaatgtgaaaaacaa

SEQ ID NO: 18217 - DNA, 260 bp, Unknown
  Description of Unknown: LeftRegion for integrase B5218 sequence
gaattctttagagcgataaaataaaaaccgccccggtgctaccaacaccgagacggtaatacatatccgaagatatgcaatctgaagccaagaatattgtatcatcttcggaaacagcttgcaatccagaacattcgttcatgcgctggctgttatttttgtacccaaatttaaatacaataacataggagtgtgatacaatgtcttattttatctacgccagaaaatccagaaaagacgccgaactggaagcgctaggg

SEQ ID NO: 18218 - DNA, 260 bp, Unknown
  Description of Unknown: LeftRegion for integrase B5219 sequence
aacagcaagatttaactattcaataaaaataaaaaccgcccctgcgccaacagagacggtatacatatccgaagatatgctattgaaatccaagaatattgtatcatcttcggagcagctacgcaagcggaacatttgttttgcgctggctgttatttttgtacccaaatttaaatacaattacataggagtgtgatacaatgtcttattttatctacgcacgaaagtcaagaaaagacgccgaactggaagcgctaggg

SEQ ID NO: 18219 - DNA, 260 bp, Unknown
  Description of Unknown: LeftRegion for integrase B5220 sequence
tatttaagaataaaattgaataataaaaaaaccgcccctgcgccaacaggaacggctttgaatatatccgaagatataccataaataaaacaaatatattgtatcatcttcgggcaactatcgcaatcagaacattcgtttcttgatagctgttatttttgtactctttttttcatacatttttaaaggagtgtgatacaatgtcttattttatttatgcacgaaaatcaagaaaagatgcagaactggaagcattgggg

SEQ ID NO: 18220 - DNA, 260 bp, Unknown
  Description of Unknown: LeftRegion for integrase B5221 sequence
tgcggcatttgccatccaccacaataaaataaaaaccgcccctgcgccaacagagacggtctacatacccgaagatatgcgattaaaatccaagaatattgtatcatcttcggaaacagcttgcaagcggaacatatgttttgcgctggctgttatttttgtacccaaatttaaatacaattacataggagtgtgatacaatgtcttattttatctacgcacgaaagtcaagaaaagacgccgaactggaagcgctaggg

SEQ ID NO: 18221 - DNA, 260 bp, Unknown
  Description of Unknown: LeftRegion for integrase B5222 sequence
attaaattctttaggagaataaaataaaaaccgccccagtgctaccaacacagagacggtctacatacccgaagatatgcgattaaaatccaagaatattgtatcatcttcggaaacagcttgcaagcggaacatatgttttgcgctggctgttatttttgtacccaaatttaaatacaataacataggagtgtgatacaatgtcttattttatctacgccagaaaatccagaaaagacgccgaactggaagcgctaggg

SEQ ID NO: 18222 - DNA, 260 bp, Unknown
  Description of Unknown: LeftRegion for integrase B5223 sequence
aaattctttaggagaataaaataaaaaccgccccggtgctaccaacaccgagacggtaatacatatccgaagatatgcaatctgaagccaagaatattgtatcatcttcgggacagctacacaatccagaacatttgttcatgtgctggctgttatttttgtacccaaatttaaatacaataacataggagtgtgatacaatgtcttattttatctacgccagaaaatccagaaaagacgccgaactggaagcgctaggg

SEQ ID NO: 18223 - DNA, 260 bp, Unknown
  Description of Unknown: LeftRegion for integrase B5224 sequence
taagaaatgcacaaagtagttattcattaaaaaccgcccctgcgccaacagagacggtctacatatccgaagatatgctattgaaatccacgaatattgtatcatcttcggaaacagcttgcaatccagaacattcgttcatgtgctggctgttatttttgtacccaaatttaaatacaataacataggagtgtgatacaatgtcttattttatctacgccagaaaatccagaaaagacgccgaactggaagcgctaggg

SEQ ID NO: 18224 - DNA, 260 bp, Unknown
  Description of Unknown: LeftRegion for integrase B5225 sequence
gaggatgaattcgtggagactctccccggattgcgtgcgttaattaagaaatgtaaataaaaaaatcgcccagtgctgcgaacaccaggcgacctgttcttccttgcggaagctgtaaactctacgaataaattttacagcgtttccgataaatccgcaagggtttattttttatactcttttttttgggaggtgggacgatgaggttcttttcctacggacgaaaatccgtattttctgataaatcagattcaatcgat

SEQ ID NO: 18225 - DNA, 260 bp, Unknown
  Description of Unknown: LeftRegion for integrase B5226 sequence
atcccgcatcctgttgcagcaggatgcgggacgcgccggcggtattaccagtaccgtatcagcaatttgtaaataaccaagtagaggactgatttaaagccaattaatttaggcttgtttaaaatcaattaaatttggctgatttacggtattattatatcatgaatcagcctgttcgcctacgaaaggactgattttttatgtcatcaactactactgccaaagccgtcatttatgcccgcttcagcagtgataagcaa

SEQ ID NO: 18226 - DNA, 260 bp, Unknown
  Description of Unknown: LeftRegion for integrase B5227 sequence
agaaatacgaggtcttttacgttatataaagaaaaccgctcctgcgccaacaggaacggttcaagtaacattccgaagaatgataccccaattcaaaaatattgtatcatcttcggtcagctatcgcaatcagaacatttgtttttgatagctgttatttttatacttttttacatataattacataggagtgtgatgcaatgtcttattttatttatgctcgtaaatcaagaaaggacgccgatcttgaagcgttgggg

SEQ ID NO: 18227 - DNA, 260 bp, Unknown; identical to SEQ ID NO: 16395
  Description of Unknown: LeftRegion for integrase B5228 sequence

SEQ ID NO: 18228 - DNA, 260 bp, Unknown
  Description of Unknown: LeftRegion for integrase B5229 sequence
aaattctttaggagaataaaataaaaaccgccccggtgctaccaacaccgagacggtaatacatatccgaagatatgcaatctgaagccaagaatattgtatcatcttcgggacagctacacaatccagaacatttgttcatgtgctggctgttatttttgtacccaaatttaaatacaattacataggagtgtgatacaatgtcttattttatctacgccagaaaatccagaaaagacgccgaactggaagcgctaggg

SEQ ID NO: 18229 - DNA, 256 bp, Unknown
  Description of Unknown: LeftRegion for integrase B5230 sequence
gccccttgcccgggcggtgggcgtgccggtggtcacagacgcgctgacccgtgcccgctccactcggcggaaattgcgtcattttcaccggttcaagatgacttttcatcttgaaccatcttgaaccgctttcacgcatttgcgtgcttttttccactttgtatttccgaattgttaacagaagggagtttttcgtatgaaacgagccgttttttacggcagatactcgagtgaccggcaaacggagcaatcaatc

SEQ ID NO: 18230 - DNA, 241 bp, Unknown
  Description of Unknown: LeftRegion for integrase B5231 sequence
tatatataaatataaggggcatcttgaacttgaaccgaaacgccgaaaaagcccgaaattgcgtcattttcaccggttcaagatgacttttcatcttgaaccatcttgaaccgtttttacgcatttgcgtgcttttttccactttgtatttctgaattattaacagaagggagtttttcgtatgaaacgtgctgttttttacggcagatactcgagcgaccggcaaaccgagcaatcgatc

SEQ ID NO: 18231 - DNA, 260 bp, Unknown
  Description of Unknown: LeftRegion for integrase B5232 sequence
aatttaaaacaaatgtaataacaaagcttagtgaattaaaagaagttgaagaagtaactaaagttaattgctatgatatagcaaaattaaaagctataaaataaatataaaggtgttcgttatcgtatttatatactattttactaaagagttatgatattcatagctctttaataatatttaaatgaggtgtttaaattatggatacagatatttttgcaatatatcttagaaaatcaagaaaagatttagaaaatcag

SEQ ID NO: 18232 - DNA, 260 bp, Unknown; identical to SEQ ID NO: 18143
  Description of Unknown: LeftRegion for integrase B5233 sequence

SEQ ID NO: 18233 - DNA, 260 bp, Unknown
  Description of Unknown: LeftRegion for integrase B5234 sequence
gatataatatctgctatattatcaggagctaataatatctatgatctagctgaaaaattaaatgttacagaagattttttgattaaatctattaaacattataaaaataaatatggagtttattatgttggtaaaacacatttgctaacatttgattcactaaatgttataggcttttaaaatattgaggtgataaaattatggatactgatatttttgcaatatatcttagaaaatctaggaaagacttagaaaacaag

SEQ ID NO: 18234 - DNA, 260 bp, Unknown
  Description of Unknown: LeftRegion for integrase B5235 sequence
atgaccgccagcttgttgccggacgggaatccgggaaggattgaaagcgagtacgcgcttttcgaaaacggtgccgcgttcggccactattggaaagtgacttcaaaggtcgttaacggagaactcgtcgtctcccgaatcagcgaaatgagtccgacaggcgatactccgccaactctttacacattaggcaggtagccatgggcggacgtgcggcgatatatgcccgcttctccagccacaaccagcgtagcgagtcc

SEQ ID NO: 18235 - DNA, 260 bp, Unknown; identical to SEQ ID NO: 15742
  Description of Unknown: LeftRegion for integrase B5236 sequence

SEQ ID NO: 18236 - DNA, 260 bp, Unknown; identical to SEQ ID NO: 13096
  Description of Unknown: LeftRegion for integrase B5237 sequence

SEQ ID NO: 18237 - DNA, 260 bp, Unknown; identical to SEQ ID NO: 16611
  Description of Unknown: LeftRegion for integrase B5238 sequence

SEQ ID NO: 18238 - DNA, 260 bp, Unknown; identical to SEQ ID NO: 17524
  Description of Unknown: LeftRegion for integrase B5239 sequence

SEQ ID NO: 18239 - DNA, 260 bp, Unknown
  Description of Unknown: LeftRegion for integrase B5240 sequence
ttgggctggcactgtagaaatacccgaatcaggagattctttcacatggaattccaaaaatgataaagaaaaaacttctacagctatacttgcttcatctgatgatacaaaagcctttgcttttgatgggaaacaaatcagctttgatgtcagcgcgatggggcagactactactgtaaagatggaaaagcagggctaaaatgaatgccgtcctctacctccgctatagcagcgataagcaaaacgagcaatctatagag

SEQ ID NO: 18240 - DNA, 260 bp, Unknown
  Description of Unknown: LeftRegion for integrase B5241 sequence
ataaaaaccgctcctgcgccaacaggaacggtcgagcgatgaaacatacgccaatatgtttctcattaagttctccgaagagatacccaaatgcaaataatattgtatcatctccggagcagccacgcaagagaacaaaagttctcaggctgttatttttgtaccctttttttcataaaatacaaaggagctgatacattatgtatgtaatttatttaagaaaatccagaaaagattccgacctcgaagcactcggaatt

SEQ ID NO: 18241 - DNA, 260 bp, Unknown
  Description of Unknown: LeftRegion for integrase B5242 sequence
aaaaaccgctcctgcgccaacaggaacggtcgagcgatgaaacatacgccaatatgtttctctattaagtactccgaagagatacccaatttccaaataatattgtatcatctccggagcagccacgcaagagaacaaaagttctcaggctgttatttttgtaccctttttttcataaaatacaaaggagctgatacattatgtatgtaatttatttaagaaaatccagaaaagattccgacctcgaagcactcggaatt

SEQ ID NO: 18242 - DNA, 260 bp, Unknown
  Description of Unknown: LeftRegion for integrase B5243 sequence
aattaaaaccgcccctactccaatagggacggtcgagcgatgaaacatacgccaatatgtttctcattaagttctccgaagagatacccaaatgcaataatattgtatcatctccggagcagccacgcaagagaacaaaagttctcaggctgttatttttgtaccctttttttcataaaatacaaaggagctgatacattatgtatgtaatttatttaagaaaatccagaaaagattccgaccttgaagcactcggaatt

SEQ ID NO: 18243 - DNA, 260 bp, Unknown
  Description of Unknown: LeftRegion for integrase B5244 sequence
cctttctttataaccattaacttttctaatggttaccattagaatttatcatggttttttgtcacctgtgtactggtaatttattctaggttaaaaaattcctaatctagaatagaattcacaatttgttaacataaaacttgtaagaatatagtataatgtaaagcgttatcatttttggcatgaaggagagtgatcaaatggataaatatgccatatacttaagaaaaagtagagctgatctagaggctgagaaatta

SEQ ID NO: 18244 - DNA, 260 bp, Unknown; identical to SEQ ID NO: 13096
  Description of Unknown: LeftRegion for integrase B5245 sequence

SEQ ID NO: 18245 - DNA, 260 bp, Unknown
  Description of Unknown: LeftRegion for integrase B5246 sequence
atgactataatatattataattatatataaagaaataggtcatcttgaacttgaaccgaaaagcgaaaaacgcccgaaactacgtgctttttagcggttcaagatgctttttcatcttgaacccatcttgaaccgtttaccgaaattacgtgttttttcacgcattgtgtttctattgtgttaacaggaggacgaaaaccatgaaacgtgcagtgttctacgggcgctattccagcgaccgccagacagaacaatcaatc

SEQ ID NO: 18246 - DNA, 260 bp, Unknown
  Description of Unknown: LeftRegion for integrase B5247 sequence
gcactgagttccggctgcaaacggttttcgcgggagctttccatagcaggtcctcctttccgggcggccgctttcacagcccgccagcgtgtggtttgcttttcatgctcattatatcgcagtccgttccgttttgcctagacccaacgtttcgacaaatttcgacaatcggctgcgccgacagaaagggggcgatccgcatggcacggaaaaagaagtaccatctgcgcgaggtgcacagcgtctgtatctacgcccgc

SEQ ID NO: 18247 - DNA, 260 bp, Unknown
  Description of Unknown: LeftRegion for integrase B5248 sequence
aattaaaaccgctcctgcgccaacaggaacggtcgagcgatgaaacatacgccaatatgtttctcattaagttctccgaagagatacccaaatgcaataatattgtatcatctccggagcagccacgcaagagaacaaaagttctcaggctgttatttttgtaccctttttttcataaaatacaaaggagctgatacattatgtatgtaatttatttaagaaaatccagaaaagattccgaccttgaagcactcggaatt

SEQ ID NO: 18248 - DNA, 260 bp, Unknown
  Description of Unknown: LeftRegion for integrase B5249 sequence
aattaaaaccgctcctgcgccaacaggaacggtcgagcgatgaaacatacgccaatatgtttctcattaagttctccgaagagatacccaaatgcaataatattgtatcatctccggagcagccacgcaagagaacaaaagttctcaggctgttatttttgtaccctttttttcataaaatacaaaggagctgatacattatgtatgtaatttatttaagaaaatccagaaaagattccgacctcgaagcactcggaatt

SEQ ID NO: 18249 - DNA, 260 bp, Unknown; identical to SEQ ID NO: 18241
  Description of Unknown: LeftRegion for integrase B5250 sequence

SEQ ID NO: 18250 - DNA, 260 bp, Unknown
  Description of Unknown: LeftRegion for integrase B5251 sequence
agagtagcaaacagaaaaaagctgaacagttgattttatccggtcaagatttgcaaattataccggaagacgttttctatgaattagtattggaaaatgtttcagagcattaatataaaccgaagtcagaaaacccaacgtcagaaaacccgatattggggaatctaacatcggttgattttacaaaaggagtgataacaatgccatttgatgattacaaggagagcgttgcgatatatttgcgtaaatcacgaatggat

SEQ ID NO: 18251 - DNA, 260 bp, Unknown
  Description of Unknown: LeftRegion for integrase B5252 sequence
taaaaaccgttcctgcgccaacaggaacggtcgagcgatgaaacatacgccaatatgtttctcattaagttctccgaagagatactcaaactgcaaataatattgtatcatctccggagcagccacgcaagagaacaaaagttctcgggctgttatttttgtacccttttttacataaaatacaaaggagctgatacattatgtatgtaatttatttaagaaaatccagaaaagattccgaccttgaagcactcggaatt

SEQ ID NO: 18252 - DNA, 260 bp, Unknown
  Description of Unknown: LeftRegion for integrase B5253 sequence
gcttcgcaatttggaaaacatctgcaagctaaaatccaagagcaagtgaacagcgaaagcaattcttctcttttacttgaacagatgaacgaattgtttaacaatgtttccaaattgtccgaaactgaacaaaaggctttttataccggacttgtaaaagggatagagcgttgggaaaatgaacagaggggggaataataatgccggaagcattaaacgcggtcatatacgcccgctattcctccgatcgtcagacagaa

SEQ ID NO: 18253 - DNA, 260 bp, Unknown
  Description of Unknown: LeftRegion for integrase B5254 sequence
taatgcgaaccacttacatcaaccagcctccagccatcatcaaggagaatcttttccagctctcggaacttcttcggcatttgttcgccctccttgcctctttattttactacgtattttacgtgttgtcaacatcgaatcgtattatttcatgaaaaaccgttatatgttctctcatgaaggaaatcggaggtgctcccatgtcctacgccatccacctgcgcaagtcccgcgccgatctggaagccgaagcccgcggc

SEQ ID NO: 18254 - DNA, 260 bp, Unknown
  Description of Unknown: LeftRegion for integrase B5255 sequence
acgtgtcaactgcattgtggtgcagtcaacgacacagcttgcccgccgtacagcagacctgctgacaatcctgcaagaattgcagagccttggtataacaactgattttgaaaaagagcgtttctccaccaattctcctacagggaaaaagatgttggacacacttcgcgcaatgagtgcaagcatttaggagaactctcatgccacaagtccaagttatccagccaatccagcaacaaccgaagcgtctgcgcgtggcg

SEQ ID NO: 18255 - DNA, 260 bp, Unknown
  Description of Unknown: LeftRegion for integrase B5256 sequence
taaaaccgctcctgcgccaacaggaacggtcgagcgatgaaacatacgccaatatgtttctctattaagtactccgaagagatacccaatttccaaataatattgtatcatctccggagcagccacgcaagagaacaaaagttctcaggctgttatttttgtaccctttttttcataaaatacaaaggagctgatacattatgtatgtaatttatttaagaaaatccagaaaagattccgaccttgaagcactcggaatt

SEQ ID NO: 18256 - DNA, 260 bp, Unknown
  Description of Unknown: LeftRegion for integrase B5257 sequence
atctgttaggtctgagtgacagcaaaaccccacaaggggataatctcacggaagaagaacgccttttgctggaagcctaccgttcagccagcacccagggacgcttccacatcattcaggtttgcatgaatgaaaaaacagccgcacccaaaggggaggtagttgccgggtgattgacttagcggaatggaggaagaaccatgtatgaggatataaaaacagcctgcctttacgtcagattttccagccataatcagacg

SEQ ID NO: 18257 - DNA, 260 bp, Unknown; identical to SEQ ID NO: 18240
  Description of Unknown: LeftRegion for integrase B5258 sequence

SEQ ID NO: 18258 - DNA, 260 bp, Unknown
  Description of Unknown: LeftRegion for integrase B5259 sequence
atcaaaactgaacaccatcagagagataagtgatgtaacccaactggaatacgctataaaacgtatcatctgactgaaaagtcagcttttattaaggttggtaagaataagatattttacatcgtaaaattctggaaaatttcatcagaaattaaaagttaatggtcttatagagtgtgtacattgaaaatgaggtatatatgaaaaaggccattgcttacatgcgtttctcgtcagtaaatcaggacaagggggattca

SEQ ID NO: 18259 - DNA, 260 bp, Unknown; identical to SEQ ID NO: 18085
  Description of Unknown: LeftRegion for integrase B5260 sequence

SEQ ID NO: 18260 - DNA, 260 bp, Unknown; identical to SEQ ID NO: 17281
  Description of Unknown: LeftRegion for integrase B5261 sequence

SEQ ID NO: 18261 - DNA, 260 bp, Unknown; identical to SEQ ID NO: 18241
  Description of Unknown: LeftRegion for integrase B5262 sequence

SEQ ID NO: 18262 - DNA, 260 bp, Unknown
  Description of Unknown: LeftRegion for integrase B5263 sequence
gcgcaaatcctcgataatatattgacagagcaagcggaaaacgatacttctattgatcccgaacgtgcggaaagtttaagaaatgaactacgtgggataatgtccggttataactctcttaccgacgaagggaaagaatttgtaaaacagtccttaaaaactgcgcttgccgcttattctaaaggcgtggaggaacagtaatgccggaagcattaaacgcggtcatatacgcccgctattcctccgatcgtcagacagaa

SEQ ID NO: 18263 - DNA, 109 bp, Unknown
  Description of Unknown: LeftRegion for integrase B5264 sequence
atactggacacacttcgcgcaatgagtgcaagcatttaggagaactctcatgccacaagtccaagttatccagccaatccagcaacaaccgaagcgtctgcgcgtggcg

SEQ ID NO: 18264 - DNA, 260 bp, Unknown
  Description of Unknown: LeftRegion for integrase B5265 sequence
aagatttgctctgttttgcaaatcaaagaatttgacgttggaattgttaaaagcaaagttgaaaacattctggtttcgccgaatcgtctgacttttcttttcaaagataatacagagaaaaccatttcttgggagaaccattccagaagcgaaagctggacaccggaaatgcgacaggctgccgcagaaaggagcagaaaatgccaaaagtaaccgtcattccgccgagtatcaatcgggcaactcgacaggatatttca

SEQ ID NO: 18265 - DNA, 260 bp, Unknown; identical to SEQ ID NO: 17493
  Description of Unknown: LeftRegion for integrase B5266 sequence

SEQ ID NO: 18266 - DNA, 260 bp, Unknown
  Description of Unknown: LeftRegion for integrase B5267 sequence
atgactataatatattataattatatataaagaaataggttatcttgaacttgaaccgaaaagcgaaaaacgcccgaaactacgtgctttttagcggttcaagatgctttttcatcttgaacccatcttgaaccgtttaccgaaattgcgtgctttttcacgcattgtgtttctattgtgttaacaggaggacaaaaaccatgaaacgtgcagtgttctacggacgctattccagcgaccgccagacagaacaatcaatc

SEQ ID NO: 18267 - DNA, 260 bp, Unknown
  Description of Unknown: LeftRegion for integrase B5268 sequence
atgactataatatattataattatatataaagaaataggtcatcttgaacttgaaccgaaaagcgaaaaacgcccgaaattacgtgctttttagcggttcaagatgctttttcatcttgaacccatcttgaaccgtttaccgaaattgcgtgctttttcacgcattgtgtttctattgtattaacaggaggacaaaaaccatgaaacgtgcagtgttctacgggcgctattccagcgaccgccagacagaacaatcaatc

SEQ ID NO: 18268 - DNA, 260 bp, Unknown; identical to SEQ ID NO: 17260
  Description of Unknown: LeftRegion for integrase B5269 sequence

SEQ ID NO: 18269 - DNA, 260 bp, Unknown; identical to SEQ ID NO: 18250
  Description of Unknown: LeftRegion for integrase B5270 sequence

SEQ ID NO: 18270 - DNA, 260 bp, Unknown
  Description of Unknown: LeftRegion for integrase B5271 sequence
gccaacgggtccatcgccgtggtggagaccgaggactaccgcgcggtcatgcgccgctggtacaagggaagcaccaagctgatgctgtcggcggacagcttcgaggactacgaggacatgattttcggcatggacgacggacccgtgcgcgtgatcggcacggtggtgtggtttcaggccgccgacgagatggagtagccgtgggcgggcgcgcggcgatatacgcccgcttctcgagccacaaccagcgcggcgagtcc

SEQ ID NO: 18271 - DNA, 260 bp, Unknown
  Description of Unknown: LeftRegion for integrase B5272 sequence
gaagataattcattaaaagaaatcaaaaacggagttacaattgaagttgccagaatttttgtattattcgacgattctgacgtaactgttgaaatttctccccttgtttcctttgataaatccgataaaattgaaacggtatactctgtaaaataaagttttccctcttcggaggggatttttctatttacttaaagattatgaatgcagttttatacctccgctatagcagcgataagcaaaatgagcaatctatagag

SEQ ID NO: 18272 - DNA, 260 bp, Unknown; identical to SEQ ID NO: 15606
  Description of Unknown: LeftRegion for integrase B5273 sequence

SEQ ID NO: 18273 - DNA, 260 bp, Unknown
  Description of Unknown: LeftRegion for integrase B5274 sequence
ggacggcagcttaaaacattcctttgaagtaaaaaatagagtaactgctatgatcggaaaatggactgcataccaagccgaaaaacgcctgccgctgctggaactctgtcaagacttgtccgaagatgaattaaccgaagttataaactatatcaaatacgttcaatcaaagcgcgattgaacaggaagggggaataataatgccggaagcattaaacgcggtcatatacgcccgctattcctccgatcgtcagacagaa

SEQ ID NO: 18274 - DNA, 260 bp, Unknown; identical to SEQ ID NO: 17493
  Description of Unknown: LeftRegion for integrase B5275 sequence

SEQ ID NO: 18275 - DNA, 260 bp, Unknown
  Description of Unknown: LeftRegion for integrase B5276 sequence
gcttcgcaatttggaaagcatctgcaagctaaaatccaagagcaagtgaacagcgaaagcaattcttctcttttacttgaacagatgaacgaattgtttaacaatgtttctaaattgtccgaagctgaacaaaaggctttttataccggacttgtgcaagggataaagcgtttggaagatgggcagaagggggaataataatgccggaagcattaaacgcggtcatatacgcccgctattcctccgatcgtcagacagaa

SEQ ID NO: 18276 - DNA, 260 bp, Unknown
  Description of Unknown: LeftRegion for integrase B5277 sequence
attatctattctgtttatctgattcaccatacccgaaagtagagatttccctaacagaagaagagcaattactgcttgacgcattccgttccgctaccccacaaggtagattcaacattattactacctgtatgtgtgagaagcgaaaaggggacaacgaaagtgccgggtgattgattttgtagagtggaggaagaaccatgtatgaggatataaaaacagcctgcctatatgtcagattctcaagccataaccagact

SEQ ID NO: 18277 - DNA, 260 bp, Unknown; identical to SEQ ID NO: 15597
  Description of Unknown: LeftRegion for integrase B5278 sequence

SEQ ID NO: 18278 - DNA, 260 bp, Unknown
  Description of Unknown: LeftRegion for integrase B5279 sequence
gttggcatattatagtctgttcctttcctccggaagcgatgaaacatactccaatatgtttctgttaagttctccgaagagataccttaactccaaacaacattgtatcatcttcggacagccatcgcaagagaacaaaagttctcaggctgttatttttgtaccctttttttcataaaatacaaaggagttgatacattatgtatgtaatttatttaagaaaatccagaaaagattccgacctcgaagcactcggaatt

SEQ ID NO: 18279 - DNA, 260 bp, Unknown
  Description of Unknown: LeftRegion for integrase B5280 sequence
taagaaccgctcctgcgccaacaggaacggtcataggacgaaacatacgccaatatgtttctctcagtactccgaagagatacatcatttttccaatcaatattgtatcatctccggagcagccacgcaagagaacaaaagttctcaggctgttatttttgtaccctttttttcataaaatacaaaggagctgatacattatgtatgtaatttatttaagaaaatccagaaaagattccgaccttgaagcactcggaatt

SEQ ID NO: 18280 - DNA, 260 bp, Unknown
  Description of Unknown: LeftRegion for integrase B5281 sequence
tatgactataatatattataattatatataaagaaataggtcatcttgaacttgaaccgaaaagctaaaaacgcccgaaattacgtgctttttagcggttcaagatgagttttcatcttgaaccatcttgaaccgtttaccgaaattgcgtactttttcacgcattgtgtttctattatgttaacaggaggacgaaaaccatgaaacgtgcagtgttctacgggcgctattccagcgaccgccagacagaacaatcaatc

SEQ ID NO: 18281 - DNA, 260 bp, Unknown
  Description of Unknown: LeftRegion for integrase B5282 sequence
ctttcttaatagccattaactttttctaatagttaccattagaatttatcatgtttttttgtcacctgcgtactggtaatttattctaggttaaaaaattcctaatctagaatagaattcacaatttgttaacataaaacttgtcagaatatagtataatgtaaagcgttatcatttttggcatgaaggagagtgagcaaatggataaatatgccatatacttaagaaaaagtagagctgatctagaggctgagaaatta

SEQ ID NO: 18282 - DNA, 260 bp, Unknown; identical to SEQ ID NO: 17281
  Description of Unknown: LeftRegion for integrase B5283 sequence

SEQ ID NO: 18283 - DNA, 260 bp, Unknown
  Description of Unknown: LeftRegion for integrase B5284 sequence
gcgcattgaggagcgcttccgcgccgcgctggacagcagggacaagcaattcgccgccgagcgcgccgtatacgcccgctggctccgtgtgctggccatcgcctgcgccgcgctggtgctgtttgttatgtccctgctcgtcatcgatatcatcaaccccaacgcgggctgggtccgcacaccctgaagggagggatcacatggcatactgcatctacctgcgcaagtcgcgcgccgacatggaggctgaggcgcgcggc

SEQ ID NO: 18284 - DNA, 260 bp, Unknown
  Description of Unknown: LeftRegion for integrase B5285 sequence
acgtgtcaactgcattgtggtgcagtcaacgacacatcttgcctgccgtacagcagacctgctgacaatcctgcaagaattgcagagccttggtataacaactgattttgaaaaagagcgcttctccaccaattctcctacagggaaaaagatactggacacacttcgcgcaatgagtgcaagcatttaggagaactctcatgccacaagtccaagttatccagccaatccagcaacaaccgaagcgtctgcgcgtggcg

SEQ ID NO: 18285 - DNA, 260 bp, Unknown
  Description of Unknown: LeftRegion for integrase B5286 sequence
tcctttcttaatagccattaactttctaatagttaccattagaatttatcattgttttttgtcacctgtgtactggtaatttattctaggttaaaaaattcctaatctagaatagaattcacaatttgttaacataaaacttgtcagaatatagtataatgtaaagcgttatcatttttggcatgaaggagagtgagcaaatggataaatatgccatatacttaagaaaaagtagagctgatctagaggctgagaaatta

SEQ ID NO: 18286 - DNA, 260 bp, Unknown
  Description of Unknown: LeftRegion for integrase B5287 sequence
ggatatacacaagttacggaaaaattctataccacaaaatcagggaaactgtttgtgcgtctcagaaatagcaatgatgttgaatcgattctcgacactttgaataaagctaataatattgttttcgctgtttctttcgcgctgaccattatttcaattatagcaagtataatttattcttttatgcattgaggggttttatgaaagcagtcatctacgcccggtactcgccgggccccaaccagaaggataagagcgtt

SEQ ID NO: 18287 - DNA, 260 bp, Unknown
  Description of Unknown: LeftRegion for integrase B5288 sequence
taaaaaccgttcctgcgccaacaggaacggtcgagcgatgaaacatacgtcaatatgtttctcattaagttctccgaagagatactcaaactgcaaataatattgtatcatcttcggacagccatcgcaagagaacaaaagttctcaggctgttatttttgtaccctttttttcataaaatacaaaggagctgatacatcatgtatgtaatttatttaagaaaatccagaaaagattccgacctcgaagcactcggaatt

SEQ ID NO: 18288 - DNA, 260 bp, Unknown; identical to SEQ ID NO: 15606
  Description of Unknown: LeftRegion for integrase B5289 sequence

SEQ ID NO: 18289 - DNA, 260 bp, Unknown; identical to SEQ ID NO: 18085
  Description of Unknown: LeftRegion for integrase B5290 sequence

SEQ ID NO: 18290 - DNA, 260 bp, Unknown
  Description of Unknown: LeftRegion for integrase B5291 sequence
tcctttcttaataaccattaactttctaatagttaccattagaatttatcattgttttttgtcacctgtgtactggtaatttattctaggttaaaaaattcctaatctagaatagaattcacaatttgttaacataaaacttgtaagaatatagtataatgtaaagcgttatcatttttggcatgaaggagagtgatcaaatggataaatatgccatatacttaagaaaaagtagagctgatctagaggctgagaaatta

SEQ ID NO: 18291 - DNA, 260 bp, Unknown
  Description of Unknown: LeftRegion for integrase B5292 sequence
atgccgcgctggtatccgctgccgcaaacggaagattgcctagggacatctgccagcgcacgaatgttggttatgcccggaaatgcggcgttttgcgccgagaagtttagtggttctcgtgaatagcttttgacctgcctttcgggtatgttgtatgtgacaaaaagagtgtcacagcgtcaaatccagaggtgaacatcatgccgcaagtccaagtcatccagccgatacagcaacagccgaagcgccttcgcgtggcg

SEQ ID NO: 18292 - DNA, 260 bp, Unknown
  Description of Unknown: LeftRegion for integrase B5293 sequence
gcttcgcaatttggaaaacatctgcaagctaaaatccaagagcaagtgaacagcgaaagcaattcttctcttttgcttgaacagatgaacgaattgtttaacaatgtttctaaattgtccgaaactgaacaaaaggccttttataccggacttgtgaaaggaataaagcgttgggaagatgagcagaagggggagtaacaatgccggaagcattaaacgcggtcatatacgcccgctattcctccgatcgtcagacagaa

SEQ ID NO: 18293 - DNA, 260 bp, Unknown; identical to SEQ ID NO: 18247
  Description of Unknown: LeftRegion for integrase B5294 sequence

SEQ ID NO: 18294 - DNA, 260 bp, Unknown
  Description of Unknown: LeftRegion for integrase B5295 sequence
aatgaagacccgatccttcgatgatctggattctttcgcctccgagttcacctaccaagtatccgggcaggcatatcgtatcatcgacctcatggcacagcggggctatctctccttctctgacgccgggaaactctcggatgagattgaccgaaacttgagcaacgagcatttcttcgtgttctgcgctggagatcggggtgattcggttgagtaaacagagcaatgctgttctgtacggcaggggcgccacgaaagaa

SEQ ID NO: 18295 - DNA, 260 bp, Unknown
  Description of Unknown: LeftRegion for integrase B5296 sequence
aattaaaaccgctcctgcgccaacaggaacggtcgagcgatgaaacatacgccaatatgtttctcattaagttctccgaagagatacccaaatgcaataatattgtatcatctccggagcagccacgcaagagaacaaaagttctcaggctgttatttttgtacccttttttgcataaaatacaaaggagctgatacattatgtatgtaatttatttaagaaaatccagaaaagattccgacctcgaagcactcggaatt

SEQ ID NO: 18296 - DNA, 260 bp, Unknown
  Description of Unknown: LeftRegion for integrase B5297 sequence
aagaactttgctacatcctgcacttttgccatatcaaacacctcctcttcatcgtctccacttgtatcatattctaaaacagcctcaaggtcaagagcagtgaagaaaatgttctcaaaaaatgcaaacttttgttctctttatcttcatggaacttgtaacgccaacgtaatatccgataaaagattggaggaagccccatgtcctacgccatccacctgcgcaagtcccgcgccgatctggaagccgaagcccgcggc

SEQ ID NO: 18297 - DNA, 260 bp, Unknown
  Description of Unknown: LeftRegion for integrase B5298 sequence
gtgcaacttctaatgcattgtacgccataaatgattccccctctctctttagtaaattatagcatatataaactttttagtaaatttatgtaattattttctttaaataaaaagaacatactttcgattttatattgtcaattacttccatatattttaatatagtattatatttacttaattaaaggcggcgataaaatatgaaaacttgtatttacttaagaaaatctcgctcagatgaagaagctgaaaaacaaggt

SEQ ID NO: 18298 - DNA, 260 bp, Unknown
  Description of Unknown: LeftRegion for integrase B5299 sequence
gagaatacgcacgtggctttcgttccgtgcgagggacagaatatcgagattgaaaacgaccggattcggctggtgattacggacgctcgccagattgacttccagagttaccagccccacccggagggcgaatttaccgaggagcagcgcacctgccgtaactggatcttcgccaactacctgttagacgggatgccgctgtgagacgggcagccctctatatccgcgtttccacgctggaacaggcacaagagggctac

SEQ ID NO: 18299 - DNA, 260 bp, Unknown
  Description of Unknown: LeftRegion for integrase B5300 sequence
ttactgggtcttagtgaagtcagaaaaccagaagtcttagttttgtcagaaaaagagaaaatcctcattgacgcataccgtactgctaatgacatgggacagttgaacataatctatgtctgcatggatgaaatgaaaaaaaagcaaaaggagaaggcgtacttgtagggtaattgatttcatagaatggaggaagaaccatgtatgaggatataaaaacagcctgcctatacgttagattctcaagccataaccagact

SEQ ID NO: 18300 - DNA, 260 bp, Unknown; identical to SEQ ID NO: 13412
  Description of Unknown: LeftRegion for integrase B5301 sequence

SEQ ID NO: 18301 - DNA, 260 bp, Unknown; identical to SEQ ID NO: 15606
  Description of Unknown: LeftRegion for integrase B5302 sequence

SEQ ID NO: 18302 - DNA, 260 bp, Unknown; identical to SEQ ID NO: 18252
  Description of Unknown: LeftRegion for integrase B5303 sequence

SEQ ID NO: 18303 - DNA, 260 bp, Unknown
  Description of Unknown: LeftRegion for integrase B5304 sequence
tgcctgttgtcgggttcctgtactttctgtgcgaaccgttggaacttaccagttcaaacccgttggcttccaacagcttcacaatttctcgtggtgtcatcggcatttttgtttcctccgttctgtatttattatacacgtattttacgtatttgtcaatagtaaattacgtatttcacgtataaaaaggggcgttatatatgcgtgcttttatttactgccggttttccagctacaaacagcaggaacttagcattgaa

SEQ ID NO: 18304 - DNA, 260 bp, Unknown; identical to SEQ ID NO: 16395
  Description of Unknown: LeftRegion for integrase B5305 sequence

SEQ ID NO: 18305 - DNA, 260 bp, Unknown
  Description of Unknown: LeftRegion for integrase B5306 sequence
aattaaaaccgctcctgcgtcaacaggaacggtcgagcgatgaaacatacgccaatatgtttctattaagttctccgaagagatacccaattccaaataatattgtatcatctccggagcagccacgcaagagaacaaaagttctcaggctgttatttttgtacccttttttacataaaatacaaaggagctgatgcattatgtatgtaatttatttaagaaaatccagaaaagattccgaccttgaagcactcggaatt

SEQ ID NO: 18306 - DNA, 260 bp, Unknown
  Description of Unknown: LeftRegion for integrase B5307 sequence
tgctataagatagataattatattatttattttcagcctaactttggtatattaaaaatgctttaaatctattacttaataataaaaacttacaaaattgaatatacttataatattactctatccagttgatttttagttgcaactggcttattttaaaaactaaaaaaaacatacattctttaaagggaggttattttatgaaaatagcaatatatagcagaaaatcaaaagaaactgatacaggtgaatctattaaa

SEQ ID NO: 18307 - DNA, 260 bp, Unknown
  Description of Unknown: LeftRegion for integrase B5308 sequence
ggacggcagcttaaaacattcctttgaagtaaaaaatagagtaactgctattatcggaaaatggacggcgtaccaagctgaaaaacgcctgccgctgctggaactctgtcaagacttgtccgaagatgaattaaccgaagttataaactatatcaaatacgttcaatcaaagcgcgattgaacaggaagggggaataataatgccggaagcattaaatgcggtcatatacgcccgctattcctccgatcgtcagacagaa

SEQ ID NO: 18308 - DNA, 260 bp, Unknown
  Description of Unknown: LeftRegion for integrase B5309 sequence
cgactacacgcaggtcgcactgccggaggaactgcttacctcctttgccaaggccatgctcccggagctgcgtaagttttacgccagcgacgagggcaggacctattttgcaaagtggcttctgaagcacccggaatatgcggcacattcgacaccggagagtggatgactataataaaaatcggagaggaggattctgtatgaatgtagtcatttacgcccgcttttccagccacagccagacggagcagtccattgaa

SEQ ID NO: 18309 - DNA, 154 bp, Unknown
  Description of Unknown: LeftRegion for integrase B5310 sequence
agcttggcgttaccggccactccgccctgaatatgtggtccggtattgtcttcagtataatgggttcctaaacacatcattttaggtattgaatatgagacgggcaatcagctacatcagattttcaagtgaacgacaactaaaaggggactct

SEQ ID NO: 18310 - DNA, 260 bp, Unknown
  Description of Unknown: LeftRegion for integrase B5311 sequence
taatacattttcatttatattataacaaatttatttgtcataatttgtaaaaacttgccatttaagttttttattatttaatatatattacctagtaaaatttaataatgtaagaacatattttcgattcagtattgtaagtaattaccatatattttaatatagtattatatttacttagttaaaggcggcgataaaatatgaaaacttgtatttacttaagaaagtcacgttcagatgaagaagctgaaaaacaaggc

SEQ ID NO: 18311 - DNA, 260 bp, Unknown
  Description of Unknown: LeftRegion for integrase B5312 sequence
tatgccgcgctggtatccgctgccgcaaacggaagattgcctagggacatctgccagcgcacaaatgttggttatgcccggaaatgcggcgttttgcgccgagaagtttagtggttctcgtgaatagcttttgacctgcctttcgggtatgttgtatgtgataaaaagaatgtcacagcgtcaaactcggaggaaatagtatgccgcaagtccaagttatccagccgatacagcaacagccgaagcgtctgcgtgtggca

SEQ ID NO: 18312 - DNA, 260 bp, Unknown
  Description of Unknown: LeftRegion for integrase B5313 sequence
ggtaaagaagaaaaagtcgtatcatttacattagataataaaactatccaaggcataaaagatggtaacatagttgctaatgagatagtaaatacatatgcaaatgatgtatatatacaccaaagtttaaaataataaataatatagataaacatcagggcagttttaccagctgctctttttaattaggaggaaataagatgtatgcaatgtatttaaggaaaagccgtgctgatgataaggatattccattagaaaag

SEQ ID NO: 18313 - DNA, 260 bp, Unknown
  Description of Unknown: LeftRegion for integrase B5314 sequence
atggtctggtggcgctggttcgcgctggcggaagcggcgtttatcctcggcatcctgatctgggatattttccacccgaccgccggttatatccggtataccacttcaatgattccggatctttatgggctgatcaggcaccttcagttataatcgacgacttcccccgcttcggcggggtttttgataggagggctatcatgatctgtgcaatgtatctgcgcaaatcgcgcgccgatctgaccgcggaagcgcgcggc

SEQ ID NO: 18314 - DNA, 260 bp, Unknown
  Description of Unknown: LeftRegion for integrase B5315 sequence
tcgttttatgctttttgttaatgtctttagtttttattcattcttttgtgctttcaaggttatggtgtaagaaaattgcaatacgattattgttgtatattcaagataatgtgaccttaattgtctttttaaataaaaattaaacaaaaatcatatctcaccactaaggtttataaaagcatactttagcaggtgtcaccatgaaaaaagccatagcatatatgcgattttcatcaccaggtcagatgtctggtgattca

SEQ ID NO: 18315 - DNA, 260 bp, Unknown
  Description of Unknown: LeftRegion for integrase B5316 sequence
tcgttttatgctttttgttaatgtctttattttttatgtattcttttgtgctttcaagattatggcgtaagaaaattgcaatacgattattgttgtatattcaagataatgtgaccttaattgtctttttaaataaaaattaaacaaaaattatatcccaccactaaggtttataaaagcatacgttagcaggtgtcaccatgaaaaaagccatagcatatatgcgattttcatcaccaggtcagatgtctggcgactca

SEQ ID NO: 18316 - DNA, 260 bp, Unknown
  Description of Unknown: LeftRegion for integrase B5317 sequence
tcgttttatgctttttgttaatgtctttatttttttatgtattcttttgtgctttcaagattatggcgtaagaaaattgcaatacgattattgttgtatattcaagataatgtgaccttaattgtctttttaaataaaaattaaacaaaattatatcccaccactaaggtttataaaagcatacgttagcaggtgtcaccatgaaaaaagccatagcatatatgcgattttcatcaccaggtcagatgtctggcgactca

SEQ ID NO: 18317 - DNA, 260 bp, Unknown
  Description of Unknown: LeftRegion for integrase B5318 sequence
tcgttttatgctttttgttaatgtctttattttttatgtattcttttgtgctttcaagattatggcgtaagaaaattgcaatacgattattgttgtatattcaagataatgtgaccttaattgtctttttaaataaaaattaaacaaaaattatatcccaccactaaggtttataaaagcatacgttagcaggtgtcaccatgaaaaaagccatagcatatatgcgattttcatcaccaggtcagatgtctggtgactca

SEQ ID NO: 18318 - DNA, 260 bp, Unknown
  Description of Unknown: LeftRegion for integrase B5319 sequence
tcgttttatgcttcttgttaatgtctttattttttatgtattcttttgtgctttcaagattatggcgtaagaaaattgcaatacgattattgttgtatattcaagataatgtgaccttaattgtctttttaaataaaaaataaacaaaaattatatcccaccactaaggtttataaaagcatacgttagcaggtgtcaccatgaaaaaagccatagcatatatgcgattttcatcaccaggtcagatgtctggcgactca

SEQ ID NO: 18319 - DNA, 260 bp, Unknown
  Description of Unknown: LeftRegion for integrase B5320 sequence
cgttttatgctttttgttaatgtctttatttttttatgtgttcttttgtgctttcaagattatggcgtaagaaaattgcaatacgattattgttgtatattcaagataatgtgaccttaattgtctttttaaataaaaattaaacaaaaattatatcccaccactaaggtttataaaagcatacgttagcaggtgtcaccatgaaaaaagccatagcatatatgcgattttcatcaccaggtcagatgtctggtgactca

SEQ ID NO: 18320 - DNA, 260 bp, Unknown
  Description of Unknown: LeftRegion for integrase B5321 sequence
aatgctggatataattattcagaaattcaggccagagtaaacaaacttttatcatagtatatgggctcagagggacattcccttctgggcctttatatttttaccttgtgattgattttagcaaatacaagggtagattggactggctaatatgcagattgtatggtaacatgtgacactaccaggaaaggagaaaagccatgagtgtacaggttattaagagcaaaaatacaagaaaaggacgcatccgagttgcagct

SEQ ID NO: 18321 - DNA, 260 bp, Unknown
  Description of Unknown: LeftRegion for integrase B5322 sequence
cgttttatgctttttgttaatgtctttatttttttatgtattcttttgtgctttcaagattatggcgtaagaaaattgcaatacgattattgttgtatattcaagataatgtgaccttaattgtctttttaaataaaaattaaacaaaaattatatcccaccactaaggtttataaaagcatacgttagcaggtgtcaccatgaaaaaagccatagcatatatgcgattttcatcaccaggtcagatgtctggcgactca

SEQ ID NO: 18322 - DNA, 260 bp, Unknown
  Description of Unknown: LeftRegion for integrase B5323 sequence
gaagaacataaatagtaaaagaccgctcagtgttaccagcactgaacggcctcttacatagattttctcctgccagtcttctggccagatataatccaacttatgcacctgaattatatcatctccaggacgtctgcgcaaggggcgtcttttttgtacccatttttcataaaataaagcaaataccaggagatgataacatgaaaaaagaagaagacactgtaaaaacagctgcgctctacatccgcgtcagcaccgat

SEQ ID NO: 18323 - DNA, 260 bp, Unknown
  Description of Unknown: LeftRegion for integrase B5324 sequence
tcgttttatgctttttgttaatgtctttagtttttattcattcttttgtgctttcaagattatggtgtaagaaaattgcaatacgattattgttgtatattcaagataatgtgaccttaattgtctttttaaataaaaattaaacaaaaatcatatctcaccactaaggtttataaaagcatactttagcaggtgtcaccatgaaaaaagccatagcatatatgcgattttcatcaccaggtcagatgtctggtgattca

SEQ ID NO: 18324 - DNA, 260 bp, Unknown; identical to SEQ ID NO: 18318
  Description of Unknown: LeftRegion for integrase B5325 sequence

SEQ ID NO: 18325 - DNA, 260 bp, Unknown
  Description of Unknown: LeftRegion for integrase B5326 sequence
catatataaaggttcaaaaaaagaaataaaagaattagaagtaaatgatgaattaaccaataatgaattagaagaaatcgcaaaggatgaatttctaagtgaatgtagttatgaatggaaaatttataaaaaataatggttaatttctagaaaaaggtaatagattaaatgctattaccttttttagtggaggaaaatatatgaataatgtaatagtttatgctagagtatccacattaatccaagcagaacaaggatat

SEQ ID NO: 18326 - DNA, 260 bp, Unknown
  Description of Unknown: LeftRegion for integrase B5327 sequence
gaactatatagaaaataaaaataactatagaagtcaaaacacatcaagtgatgcagatgaattaatgaaattcaaaaaacttctagatatgggtgctataactgaagaagaatatgaaaataaaaaagaacaaatattaaaattatagataaacatcagggcagttttaccagctgctctttttttaaggaggaaataagatgtatgcaatgtatttgagaaaatcaagggctgatgataaggatattccattagaaaag

SEQ ID NO: 18327 - DNA, 260 bp, Unknown; identical to SEQ ID NO: 18312
  Description of Unknown: LeftRegion for integrase B5328 sequence

SEQ ID NO: 18328 - DNA, 260 bp, Unknown
  Description of Unknown: LeftRegion for integrase B5329 sequence
aaaaatgtattaaaccttgaacaatttggtagagatatcactattaaatcttttgataattttgccaacaaaatagataaaactatttattaataaaaaagaaatcgaagtaaatgatgaattaaccaataaatggttaatttctacaaaacaaaggtaataggttaaatactattaccttttttagtggaggaaaatatatgtataatgtaataatttatgctagagtatccacattaattcaggcagaacaaggatat

SEQ ID NO: 18329 - DNA, 260 bp, Unknown
  Description of Unknown: LeftRegion for integrase B5330 sequence
atataataatttaggggatggctataagaatgctccagatttacaaacagctgactatttttcaggaagtaaattaataacattaaaagaagggcaatatttgaaattagatagtaatacaaaagttataaaatagaaataatatagataaacatcagggcagttttaccagctgctctttttaattaggaggaaataagatgtatgcaatgtatttaaggaaaagccgtgctgatgataaggatattccattagaaaag

SEQ ID NO: 18330 - DNA, 260 bp, Unknown
  Description of Unknown: LeftRegion for integrase B5331 sequence
cgttttatgctttttgttaatgtctttatttttttatgtgttcttttgtgctttcaagattatggcgtaagaaaattgcaatacgattattgttgtatattcaagataatgtgaccttaattgtttttttaaataaaaattaaacaaaaattatatcccaccactaaggtttataaaagcatacgttagcaggtgtcaccatgaaaaaagccatagcatatatgcgattttcatcaccaggtcagatgtctggtgactca

SEQ ID NO: 18331 - DNA, 260 bp, Unknown; identical to SEQ ID NO: 18329
  Description of Unknown: LeftRegion for integrase B5332 sequence

SEQ ID NO: 18332 - DNA, 260 bp, Unknown
  Description of Unknown: LeftRegion for integrase B5333 sequence
gaagaacataaatagtaaaagaccgctcagtgttaccagcactgaacggcctcttacatagattttctcctgccagtcttctggccagatataatccaacttatgcacctgaattatatcatctccagggcgtctgcgcaaggggcgtcttttttgtacccatttttcataaaataaagcaaataccaggagatgataacatgaaaaaagaagaagacactgtaaaaacagctgcgctctacatccgcgtcagcaccgat

SEQ ID NO: 18333 - DNA, 260 bp, Unknown; identical to SEQ ID NO: 18321
  Description of Unknown: LeftRegion for integrase B5334 sequence

SEQ ID NO: 18334 - DNA, 260 bp, Unknown; identical to SEQ ID NO: 18329
  Description of Unknown: LeftRegion for integrase B5335 sequence

SEQ ID NO: 18335 - DNA, 260 bp, Unknown; identical to SEQ ID NO: 18323
  Description of Unknown: LeftRegion for integrase B5336 sequence

SEQ ID NO: 18336 - DNA, 260 bp, Unknown
  Description of Unknown: LeftRegion for integrase B5337 sequence
gaactatatagaaaataaaaataactatagaagtcaaaatacatcaagtgatgcagatgaattaatgaaattcaaaaaacttctagatatgggtgctataactgaagaagaatatgaaaataaaaaagaacaaatattaaaattatagataaacatcagggcagttttaccagctgctctttttttaaggaggaaataagatgtatgcaatgtatttgagaaaatcaagggctgatgataaggatattccactggaaaag

SEQ ID NO: 18337 - DNA, 260 bp, Unknown
  Description of Unknown: LeftRegion for integrase B5338 sequence
tacatgggccgcttttgttaatgtttttagtttttgtgtattcttttgtgccttcaagattattgcgtaagcaaattgcaatacgattattgttgtatattcaaaagaatgtgatcgtaattgtctttttaaataaaaattaaacaaaaattatatctcaccactaaggtttataaaagcatacgttagcaggtgtcaccatgaaaaaagccatagcatatatgcgattttcatcaccaggtcagatgtctggcgactca

SEQ ID NO: 18338 - DNA, 260 bp, Unknown
  Description of Unknown: LeftRegion for integrase B5339 sequence
catggtctggtggcgctggttcgcgctggcggaagcggcgtttatcctcggtatcctgatctgggatattttccacccgaccgccggttatatccggtacaccacttcaatggttccagatctttatgggctgatcaggcaccttcagttataatcgacgacttccccgcttcggcggggtttttgataggagggctatcatgatttgtgcaatgtatctgcgcaaatcgcgcgccgatctgaccgcagaagcgcgcggc

SEQ ID NO: 18339 - DNA, 260 bp, Unknown
  Description of Unknown: LeftRegion for integrase B5340 sequence
cgttttatgctttttgttaatgtctttatttttttatgtattcttttgtgctttcaagattatggcgtaagaaaattgcaatacgattattgttgtatattcaagataatgtgaccttaattgtctttttaaataaaaattaaacaaaaattatatctcaccactaaggtttataaaagcatacgttagcaggtgtcaccatgaaaaaagccatagcatatatgcgattttcatcaccaggtcagatgtctggcgactca

SEQ ID NO: 18340 - DNA, 260 bp, Unknown
  Description of Unknown: LeftRegion for integrase B5341 sequence
tcagaaatttttattgatacaactaaaattaaattttaaataaaaaaccgtctcctgagaattaagacggtttaccctttcctttaaagaaaggaaaaaaatgacttgtaaaaggaaaatatattcaaaaaccttttacgtgcttaattttatcataaatggcacgtttaaggcaatatcatagaaaggatgtgctatttatgtatggaatgtatttaagaaaatcaagagctgatgatccaaatgaaacaatggatgaa

SEQ ID NO: 18341 - DNA, 260 bp, Unknown
  Description of Unknown: LeftRegion for integrase B5342 sequence
agaaattgccgtgctttgcaatgtgtccatgcaggcggcagaaattcgctccagaaggatgcaaatcttgcttgcaagaaataaatttttaacgcatccgctggaacggcaggtgtttgaacagtttcaacagtttatcaacaatcagtgaaaaagccgccctgcaaggaattgtggggcggtacaattaaggagcgattatgaaaagagcagtgttttatggtcgttattccagcgaccgacagaccgagcagagcatt

SEQ ID NO: 18342 - DNA, 260 bp, Unknown
  Description of Unknown: LeftRegion for integrase B5343 sequence
aaaattgatcacaaaatgcaaaaccgcccggtgctaccaacaccgaacggctttacatagattttctcttgccagtctcccggccagatataaatcagacttgaacacctgaattatatcatctccagaacttctgcgcaaggggcgtcttttttgtacccatttttcataaaataaagcaaataccaggagatgataacatgaaaaaagaagaagacactgtaaaaacagctgcgctctacatccgcgtcagcaccgat

SEQ ID NO: 18343 - DNA, 260 bp, Unknown
  Description of Unknown: LeftRegion for integrase B5344 sequence
aatagataaaactatttattaataaaaaagaaatcgaagtaaatgataaattaaccaataacaagttagaagaagttgcacgagatgaatttttaagtgaatataattatgcatgggaattttataaaaataatggttaatttctgcaaaacaaaggtaataggttaaatactattaccttttttagtggaggaaaatatatgaataatgtaataatttatgctagagtatccacattaattcaggcagaacaaggatat

SEQ ID NO: 18344 - DNA, 260 bp, Unknown
  Description of Unknown: LeftRegion for integrase B5345 sequence
atcgtaacgagttagatggggataaagataaaactgcggcagtctaaggtcattccgatagaattgctcagacgtaagaagctattggaggtgagattacgaaagcagtaatttatgctcgatattcgagccacagtcaaagagaggagtctatagagggtcagcttcgtgagtgtcatgagttcgctcttaaaaacggaatgacggtcataaatgaatactgtgaccgagcaatttccggcaagacagataatcgtccg

SEQ ID NO: 18345 - DNA, 260 bp, Unknown
  Description of Unknown: LeftRegion for integrase B5346 sequence
gggatagaattgttatgatttattatcgggttaatcataggcggtacagtcggcgtatttgcaatggctttgtgcatagccgcaggacaagccgacaaacgtgaaaactgcacagattcggataagtaattttatcaagtatagtgataccattccataaagatttgtggtatcattgttggtaaaacggaggtgagaatatgccaactgtaactgtgatacagccgaccatagcagcagaacaaaacacaaagatccgt

SEQ ID NO: 18346 - DNA, 260 bp, Unknown
  Description of Unknown: LeftRegion for integrase B5347 sequence
tacatgggccgcttttgttaatgtttttagtttttgtgtattcttttgtgccttcaagattattgcgtaagcaaattgcaatacgattattgttgtatattcaagatagtgtgatcgtaattgtctttttaaataaaaattaaacaaaaattatatctcaccactaaggtttataaaagcatacgttagcaggtgtcaccatgaaaaaagccatagcatatatgcgattttcatcaccaggtcagatgtctggcgactca

SEQ ID NO: 18347 - DNA, 260 bp, Unknown
  Description of Unknown: LeftRegion for integrase B5348 sequence
gaggatcgcaagctgaatatggtcaaccagcgccgcgaattcttcaacgtcaccctcgacgagatcaaagaggtcgtgcgcagccattacgacaaatcggttgaatttatcgatgttccgcaagccgaacagtatagaaccagtttgaagatgaaagaggcgacgacctgaaccgtttttattatgtgtgaggaaagaatatgaaaccgttatcgagaccgtccggtttacccccaaaagcggttatatatgcgcgcttt

SEQ ID NO: 18348 - DNA, 260 bp, Unknown
  Description of Unknown: LeftRegion for integrase B5349 sequence
gcaaagaagaaaaagttgtatcatttacattgaatagcaaaactatacaaggaataaaaaatggaaatatagttgctaatgaaatagtaaatacatatgcagatgatgtatatatacatcagagtttaaaaaaataataaataatatagataaacatcagggcagttttaccagctgctcttttttaaggaggaaataagatgtatgcaatgtatttaaggaaaagccgtgctgatgataaggatattccattagaaaag

SEQ ID NO: 18349 - DNA, 260 bp, Unknown
  Description of Unknown: LeftRegion for integrase B5350 sequence
tcattaaaatttcaaactatttcggtataactcttgaagaacttgtcaacggtacggcttcagagggtttcgtctttgatactaacgaattcaaaaactatgagctttacgcaatatataactttgcacagtttttgaaatacaacagaggtgatctggctaaggtgtttacggttccagacactaaatggagataaaaaatgagagtagctatgtatcttagaaagtccagacaagacgaagaattgataaacgcaacg

SEQ ID NO: 18350 - DNA, 260 bp, Unknown; identical to SEQ ID NO: 18315
  Description of Unknown: LeftRegion for integrase B5351 sequence

SEQ ID NO: 18351 - DNA, 260 bp, Unknown
  Description of Unknown: LeftRegion for integrase B5352 sequence
gaactatatagaaaataaaaataactatagaagtcaaaatacatcaagtgatgcagatgaattaatgaaattcaaaaaacttctagatatgggtgctataactgaagaagaatatgaaaataaaaaagaacaaatattaaaattatagataaacatcagggcagttttaccagctgctctttttttaaggaggaaataagatgtatgcaatgtatttgagaaaatcaagggctgatgacaaggatattccattagaaaag

SEQ ID NO: 18352 - DNA, 260 bp, Unknown
  Description of Unknown: LeftRegion for integrase B5353 sequence
tcgttttatgctttttgttaatgtctttagtttttattcattcttttgtgctttcaagattatggtgtaagaaaattgcaatgcgattattgttgtatattcaagataatgtgaccttaattgtctttttaaataaaaattaaacaaaaatcatatctcaccactaaggtttataaaagcatactttagcaggtgtcaccatgaaaaaagccatagcatatatgcgattttcatcaccaggtcagatgtctggtgattca

SEQ ID NO: 18353 - DNA, 260 bp, Unknown; identical to SEQ ID NO: 16741
  Description of Unknown: LeftRegion for integrase B5354 sequence

SEQ ID NO: 18354 - DNA, 260 bp, Unknown
  Description of Unknown: LeftRegion for integrase B5355 sequence
atcgtcatgtggttaggagctgttggtatgataattgagggcgcgggcagcgagaagttattttctctctggataatttttctactggcctgcttcaacgtacctgacctgatccggctgaaactgggcaagttccgggataacgtgggcgattatctgcggcaataaaaaagcccgcacactggcgggcgggtgatggtatgaaaaaagagaacgaaattcgggcagttgtctacgcccggtactcatcccattcgcaa

SEQ ID NO: 18355 - DNA, 260 bp, Unknown
  Description of Unknown: LeftRegion for integrase B5356 sequence
agaactatatagaaaataaaaataactatagaagtcaaaatatatcaagtgatgcagatgaattaatgaaattcaaaaaacttctagatatgggcgctataactgaagaagaatatgaaaataaaaaagaacaaatattaaaattatagataaacatcagggcagttttaccagctgctcttttttaaggaggaaataagatgtatgcaatgtatttaaggaaaagccgtgctgatgataaggatattccattagaaaag

SEQ ID NO: 18356 - DNA, 260 bp, Unknown
  Description of Unknown: LeftRegion for integrase B5357 sequence
acttactgggtcttagtgaagtcagaaagccagaagtcttagttttgtcagaaaaagagaaaatcctcattgacgcataccgtactgctaatgacatgggacagttgaacataatttatgtctgcatggacgaaatgaaaaaagcaaaaggagaaggcgtacttgtagggtaattgatttcatagaatggaggaagaaccatgtatgaggatataaaaacagcctgcctatacgttagattctcaagccataaccagact

SEQ ID NO: 18357 - DNA, 260 bp, Unknown
  Description of Unknown: LeftRegion for integrase B5358 sequence
tggaattatattcctattgttcaccttgcatagattgtgaatttttagataataatggaaattgtttgtatggcaaaaaatgttttacaaacaaataaagcaaaagtataatgttattaaatactttataaatttgaatttaaagaagatgttttacacaaatacatcttctttaaacatatatgaaaggggtaatttagttgaaaaatatagctatatactctagaaaatctagggaaaccgataagggagaatctata

SEQ ID NO: 18358 - DNA, 260 bp, Unknown; identical to SEQ ID NO: 18323
  Description of Unknown: LeftRegion for integrase B5359 sequence

SEQ ID NO: 18359 - DNA, 260 bp, Unknown
  Description of Unknown: LeftRegion for integrase B5360 sequence
ttatataataatttaggtggaggttataaaggtggtccagacttacaggattcagattatttttcaggaagtaaattaataacattaaaagaagggcaatatttgaaattagatagtaatacaaaagttataaaatagaaataatatagataaacatcagggcagttttaccagctgctcttttttaaggaggaaataagatgtatgcaatgtatttaaggaaaagccgtgctgatgataaggatattccattagaaaag

SEQ ID NO: 18360 - DNA, 260 bp, Unknown
  Description of Unknown: LeftRegion for integrase B5361 sequence
tatataataatttaggtgaaggttacaaaggtggtccagatttgcatgattcagattatttttcaggaagtaaattaataacattaaaagaaggtcaatatttgaaattagacagtaatacaaaaattataaaatagaaataataatagataaacatcagggcagttttactagctgctctttttttaggaggaaataagatgtatgcaatgtatttaagaaaatccagggctgatgacaaggatattccactagaaaaa

SEQ ID NO: 18361 - DNA, 260 bp, Unknown
  Description of Unknown: LeftRegion for integrase B5362 sequence
tcgttttatgctttttgttaatgtctttagtttttattcattcttttgtgctttcaagattatggtgtaagaaaattgcaatacgattattgttgtatattcaagataatgtgaccttaattgtctttttaaataaaaattaaacaaaaatcatatctcaccactaaggtttataaaagcatactttagcaggtgtcaccatgaaaaaagccatagcatatatgcgattttcatcaccaagtcagatgtctggtgattca

SEQ ID NO: 18362 - DNA, 260 bp, Unknown
  Description of Unknown: LeftRegion for integrase B5363 sequence
gatttactgaattaaatagtaaaagaccgctcctgcgccaacaggaacggcctcttacatagattttctcctgccagtctcccggcacgatataatcagcttagacacctgaattatatcatctccaggacgtctgcgcaaggggcgtcttttttgtacccatttttcataaaataaagcaaataccaggagatgatagcatgaaaaaagaagaagacactgtaaaaacagctgcgctctacatccgcgtcagcactgat

SEQ ID NO: 18363 - DNA, 260 bp, Unknown; identical to SEQ ID NO: 18317
  Description of Unknown: LeftRegion for integrase B5364 sequence

SEQ ID NO: 18364 - DNA, 260 bp, Unknown
  Description of Unknown: LeftRegion for integrase B5365 sequence
gaagaacataaatagtaaaagaccgctcagtgttaccagcactgaacggcctcttacatagattttctcctgccagtcttctggccagatataatccaacttatgcacctgaattatatcatctccaggacgtctgcgcaaggggcgtcttttttgtacccatttttcataaaataaagcaaataccaggagatgataacatgaaaaaagaagaagacactgtaaaaacagctgcactctacatccgcgtcagcaccgat

SEQ ID NO: 18365 - DNA, 260 bp, Unknown; identical to SEQ ID NO: 16611
  Description of Unknown: LeftRegion for integrase B5366 sequence

SEQ ID NO: 18366 - DNA, 260 bp, Unknown
  Description of Unknown: LeftRegion for integrase B5367 sequence
catggtctggtggcgctggttcgcactggcggaagcggcgtttatcctcggcatcctgatctgggatattttccaccctaccgccggttatatccggtataccacttcaatgattccggatctttatgggctgatcaggcaccttcagttataatcgacgacttccccgcttcggcggggtttttgataggaggtctatcatgatctgtgcaatgtatctgcgcaaatcgcgtgccgatctgaccgcggaagcgcgcggc

SEQ ID NO: 18367 - DNA, 260 bp, Unknown; identical to SEQ ID NO: 16673
  Description of Unknown: LeftRegion for integrase B5368 sequence

SEQ ID NO: 18368 - DNA, 260 bp, Unknown
  Description of Unknown: LeftRegion for integrase B5369 sequence
atataataatttagggggtggctataagaatgctccagatttacaaacagctgactatttttcaggaagcaaactaataacattaaaagaagggcaatatttaaaattagatagcaatacaaaagttataaaatagaaataataatagataaacatcagggcagttttaccagctgctctttttttaaggaggaaataagatgtatgcaatgtatttgagaaaatcaagggctgatgacaaggatattccagtagaaaag

SEQ ID NO: 18369 - DNA, 260 bp, Unknown; identical to SEQ ID NO: 18315
  Description of Unknown: LeftRegion for integrase B5370 sequence

SEQ ID NO: 18370 - DNA, 260 bp, Unknown; identical to SEQ ID NO: 18317
  Description of Unknown: LeftRegion for integrase B5371 sequence

SEQ ID NO: 18371 - DNA, 260 bp, Unknown
  Description of Unknown: LeftRegion for integrase B5372 sequence
catagtctggtggcgctggtttgcgctggcggaagcggcgtttatcctcggcatcctgatctgggatattttccaccctaccgccggttatatccggtataccacttcaatggttccagatctttatgggctgatcaggcaccttcagttataattgacgacttccccgcttcggcggggtttttgatgggaggtctatcatgatctgtgcaatgtatctgcgcaaatcgcgtgccgatctgaccgcggaagcgcgcggc

SEQ ID NO: 18372 - DNA, 260 bp, Unknown; identical to SEQ ID NO: 18317
  Description of Unknown: LeftRegion for integrase B5373 sequence

SEQ ID NO: 18373 - DNA, 260 bp, Unknown
  Description of Unknown: LeftRegion for integrase B5374 sequence
taatatcagtgtaaatatgttaattggcatgaattttaaagcacgtgaaaacgaatctcactttgttagcatgatgcgcattttaaaacgaactaagcaatggaatgaagttgtaggtgaaacacaattcagtgatgcagaaatgaacgaattaatgaactacgctaaatatttaatcagtaaaagaaaggtagaataacatggaagaaatattgatataccttagaaaatcaagacaagatgaaccaagcgaaacaata

SEQ ID NO: 18374 - DNA, 260 bp, Unknown
  Description of Unknown: LeftRegion for integrase B5375 sequence
aatagataaaactatttattaataaaaaagaaatcgaagtaaatgataaattaaccaataacaagttagaaaaagttgcacgagatgaatttttaagtgaatataattatgcatgggaattttataaaaataatggttaatttctgcaaaacaaaggtaataggttaaatactattaccttttttagtggaggaaaatatatgaataatgtaataatttatgctagagtatccacattaattcaggcagaacaaggatat

SEQ ID NO: 18375 - DNA, 260 bp, Unknown
  Description of Unknown: LeftRegion for integrase B5376 sequence
tataacaatttaggcaaaggctacaaaggtggtccagacttacaagattcagatttcttttctggaagcaaattaataacattaaaagaaggtcaatatttgaaattagacagtaatacaaaaattataaaatagaaataataatagataaacatcagggcagttttaccagctgctcttttttttaaggaggaaataagatgtatgcaatgtatttgagaaaatcaagggctgatgacaaggatattccactggaaaag

SEQ ID NO: 18376 - DNA, 260 bp, Unknown
  Description of Unknown: LeftRegion for integrase B5377 sequence
ttaggaggttttgatatgataggatttgtaattggactgcttgtaggcggtacagcaggagtattcacaatgtgtctctgcacaacggcaaagcaggcagatgaaaatatgtcaaattcggacaagtaattttgtccggtttggtaataccattctgaaaagatttgtggtattcttgttggtaaaacggaggtgagaaaatgccgacagtaacggttatacagccgacaatagcagaagaaaaagcagtcaagaaacgt

SEQ ID NO: 18377 - DNA, 260 bp, Unknown
  Description of Unknown: LeftRegion for integrase B5378 sequence
gattgcaccgtttttatgttggaaaatggggcacaggattcttgtacctcatcacttttggattctttttcattggcgccattatagactttattcatattttgcggggcactttcaaggataaaaatgggataccgctgattgaatggtagtatattttaacagaatcagcctattttcgttaaatagggggtgatagtttgagttcagttgaaacaaccgccgttgtttacgcacggtattcatctcacggccagacc

SEQ ID NO: 18378 - DNA, 260 bp, Unknown
  Description of Unknown: LeftRegion for integrase B5379 sequence
taattacattaattaaaaaaattcttaataataattaaaaaagacctcatgctggaacatgaggccgaaatgcaaaaaacaaataaagtccactacgacacgaatgtagaatacctacaaacgaaatgtttttttgctatttaattatagcatgaaaaatatctcgtatcaataatatttagagaggaagtgctataattatgagaaaaaaagtagcctatttaagaaaatcccgtgctgatatagaattggaaaataca

SEQ ID NO: 18379 - DNA, 260 bp, Unknown
  Description of Unknown: LeftRegion for integrase B5380 sequence
tatatattaatatatatttatattaattgacttatagattttaaatttcataagtaaattaataaagaagttaaaattacatatgtaacctatgtaacctatgataactaattgatttttatagcgttttttagcgtttttggtgacgtaggttaaaaaataacctgtgtcacctatgtaacgtagaaaggaatgaggaaatgaaagaatgtattgagtatttgagaaagtcacagtttgaccgtgattttgccgatttg

SEQ ID NO: 18380 - DNA, 260 bp, Unknown
  Description of Unknown: LeftRegion for integrase B5381 sequence
accgaaaatattaaataatacaaaaataaaattataaaaaaagacctcatgctggaacatgaggccaaaatgcaaaaaacaaataaagtccactacgacacgaatgtagaatgcctacaaacgaaatgtttttttgctatttaattatagcatgaaaaatatctcgtatcaataatatttagagaggaagtgctataattatgagaaaaaaagtagcctatttaagaaaatcccgtgctgatatagaattggaaaataca

SEQ ID NO: 18381 - DNA, 260 bp, Unknown
  Description of Unknown: LeftRegion for integrase B5382 sequence
gaatctgtgtagaattgcttagatatttgaagaaataccgttaaattgcatagtcattcacctgtttatgtcctgtaattaacaggtatgttctaggaatcatcctcatagtgcatttagaccttgatgatttttattagacacgtttaaatacaccatcttaagcgatacaatctaggggttattaggtgaggtgaacaatgaaacgtgtaatcagctacatcagattcagttctgagcgacaagccaaaggcgactca

SEQ ID NO: 18382 - DNA, 260 bp, Unknown
  Description of Unknown: LeftRegion for integrase B5383 sequence
tgaggcaataaaaagtggtgctaatgatagatatgaaattgctgaatatcttactataacagacaaattctttgatgaagcaataaactaccatagacaaaaaaatggattagtctgtaaatatgaaggggtatggatatactttgaacctagtttcggtatactaagggataatattttttaattttgggaggttacttatgagtagaattgcaatatattctcgtaaaagtaaagatactgatactggagaatctata

SEQ ID NO: 18383 - DNA, 260 bp, Unknown
  Description of Unknown: LeftRegion for integrase B5384 sequence
cattttctcgattctcttcccggtgaatttaattatggggtggaagtccgccatccacagtttttcgccaaaggggaagaggaacaaacgcttaatcgcggtttacatcagcgcggcgttaatcgggtgatttttattagacacgtttaaatacaccatctaaaacgatacaatctagggcatcagttttgaggtgaacaatgaaacgtgccatttcttacatcaggttttcatctgagaagcaatcccgaggtgattca

SEQ ID NO: 18384 - DNA, 260 bp, Unknown
  Description of Unknown: LeftRegion for integrase B5385 sequence
ccaactgcggcaataccaagcatgcttcccccatcgaccgggacaaagccatctccatgggatacgaagcctgcaagaagtgctattaagcaactcccctttccggccccactcgggccggaatttttttcgggaggggtacagaaacgcccttcctgtggtatactgtctatcaagagaatcagaaaggagccgaaacaatgccctattgtatgtatctgcgcaaatcccgaaaggacagcgatcaccccggacaggcg

SEQ ID NO: 18385 - DNA, 260 bp, Unknown
  Description of Unknown: LeftRegion for integrase B5386 sequence
cggtattatatcagcgtaatatgtttttagcacatccattagaacgacaagtgtatcagcagtttcaagattttatctatggatatacgaacggctagtagatgctaaaattgtgacagttttgcattgatttttacagattgcatagatttaaaatagtgtttgtttaaatttatgaaattttacagatcatacttcacatgaatactaaacaatcaatgggagtgtattgcgtaaggaagggagtgtatcgcatggag

SEQ ID NO: 18386 - DNA, 260 bp, Unknown
  Description of Unknown: LeftRegion for integrase B5387 sequence
tgaggcaataaaaaatggtgctaatgatagatatgaaattgctgaatatcttactgtaacagacaaattctttgatgaagcaataaactaccatagacaaaaaaatggattagtctgtaaatgtgaagggttatggatatactttgaacctagtttcggtatactaagagataatattttttaattttgggaggttacttatgagtagaattgcaatatattctcgtaaaagtaaagagactgatactggagaatctata

SEQ ID NO: 18387 - DNA, 260 bp, Unknown
  Description of Unknown: LeftRegion for integrase B5388 sequence
tttctcgattctcttcctggcgaatttaattatggcgtggaagtccgccatccacagtttttcgccaaaggagaagaggaacaaacgcttaatcgcggtttacatcagcgcggcgttaatcgggtgattttcatcagacacgtttaaatacaccacctaaagcgatacaatcgcgctattagtttttatggtggtaaagaatgaaacgtgtaatcagctacatcagattcagttctgagcgacaggccaaaggcgactca

SEQ ID NO: 18388 - DNA, 260 bp, Unknown
  Description of Unknown: LeftRegion for integrase B5389 sequence
ggcaagggcaattatataccacaagcaaacacgccgtatacagccacacagaagtgttgaaaagggtcggaactttgttcctcacctatcaaaatatatccgaacagacgtgattttaaatcgcacctgtgaaaaccctaatttaagatattatacttatattttctgatcgtaatttcgaaaacaggagatgaaaataaatgtcatactgtatatacttgcgtaaatcaagagcagatttagagcttgaagcaatggga

SEQ ID NO: 18389 - DNA, 260 bp, Unknown; identical to SEQ ID NO: 17312
  Description of Unknown: LeftRegion for integrase B5390 sequence

SEQ ID NO: 18390 - DNA, 260 bp, Unknown; identical to SEQ ID NO: 18085
  Description of Unknown: LeftRegion for integrase B5391 sequence

SEQ ID NO: 18391 - DNA, 260 bp, Unknown; identical to SEQ ID NO: 16075
  Description of Unknown: LeftRegion for integrase B5392 sequence

SEQ ID NO: 18392 - DNA, 260 bp, Unknown
  Description of Unknown: LeftRegion for integrase B5393 sequence
tatgataagaaaagcggaaatcatttacattcagtagttggttgtgaaattaaataaaataaaaatagccgcccaggctcctacccctgaacggctgatgtaaccttcactttacccctgttaaaagtaatgctggattacgctattattatagcatataccggccttagtattctataccctttttagggtaatattttatgaaaggctggtatttttttatggcaaacggagtaatttacgcgcgctattcttccaac

SEQ ID NO: 18393 - DNA, 260 bp, Unknown; identical to SEQ ID NO: 15606
  Description of Unknown: LeftRegion for integrase B5394 sequence

SEQ ID NO: 18394 - DNA, 260 bp, Unknown
  Description of Unknown: LeftRegion for integrase B5395 sequence
tcctggcgaatttacctatggtgtggaagtccgccatccgcagtttttcaccaaaggcgaagaagaacaaacgcttaatcgaggtttgcatcaacgcagcgttaatcgggtgatttttattagacacgtttaaatacaccatctaaagcgatacaatctaggggttggtacaagcccaactgctattggtgaggtgaacaatgaaacgtgcaatcagttacatccggttttcatctgagaagcaatccagaggcgactca

SEQ ID NO: 18395 - DNA, 260 bp, Unknown
  Description of Unknown: LeftRegion for integrase B5396 sequence
ctctacctgaaggatctaggcatttctaccggctcgaagaaacagaataaaagaatcccccaccgtgcgggaacacgatgagggacgcgcagcaggtattaccagtaccgtactgcagtataatctacccactctggaggtcgactatgtattatattataacatttcggccccctttcgcatagaaggaggctattcttatgcaaaaaaatacaactgttgaaaccacaacaaaggctgtcatttatgctcggtactcg

SEQ ID NO: 18396 - DNA, 260 bp, Unknown
  Description of Unknown: LeftRegion for integrase B5397 sequence
taattacattaattaaaaaaattcttaataataattaaaaaagacctcatgctggaacatgaggccgaaatgcaaaaaacaaataaagtccactacgacacaaatgtagaatacctacaaacgaaatgtttttttgctatttaattatagcatgaaaaatatctcgtatcaataatatttagagaggaagtgctataattatgagaaaaaaagtagcctatttaagaaaatcccgtgctgatatagaattggaaaataca

SEQ ID NO: 18397 - DNA, 260 bp, Unknown; identical to SEQ ID NO: 16700
  Description of Unknown: LeftRegion for integrase B5398 sequence

SEQ ID NO: 18398 - DNA, 260 bp, Unknown
  Description of Unknown: LeftRegion for integrase B5399 sequence
ttggcctttgtgatgacaaacgcgggaggatcgttaccgtttcaccagagggcgcggaagaatatgtacggcgcaaaccggattggagcgagttcgtggaagcttgtttcgagccaggaagtgaactgaaccgcaaactcaagcagatggtgctgaacatggcggaagaacattcgcatggcgtcaaggagggatagacaatgaatgcagtaatctacgccagatacagcagtgataaccagcgggaagaatcgattgag

SEQ ID NO: 18399 - DNA, 183 bp, Unknown
  Description of Unknown: LeftRegion for integrase B5400 sequence
ggaacaaacgcttaatcgcggtttacatcagcgcggcgttaatcgggtgattttcatcagacacgtttaaatacaccacctaaagcgatacaatcgcgctattagtttttatggtggtaaagaatgaaacgtgtaatcagctacatcagattcagttctgagcgacaagccaaaggcgactca

SEQ ID NO: 18400 - DNA, 260 bp, Unknown
  Description of Unknown: LeftRegion for integrase B5401 sequence
tggtttagaacaaccattctgacattagacagatattaaaatataccgtattttctatatgagaaaatacggtatatttttttgcacaggcattttcactcccccttgttcaaaaattacttttttgaaaagtttttaatgaacaatatattattacaagtttttttgtaataatatttcaaagaatggagggctataaaatgcctaatattttaaataataatgttgtctatgatgacaatactaaacagctgttatat

SEQ ID NO: 18401 - DNA, 260 bp, Unknown
  Description of Unknown: LeftRegion for integrase B5402 sequence
accttatgggtctaagtgaacttagaacccccggtatggtattgacagaggaagaacttctactgctcaacacctatcgcaattccagcacccagggacgcttccgtattattcaggtctgtatgaatgaaatggataccactggaaaaggggcaaccgtaaatgccggataattgacttgaatgagtggaggaagaaccatgtatgaagaaatcaaagaagtagctctgtatgtacgctattccagtgccaaccagaca

SEQ ID NO: 18402 - DNA, 180 bp, Unknown
  Description of Unknown: LeftRegion for integrase B5403 sequence
ggaacaaacgcttaatcgcggtttacatcagcgcggcgttaatcgggtgatttttattagacacgtttaaatacaccatctaaaacgatacaatctagggcatcagttttgaggtgaacaatgaaacgtgccatttcttacatcaggttttcatctgagaagcaatcccgaggtgattca

SEQ ID NO: 18403 - DNA, 260 bp, Unknown
  Description of Unknown: LeftRegion for integrase B5404 sequence
actcaaaagcaattggctgagatgataggagtttctcaagcctatatttcaaaaatagaaagtgatgaatttgttaatgttactttgattgaaataataaaattaagtaaagcactatcgattaatgaactggaggttgctaaatattttctaaataaatacaataattataaatatgaatttgggggagaaatagcataatgaaagtatgtatgtacttgcgcaaaagccgtcaagacgaagaattagaaaaaagagaa

SEQ ID NO: 18404 - DNA, 260 bp, Unknown
  Description of Unknown: LeftRegion for integrase B5405 sequence
tagactactttcaagataattatcccgaattattggatgattacatagatttttatgaaaacggtgtaacattaagcgacggagaaattacaccggaagatatggttgatattgtaagaataacatcaaattttaacaaagataattattttaaattaaattaaacatacaatttatagaaagagaaagttggtgaaaaaatgtatgggatgtatttaagaaaatctcgtagcgatgatccaaacgaagatataaatgat

SEQ ID NO: 18405 - DNA, 260 bp, Unknown
  Description of Unknown: LeftRegion for integrase B5406 sequence
atgggactataataaatgtcgtgccgtttcccatgctgcaggagtttaatttggttcttgctgaacaatttcaacagctcgcttagcttcacgcgctctcccctcactttctgtatttattataacacgtattcgtacgtatgtcaaggggtttcgaaaatattattattttttttgcttataaaaggagacatacatcagtgaacgcagtcatctatgcaagatattcctccgacaagcagacggagcaatctatcgaa

SEQ ID NO: 18406 - DNA, 260 bp, Unknown
  Description of Unknown: LeftRegion for integrase B5407 sequence
agactactttcaagataattatcccgaattattggatgattacatagatttttatgaaaacggtgtaacattaagcgacggggaaattacaccggaagatatggttgatattgtaagaataacatcaaattttaacaaagataattattttaaattaaattaaacatacaatttatagaaagagaaagttggtgaaaaaaatgtatgggatgtatttaagaaaatctcgtagcgatgatccaaacgaagatataaatgat

SEQ ID NO: 18407 - DNA, 260 bp, Unknown
  Description of Unknown: LeftRegion for integrase B5408 sequence
gaacaacaataacggttgtcgttaaaacattgaaatttcaagtgctgtacatattatgcaacaaatgcaacaacaaatatataaaactaaacaatcacatgtataaggcacacaggcgtatagcacacccgcataaatgcgcgtattaggcacttatacgcgcgaagcgttgccactgttgcagaaaggaatagaccaagatgaaagcagttatttacgcaagatactccgcaggctctgggcagaccgagctgtccatc

SEQ ID NO: 18408 - DNA, 260 bp, Unknown
  Description of Unknown: LeftRegion for integrase B5409 sequence
tttagaggctatgatagcgctaggcaatgcccaacgcacaggcaagtttacacctccagcagcccaataaaaaagagcccctatcaaggggctttatttatacctaaaaaccaaaaaccgccgagtgtatacatcggcggttatggttatcacatctttacttcttgataagattataccattgaaaggaacatcacacaatgacaaatacaaaagatttacaaacaggcgttatatacgctagatattcaagcgataaa

SEQ ID NO: 18409 - DNA, 260 bp, Unknown
  Description of Unknown: LeftRegion for integrase B5410 sequence
caagcaaaagaattgtaaaaaaatcaaccaaaactgtatcaaagaccgttagtcaaacagtgtacgtcacaagaacaggttcaaaatatcaccgatatggttgccagtatttaaggaaaagttgctattctatgagcaagtcaaacgcacgagcgcaaggatatactgcctgttcaaggtgttggtaagaggaaaataacatggtactgatgtatttacggaagtctcggtcagataacccatacgagactgtggaagaa

SEQ ID NO: 18410 - DNA, 260 bp, Unknown
  Description of Unknown: LeftRegion for integrase B5411 sequence
cctagaatataaatgtatgattaggttttttggaataaaaaataaaaccgccataatgctaccaacattatagcggctcgtaatacgatactaccaatatcgtattttaataggtcttttactatatacctactaccaaccttattatatagtaattgacctctttttgcaatttaatattgaatatggaggtcttttaaatgactaaaattataacagcaggtatttatgtccgtgtatcaacttctgaacaagcagaa

SEQ ID NO: 18411 - DNA, 260 bp, Unknown; identical to SEQ ID NO: 16741
  Description of Unknown: LeftRegion for integrase B5412 sequence

SEQ ID NO: 18412 - DNA, 260 bp, Unknown
  Description of Unknown: LeftRegion for integrase B5413 sequence
agactactttcaagataattatcccgaattattggatgattacatagatttttatgaaaatggtgtaacattaagtgacggggaaattacaccggaagatatggttgatattgtaagaataacatcaaattttaacaaagataattattttaaattgaattaaacatacaatttatagaaagagaaagttggtgaaaaaaatgtatgggatgtatttaagaaaatctcgtagcgatgatccaaacgaagatataaatgat

SEQ ID NO: 18413 - DNA, 260 bp, Unknown; identical to SEQ ID NO: 16959
  Description of Unknown: LeftRegion for integrase B5414 sequence

SEQ ID NO: 18414 - DNA, 260 bp, Unknown
  Description of Unknown: LeftRegion for integrase B5415 sequence
tgttttgctcctgatgatgtgacaacgttcacgcaatatcactacggaaaagcattggaaaaattctgggttaaatatattatttaaataaaacaaaatcgcccctagatggagcgacttcggtggttggattgaaaaacaatacaataatgatcaaatgtattgtaccatatccagccactttttgcaaggagacaattatggtactaatgtatttacgaaaatcccgtgctgacaatccgtatgagactgtagaagag

SEQ ID NO: 18415 - DNA, 202 bp, Unknown
  Description of Unknown: LeftRegion for integrase B5416 sequence
agaccgaaagtaacgtcggccaggggaagcggcgaggtaaatcaagggtcattgtattgtagctattcggcattgtagcattagccataacgtttataagttcatctttaaatgataatcaattgcatgggagtttatcaccgtgagaaccgtaataacatacttgagattctcatcagccatacaaggcgctgaaggtgca

SEQ ID NO: 18416 - DNA, 260 bp, Unknown
  Description of Unknown: LeftRegion for integrase B5417 sequence
gatgggactataataaatgtcgtgccgtttcccatgctgcaggagtttaatttggttcttgctgaacaatttcaacagctcgcttagcttcacgcgctctcccctcactttctgtatttattataacacgtatttgtacgtatgtcaaggggtttcgaaaatattattatttttttgcttataaaaggagacatacatcagtgaacgcagtcatctatgcaagatattcctccgacaagcagacggagcaatctatcgaa

SEQ ID NO: 18417 - DNA, 260 bp, Unknown; identical to SEQ ID NO: 18410
  Description of Unknown: LeftRegion for integrase B5418 sequence

SEQ ID NO: 18418 - DNA, 260 bp, Unknown; identical to SEQ ID NO: 18406
  Description of Unknown: LeftRegion for integrase B5419 sequence

SEQ ID NO: 18419 - DNA, 260 bp, Unknown
  Description of Unknown: LeftRegion for integrase B5420 sequence
tacactcattattatgagcgattagttgagaaagatgtttgggagaagtgccaaattcgcctgaaacattaccgaaaaaataagggataaaggcaaccgctccgtcaaatgaaggctggattaaattccggccttcattgactttaagaaaccagcaatccattaataaaaaaacagacaaaaaaataaggaaaaacaatatgccaagacagacaaaaaaatttcaagcaacagcaacaaaaggtatcatttgggctaga

SEQ ID NO: 18420 - DNA, 260 bp, Unknown
  Description of Unknown: LeftRegion for integrase B5421 sequence
caagcaaaagaattgtaaaaaaatcaaccaaaactgtatcaaagcccgttagtcaaacagtgtacgtcacaagaacaggttcaaaatatcaccgatatggttgccagtatttaaggaaaagctgctattctataagcaaatctgatgcaaaagcaagaggatatacagcttgttcaaggtgttggtaagaggaaaataacatggtactgatgtatttacggaagtctcggtcagataacccctacgagactgtggaagaa

SEQ ID NO: 18421 - DNA, 260 bp, Unknown
  Description of Unknown: LeftRegion for integrase B5422 sequence
acagctgcagggaaagtaatcgagtgtgccggtggtcttttggggctgccggtatttttgtgctatggaaaccgcataggggaaggtggattttggggcagtttttttggtcgttctgcgagttggcgcagacgggtgattccgatatattttatgtacggcaaccgtatgacgatgggcaaccgaaatgaggtgaagatttgagaaagaaatgttacatatatacccgtgtttctacggcggctcagacagagggatac

SEQ ID NO: 18422 - DNA, 260 bp, Unknown
  Description of Unknown: LeftRegion for integrase B5423 sequence
ttacaacgtccgcaattcagcgcaaatgtaaatgcggaaacaactgtgcgtatgcagttcttcaaaacctacaggtctacggaatgattcgagagattcggcaattcacatacgaatggacagaaaaagccctcctgctgggcgcagaagggcgtaacgggtaaacagatatgtcgatagatattaaatggcaggtgccaatggcaaaaccggaggttagcgaactggccgtcgtatatgcccggtattcaagccacagt

SEQ ID NO: 18423 - DNA, 260 bp, Unknown; identical to SEQ ID NO: 18410
  Description of Unknown: LeftRegion for integrase B5424 sequence

SEQ ID NO: 18424 - DNA, 202 bp, Unknown
  Description of Unknown: LeftRegion for integrase B5425 sequence
agaccgaaagtaacgtcggccaggggaagcggcgaggtaaatcaagggtcattgtattgtagctattcggcattgtagcattagccataacgtttataagttcatctttaaatgataatcaattgcatgggagtttatcaccgtgagaaccgtaataacatacttgagattctcatcagccacacaaggtgctgaaggtgct

SEQ ID NO: 18425 - DNA, 260 bp, Unknown; identical to SEQ ID NO: 18410
  Description of Unknown: LeftRegion for integrase B5426 sequence

SEQ ID NO: 18426 - DNA, 260 bp, Unknown; identical to SEQ ID NO: 18406
  Description of Unknown: LeftRegion for integrase B5427 sequence

SEQ ID NO: 18427 - DNA, 202 bp, Unknown
  Description of Unknown: LeftRegion for integrase B5428 sequence
agaccgaaagtaacgtcggccaggggaagcggcgaggtaaatcaagggtcattgtattgtagctattcggcattgtagcattagccataacgtttataagttcatctttaaatgataatcaattgcatgggagtttatcaccatgagaagtgtaataacatacttgagattctcatcagccacacaaggtgctgaaggtgct

SEQ ID NO: 18428 - DNA, 260 bp, Unknown
  Description of Unknown: LeftRegion for integrase B5429 sequence
tcaataacctgatgtaccgaggtatagagcagacccgccacaacagcaccatgaatgcagaccgaaagtaacgtcggccaggggaagcggcgaggtaaatcaagggtcattgtattgtagctattcggcattgtagcattagccataacggttataagcttatctttaaatgagaatcaattgcatgggagtttatcaccatgagaaccgcaataacataccttcggtacagttcagctatacaaggcgctgaaggtgca

SEQ ID NO: 18429 - DNA, 260 bp, Unknown
  Description of Unknown: LeftRegion for integrase B5430 sequence
gacaggtatttgaacagtttaaacagtttattaacaatcagtgaaaaagcaatcattctcgtgaggtcacgaaaatgaaaaaaagccgccccacggcggcaaccgtgaagcggcaagagggaactattgctataatagtccaaaccagaacggtactattatagcacattctctcaaaaaatgcaaggaggaagtgcaaaatgcaagcagcagcatatgcaagatacagcacagagcatcagacagagagcagtattgct

SEQ ID NO: 18430 - DNA, 260 bp, Unknown
  Description of Unknown: LeftRegion for integrase B5431 sequence
acacagaaagaattagcgaatatgataggggttagtcaagcttatataagcaaactagaaaatgataagtttgtaaatataactcttattgagattataaaaattagtaaagcgttacaattaaaagagttagaagtatgtaaatattttttagagaaacatcatgatattcatatagagtttgagggggaattagcataatgaaaacagcgatatatcttagaaaatcaagacaagatgaggaattagaaaaaagagaa

SEQ ID NO: 18431 - DNA, 109 bp, Unknown
  Description of Unknown: LeftRegion for integrase B5432 sequence
ttataagttcatctttaaatgataatcaattgcatgggagtttatcaccatgaggagcgtaattacatacttgagattctcatcagccatacaaggcgctgaaggtgca

SEQ ID NO: 18432 - DNA, 260 bp, Unknown
  Description of Unknown: LeftRegion for integrase B5433 sequence
cttggaaaattgcatagtcataggggttggaacaagcccaactacacctgatattgtcctgtttttaacaggtctcttagaaaaccgaatagacttcattcaagggtcattgtattgtagctattcggcattgtagcattagccataacggttataagcttatctttaaatgataatcaattgcatgagagtttatcaccatgagaagcgtaattacataccttcggtacagttcagccatacaaggcgctgaaggtgca

SEQ ID NO: 18433 - DNA, 260 bp, Unknown
  Description of Unknown: LeftRegion for integrase B5434 sequence
agactactttcaagataattatcccgaattattggatgattacatagatttttatgaaaacggtgtaacattaagcgacggggaaattacaccggaagatatggttgatattgtaagaataacatcaaattttaacaaagataattattttaaattaaattaaacatacaatttatagaaagagaaagttggtgaaaaaaatgtatgggatgtatttaagaaaatctcgtagcgatgatccgaacgaagatataaatgat

SEQ ID NO: 18434 - DNA, 260 bp, Unknown
  Description of Unknown: LeftRegion for integrase B5435 sequence
ttagcttaaaacttgcaagttggttgcaaccaattttttgcacaataaaaagccccatccataccgtcatatggatgaggctagtggtcacgaagctttgcggagcttgtggccggttgtaatctattaccctgtgaggctgattactattctattataccaaatcagcctccattttacccagttaggaggcttttcttatgcctaaaaaagaaaccacagcaccagtcaaggccgttttatatgcccgctattcttcg

SEQ ID NO: 18435 - DNA, 260 bp, Unknown
  Description of Unknown: LeftRegion for integrase B5436 sequence
tgcaatcgttccaaatgacttgaattcatttacagaatatcaatacaataacaaattcgaaaaagtctggattaaatataacatctaaataaaacaaaatcgcccctaatggagcgacttcggtggttggattgaaaaacaatacaataatggtcaaatgtattgtaccatatccagccactttttgcaaggagacaattatggtactaatgtatttacgaaaatcaaggtctgataatccgtacgaaacagtggaagag

SEQ ID NO: 18436 - DNA, 202 bp, Unknown
  Description of Unknown: LeftRegion for integrase B5437 sequence
agaccgaaagtaacgtcggccaggggaagcggcgaggtaaatcaagggtcattgtattgtagctattcggcattgtagcattagccataacgtttataagttcatctttaaatgataatcaattgcatgagagtttatcaccatgagaagtgtaataacatacttgagattctcatcagccatacaaggcgctgaaggtgca

SEQ ID NO: 18437 - DNA, 203 bp, Unknown
  Description of Unknown: LeftRegion for integrase B5438 sequence
cagaccgaaagtaacgtcggccaggggaagcggcgaggtaaatcaagggtcattgtattgtagctattcggcattgtagcattagccataacgtttataagttcatctttaaatgataatcaattgcatgagagtttatcaccatgagaagtgtaataacatacttgagattctcatcagccatacaaggcgctgaaggtgca

SEQ ID NO: 18438 - DNA, 218 bp, Unknown
  Description of Unknown: LeftRegion for integrase B5439 sequence
gtatatataaacactttaaacactttatatatataactaaataaacatacatataagcgcgtatacacctatacacaagttaaaaaacgcgcatataacacatatacgcgtacgtgtgtttatttcgtttaaagtgttgcagaaaggaatagaccaagatgagagcagttatttacgcaagatactccgcaggctccgggcagaccgagctgtccatc

SEQ ID NO: 18439 - DNA, 260 bp, Unknown; identical to SEQ ID NO: 18409
  Description of Unknown: LeftRegion for integrase B5440 sequence

SEQ ID NO: 18440 - DNA, 260 bp, Unknown; identical to SEQ ID NO: 18410
  Description of Unknown: LeftRegion for integrase B5441 sequence

SEQ ID NO: 18441 - DNA, 225 bp, Unknown
  Description of Unknown: LeftRegion for integrase B5442 sequence
cgccacaacagcaccatgaatgcagaccgaaagtaacgtcggccaggggaagcggcgaggtaaatcaagggtcattgtattgtagctattcggcattgtagcattagccataacggttataagcttatctttaaatgagaatcaattgcatgggagtttatcaccatgaggagcgtaattacataccttcggtacagttcagccatacaaggcgctgaaggtgca

SEQ ID NO: 18442 - DNA, 260 bp, Unknown
  Description of Unknown: LeftRegion for integrase B5443 sequence
cctatttttacgaattgggtatcaaaatataataaaaaatcgcccttcggtgttggtagcaccaaaggacgataatcattacacagggtgcaatgatactaacacttagcaagtaatattgtatcatacccttgtaaatttttcaatataatttacaagggatttttgcacccttttttagataagagaggagcaagaagatgaaaaatgcaatgtatttgagaaagtcaaggcaagatgaaggtggacttgaagaaaca

SEQ ID NO: 18443 - DNA, 260 bp, Unknown
  Description of Unknown: LeftRegion for integrase B5444 sequence
acttactgggtcttagtgaagtcagaaaaccagaagtcttagttttgtcagaaaaagagaaaatcctaattgacgcataccgtactgctaatgacatgggacaattaaacataatctatgtctgcatggatgaaatgaaaaaagcaaaaggggaaggcgtacttgtagggtaattgatttcatagaatggaggaagaaccatgtatgaggatataaaaacagcctgcctatacgttagattctcaagccataaccagact

SEQ ID NO: 18444 - DNA, 260 bp, Unknown
  Description of Unknown: LeftRegion for integrase B5445 sequence
ttcatttttcatctgcttgaaatcgttcgaatctgcttgaaacaataaaaagcctcatccatattggcgtatggatgaggctagtggtcacgaagctttgcagagcttgtggccggttgtaatctattaccctgtgaggctgattactattctattataccaaatcagcctccattttacccagttaggaggcttttcttatgcctaaaaaagaaaccacagcaccagtcaaggccgttttatatgcccgctattcttcg

SEQ ID NO: 18445 - DNA, 260 bp, Unknown
  Description of Unknown: LeftRegion for integrase B5446 sequence
taccacaatataatgtttggaacgaagaagatagctacagcgactatgccgaagaaactgtgtatgtaacaaatactggttctaagtatcataggtacgggtgtcaatatttaagccaaagctgcattgcaatagatctaagtgacgcagaagcgcaaggatatactgcctgttcaaggtgttggtaagaggaaaataacatggtactgatgtatttacggaagtctcgttcagataacccatacgagactgtggaagaa

SEQ ID NO: 18446 - DNA, 260 bp, Unknown
  Description of Unknown: LeftRegion for integrase B5447 sequence
gcgctaggcaatgcccaacgcataggcaagtttacaccgccagcagcccaataaaaaagagcccctatcaaggggctctatttctacctaaaattaaataaccgccgatgtatacgttcggcggttatttaactgactatgtcaaattttctgtaaagaatatactataaatattatactacaaaaaggaatattacacaatgacaaatacaaaagacttacaaacaggcgtgatatacgccagatattcaagcgataaa

SEQ ID NO: 18447 - DNA, 260 bp, Unknown
  Description of Unknown: LeftRegion for integrase B5448 sequence
tgtttcgcacctgatgatgtgacaacgttcacgcaatatcactacggcaaagcattagaaaagttctggattaaatataacatctaaataaaacaaaatcgcccctaacggagcgattttgagtggttggattgaaaaacaatacaataatggtcaaatgtattgtaccatatccagccactttttgcaaggagacaattatggtactaatgtatttacgaaaatcccgtgctgacaatccgtatgagactgtagaagag

SEQ ID NO: 18448 - DNA, 260 bp, Unknown
  Description of Unknown: LeftRegion for integrase B5449 sequence
ctgcaagttatcggcaagtgagatctcaccattttcgtggagccacgaaaaatggtgcaaacgtggttatcaaaaacaaaagagcaatcatattatgggtaaaaatggcacaaaaaaagacccgaagttcagccccgtccagaacgggcctatcctgagtctcttacccatagttattacaccagaaaggaatacgaaaaatggaaaaacaaacggccgtaatatatgccaggtactcttctgatcggcagcgtgaggag

SEQ ID NO: 18449 - DNA, 260 bp, Unknown; identical to SEQ ID NO: 13549
  Description of Unknown: LeftRegion for integrase B5450 sequence

SEQ ID NO: 18450 - DNA, 260 bp, Unknown
  Description of Unknown: LeftRegion for integrase B5451 sequence
aaaagtaaataattaaaatatatatttttttatattattaacatattatacaaattatagtgtattatatataatataagaaaatacaatctatttgtattaaaatggagtttcctaaaagttcagattttaatttttatccgaatcactctgattgccgtcagggtgattctttaatttaaaataaaggagagatttacatgaatacagtaatatacttaagaaaaagtagagctgacgaagaagcagaaaagcaaggg

SEQ ID NO: 18451 - DNA, 260 bp, Unknown; identical to SEQ ID NO: 18406
  Description of Unknown: LeftRegion for integrase B5452 sequence

SEQ ID NO: 18452 - DNA, 260 bp, Unknown; identical to SEQ ID NO: 16092
  Description of Unknown: LeftRegion for integrase B5453 sequence

SEQ ID NO: 18453 - DNA, 260 bp, Unknown
  Description of Unknown: LeftRegion for integrase B5454 sequence
ccctatttttacgaattgggtatcaaaatataataaaaaaaatcgccctctagtattggcgtactagagagcgacaccattacacagggtgcaatgatacatagaaatgcaagtaatattgtatcatacccttgtaaatttttcaatataatttacaagggatttttgcacccttttttagataagagaggagcaagaagatgaaaaatgcaatgtatttgagaaagtcaaggcaagatgaaggtggacttgaagaaaca

SEQ ID NO: 18454 - DNA, 260 bp, Unknown
  Description of Unknown: LeftRegion for integrase B5455 sequence
caaaggcattagcgccagagattaggaagttctatgatagtgacgagggcaaagcgtactttgaaaaatggcttaccaaacaccctgaatatgatgaacggacacctgatgcaactgcatcgggcgtctgagttttcgcacattcgacagcaaataaaggaggattataattatgtatagaaagaattggaggctcacagatgaatgttgtaatatacgcccgcttttccagtcacagccagacggagcagtccattgag

SEQ ID NO: 18455 - DNA, 260 bp, Unknown
  Description of Unknown: LeftRegion for integrase B5456 sequence
cacagcataaaataaactaaaaacggaggtaatcataatgtcggaatacacggatataagaaacaatacatatcaaatacatcagcgttcgcttgtgaatacttctcaagcggagcaacaaaagcaagaaattatagaagaattgtatcgtatctttgataagaaataattttattaaaatctgaaaggaggaagcaaagatggcgattgcgttatacgcaagaaaatcaatagaacgtgaaaacagtatttcatgcgaa

SEQ ID NO: 18456 - DNA, 260 bp, Unknown
  Description of Unknown: LeftRegion for integrase B5457 sequence
tatacacaaagcaggcaactatttcttaatagttatgcaaaatatactaacaaaacaaaaagctccggcgcaaaccggagcaaagatatactataccgcaaggtgcaatataatataaccgtaagcaagtcatattatatcacaatgcaccttacaatgtatagggtgtattttttatactcataaaggagcgtgatattatgtactgtatctatcttagaaaatctcgtgcggatatggaagcagaacgacaagggatt

SEQ ID NO: 18457 - DNA, 260 bp, Unknown
  Description of Unknown: LeftRegion for integrase B5458 sequence
attacagtaacttataatagtggcgagagtactgcaggtggattatattctaaagaaacagatagtgacggatatgtttcttggtcttggaaagttggaacaaaaactgaatcaggtacatatgacattgaaatctctaattattaccaaacaaaatattttgaatttactgtaaattaaggaataaaaaaggtgatattatgaacgctgtaatatatgctaggttctctagccataaccaacaagagcaaagcattgaa

SEQ ID NO: 18458 - DNA, 260 bp, Unknown
  Description of Unknown: LeftRegion for integrase B5459 sequence
ttactgggtcttagtgaagtcagaaaaccagaagtcttagttttgtcagaaaaagagaaaatcctcattgacgcataccgtactgctaatgacatgggacaattaaacataatctatgtctgcatggatgaaatgaaaaaaaagcaaaaggggaaggcgtacttgtagggtaattgatttcatagaatggaggaagaaccatgtatgaggatataaaaacagcctgcctatacgttagattctcaagccataaccaaact

SEQ ID NO: 18459 - DNA, 260 bp, Unknown
  Description of Unknown: LeftRegion for integrase B5460 sequence
gggcaacggtaattgttgtcgctaaaacgttgaaatttaaaggtttatgcgtattatgcaacaaatacaacaataaatatataaaactaaacaaccacatgtataaggcgtacaggcgtatagcaaacccgcataaatgcacgtattaggcgcttatacgcgcgaagcgttgccactgttgcagaaaggaatagaccaagatgaaagcagttatttacgcaagatactccgcaggctctgggcagaccgagctgtccatc

SEQ ID NO: 18460 - DNA, 260 bp, Unknown; identical to SEQ ID NO: 15792
  Description of Unknown: LeftRegion for integrase B5461 sequence

SEQ ID NO: 18461 - DNA, 260 bp, Unknown
  Description of Unknown: LeftRegion for integrase B5462 sequence
cttacaacgtccgcaattcagcgcaaatgtaaatgcggaaacaactgtgcgtatgcagttcttcaaagcctacaggtctacggaatgattcgagagattcggcaattcacatacgaatggacagaaaaagccctcctgctgggcgcagaagggcgtaacgggtaacagatatgtcgatagatattaaatggcaagtgccaatggcaaagccggaagtcagcgaactggccgtcgtatatgcccggtattcaagccacagt

SEQ ID NO: 18462 - DNA, 260 bp, Unknown
  Description of Unknown: LeftRegion for integrase B5463 sequence
tttatgacgaaacgcagcaatatataagatccgacaatagcagagatagatatgattatgaaaatctaaaactcacgattgagcagaatgtagattcagaagaagcttaaacgaaaagatccccacgttaacaagcaccaccaagaacgtgaggatcaggagaaaaaccttccgcaaacgaaaggcagtgttattctatcatgacgcactctaacgatgggttatttgccctatatcttcgtagatcacgcgctgatatt

SEQ ID NO: 18463 - DNA, 260 bp, Unknown; identical to SEQ ID NO: 15631
  Description of Unknown: LeftRegion for integrase B5464 sequence

SEQ ID NO: 18464 - DNA, 260 bp, Unknown; identical to SEQ ID NO: 15325
  Description of Unknown: LeftRegion for integrase B5465 sequence

SEQ ID NO: 18465 - DNA, 260 bp, Unknown
  Description of Unknown: LeftRegion for integrase B5466 sequence
caatagcatattcatccataaaatgcaagagccgcccggtgttaccagcaccgaacggcctcacacagattatctcttaccagaacataccggaaagatacaatcagatcaatcacctgcattatatcattttcggtacgtcctggcaaggggcgtattttttgtacctaaaaatcatatagattgacacaggagatgatatgatgaatgaaaatgttttgaaaactgctgccctctacatccgggtatccacggacaag

SEQ ID NO: 18466 - DNA, 260 bp, Unknown
  Description of Unknown: LeftRegion for integrase B5467 sequence
tggggagattgattctgtagtagcgacaattatattcggcgtcttattcattgcggttttaggttttctaaaatagtaaccgtttttcagccattaaacgcaattttgagagtttttgtatctaatttagccttttaagcataaaattggagccttaattacaaatttaggctcattttcgttagataagaggtgatactttgagttcggttgataaaatcgccgttatttacgcgcgttattcgtctcacggccagacc

SEQ ID NO: 18467 - DNA, 260 bp, Unknown
  Description of Unknown: LeftRegion for integrase B5468 sequence
atgaacaaaagcctttttataagaaattaaaaattaaagtaaaaaataacattatataaataaaaaatatataaatatagaaaaaaaggtgaacaacttgaacaagttgaacaaaatgtcaaatgagcctataaacaaagggtttttaagtgttcaacttatgttctacttgttcatacttgggaaagaagggataaaatatggcatacgcaatatatttgcgaaaatcacgagccgacgccgaaatggaagcattaggc

SEQ ID NO: 18468 - DNA, 260 bp, Unknown
  Description of Unknown: LeftRegion for integrase B5469 sequence
tgaaaaaatgcattttcgtgtaatcagtagacatccgcagtattccatagacaccgcaaaccgcatatttgaagagcaaagaaaagatctgtacaatatctttaaaaaatatgcatgatttttaaaccggaaagcggtattcatggtataatcaatgtaatggagagtgactgtttacacatagtaaggaggtatgtgctatgtgtccaatcgatgctttatacgcaagacagtcactggataaaaaagacagtatctcc

SEQ ID NO: 18469 - DNA, 260 bp, Unknown
  Description of Unknown: LeftRegion for integrase B5470 sequence
caatagcatattcagccataaaatgcaagagccgcccggtgttaccagcaccgaacggcctcactcagattatctcttaccagaatataccggaaagatacaatcaatcaaatcacctgcattatatcattttcggtacgttctggcaaggggcgtattttttgtacctaaaaatcatatagattgacacaggagatgatatgatgcatgaaaatgttttgaaaactgctgccctctacatccgggtatccacggacaag

SEQ ID NO: 18470 - DNA, 260 bp, Unknown
  Description of Unknown: LeftRegion for integrase B5471 sequence
tctcgcagatgcaggacgccggccgcgagatagtggacgtgaagttcgactgcgagtacggcatcggcgtgacgaagacgggcatcgcctaccgcgtgatggtcatctacaagtaacggatgaagccccgcgcatacgggcggcaaccctgcgcgaggctctgcaaaacaccgaccccgaagggagggtgagcccattatatggcaagcgcggttatctacgcacggtattcctcgtcaggacagcgcgaggagtcgata

SEQ ID NO: 18471 - DNA, 260 bp, Unknown
  Description of Unknown: LeftRegion for integrase B5472 sequence
ccgatgaccggggaactgtaacaatccctattcaggaatctattcaactttctgaggaagaacgtattctgatttccgcatttaggagtgcttctatagaaggacgcatgagaattatccaagtctgcatgaatgaaaaggattcaaaaggggaaaatatcattgcaggataataagcatcgaagaatggaggaagaaccatgtacgaagagattaagactgcttgtctatatctacgatattcaagtagcaaccaaact

SEQ ID NO: 18472 - DNA, 260 bp, Unknown
  Description of Unknown: LeftRegion for integrase B5473 sequence
ccaagccacagccaccaaagacgccgccagctccacctaaaccccaacaaaaataatgtatatacaagaaatcccgcatcatgcaccaccatgctgcgggatggccggcagttaccggctgtgtaaacctgtaaagggctgatttacaatattattatatcacaatcagtcctgttttataagaaaggaatgatgatataatgaccaaaaatgcagtaatttatgcccgcttcagcagtgacaaacaaagagaagaatca

SEQ ID NO: 18473 - DNA, 260 bp, Unknown
  Description of Unknown: LeftRegion for integrase B5474 sequence
aggcatcctaagaaagctactgggtgtcaaggcaaagtgaaagcaaaataaaagcccctgccatatcgcgaaatatgacaggggaatgcagctaggcattaccagtaccgggctgcggttataatccactcttgtaggaggcagattatgtgtatattatatcataaagcctcccaatgccaaagaaggaggctctttttatgcctaaaacagaagaaaaacaggccgtaaaggccgtcatatatgccagatattcatcc

SEQ ID NO: 18474 - DNA, 260 bp, Unknown
  Description of Unknown: LeftRegion for integrase B5475 sequence
tgaaaaaatgcattttcgtgtaatcagcagacatccgcagtattccatagacaccgcaaatcgcatatttgaagaacaaagaaaagatctgtacaatatctttaaaaaatatgcatgatttttaaaccggaaagcggtattcatggtataatcaatgtaatggagagtgactgtttacacatagtaaggaggtatgtgctatgtgtccaatcgatgctttatacgcaagacagtcactggataaaaaagatagtatctcc

SEQ ID NO: 18475 - DNA, 260 bp, Unknown; identical to SEQ ID NO: 17370
  Description of Unknown: LeftRegion for integrase B5476 sequence

SEQ ID NO: 18476 - DNA, 260 bp, Unknown
  Description of Unknown: LeftRegion for integrase B5477 sequence
cttacgacctctgtgatccaacgtaactgcaagtgcggaatcgaccgcgcgtactcgatactacgcaatcttcaggtctacgggcttattcatgaggctggaaaagacacctatgaatggacagaaaaagccctcctgctgggcgcagaagggcgtaacgggtaacagatatgtcgatagatattaaatggcaagtgccaatggcaaagccggaggtcagcgaactggccgtcgtatatgcccggtattcaagccacagt

SEQ ID NO: 18477 - DNA, 260 bp, Unknown
  Description of Unknown: LeftRegion for integrase B5478 sequence
tttctcatatctacgatatgatttttggttctatttaatttttttataaaaaatcccgcatcctgcaaaccaggatacgggacgcgccggcggtatcaccagtaccgtatcggcatttgtaaataaccaagtaataggctgatttacggtatcattatatcatgaatcggccccatttgcctacgaaaggactgatttttatgtcaacaaatgctgttatctacgcacgtttttcctctgacaaacaaagagaagaatcc

SEQ ID NO: 18478 - DNA, 260 bp, Unknown
  Description of Unknown: LeftRegion for integrase B5479 sequence
ttacaacgtccgcaattcagcgcaaatgtaaatgcggaaacaactgtgcgtatgcagttcttcaaaacctacaggtctacggaatgattcgagagattcggcaattcacatacgaatggacagaaaaagccctcctgctgggcgcagaagggcgtaacgggtaaacagatatgtcgatagatattaaatggcaagtgccaatggcaaagccagaggtcagcgaactggccgtcgtatatgcccggtattcaagccacagt

SEQ ID NO: 18479 - DNA, 260 bp, Unknown; identical to SEQ ID NO: 15106
  Description of Unknown: LeftRegion for integrase B5480 sequence

SEQ ID NO: 18480 - DNA, 260 bp, Unknown
  Description of Unknown: LeftRegion for integrase B5481 sequence
tgttctgtttatccgattcaccttaccccaaagtagagatttccctaacggaaaaagagaaaatccttattgacgcataccgtgctgctaatgacatggggcagttgaacataatctatgtctgcctggatgaaatgaaaaaagcaaaaggggacaacgaaagtgccgtgtgattgattttgtagagtggaggaagaaccatgtatgaggatataaaaacagcctgcctatacgttagattctcaagccataaccagact

SEQ ID NO: 18481 - DNA, 260 bp, Unknown
  Description of Unknown: LeftRegion for integrase B5482 sequence
gaatgggcgcactcggaatatgaacaagcaaccagaacttacaaccttatgcagcaagaaaagttcaagttcattatcaatgtgaacgcctaccgccaagcgcaggcaaataatagctttccgaattttgaaaccgaatctgctgaagaatttggagaacggttaaaatcaaaatggaaagaactgaaaagaggtgtaaaatgacaatggaatccaaacgcgccgttatttacgcccggtattcgagtagccgccagcga

SEQ ID NO: 18482 - DNA, 260 bp, Unknown
  Description of Unknown: LeftRegion for integrase B5483 sequence
tgcttttctccggcaatcttgactcccacatatacgagagcagcgaatcggtatgcagcaaaacgaagcctatttgaaagaccataacgacgacaaagaataagccaacccagccgcatccgtttaagactgcggctggtttgctgcgtgcgtaggacactttgcattaactgcaaaattgaaatttcggaggtatcggcatgaacggtgaaatcaaaaatgtggtgctctatctccgctattccagcgccgctcagaac

SEQ ID NO: 18483 - DNA, 260 bp, Unknown
  Description of Unknown: LeftRegion for integrase B5484 sequence
aaactttgataaatctgttgagtttgtcgattcaccatacgcggagcagtataggcagtctcttttaatccagaaacagctctcaaaatcgggataaaaaatgcctcccacggtactcgcaataccgtgggaggcgggaaggtgtagaccacagagcggcggctacccttctattttatcggaataggaggattttgtcaatgcgcagggctgcaatatatgcacggtactcaagcgacctccaacgcagcgaatccatc

SEQ ID NO: 18484 - DNA, 260 bp, Unknown; identical to SEQ ID NO: 16053
  Description of Unknown: LeftRegion for integrase B5485 sequence

SEQ ID NO: 18485 - DNA, 260 bp, Unknown; identical to SEQ ID NO: 18472
  Description of Unknown: LeftRegion for integrase B5486 sequence

SEQ ID NO: 18486 - DNA, 260 bp, Unknown; identical to SEQ ID NO: 16118
  Description of Unknown: LeftRegion for integrase B5487 sequence

SEQ ID NO: 18487 - DNA, 260 bp, Unknown
  Description of Unknown: LeftRegion for integrase B5488 sequence
attaaatgctgcgttaaacgacataaattcaaagattgaaaagggctatgtatataagcccagaggaaagagtagaaaataaaaaatccccgcccggcgctggaacaccgaacggggaagaagctgtgatacaatcacaaccttagacaagtttattgtatcatagctccctgaaaatgtcaaggagtgataacaaatatatgaaaaccgccgtaatatacgcccgatattcatcggacaagcagacagagcagtccatt

SEQ ID NO: 18488 - DNA, 260 bp, Unknown
  Description of Unknown: LeftRegion for integrase B5489 sequence
tacgccagccctccctctgccgtggtcatcattcgcccttctcctgtaataacaatgtttccgcattgttgcatttgtgtcgcctcaggcaagggcgcgatggcgggtatatgaaagaactattacccgggtaatagtatcattttacaaaagaaataaccttgttataatcaaccacttagcagtatcaggaggttgaaatgacactggcattcagttacgtaaggttcagtaccaagcaccaagcgtcaggtacttcg

SEQ ID NO: 18489 - DNA, 260 bp, Unknown
  Description of Unknown: LeftRegion for integrase B5490 sequence
gcctatatcggatcaaaagcaattacagtcattggattgacgcctgttttctccgacgaactggaaaagcaaaaaagcagagaaaagattgaatacggactattcaacatttttgagaagtattcgcacatttgagcatacggagccgccgcagtataatcatgctgttggtggctctttctacatagaggggagagcttatgttaaaatatgatgcgatatacgcgcgacagtctgttgatcgcatggacagcatttcc

SEQ ID NO: 18490 - DNA, 260 bp, Unknown; identical to SEQ ID NO: 16187
  Description of Unknown: LeftRegion for integrase B5491 sequence

SEQ ID NO: 18491 - DNA, 260 bp, Unknown; identical to SEQ ID NO: 15411
  Description of Unknown: LeftRegion for integrase B5492 sequence

SEQ ID NO: 18492 - DNA, 260 bp, Unknown
  Description of Unknown: LeftRegion for integrase B5493 sequence
tacacttaagttaaataagcaatatagataaaaaacagcaaaaccgcccggtatccgcacaccgaacggcttcacatagatttcctgtataagccgaagctttgtgatacagtacatcacggcagatatattgtatcacaaaaaaccggcaccgtacaggtgtattttttatacccttttttaagattggagtgatacatatggataaatacgcaatataccttcgaaaatcaagagctgatttggaagctgaaaagcta

SEQ ID NO: 18493 - DNA, 260 bp, Unknown
  Description of Unknown: LeftRegion for integrase B5494 sequence
tgttactaagtaagcttaagtttttatctttagaaactaaatctttacacttaggtaatgataggtttatttccttaactaatcttcctaatatgtttatctatgatatgtctatcatttaaatatatttgatatattctatagttttaaaaactaaaatatagtattagttattttatatcataaaggaggtatacataatgcgttgtgctatatatttgagaaaatctagagctgatgaagaagccgaaaataaaggc

SEQ ID NO: 18494 - DNA, 260 bp, Unknown
  Description of Unknown: LeftRegion for integrase B5495 sequence
aacatatgtgttaaataaaagcacgatgaaattccacttgccgagctgctcgtcctgctccaaaatcaaggccgagaataaaggcagctacaccggcagccgtgacgatctcatcggtcagggttattcgccctgcggcaactgccatccgtaataaattcgccccggataagctccggggcttgtcataggtgataatcatggacaatgtcgtcatatatgcccgctactcctccgacaagcagacggagcagagcata

SEQ ID NO: 18495 - DNA, 260 bp, Unknown; identical to SEQ ID NO: 16089
  Description of Unknown: LeftRegion for integrase B5496 sequence

SEQ ID NO: 18496 - DNA, 260 bp, Unknown; identical to SEQ ID NO: 13129
  Description of Unknown: LeftRegion for integrase B5497 sequence

SEQ ID NO: 18497 - DNA, 260 bp, Unknown
  Description of Unknown: LeftRegion for integrase B5498 sequence
taaattcgaaaaacaagctgattattttgcactcaagctaagtaatatagaatttgatgaaatagaaatgtatcaaatgacttataaacaaatagctagttgtattgaagttcccgcaagagctttaaaacaactagttaatttataatatattttttaaattataatcaaacatatattcggttttcaataaggaggttttgaaaatagaaaaaatagcaatatatgctcgtagaagcgaggaaaaagaaactggtgaa

SEQ ID NO: 18498 - DNA, 260 bp, Unknown
  Description of Unknown: LeftRegion for integrase B5499 sequence
cacacaatattattcttgaattcgatccagaagttgctccacatattgtatctttctacgataaatatggcaactaaataaaacaaaaaaaccgctctgggctcctacccccaaagcggcgtgcaaatcccatactgccaaatataagaacttgcacggatattataccacaatatccgtctgtcgaaaagaggaacattatgaataattctgtcctgtccgccatgtacttgcgcaaatcccgtgcggatgacccacat

SEQ ID NO: 18499 - DNA, 260 bp, Unknown
  Description of Unknown: LeftRegion for integrase B5500 sequence
taatgctgttgctaacgcattgaacgctaaagaaggagagaaagtatgcagttttcaacaacgccaaccctggaaggacaaccgattaccgagtactgcggcgtggtgaccggcgaagcgattctgggcgccaatatcttccgggatatgtttccattattgacataatgatataattgttctctgaccaaggaggacatatggaactcgcttttagttacgcccgattcagtacaaaatctcagtccacagggaccagt

SEQ ID NO: 18500 - DNA, 260 bp, Unknown
  Description of Unknown: LeftRegion for integrase B5501 sequence
tgaaaaaatgcattttcgtgtaatcagcagacatccgcagtattccatagacaccgcaaatcgcatatttgaagaacaaagaaaagatctgtacaatatctttaaaaaatatgcatgatttttaaaccggaaagcggtattcatggtataatcaatgtaatggagagtgactgtttacacatagtaaggaggtatgtgctatgtgtccaattgatgctttatacgcaagacagtcactggataaaaaagatagtatctcc

SEQ ID NO: 18501 - DNA, 260 bp, Unknown
  Description of Unknown: LeftRegion for integrase B5502 sequence
tgaaaaaatgcattttcgtgtaatcagcagacatccgcagtattccatagacaccgcaaaccgcatatttgaagaacaaagaaaagatctgtacaatatctttaaaaaatatgcatgatttttaaaccggaaagcggtattcatggtataatcaatgtaatggagagtgactgtttacacatagtaaggaggtatgtgctatgtgtccaatcgatgctttatacgcaagacagtcactggataaaaaagacagtatctcc

SEQ ID NO: 18502 - DNA, 260 bp, Unknown; identical to SEQ ID NO: 15792
  Description of Unknown: LeftRegion for integrase B5503 sequence

SEQ ID NO: 18503 - DNA, 260 bp, Unknown
  Description of Unknown: LeftRegion for integrase B5504 sequence
atctatgtctgaacctgtctctgaattatcttctttatctgatattgaggaagatgattcggaagacgaataaaatcaaaataaaaagccgccctttgtgctaccaacacagagagcggcgtgcaaatcccatactgccaaatataagaacttgcacggatattataccacaatatccgtctgtcgaaaagaggaacattatgaataattctgtcctgtccgccatgtacttgcgcaaatcccgtgcggatgacccacat

SEQ ID NO: 18504 - DNA, 260 bp, Unknown
  Description of Unknown: LeftRegion for integrase B5505 sequence
ggcgtaggcaaaaagcagaaaacggtctggaaagatttctttgtgataaactacacggcagcaggtagcagcgagccctccgttctgtcgtttgaaatggtcgggcctccggtcggtttcgctccgttcctctcggagttgaagcagcgggctgggatcccggacgccccgaagtcagagacggggccgatcgttctgtaatggctcagaaaaaagcgagggccccggaggttctgatcccggcggtgatatatgcccgg

SEQ ID NO: 18505 - DNA, 260 bp, Unknown
  Description of Unknown: LeftRegion for integrase B5506 sequence
atgtttgaaatggtgatggcttccgaccgttgccgtcaaataccatccatttgcttttaagattttgatgacttcccgtgacgaataacttttcatctcctccctccttatgtatatattataacacatattattatatttgtcaagggctttggcaaatatttttctatttgttgtttggtgaaagaaggtatatgcggatgaatgcggtcatctatgcgagatactcgtcggataagcaaacggagcagtccattgaa

SEQ ID NO: 18506 - DNA, 260 bp, Unknown
  Description of Unknown: LeftRegion for integrase B5507 sequence
tggggagattggttctgtagtagcgacaattatattcggcgtcttattcattgcggttttaggttttctaaaatagtaaccgtttttcagccattaaacgcaattttgagagtttttgtatctaatttagccttttaagcataaaattggagccttaattacaaatttaggctcattttcgttagataagaggtgatactttgagttcggttgataaaatcgccgttatttacgcgcgttattcgtctcacggccagacc

SEQ ID NO: 18507 - DNA, 260 bp, Unknown
  Description of Unknown: LeftRegion for integrase B5508 sequence
atactgcgagaattgcggatacagctttgactttaccacacaggatgacctcaacgcccaatataataaactgaacacaaacgagggatgcgccattttggtggcggtcattctcggcgttattcttataacaatttggttttacagccattaaatgcaaatttgaggatgttttcgttaaataaggagggggtgacagtttgaatccagttgacaaaatcgccgttgtttacgcacgatattcttctcacgggcagacc

SEQ ID NO: 18508 - DNA, 260 bp, Unknown; identical to SEQ ID NO: 15702
  Description of Unknown: LeftRegion for integrase B5509 sequence

SEQ ID NO: 18509 - DNA, 260 bp, Unknown; identical to SEQ ID NO: 16187
  Description of Unknown: LeftRegion for integrase B5510 sequence

SEQ ID NO: 18510 - DNA, 260 bp, Unknown
  Description of Unknown: LeftRegion for integrase B5511 sequence
ccaagtcacagccaccaaagacgccgccagctccacctaaaccccaacaaaaataatgtatatacaagaaatcccgcatcatgcaccaccatgctgcgggatggccggcagttaccggctgtgtaaacctgtaaagggctgatttacaatattattatatcacaatcagccttgttttagaaagaaggactgattatattatgacaaaaaatgcagttatttacgcccgcttcagcagtgacaaacagcgggaagaatcc

SEQ ID NO: 18511 - DNA, 260 bp, Unknown
  Description of Unknown: LeftRegion for integrase B5512 sequence
aggttggttatcatagctgcaaaaaaatataccgaagaaaaagtcaacgccgtatatgacggcgatatttataccatcatcaacctcacgccagttatacataaagacgaccgacaggaacagaaaaatgaaattgaaaaaaccctgtacaccgtctttagcaaatacacaccgaaaaagaaataagacggaggataccgatggaagattttatttacgcaagacagtctgttgataaagaagacagtatctctattgaa

SEQ ID NO: 18512 - DNA, 260 bp, Unknown
  Description of Unknown: LeftRegion for integrase B5513 sequence
tgattcgcatttttatattgcacatatgttctgtacgctgtataataatcctataaataaaaaaatccggtactggcaataccggattcgtaacttatcaatcataggatgactgatatataaactcaaataaattatatcatacatcctgctgtttgcatagggtgtattttttatacccttttttagggaggtaatcaatgaactataatgattcaaaaggcatttatttaatgtatctcagaaaatcgcgtgctgac

SEQ ID NO: 18513 - DNA, 260 bp, Unknown; identical to SEQ ID NO: 18511
  Description of Unknown: LeftRegion for integrase B5514 sequence

SEQ ID NO: 18514 - DNA, 260 bp, Unknown; identical to SEQ ID NO: 18511
  Description of Unknown: LeftRegion for integrase B5515 sequence

SEQ ID NO: 18515 - DNA, 260 bp, Unknown
  Description of Unknown: LeftRegion for integrase B5516 sequence
tgattcgcatttttatattgcacatatgttctgtaggctgtataataatcctataaataaaaaaatccggtactggcaataccggattcgtaacttatcaatcataggatgactgatatataaactcaaataaattatatcatacatcctgctgtttgcatagggtgtattttttatacccttttttagggaggtaatcaatgaactataatgattcaaaaggcatttatttaatgtatctcagaaaatcgcgtgctgac

SEQ ID NO: 18516 - DNA, 260 bp, Unknown; identical to SEQ ID NO: 16256
  Description of Unknown: LeftRegion for integrase B5517 sequence

SEQ ID NO: 18517 - DNA, 260 bp, Unknown
  Description of Unknown: LeftRegion for integrase B5518 sequence
catttttcaacatttccttgcacatatgttctgtacgctgtataataatcctataaataaaaaaatccggtactggcaataccggattcgtaacttatcaatcatcggatgactgatatataaactcaaataaattatatcatacatcctgctgtttgcatagggtgtattttttatacccttttttagggaggtaagcaatgaactataatgattcaaaaggcatttatttaatgtatctcagaaaatcgcgtgctgac

SEQ ID NO: 18518 - DNA, 260 bp, Unknown
  Description of Unknown: LeftRegion for integrase B5519 sequence
aggttggttatcatagccgcaaaaaaatataccgaagaaaaagtcaacgccgtatatgacggcgatatttataccatcatcaacctcacgccagttatacataaagacgaccgacaggaacagaaaaatgaaattgaaaaaaccctgtacaccgtctttagcaaatacacaccgaaaaagaaataagacggaggataccgatggaagattttatttacgcaagacagtctgttgataaagaagacagtatctctattgaa

SEQ ID NO: 18519 - DNA, 260 bp, Unknown; identical to SEQ ID NO: 18511
  Description of Unknown: LeftRegion for integrase B5520 sequence

SEQ ID NO: 18520 - DNA, 260 bp, Unknown
  Description of Unknown: LeftRegion for integrase B5521 sequence
aggttggtcatcatagccgcaaagaaatataccgaagaaaaagtcaacgccgtatatgacggcgatatttataccatcatcaacctcacgccagttatacataaagacgaccgacaggaacagaaaaatgaaattgaaaaaaccctgtacaccgtctttagcaaatacacaccgaaaaagaaataagacggaggataccgatggaagattttatttacgcaagacagtctgttgataaagaagacagtatctctattgaa

SEQ ID NO: 18521 - DNA, 260 bp, Unknown
  Description of Unknown: LeftRegion for integrase B5522 sequence
gagaaagctgggagttagctgttaggatgattgaaaaattagctcaagccgaaaaaaataacactgaaaaataatatttattataaaaagttatgttataagcataactttttatgttatgtggaatttcattcttactctaaaaataataaaaaataattttatatgcagtagcataaaattaactaaaggtggtttttatgaaaagaattgcaatttattcaaggaaatctaaagaaactgatactggagaatctatt

SEQ ID NO: 18522 - DNA, 260 bp, Unknown
  Description of Unknown: LeftRegion for integrase B5523 sequence
aaatgaatttatcgatgacaataatgctgtaaaaaaagatattcttaactctctattaaaagtacatgatgaaaatacattaaaattaatttctgatatgatacataaatttgctgaatgcgaaaacttataaaaataaatttaattagatgtatccattaatatatttaggagcataagattaaataaaggagaatggtatgaaaagaattgcaatctattcaagaaaatctaaagaaactgatacaggtgaatcaatt

SEQ ID NO: 18523 - DNA, 260 bp, Unknown
  Description of Unknown: LeftRegion for integrase B5524 sequence
aggcaaatgtgtcacagatttgccaaatgatttcagaaaaagttctctagaatgaaacagccgcccgcttctgttggcgcagaaacgagcggcaaaaatagaacagcttacccaaagtggataattccgtccaagcaatgaaattataccactttcggggtaggcttggcaagtcatactttgaaggtggtttttgtattatgtacaaagcaagcaacggaagtggtgaactcatggaaaataaagtaatccgcgtcggc

SEQ ID NO: 18524 - DNA, 260 bp, Unknown
  Description of Unknown: LeftRegion for integrase B5525 sequence
ttacaagtgagtacaagggccgggtaactcaatattgggagcaagatcattaccaattaaccgagttttaactgtatataatgtattttattaatatttagaggtgaaaagatggaagaaaaatacgaaataatagcaaaatatttactaaagcttcttttagagtctgaaccccccatcaacgatgaggaggctgcgtaatggatcgggctgtaatatacgcgcgttacagtagcgataatcagcgcgaggaatccatt

SEQ ID NO: 18525 - DNA, 260 bp, Unknown
  Description of Unknown: LeftRegion for integrase B5526 sequence
aggttggtcatcatagccgcaaagaaatataccgaagaaaaagtcaacgccgtatatgacggcgatatttataccatcatcaacctcacgccagttatacataaagacgaccgacaggaacagaaaaatgaaattgaaaaaaccctgtacaccgtctttagcaaatacacaccgaaaaagaaataagacggaggatacagatggaagattttatttacgcaagacagtctgttgataaagaagacagtatctctattgaa

SEQ ID NO: 18526 - DNA, 260 bp, Unknown
  Description of Unknown: LeftRegion for integrase B5527 sequence
aggttggttatcatagccgcaaaaaaatataccgaagaaaaagtcaacgccgtatatgacggcgatatttataccatcatcaacctcacgccagttatacataaagacgaccgacaggaacagaaaaatgaaattgaaaaaaccctgtacaccgtctttagcaaatacacaccgaaaaagaaataagacggaggatatcgatggaagattttatttacgcaagacagtctgttgataaagaagacagtatctctattgaa

SEQ ID NO: 18527 - DNA, 260 bp, Unknown; identical to SEQ ID NO: 18511
  Description of Unknown: LeftRegion for integrase B5528 sequence

SEQ ID NO: 18528 - DNA, 260 bp, Unknown; identical to SEQ ID NO: 18511
  Description of Unknown: LeftRegion for integrase B5529 sequence

SEQ ID NO: 18529 - DNA, 260 bp, Unknown
  Description of Unknown: LeftRegion for integrase B5530 sequence
accgcagcgccgagaacatcagccttccgacgctcaagaagctgtcggaatacttcggagtaagcatcgaagaacttgtctacggaaacgaaacaaggcgcgagataacgttctccacgccgaactacaccaacgaggaattggagcagatagcgcagtacgcgatgttcctgaagcagcagagaaaggattgattatgaatggcatacgcaatgtacttgagaaaatcgagaaaggacgatgacactggcatcgaggac

SEQ ID NO: 18530 - DNA, 260 bp, Unknown
  Description of Unknown: LeftRegion for integrase B5531 sequence
attctggacaaatgcaaggcagccatgactgaagtcgccattgtggaatatcaaccggcggcataacacaaaaaaaccgccccacggcggcaaccgtgaagcggcaagaggaaaaactattgctataatagacttcccaaagcaaggtctattatagcatatttcctctgaaaaatcaagtcttaggaggaaatttacacatgaatgcagtgatctacgcccgttacagctgcgaccggcagaccgagcagtccattgag

SEQ ID NO: 18531 - DNA, 260 bp, Unknown
  Description of Unknown: LeftRegion for integrase B5532 sequence
tgattcacatttttatattgcacatatgttctgtaggctgtataataatcctataaataaaaaaatccggtactggcaataccggattcgtaacttatcaatcataggatgactgatatataaactcaaataaattatatcatacatcctgctgtttgcatagggtgtattttttatacccttttttagggaggtaatcaatgaactataatgattcaaaaggcatttatttaatgtatctcagaaaatcgcgtgctgac

SEQ ID NO: 18532 - DNA, 260 bp, Unknown
  Description of Unknown: LeftRegion for integrase B5533 sequence
gtgatttttatagcaacaaaatatgagcaggaaaaatttaatgccgtgtattacggagatgtctataccattatcaacctcactcccgacatacataaagacgacagacaggaacgaaaaaacgaaattgaaaaagcgttgtatgccgtctttagcaaatacacatccaatccaaaacaagatgggagaaggtaaatacattggaggatttgatttacgcaagacagtcggtagacaaagaggacagtatttcaattgaa

SEQ ID NO: 18533 - DNA, 260 bp, Unknown; identical to SEQ ID NO: 18511
  Description of Unknown: LeftRegion for integrase B5534 sequence

SEQ ID NO: 18534 - DNA, 260 bp, Unknown; identical to SEQ ID NO: 16187
  Description of Unknown: LeftRegion for integrase B5535 sequence

SEQ ID NO: 18535 - DNA, 260 bp, Unknown; identical to SEQ ID NO: 18515
  Description of Unknown: LeftRegion for integrase B5536 sequence

SEQ ID NO: 18536 - DNA, 260 bp, Unknown
  Description of Unknown: LeftRegion for integrase B5537 sequence
tgtccagtaaacatgatggattttaattgcaccggattcgaggcaattaaacagggcaataaaaaatcccccaccggttgcagccgatgggggataaaatagaacagcttacccaaagtggataattccgtccgaacaacgaaattataccactttcgggtaggcttggcaagtcatacttagagggtggtttttgtattatgtacaaagcaagcaacggaagtggtgaactcatggaaaataaagtaatccgcgtcggc

SEQ ID NO: 18537 - DNA, 260 bp, Unknown; identical to SEQ ID NO: 18520
  Description of Unknown: LeftRegion for integrase B5538 sequence

SEQ ID NO: 18538 - DNA, 260 bp, Unknown; identical to SEQ ID NO: 18518
  Description of Unknown: LeftRegion for integrase B5539 sequence

SEQ ID NO: 18539 - DNA, 260 bp, Unknown; identical to SEQ ID NO: 18518
  Description of Unknown: LeftRegion for integrase B5540 sequence

SEQ ID NO: 18540 - DNA, 260 bp, Unknown
  Description of Unknown: LeftRegion for integrase B5541 sequence
cgaattattaaaggtatgttacaactaaaagatagagaaagctgggaactggctgttaatatggttgaaaaattagcccaagctgaaaaaaacagtactgaagaataatttctaatttaaaaagttatgtcataatcataactttttattctattaataaatagtatattagagaattaatatttaaatacggaggatatatgaaaagaattgcaatctattcaagaaaatctaaagaaactgatacaggtgaatcaatt

SEQ ID NO: 18541 - DNA, 260 bp, Unknown
  Description of Unknown: LeftRegion for integrase B5542 sequence
aggttggtcatcatagccacaaagaaatataccgaagaaaaagtcaacgccgtatatgacggcgatatttataccatcattaacctcacgccagttatacataaagacgacagacaggaacagaaaaatgaaattgaaaaaaccctgtacaccgtctttagcaagtacacaccgaaaaagaaataagacggaggataccgatggaagattttatttacgcaagacagtctgttgataaagaagacagtatctctattgaa

SEQ ID NO: 18542 - DNA, 260 bp, Unknown; identical to SEQ ID NO: 18511
  Description of Unknown: LeftRegion for integrase B5543 sequence

SEQ ID NO: 18543 - DNA, 260 bp, Unknown
  Description of Unknown: LeftRegion for integrase B5544 sequence
gcagtgcagaaaacatcagtctgaaaactttaaaaaagctatctgagtacttcggcgtgagcatggaagagctggtgcatggcaaaacaccgaagcacgatcttgtgttctcaagcgacacatatacggaggaagaactcgcgcagattaagcaattcgcgcactttttaatagggcaacgacgaaaggacagatgatgaatgacatacgcaatttatttacgaaaatcacgaaaagatgacgaaacgggatatgctgat

SEQ ID NO: 18544 - DNA, 260 bp, Unknown
  Description of Unknown: LeftRegion for integrase B5545 sequence
gcagtgcagaaaacataagtctgaaaactttaaaaaagctatctgagtacttcggcgtgagcatggaagagctggtgcatggcaaaacaccgaagcacgatctcgtgttctcaagcgacacatacacggaggaagaactcgcgcagattaagcaattcgcgcactttttaatagggcaacgacgaaaggacagatgatgaatgacatacgcaatttatttacgaaaatcacgaaaagatgacgaaacgggatatgctgat

SEQ ID NO: 18545 - DNA, 260 bp, Unknown
  Description of Unknown: LeftRegion for integrase B5546 sequence
aggttggtcatcatagccgcaaagaaatataccgaagaaaaagtcaacgccgtatatgacggcgatatttataccatcatcaacctcacgccagttatacataaagacgaccgacaggagcagaaggacgagattgaaaagaccctgtacgccgtctttagcaaatacacaccgaaaaagaaataagacggaggataccgatggaagatttaatttacgcaagacagtctgttgataaagaggacagtatctctattgaa

SEQ ID NO: 18546 - DNA, 260 bp, Unknown
  Description of Unknown: LeftRegion for integrase B5547 sequence
gggagatatttttatattgcacatatgttttacacattgtataatcatattaacaaaaaatccggtactgacaataccggatttccagttacctatcaactaaggatgttgataatctaactgcttcaattagattataacatgcatcctgtgatttgcatagggtgtattttttatacccttttttagggaggtaatcaatgaactataatgattcaaaaggcatttatttaatgtatctcagaaaatcgcgtgctgac

SEQ ID NO: 18547 - DNA, 260 bp, Unknown; identical to SEQ ID NO: 18511
  Description of Unknown: LeftRegion for integrase B5548 sequence

SEQ ID NO: 18548 - DNA, 260 bp, Unknown
  Description of Unknown: LeftRegion for integrase B5549 sequence
ccaagctggttgaacgtaaaagcagaggaagccggaattaatttttctgctgttcttcgtgaagcccttgaaaatcgtcttaatatcaggtgaaaataagattcctcggtcaataccggggaattcttataaaaataacgccctgcaaatatacagagcgttataaaaaacacaatcaataataaaataaggaggaatttatgcaaaaatatctaatgtacctaagaaaatcaagagccgacggagaacatgaaaccatt

SEQ ID NO: 18549 - DNA, 260 bp, Unknown
  Description of Unknown: LeftRegion for integrase B5550 sequence
atgtgtggattgaaaaaatagtacatagaaaaagccctaccaaaaccggcagggcaacatcaaacacaaaaaaaaaccgccccacggcggcaaccgtgaagcggcaagaggaaaaactattgcgataatagccattccacaacaaggtctattatagcatatttcctcgtaaaaatcaagtcttaggaggaaatttacacatgaatgcagtgatctacgcccgttacagctgcgaccggcagaccgagcaatccattgag

SEQ ID NO: 18550 - DNA, 260 bp, Unknown; identical to SEQ ID NO: 16948
  Description of Unknown: LeftRegion for integrase B5551 sequence

SEQ ID NO: 18551 - DNA, 260 bp, Unknown; identical to SEQ ID NO: 18515
  Description of Unknown: LeftRegion for integrase B5552 sequence

SEQ ID NO: 18552 - DNA, 260 bp, Unknown; identical to SEQ ID NO: 18511
  Description of Unknown: LeftRegion for integrase B5553 sequence

SEQ ID NO: 18553 - DNA, 260 bp, Unknown
  Description of Unknown: LeftRegion for integrase B5554 sequence
accgcagcgccgagaacataagccttccgacgctcaagaagctgtcggaatacttcggagtaagcatcaaggaacttgtctacggaaacgaaacaaggcgcgagataacgttctccacgccgaactacaccaacgaggaattggagcagatagcgcagtacgcgatgttcctgaagcagcagagaaaggattgattatgaatggcatacgcaatgtatttgagaaaatctagaaaggacgatgacactggcatcgaggac

SEQ ID NO: 18554 - DNA, 260 bp, Unknown
  Description of Unknown: LeftRegion for integrase B5555 sequence
aggttggttatcatagccgcaaagaaatataccgaagaaaaagtcaacgccgtgtatgacggcgatatttataccatcatcaacctcacgccagttatacataaagacgaccgacaggagcagaagaacgaaattgaaaagaccctgtacaccgtctttagcaaatacacaccgaaaaagaaataagacggaggataccgatggaagatttaatttacgcaagacagtctgttgacaaagaagacagtatctctattgaa

SEQ ID NO: 18555 - DNA, 260 bp, Unknown
  Description of Unknown: LeftRegion for integrase B5556 sequence
aagaaagttgggagttagttgctaaaataattgaaaaactagctcaagctgaagaaaatagcactaaagaataatatctattataaaaagttatgttataaacataactttttatgttatgtagaatttccttcttactctgaaaataattaaaaataattttatatgcagtagcataaaattaaataaaggtggtttttatgaaaagaattgcaatttattcaagaaaatctaaagaaaccgatactggggaatctatt

SEQ ID NO: 18556 - DNA, 260 bp, Unknown
  Description of Unknown: LeftRegion for integrase B5557 sequence
gctttttatcaattagctaatatgttatacttaccagaggaacaaatagcgatatgtccgatatgccatagattttttatacggaaaaatgccaatcaaaaatattgtcataatactaaagttgttaatggaatagaaaggcgaacttgttatgctcaaaaaatgtataagagaaatcaaagcagaaaggaatcagaataatgaatgttgtaatatatgctcgtttcagttcaagtggacagagagaagaaagtattgaa

SEQ ID NO: 18557 - DNA, 260 bp, Unknown; identical to SEQ ID NO: 18518
  Description of Unknown: LeftRegion for integrase B5558 sequence

SEQ ID NO: 18558 - DNA, 260 bp, Unknown
  Description of Unknown: LeftRegion for integrase B5559 sequence
actcaaaagcaattggctgagatgataggagtttctcaagcctatatttcaaaaatagaaagtgatgaatttgttaatgtcactttaattgaaataataaaattaagtaaagcactatcaattaatgaactggaagttgctaaatattttctaaataaatacaataattataaatatgaatttggaggagaaatagcataatgaaagtatgtatgtatcttaggaaatcaaggcaagatgaagaattagagaaaaaagaa

SEQ ID NO: 18559 - DNA, 260 bp, Unknown
  Description of Unknown: LeftRegion for integrase B5560 sequence
accgaagcgctgagaacataagccttccgacgctcaagaagctgtcggaatacttcggagtaagcatcgaggaacttgtctacggaaacgaaacaaggcgcgagataacgttctccacgccgaactacaccaacgaggaattggagcaaatagcgcagtacgcgatgttcctgaagcagcagagaaaggattgattatgaatggcatacgcaatgtatttgagaaaatctagaaaggacgatgacactggcatcgaggac

SEQ ID NO: 18560 - DNA, 260 bp, Unknown
  Description of Unknown: LeftRegion for integrase B5561 sequence
taaatgaatttatcgatgacaataatgccgtaaaaaaagatattctcaattctctattaaaagtacatgatgaaaatacattaaaattaatttctgatatgatacataaatttgctgaatacgaaacttataaaaataaatttaattagatgtatttattgatatatttagtggcataagattaaataaaggaggctattatgaaaaaaattgcaatctattcaaggaaatctaaagaaactgatacaggagaatctatt

SEQ ID NO: 18561 - DNA, 260 bp, Unknown
  Description of Unknown: LeftRegion for integrase B5562 sequence
taaatgaatttatcgatgacaataatgccgtaaaaaaagatattctcaattctctattaaaagtacatgatgaaaatacattaaaattaatttctgatatgatacataaatttgctgaacacgaaacttataaaaataaatttaattagatgtatttattgatatatttagcggcataagattaaataaaggagactattatgaaaaaaattgcaatctattcaagaaaatctaaagaaactgatactggagaatctatt

SEQ ID NO: 18562 - DNA, 260 bp, Unknown; identical to SEQ ID NO: 18518
  Description of Unknown: LeftRegion for integrase B5563 sequence

SEQ ID NO: 18563 - DNA, 260 bp, Unknown
  Description of Unknown: LeftRegion for integrase B5564 sequence
tttcgatcaagggcttatgacggtcttgcctgatcttacaattcaggtctcggactatgtgaaagacagctacgatgaccaaaatacgaaagactggctactcggcgtagagggtacaaaaatcatcaggccgaagaggttcgcgccaaatcgcgacatgctggcctaccacaatgagtttgtattcctgaggtgattccatgcagcgagcagtgatatacgccaggtacagccctggaccaaatcagacggagcagtcg

SEQ ID NO: 18564 - DNA, 260 bp, Unknown; identical to SEQ ID NO: 18518
  Description of Unknown: LeftRegion for integrase B5565 sequence

SEQ ID NO: 18565 - DNA, 260 bp, Unknown
  Description of Unknown: LeftRegion for integrase B5566 sequence
aggttggttatcatagctgcaaaaaaatataccgaagaaaaagtcaacgccgtatatgacggcgatatttataccatcatcaacctcacgccagttatacataaagacgaccgacaggaacagaaaaatgaaattgaaaaaaccctgtacaccgtctttagcaaatacacgccgaaaaagaaataagacggaggataccgatggaagattttatttacgcaagacagtctgttgataaagaagacagtatctctattgaa

SEQ ID NO: 18566 - DNA, 260 bp, Unknown; identical to SEQ ID NO: 18511
  Description of Unknown: LeftRegion for integrase B5567 sequence

SEQ ID NO: 18567 - DNA, 260 bp, Unknown
  Description of Unknown: LeftRegion for integrase B5568 sequence
ccttgcggtctgcatcgtgtcgctcccggtcggcttgatcattgtagccgttggagcgtaccgggcggtaaaagccggggatatttatgatgctgcagttgctcggtacgagcaacaaatctcggactatgttgactggctggatgaagtcaacgcaaaataaaaagccgccctctgtgggcggcgggaggttgctctgaatgcgcgcaaaaaagaaaccggccgtgatctacactcggtactcgtctcataaccagcgg

SEQ ID NO: 18568 - DNA, 260 bp, Unknown
  Description of Unknown: LeftRegion for integrase B5569 sequence
gccaacgggtccatcgccgtggtggagaccgaggactaccgcgcggtcatgcgccgctggtacaagggcagcaccaagctgatgctgtcggcggatagcttcgaggactacgaggacatgattttcggcatggacgacggacccgtgcgcgtgatcggcacggtggtgtggttccaggccgccgacgagatggagtagccgtgggcgggcgcgcggcgatatacgcccgcttctcgagccacaaccagcgcggcgagtcc

SEQ ID NO: 18569 - DNA, 260 bp, Unknown
  Description of Unknown: LeftRegion for integrase B5570 sequence
tccacgaaatctctgaccttatgaaacttatgaactaaataaaaacgcccaccctagcaaaaaggatgagcaaaaacaaaaatggcccagctggcggcaaccaactggaccaaactaggaagtgcgatatacttcatagctccaactcaagtatatcacacctcctggattttcgcacccaaaatcatggaggtgtttctatgtcgaccattgccgtcatctacgcgcgttactccagcagcaaccagcgcgaagaatcc

SEQ ID NO: 18570 - DNA, 260 bp, Unknown
  Description of Unknown: LeftRegion for integrase B5571 sequence
cagctccgagaacatcagccttcagacgcttaagaagctgtcggaatacttcgggataagcatcgaagagcttgttcatggcaggcatcaaaggcgcgagattgcgttctcaagtagcgcgtatacggacgaagagcttgaccagattcagcgctttgcgcactttttgatagggcaacgaggaaaggggtaattgatgaatgacatatgcgatttatctacgaaaatcaagaaaagacgatgacgcgggctttgccgac

SEQ ID NO: 18571 - DNA, 260 bp, Unknown; identical to SEQ ID NO: 15539
  Description of Unknown: LeftRegion for integrase B5572 sequence

SEQ ID NO: 18572 - DNA, 260 bp, Unknown
  Description of Unknown: LeftRegion for integrase B5573 sequence
aggttggtcatcatagctgcaaaaaaatataccgaagaaaaagtcaacgccgtatatgacggcgatatttataccatcatcaacctcacgccagttatacataaagacgaccgacaggaacagaaaaatgaaattgaaaaaaccctgtacaccgtctttagcaaatacacaccgaaaaagaaataagacggaggataccgatggaagattttatttacgcaagacagtctgttgataaagaagacagtatctctattgaa

SEQ ID NO: 18573 - DNA, 260 bp, Unknown
  Description of Unknown: LeftRegion for integrase B5574 sequence
actcggcattttttcaattgcaatagttttggcacggaactaaaaaaatgcgtctcggtaaattttgggcacgaaaaaatacagttttatttgtacaagataaacaataaaatttacattaatgcccaataaaaataacgccctgcaaatatacagagcgttataaaaaacacaatcaataataaaataaggaggaatttatgcaaaaatatctaatgtacctaagaaaatcaagagccgacggagaacatgaaaccatt

SEQ ID NO: 18574 - DNA, 260 bp, Unknown
  Description of Unknown: LeftRegion for integrase B5575 sequence
actcaaaagcaattggctgagatgataggagtttctcaagcctatatttcaaaaatagaaagtgatgaatttgttaatgtcactttaattgaaataataaaattaagtaaagcactatcaattaatgaactggaagttgctaaatattttctaaataaatacaataattataaatatgaatttgggggagaaatagcataatgaaagtatgtatgtatcttagaaaatcaaggcaagatgaagaattagagaaaaaagaa

SEQ ID NO: 18575 - DNA, 260 bp, Unknown
  Description of Unknown: LeftRegion for integrase B5576 sequence
acgcccgctgctgctggtatcgcaagaaccttgaggctggcaggattttttacggaaagaataagaataatggataaaaaaatcccctgcttggtgcgccaacaccaagcaggggagatggatatgtataaaatacacactccacaacatctgtattttatcatatcctgacgaaaaaatcaataggagtgataaaaaatatgcaaaccgccgtgatatacgcccggtattcgtccgacaagcagacggagcagtccatc

SEQ ID NO: 18576 - DNA, 260 bp, Unknown; identical to SEQ ID NO: 18520
  Description of Unknown: LeftRegion for integrase B5577 sequence

SEQ ID NO: 18577 - DNA, 260 bp, Unknown
  Description of Unknown: LeftRegion for integrase B5578 sequence
agaataataaaaggtatgttacaactaaaagatagagaaagctgggaactggctgttaaaatgattgaaaaactagcacaagctgaaaaaaacagtactgaagaataatttctaatttaaaaagttatgtcataatcataactttttatgctattaataaatagtatattagagaattaatatttaaatacggaggatacatgaaaagaattgcaatctattcaagaaaatctaaagaaactgatacaggtgaatcaatt

SEQ ID NO: 18578 - DNA, 260 bp, Unknown; identical to SEQ ID NO: 15792
  Description of Unknown: LeftRegion for integrase B5579 sequence

SEQ ID NO: 18579 - DNA, 260 bp, Unknown; identical to SEQ ID NO: 18511
  Description of Unknown: LeftRegion for integrase B5580 sequence

SEQ ID NO: 18580 - DNA, 260 bp, Unknown
  Description of Unknown: LeftRegion for integrase B5581 sequence
gggagatatttttatattgcacatatgttttacacattgtataatcatattaacaaaaaatccggtactgacaataccggatttccagttacctatcaactaaggatgttgataatctaactgcttcaattagattataacatgcatcctgtgatttgcatagggtgtattttttatacccttttttagggaggtaatcaatgaactataatgattcaaaaagcatttatttaatgtatctcagaaaatcgcgtgctgac

SEQ ID NO: 18581 - DNA, 260 bp, Unknown
  Description of Unknown: LeftRegion for integrase B5582 sequence
ctcgagtactttatagatgatataaatagtattaaaattgaacaataccaagtattagatagttctatagaaatgttttatgaaaaaggttatatacatgaagatggaacagttgatagttctatagaaagtatcttattagaaatattaagaaaagaaattaaagttaaaatcgaaagaatgaaggaagtgaataaataatgaaaatcgctatttattctagaaaatctaaagaaacagatacaggtgaatctattcaa

SEQ ID NO: 18582 - DNA, 260 bp, Unknown; identical to SEQ ID NO: 18511
  Description of Unknown: LeftRegion for integrase B5583 sequence

SEQ ID NO: 18583 - DNA, 260 bp, Unknown; identical to SEQ ID NO: 13188
  Description of Unknown: LeftRegion for integrase B5584 sequence

SEQ ID NO: 18584 - DNA, 260 bp, Unknown
  Description of Unknown: LeftRegion for integrase B5585 sequence
acaccctttcaaatcttgtaatagcgatatgtatatatttatattatatcatatattttattacatatcaagagataaataaaaaaaacgccccaaaagatgctggaacatctctcggagcgcaggagaatgtggtacattcaccattcatacaatgtgaattataccatatcctccaagaaaagtcaaggaggaattaaatgaaaatcgccgtaatatacgcccgatactcttcggacaagcagacggagcagtccatc

SEQ ID NO: 18585 - DNA, 260 bp, Unknown; identical to SEQ ID NO: 18518
  Description of Unknown: LeftRegion for integrase B5586 sequence

SEQ ID NO: 18586 - DNA, 260 bp, Unknown; identical to SEQ ID NO: 18511
  Description of Unknown: LeftRegion for integrase B5587 sequence

SEQ ID NO: 18587 - DNA, 260 bp, Unknown; identical to SEQ ID NO: 18511
  Description of Unknown: LeftRegion for integrase B5588 sequence

SEQ ID NO: 18588 - DNA, 260 bp, Unknown
  Description of Unknown: LeftRegion for integrase B5589 sequence
aggttggttatcatagctgcaaaaaaatataccgaagaaaaagtcaacgccgtatatgacggcgatatttataccatcatcaacctcacgccagttatacataaagacgaccgacaggaacagaaaaatgaaattgaaaaaaccctgtacaccgtctttagcaaatacacaccgaaaaagaaataagacggaggataccgatggaagattttatttacgcaagacagtctgttgataaagaagacagcatctctattgaa

SEQ ID NO: 18589 - DNA, 260 bp, Unknown
  Description of Unknown: LeftRegion for integrase B5590 sequence
aggcaaatgtgtcacagatttgccaaatgatttcagaaaaagttctctagaaagaaaaagccgcccgcttctgttggcgcagaaacgaacggcaaaaatagaacagcttacccgaaagtggataattccgtccaagcaatgaaattataccactttcgggtaggcttggcaagtcatactctgagggtggtttttgtattatgtacaaagcaagcaacggaagcggtgaactcatggaaaataaagtaatccgcgtcggc

SEQ ID NO: 18590 - DNA, 260 bp, Unknown
  Description of Unknown: LeftRegion for integrase B5591 sequence
agcatcaacgtcaatcgactggtgcaggatgcggtgtgggatacgccgctgcgcgacgtcatggacaggatggaaatacagatcgagaaaatccacaaatacctgatcgccttcaacgagatcctgaaggaacggctggcagccggtctgctgccgggatacgacgcaggctaggacaggttgatcatgacgacatccccatgcagcgggtagcgtgccgcgaattcattgatcggcaaaaggattggactttagtagac

SEQ ID NO: 18591 - DNA, 260 bp, Unknown; identical to SEQ ID NO: 18518
  Description of Unknown: LeftRegion for integrase B5592 sequence

SEQ ID NO: 18592 - DNA, 260 bp, Unknown
  Description of Unknown: LeftRegion for integrase B5593 sequence
ttgggcagcgtacccaacaaagccggatacatcaaggcattgatccgcaaggatattgaagaaaacggataaaaaaaccgccccacggcggcaaccgtgagacggcaagaggaaaaactattgcgataatagccctccagaacaaggtctattatagcatatttcctctgaaaaatcaagtcttaggaggaaatatacacatgaatgcagtgatctacgcccgttacagctgcgaccggcagaccgagcagtccattgag

SEQ ID NO: 18593 - DNA, 260 bp, Unknown
  Description of Unknown: LeftRegion for integrase B5594 sequence
actcaaaagcaattggctgagatgataggagtttctcaagcctatatttcaaaaatagaaagtgatgaatttgttaatgtcactttaattgaaataataaaattaagtaaagcactatcaattaatgaactggaagttgctaaatattttctaaataaatacaataattataaatatgaatttgggggagaaatagcataatgaaagtatgtatgtatcttagaaaatcaagacaagatgaagaattagagaaaaaagaa

SEQ ID NO: 18594 - DNA, 260 bp, Unknown; identical to SEQ ID NO: 18511
  Description of Unknown: LeftRegion for integrase B5595 sequence

SEQ ID NO: 18595 - DNA, 260 bp, Unknown; identical to SEQ ID NO: 18511
  Description of Unknown: LeftRegion for integrase B5596 sequence

SEQ ID NO: 18596 - DNA, 260 bp, Unknown; identical to SEQ ID NO: 18574
  Description of Unknown: LeftRegion for integrase B5597 sequence

SEQ ID NO: 18597 - DNA, 260 bp, Unknown; identical to SEQ ID NO: 13967
  Description of Unknown: LeftRegion for integrase B5598 sequence

SEQ ID NO: 18598 - DNA, 260 bp, Unknown
  Description of Unknown: LeftRegion for integrase B5599 sequence
gccaacgggtccatcgccgtggtggagaccgaggactaccgcgcggtcatgcgccgctggtacaagggcagcaccaagctgatgctgtcggcggatagcttcgaggactacgaggacatgattttcggcatggacgacggacccgtgcgagtgatcggcacggtggtgtggttccaggccgccgacgagatggagtagccgtgggcgggcgcgcggcgatatacgcccgcttctcgagccacaaccagcgcggcgagtcc

SEQ ID NO: 18599 - DNA, 260 bp, Unknown
  Description of Unknown: LeftRegion for integrase B5600 sequence
caactataaaagatggaaaaagttcaaaactaaagaaggctgaagagctaatattaaaaggtcatgatattttaattttatctgaagatactttttatgatttaattctggataattctcataattaaattctaagtattctttataataaagactttgggtttatcgaagtctttatttaatttttattttcaaatgaggtggttaaaattagagttgcaatttactgtagaaaatctgtttatgttgaaggatctgtt

SEQ ID NO: 18600 - DNA, 260 bp, Unknown
  Description of Unknown: LeftRegion for integrase B5601 sequence
cacgccggagcaggaagcggcaaaacgccgggagctggaacagcagctttatgaggtgttccgcaaatatgccgataagcggaagaaagaggaagccggggcgtaaggttttccgaagccatcgttgatttacggggctgctggcagtataatagaattgtcagcagctccgtttctttttgaagaaaaggagcgacaaaatgaataacagaatagacgcaatctatgcaaggcaatcggtggacaaaaaggacagcatt

SEQ ID NO: 18601 - DNA, 260 bp, Unknown
  Description of Unknown: LeftRegion for integrase B5602 sequence
gaagagttcgcttttttagttggtgcttttgcagcagaaggtaatgactttaaaaagagaatcataaaagctatgctagaaatagaaaacaaagacgattgggagctaatagcttcagttgttgaaaggctagcaaaataaaaggagaatttaaatttctccttttttaatatataaatattttattttagtaaaatgaggtgattaaaattagagttgcaatttactgtagaaaatctgtttttgttgaaggatctgtt

SEQ ID NO: 18602 - DNA, 260 bp, Unknown
  Description of Unknown: LeftRegion for integrase B5603 sequence
cacgccggagcaggaagcggcgaaacgccgggagttggaacagcagctttatgaagtgttccgcaagtatgccgataaacggcagaatgagggcgccggggcgtaaggttttccaaagccaccgttgatttgcggggctgctggcggtataataatagtgtcagcagctccgtttcttttttaagaaaaggagcgacaatatgaacaacagaatagacgcaatctatgcaagacaatcggtggacaaaaaagacagtatt

SEQ ID NO: 18603 - DNA, 260 bp, Unknown
  Description of Unknown: LeftRegion for integrase B5604 sequence
tttcgatcaagggcttatgacggtcttgcctgatcttacaattcaggtctcgaactacgtgaaggacggctacgacgaccaaaatacgagagactggctactcggcgtagatggtacaaaaatcatcaggccgaagaggttcgcaccaaatcgcgacatgctggcctaccacaatgagtttgtattcctgaggtgattccatgcagcgagcagtgatatatgccaggtacagccctggaccaaatcagacagagcagtcg

SEQ ID NO: 18604 - DNA, 260 bp, Unknown
  Description of Unknown: LeftRegion for integrase B5605 sequence
atttttctaatggtaagatagtaaaaagaaatggtcgttgtttagatgactagaaaaaatccctcttaccattttcggaaggagggattttttctttatacaaataaaaaccggctcctgcgccaacaggaaccggcaagtaacattccgaagaatgataccctaactcgcaaaaatattgtatcatcttcggagcagctatgcaagcggaacacctgttctacttctggctgttatttttgtactcatttttacataca

SEQ ID NO: 18605 - DNA, 260 bp, Unknown
  Description of Unknown: LeftRegion for integrase B5606 sequence
acgatacatcgaaattatcaagcaataaaaaaaatcccgcaccctgttaccagcaggatgcgggaagcgccgaaggtattaccagtaccatgtcggcaaatataatcaaacctacgtcaataaggggctgattacgtctattattatagcatatgagcccctttattaaccatatacatttaataaggaggcttatttttatgtctaaattagctgttatttacgcccgtttttcgtcggacaaacagcgcgaagaatcc

SEQ ID NO: 18606 - DNA, 260 bp, Unknown
  Description of Unknown: LeftRegion for integrase B5607 sequence
caacatagtgccaatcattgcggtacggttttcgttgttgtgaatcatactcccaatatacataacgaagacagaacagaagtgaagagaaatatcgaagagcgcttgtattctgttttcagtaaatataccacagcgaagcattaaagcgaaggctgccattgttatgatggcagccttattttttaggagacgagagtatggatttaatttatgcaagacagtcagtcgataaagaggatagtatctctatcgaaagt

SEQ ID NO: 18607 - DNA, 260 bp, Unknown
  Description of Unknown: LeftRegion for integrase B5608 sequence
aatgtcttaacattgaataaaaatcgtttgaaatcgtttcaaacgattagaaaaaaccgccaccatgagttatcatgatgacggtttccccggtcggatattagccgtatccgccggaatttgtaaatcactcaccctgagctgattacttctatattatatcacaatcagctcttgttgtagaaaggagctgttttattatgcttagagctgctttatatggcaggttttcctcggataatcaaagagaagaatctatc

SEQ ID NO: 18608 - DNA, 260 bp, Unknown
  Description of Unknown: LeftRegion for integrase B5609 sequence
ggcaagaacgataacggctcgcacggcaccgtgtcgtaccttcgcgacgggtcgatggggaaggccgttatccattactggcgcaaccatgtgtactatggcgcgtatttcaagattatcgacggcgctatagccttgaatgtgctgaattacagggcaacgcctaacgatgaccccgtagagctgtacagggcgtagccatgggcggacgtgcggcgatatatgcccgcttctcgagccacaaccagcgcggcgagtcc

SEQ ID NO: 18609 - DNA, 260 bp, Unknown
  Description of Unknown: LeftRegion for integrase B5610 sequence
aatgtatttttaaaaaatgggcagtaaaatgcccatttgaattatttgttgatatagaatctttgagtcaatttataaatacgttcaataaattgtatatcgttgattctatgtaagtatctaatgatacattcaatcatttcttctttagtcatatttatcacccctatgaaattgtaaaacagaaaggatgtgcaattatgtatgcgatgtatttaagaaagtcacgtgctgatgatccgcatgaaagtatagaagag

SEQ ID NO: 18610 - DNA, 260 bp, Unknown
  Description of Unknown: LeftRegion for integrase B5611 sequence
ggcaagaacgacaacggctcgcacggcaccgtgtcgtaccttcgcgacgggtcgatggggaaggccgttatccattactggcgcaaccatgtgtactatggcgcgtatttcaagattatcgacggcgctatagccttgaacgtgctgaattacaggggagcgccgaacgatgacctcgtagagctgtacagggcgtagccatgggcggacgtgcggcgatatacgcccgcttctccagccacaaccagcgcggcgagtcc

SEQ ID NO: 18611 - DNA, 260 bp, Unknown
  Description of Unknown: LeftRegion for integrase B5612 sequence
tacaaacaatagatatggtcaaagacaaatataaaaaagatttatattcttccgattcacaaaaaataggttgaaaataaaaaaatccccgactgctactaacagtcggggaaatagtgtagtgttatggtacaccaattaaaaacatatatattgtaccataacaccgattaaaaatcaagttaagaggtgttatttttatgaacaaaaaaattaatgcagtcggatatgcacgatatagtacagaatttcaaacagat

SEQ ID NO: 18612 - DNA, 260 bp, Unknown
  Description of Unknown: LeftRegion for integrase B5613 sequence
agttagagggggataaggattcaactgcggcggtctaaggttgtgcctatcgaattacttagaagaaaaaaagtattggaggtgagactatcaaagcggtaatctatgctcgctattcgagccacaatcaaagagaagaatccattgagggacagcttagagagtgccatgagtttgccttgaaaaatggatttgtcgtagtgaacgaatatatagatcgtgcgatttcgggcaagaccgataaccgtccgagctttcag

SEQ ID NO: 18613 - DNA, 260 bp, Unknown
  Description of Unknown: LeftRegion for integrase B5614 sequence
gttcatccgctgctcttttctcttgcacatatgttctatctatcgtataattattttacaaataaaaaatccggtactggcaataccggattcgtaacttatcaaccaggatgattgataataaacacagataaattatatcatacatcctgccgtttgcatagggtgtattttttataccctttttagggaggcaatcaatgtataatgattcaaaaggcatttatttaatgtatctcagaaaatcacgtgctgatgaa

SEQ ID NO: 18614 - DNA, 260 bp, Unknown
  Description of Unknown: LeftRegion for integrase B5615 sequence
atttgataacctttgaggttactgttgaacagatccagaaaatgattgaagatgaaaaaagttttaacgcatagcatgtaaaaaatcccgttatcatactgccatacgataacgggagaatgtaataacccacccacgggctgattactattatattataacacgatcagcccatttctaaaaaaggagctgatttttttatgcttagagccgctttatacgcacgtttttcttctgaaaatcaaagagaagaatccata

SEQ ID NO: 18615 - DNA, 260 bp, Unknown
  Description of Unknown: LeftRegion for integrase B5616 sequence
cccttccactattactactaccgcaaaatgaaaaagcgccgcccgtaggcgacgccctgccgtctctggcggcaataaaataagccccatcctgaccgatggagctttgctgaaggtttgtggccttccccgtgtgaagaaatccatttacatgatacaccatgcggggagggcttgcaagctatataggaggttattttatgattgctgctctatacgcccgctattcgtccgacagccagcgggccgaaagcatcgtg

SEQ ID NO: 18616 - DNA, 260 bp, Unknown
  Description of Unknown: LeftRegion for integrase B5617 sequence
atgaccgctagcttgatgccgaacggggacccgggaaggattgaaagcgagtacgctctcttcgagagtggtgcctcgttcggccactattggatagtcacctcaaagatcgtcaacggagaacttgtcgtctcacgaatcagcgaaacgagtccgacaggcgatactccgccgactctttacacattaggcagatagccatgggcgggcgcgcggcgatatacgcccgcttctcgagccacaaccagcgcggcgagtcc

SEQ ID NO: 18617 - DNA, 260 bp, Unknown
  Description of Unknown: LeftRegion for integrase B5618 sequence
cttccactattactactaccgcaaaataaaaaagcgccgcccgtaggcgacgccccgccgctactggcggcaacaataaaataagccccatcctgtccgatggagctttgctgaaagccttgcggccctccctgtgaagaaatccatttacatgatacaacatgcggggagggcttgcaagccatataggaggttattctatgattgctgcactctacgcccgctactcgtccgacagccagcgggccgaaagcatcgtg

SEQ ID NO: 18618 - DNA, 260 bp, Unknown
  Description of Unknown: LeftRegion for integrase B5619 sequence
gccaacgggtccatcgccgtggtggagaccgaggactaccgcgcggtcatgcgccgctggtacaagggcagcaccaagctgatgctgtcggcggatagcttcgaggactacgaggacatgattttcggcatggacgacggacccgtgcgcgtgatcggcacggtggtgtggttccaggccgccgacgagatggagtagccgtggtcgggcgcgcggcgatatacgcccgcttctcgagccacaaccagcgcggcgagtcc

SEQ ID NO: 18619 - DNA, 260 bp, Unknown
  Description of Unknown: LeftRegion for integrase B5620 sequence
caatgactaattttttcttttaataaaaaaaaatcccgcaccctgttaccagcaagatgcgggaagcgccgacggtattcccagtaccgtatcggcaaatataatcatctacccagcttataaggggctgattacgtctattattatagcatatgagcccctttattaaccatacacatttaataaggaggcttatttttatgtctaaattagcagttatttacgcccgtttctcgagcgacaagcaaagagaggaaagc

SEQ ID NO: 18620 - DNA, 260 bp, Unknown
  Description of Unknown: LeftRegion for integrase B5621 sequence
agcaaataatcttgacagttaaccaaaaaaatcccgccatcgtgctaccaacacgacagcgggaagcgccgaaggtattaccagtaccatctcggcaaatataatcatttacccagtctataaggggctgattacgtctattattatagcatatgagcccctttattcaccatacacatttaataaggaggcttatttttatgtctaaattagctgttatttacgcccgtttttccagtgataaacaacgcgaagagtcc

SEQ ID NO: 18621 - DNA, 260 bp, Unknown
  Description of Unknown: LeftRegion for integrase B5622 sequence
ggttaaagttaaatctaatagtgatgtcacaacggttgtagtaacgcgtaccggcgcaaagtatcaccttcccgactgccgctatgttgaaaacaaaaccgatactgaagaaatgactgttgaagaggctttgtcagaaggctatggaccatgtaaagtgtgtgaacccggaacaaattaatatataaagggctgatatcatgtcaaaaaagcagaaattaatttgcgctatgtatttacgaaaatcccgcgcggatagt

SEQ ID NO: 18622 - DNA, 260 bp, Unknown
  Description of Unknown: LeftRegion for integrase B5623 sequence
gggatctgataacttttgaagttacaaccgaacaaattcagaagatggttgaagacgaaaagaattttaacgcataacataaaaatcccgctatcgtattaacggtacgataacgggaagatgtaataacccacccagggctgattactattatattataacatgatcagcccatttctaaaaaggagctgattttttttatgcttagagccgctttatacgcacgtttttcttccgaaaaccagcgtgaagaatctatt

SEQ ID NO: 18623 - DNA, 260 bp, Unknown; identical to SEQ ID NO: 18609
  Description of Unknown: LeftRegion for integrase B5624 sequence

SEQ ID NO: 18624 - DNA, 260 bp, Unknown
  Description of Unknown: LeftRegion for integrase B5625 sequence
ctgaaggcgaccgatcgcgcgaagtgggtttcgctcgatttgtggaacgccgctgatgaaataaaaaaagacgatcgtttgcagatcgtcaaaaatcgaaatcagcggcattggaaaatcccgctttcctgcgtcgccgatcttgaacaatattcatattttataaatgccgcatatagcgcgaataaggaagattgtgtatgaacggcgtaatttatgcccgctattcttcggacagacaaacggaacaaagtatcgaa

SEQ ID NO: 18625 - DNA, 260 bp, Unknown; identical to SEQ ID NO: 18609
  Description of Unknown: LeftRegion for integrase B5626 sequence

SEQ ID NO: 18626 - DNA, 260 bp, Unknown
  Description of Unknown: LeftRegion for integrase B5627 sequence
tttcgatcaagggcttatgacggtcttgcctgatcttacaattcaggtctcgaattacgtgaaggacggctacgacgaccaaaatacgagagactggctactcggcgtagagggtacaaaaatcatcaggccgaagaggttcgcaccaaatcgcgacatgctggcctaccacaatgagtttgtattcctgaggtgattccatgcagcaagcagtaatatacgccaggtacagccctggaccaaatcagacagaacagtcg

SEQ ID NO: 18627 - DNA, 260 bp, Unknown
  Description of Unknown: LeftRegion for integrase B5628 sequence
aactccgaaattaaagtttttacatgggaacaagatgtaaaagaaactaaagaaattacaggagttgatttagaaaataacaactaacgaaaccaatatcttttaaaagggtaaatattatataaaatagaaataatatagataaacatcagggcagttagcagctgctctttttaattgaatgacaaggaggaccaccaatgaaaacatgtatataccttagaaaatctagggctgatgaagaactagagaaaaaagaa

SEQ ID NO: 18628 - DNA, 260 bp, Unknown; identical to SEQ ID NO: 16187
  Description of Unknown: LeftRegion for integrase B5629 sequence

SEQ ID NO: 18629 - DNA, 260 bp, Unknown
  Description of Unknown: LeftRegion for integrase B5630 sequence
gaaatcaattgagagggtattatgacggttgtaaacgtatatccggctgcaaacgataattttgcatgggatgaactggcagagttgtcccagaaactgctcacgcatatttatgctgaaatggaaaaatgcgaaaatagcaaaaacactttgatagatatgggtggcggctgcgagacgagcgtgagggcaagttcgctatgaacgcggtgtatacgaggcaatcccttgacgttaaggacagtttgtcgattgaatca

SEQ ID NO: 18630 - DNA, 260 bp, Unknown
  Description of Unknown: LeftRegion for integrase B5631 sequence
atgtatttttaaaaaatgggcagtaaaatgcccatttgaattatttgttgatatagaatctttgagtcaatttataaatacgttcaataaattgtatatcgttgattctatgtaagtatctaatgatacattcaatcatttcttctttagtcatatttatcacccctacgaaattgtaaaacagaaaggaagtgtttattgtgtatgctatgtatttgagaaaatcacgtgctgatgatccacatgaaagtatagaggat

SEQ ID NO: 18631 - DNA, 260 bp, Unknown; identical to SEQ ID NO: 15325
  Description of Unknown: LeftRegion for integrase B5632 sequence

SEQ ID NO: 18632 - DNA, 260 bp, Unknown; identical to SEQ ID NO: 16420
  Description of Unknown: LeftRegion for integrase B5633 sequence

SEQ ID NO: 18633 - DNA, 260 bp, Unknown
  Description of Unknown: LeftRegion for integrase B5634 sequence
gagcctggcgcgattgcccaggcgatgggaataccggacgagccgactcagccgcagcaggttattcgagtggtcgacaaacgcctacagaacatcgaggacgcctacgactccatgaacgagaacgggcgccacatactgcacagcgtggccacgtcgctggcgaaggaccccgcgaacgcggcggaggagggctagccgtggccaacgccgtcatatacgccaggtacagcagcgcgggccagcgcgaggagtccatc

SEQ ID NO: 18634 - DNA, 260 bp, Unknown
  Description of Unknown: LeftRegion for integrase B5635 sequence
cttttattaattttaataatagttttttatatgtcatttccaattcaacatattcatccatttcgcacctcgttatacataagctataataaaatactagcattattttataaaaatgtaaagaacaaacgttcgcacaatcttatatattttgtaatttaaagtaactttttttaatcaaattataaggagattataaaatgaacaatatatgtatttatttaagaaaatcaagagcagatgaagaacttgaaaaaaca

SEQ ID NO: 18635 - DNA, 260 bp, Unknown; identical to SEQ ID NO: 16402
  Description of Unknown: LeftRegion for integrase B5636 sequence

SEQ ID NO: 18636 - DNA, 260 bp, Unknown
  Description of Unknown: LeftRegion for integrase B5637 sequence
atgagttcgagaaccgagaggagttacagggggataaacaagacattacggcagtctaagctaattcccatagacttgctcagacgcaagaaatacttggaggtgatactacgaaagctgtaatatacgcacgatactcaagccatagccagcgagaagaatccatagagggacagcttcgggagtgtcatgagttcgcattgaaaaacggttttaccatcatcaacgaatactgtgacagagctatatcgggtaagacc

SEQ ID NO: 18637 - DNA, 260 bp, Unknown
  Description of Unknown: LeftRegion for integrase B5638 sequence
gccaacgggtccatcgccgtggtggagaccgaggactaccgcgcggtcatgcgccgctggtacaagggcagcaccaagctgatgttgtcggcggatagcttcgaggactacgaggacatgattttcggcatggacgacggccccgtgcgcgtgatcggcacggtggtgtggttccaggccgccgacgagatggagtagccgtgggcggacgtgcggcgatatacgcccgcttctccagccacaaccagcgcggcgagtcc

SEQ ID NO: 18638 - DNA, 260 bp, Unknown; identical to SEQ ID NO: 18613
  Description of Unknown: LeftRegion for integrase B5639 sequence

SEQ ID NO: 18639 - DNA, 109 bp, Unknown
  Description of Unknown: LeftRegion for integrase B5640 sequence
gtaaaccggttatgtgatgaaggttacgcagatgcgatttatattgtaaatggttaaattgcgtgcggcggcatattgccgtgtatcgaccgacagagcggagcaggcg

SEQ ID NO: 18640 - DNA, 260 bp, Unknown
  Description of Unknown: LeftRegion for integrase B5641 sequence
tttcgatcaaggacttatgacggtcttgcctgatcttacaattcaggtctcggactatgtgaaagacagctacgacgaccaaaatacaagagactggctactcggcgtagagggtacaaaaatcatcaggccgaaaagattcgcgccaaatcgcgacatgctggcctaccataatgagtttgtattcctgaggtgattccatgcagcgagcagtgatatacgccaggtacagccctggaccaaatcagacggagcagtcg

SEQ ID NO: 18641 - DNA, 260 bp, Unknown
  Description of Unknown: LeftRegion for integrase B5642 sequence
gtgtttgctaatgagtagtattatagtatttttaattttattgtggatctactttacgtacgtgaaagaaaaatagcagcataaaaatcccgctaccgtactgccatacgatagcgggaaaatgtaataacccacctcgggctgattacgcttatagtatagcataatcagcccattttcaaaaaggagctgatttttttatgcttagagccgctttatacgcacgtttttcttccgaaaaccagcgtgaagaatctatt

SEQ ID NO: 18642 - DNA, 260 bp, Unknown; identical to SEQ ID NO: 18601
  Description of Unknown: LeftRegion for integrase B5643 sequence

SEQ ID NO: 18643 - DNA, 260 bp, Unknown
  Description of Unknown: LeftRegion for integrase B5644 sequence
aatgtgtcttttgagcaatttgaaggattaaccgttgtaattaataaattgatatctactggtgatattgatgaaaacggaaaaatgaacgatgatgctaaggcattaatttttaaaatattagaagcagaaattaaattgatgttaaagaaaaagagctagcgataagacctagctcttttgatactaggaggttattaatggatagagtttgtatttatttacgaaaatctcgtgctgatgaagaactagaaaaaact

SEQ ID NO: 18644 - DNA, 260 bp, Unknown; identical to SEQ ID NO: 18608
  Description of Unknown: LeftRegion for integrase B5645 sequence

SEQ ID NO: 18645 - DNA, 260 bp, Unknown
  Description of Unknown: LeftRegion for integrase B5646 sequence
aggggatctgataacttttgaagttacgatcgaacaaattcagaagatgattgaagatgaaaagaattttaatgcataacataaaaatcccgctaccgtacggcaatacgatagcgggaaaatgtaataacccaccccgggctgattactttataattatatcacaatcagcccatttctaaaaaggagctgatttttttatgcttagagccgctttatacgcacgtttttcttccgaaaaccagcgtgaagaatctatt

SEQ ID NO: 18646 - DNA, 260 bp, Unknown; identical to SEQ ID NO: 16187
  Description of Unknown: LeftRegion for integrase B5647 sequence

SEQ ID NO: 18647 - DNA, 260 bp, Unknown
  Description of Unknown: LeftRegion for integrase B5648 sequence
gtatgttttaaaattacaaatagagcaaaacggaagtataaccgttacatttatgaacggaagcgttgtttcaagcgatataggaggtgaaaagttcagtgaatgcggcaaaaaagattataacgcgaatagaagcggatccgaaaaagaaagcggcgaacgcagaactttcgatactccgtacagcggcgtattgtcgtgtgtcaacggatagttccgaccagcttgaaagttataaagcacaggttgcctattatacg

SEQ ID NO: 18648 - DNA, 260 bp, Unknown
  Description of Unknown: LeftRegion for integrase B5649 sequence
gaagtttttcatgttgatcttaattatttgttggggttcacggacaaaatagagaagcccgcaggagatgaaacggatccggcagcgaacaaatacctcgcggtcactctggcggagatcgacctgatcgaagcgttccgccatgcaggtccggagactcaggccgcgatccgggcgatcctgcacttggagggtcggaagtgatcggcgcgatttatgcccggtactcgaacgggccgaaccagacagaccagtcgatc

SEQ ID NO: 18649 - DNA, 260 bp, Unknown
  Description of Unknown: LeftRegion for integrase B5650 sequence
aggaaaaaatgaaaatgaccgtaacaaatatacttccacatcatacatcgaataacgcagagaggaaacataaaattgaaattcaactttttcaaattttccaaaaatatgtgtaatacagttgtgagaatatatgttcggtggtataattataggtgtggaaaacctaagtcatacattcttggcaggaggacaagaatatgatgtatgacgcactatacggacgacagtccatcgagaagaaagatagtatatccgtt

SEQ ID NO: 18650 - DNA, 260 bp, Unknown
  Description of Unknown: LeftRegion for integrase B5651 sequence
gcgcaaaggacgttgaattagcgattcagaaaataatcgtagaaagacttctttcgctacagatacatgaaacattatcaaaagtcagttgaaaccagcctatattctcaacagcaaaggagatcaagcggtttcctttgctttctttttatgctaaaatagagagcgatataggttggttggcgaaaggagcaaccgacatgaaaatagcggcttattgtcgcgtatcaacagataaagatgagcagttagacagtctg

SEQ ID NO: 18651 - DNA, 260 bp, Unknown
  Description of Unknown: LeftRegion for integrase B5652 sequence
gcttgtacatatattgtaaagtagcaattttgtataagaagggaggactaatgaaattattaagtgtcaattatataaatggatataaagtaaataattatgctacggaaataacaaaagaagaagaagaagagatagtttttaacatatacaaaatattaacgaaagatgataaaatggataacaaggaagtgatgtaaatgatagcaatatacgcgagacaaagtgtagacaaaaaggattctatctccatagaaagc

SEQ ID NO: 18652 - DNA, 260 bp, Unknown
  Description of Unknown: LeftRegion for integrase B5653 sequence
aaattgctgattttttaggggttactgaaagttatttagaagatgcaatagattattatagatgtaaatacggtgtttcttgcaaaatagataattatgaagttagatttattcctaacttaatgattggtaagttcttttaaaattaaagtctcttaggcaattttgactaagagattttttaataaggagggattaacatgaaaaaagtagcaatttacagtagaaaatctgtttatatagaaggttctgtttcaata

SEQ ID NO: 18653 - DNA, 260 bp, Unknown
  Description of Unknown: LeftRegion for integrase B5654 sequence
ctgctgcccgttcagagcggtaaaataagcaaaaagctcccgtgctggtaacacggaagcctttgcatagattaacccttactggatgaaccagaaatgatataacctatccgaacaatagaattatatcattcctggtacgtcctggcaaggggcgtattttttatgctcttaagtcatagtatgaatagggtgatataatgaaaaagaaaatattaatggctgcactgtatattcgtgtcagcaccgaaaagcaagaa

SEQ ID NO: 18654 - DNA, 260 bp, Unknown
  Description of Unknown: LeftRegion for integrase B5655 sequence
aatatattttagactaaaacaatagaaaataaaaaccgccctactctttcaagcaaggcggtatgcttccgaataatacgaaagccctaagcaagcatattgtatcattccggaagcagctacgcaagcggaacacccgttcctcgctggctgttatttttgtacccattttttcatacacttaacaaaggagtgataacatgaccgacaacacctccatgcgtaccggtgccctctacatccgggtatctaccggcaag

SEQ ID NO: 18655 - DNA, 260 bp, Unknown
  Description of Unknown: LeftRegion for integrase B5656 sequence
cactaatattttacagctgtgagcagggattttcaacaggaaatattttccaataaaaatattaaaacaaatgtttgtatatattgtaaaacatctgtttgttattgtcaataacaaaatttgtaaaacgttgtcgctgtcccattagttggacatttaaaatatttttttgcatattaataaaaaagggagtgttgtttatggaaaaatatgcaatgtacttgcgaaagtcaagagctgaccaggataaaacgcttgaa

SEQ ID NO: 18656 - DNA, 260 bp, Unknown
  Description of Unknown: LeftRegion for integrase B5657 sequence
aataaggatgctcaaaactctgaaattaaagtttttacatgggaacaaaatgtaaaagaaactaaagaaaccacaggagttgatttagaataacaataacgtgtagaatatgaaggagaagattacacaaaatagaaattaataatatagatacgtacagggcagttagcagctgctctttttaattaggaggaaataaaatgaaaacatgtatataccttagaaaatctagggctgatgaagaactggagaaaaaagaa

SEQ ID NO: 18657 - DNA, 260 bp, Unknown
  Description of Unknown: LeftRegion for integrase B5658 sequence
catatctctaggtggcattaatataaatatcattaaaatagctaaataaacgatacttaaaatagatgatattaatagttcttttgttttttttacttccattacaaatcaaaatcctttactaaaatcttattattaatattactatatttacataatattatctatattaaaataatctaaacatatgaggtgataatatgaaaagaatagcaatttatagtagaaagtcagtatatatagaaggttctatatcaata

SEQ ID NO: 18658 - DNA, 260 bp, Unknown
  Description of Unknown: LeftRegion for integrase B5659 sequence
gccgctgcccgttcagagcggtaaaataagcaaaaagctcccgtgctggtaacacggaagcctttgcatagattaactcttaccggatgaaccaggaagatataacctatccgaacattagaattatatcattcctggtacgtcctggcaaggggcgtattttttatgctcttaagtcatagtatgaatagggtgatataatgaaaaagaaaatattaatggctgcactgtatattcgtgtcagcaccgaaaagcaggaa

SEQ ID NO: 18659 - DNA, 260 bp, Unknown
  Description of Unknown: LeftRegion for integrase B5660 sequence
acgaagaaataattggagctttattacatatatcagatactttaagtggattagctctccattttaatgttactgaagaaattataaaatataagttattatcaatctacctaaaggaagataagtttagaatatctaaatcaatgattatggaagatgaaataatttataattcttgttctgtttaatggaggtctattatgaaaaaagttgctatttattcaaggaaatctgttttagttgaaggatcagtatccata

SEQ ID NO: 18660 - DNA, 260 bp, Unknown
  Description of Unknown: LeftRegion for integrase B5661 sequence
aacagcagattatttttctggaagtaagttaataacattaaaagatggtcaatatttgaaactagatagtaatactaaagttattaaataataagattaacatatagaatataaaggaatagaaactaaaaaaatagaaataaataatatagatacgtacagggcagttagcagctgctctttttttaggaggaaatcatatgaaaacatgtatatatttaagaaaaagtcgtgccgatgaagaactggagaaaaaagaa

SEQ ID NO: 18661 - DNA, 260 bp, Unknown
  Description of Unknown: LeftRegion for integrase B5662 sequence
caaaggcattagcgccagagattaggaagttctatgatagtgacgagggcaaagcttactttgaaaaatggcttaccaaacaccctgaatatgatgaacggacacctgatgcaactgcatcgggcgtctgagttttcgcacattcgacagcaaataaaggaggattataattatgtatagaaagaattggaggctcacagatgaatgttgtaatatacgctcggttttccagccatagtcaaaccgagcaatctattaaa

SEQ ID NO: 18662 - DNA, 260 bp, Unknown
  Description of Unknown: LeftRegion for integrase B5663 sequence
tcatccagtgattttttacaacaaaattttaaaaaccgccctactctttcaagcaaggcggcatgcttccgaataatacgaaagccctaagcaagcatattgtatcattccggaagcagctacgcaagcggaacacccgttcctcgctggctgttatttttgtacccattttttcatacacttaacaaaggagtgataacatgaccgacaacacctctatgcgtaccggtgccctctacatccgggtatcgaccggtaag

SEQ ID NO: 18663 - DNA, 260 bp, Unknown
  Description of Unknown: LeftRegion for integrase B5664 sequence
tgtccgggatctgatcgtccgctgcttccagaaggcgatgctgaacgctgagaagctaaaaacggagaagggaaagcgcggccagtttgagaagttccagatctccctggagccctatttcttccggatgtctgacgagaacgccagactggtccaggatctacacgatgaagcactaaagaagatcggagggtgagcctatgcgcggcgtcatttatgccagatattcaccaggcccacgccagacggagcagtccatc

SEQ ID NO: 18664 - DNA, 260 bp, Unknown
  Description of Unknown: LeftRegion for integrase B5665 sequence
atgtaataaaagttgtaattttctacagaaaaattgacaaatttgttgatttttttatacaaaaaatctataatataagaacaaagaggttaagcctcaaactaaaattattataagcggtttagccgcaaaaaagataaggtcttgttcttatacgttcaaggccttatctttttttatttgtcataaggagcgaacatatgagcgaaactactcaaataggtgttatttatgcccggtattcctcggacaaacaacgg

SEQ ID NO: 18665 - DNA, 260 bp, Unknown
  Description of Unknown: LeftRegion for integrase B5666 sequence
ctatttgctggggtattctgataaaatcacgcggctgtccggggatcacaccgaccccacatctggcccctgtgttgaagttactgctgcggagctggagctgctgaaggctttccggcacgccggagctgagacccaggcagcgatcagagcgatcctgcacatttaacgggaggaccccgggaagggaggacggtgccatgcgcggcgtcatttatgcgagatattcaccaggcccgcaccagacggagcagtccatc

SEQ ID NO: 18666 - DNA, 260 bp, Unknown
  Description of Unknown: LeftRegion for integrase B5667 sequence
tattggaaaatctaattccggtactatccccggatgaaaagaacaagcgaaaaagagaaatcgaaaatcacttatatgatgtgttcagtaaatacacggacagattttactaatcaaccgcaacattgttgtccggggctgcctatggtataatataattgtaaggttggtagctccattccatacggaaggagcccaatatggacattatcagagaagattgtatatacgcgagacagtcggtagaccgtaaggacagt

SEQ ID NO: 18667 - DNA, 260 bp, Unknown
  Description of Unknown: LeftRegion for integrase B5668 sequence
ctatttgctcggcttcactgacaagatcgaaaagccggccggtgatgagactgacgtcgctgccaataagtacctggcggtaactctcgcagagatcgacctgatcgaagcataccggcacgccggagctgagactcaggcagcgatcagagcgatcctgcacatttaacgggaggcccccgggaagggaggacggtgccatgcgcggcgtcatttatgcgagatattcaccaggcccacgccagacggagcagtccatc

SEQ ID NO: 18668 - DNA, 260 bp, Unknown
  Description of Unknown: LeftRegion for integrase B5669 sequence
gcttgtacatatattataaagtagcaattttgtacaaggaaggaggagtaatggaactaataaaagtaaattatatgaatggatataaaataaataattatgctacggaaataactaaagaagaagaagaggagatagtttttaacatatacaaaatattaacaaaagatgataaaatggataacaaggaagtgatgtagatgatagcaatatacgctagacaaagtgtagacaaaaaggattctatctccatagagagc

SEQ ID NO: 18669 - DNA, 260 bp, Unknown
  Description of Unknown: LeftRegion for integrase B5670 sequence
atgagttgaagaagtgaagtcccggatggacaagaaattttcaagaattgaaaatttgtggccacgggacgattcttgctctcagctttttcgctgcgtttcgcaattttcacatttcaatctgctcgcagattgttgacaagctgcgcttgacccgatactataaaggcaagtcgaatacacgccaaggaggtgcaaccatgaccgccgtgatctacgcccgctattcatctgacagccagcgagaagcgtccattgaa

SEQ ID NO: 18670 - DNA, 260 bp, Unknown
  Description of Unknown: LeftRegion for integrase B5671 sequence
atatattttagactaaaacaatagaaaataaaaaccgccctactctttcaagcaaggcggtcagcttccggattaatacgaaagccctacacaagcatattgtatcattccggaagcagctacgcaagcggaacacccgttcctcgccggctgttatttttgtacccattttttcatacacttaacaaaggagtgataacatgactgacaacacctccatgcgtaccggtgccctctacatccgggtatcgaccggcaag

SEQ ID NO: 18671 - DNA, 260 bp, Unknown
  Description of Unknown: LeftRegion for integrase B5672 sequence
tagaacgtaatgaaaaactcattatattaggtgttagattaaaaactattaaaaatatcgctaatgcacttaatgtaaatgaaaataaaatattaattttggataaggactagattatatatttttattaatctagtccttattttattgaattacatctattaattacatataataaatgtaaaaggaggggctttccaatgactaataaaatatgtatttatttaagaaaaagtcgtgctgatgaagaattagaaaaa

SEQ ID NO: 18672 - DNA, 260 bp, Unknown
  Description of Unknown: LeftRegion for integrase B5673 sequence
gctacatccttcctgccggtgctgaaaaaattatctgattactataaagaaatttaaataaaaaatcccccttccctgttggcgcagagaaagaggattcataaagcggtcgcatgatacaaccactcctcgcaacagtattgtatcataagaccgctttctttgctatacatttttatagacagaaggaggtcttttttatgattgcgatttatgcacggcagtctgtcgagaaaaaggacagcatcagcattgaatct

SEQ ID NO: 18673 - DNA, 260 bp, Unknown
  Description of Unknown: LeftRegion for integrase B5674 sequence
ttattgatgattttaggctatgcatttataatccttacaataaagcagataataacaaaaacttgcgaatttttgaggattatattaggcttacactattgccaaaaaatgtcttgaaaaggttaaatgattactatataacaataaattcaaagttttaggggctatgcccctttaattttttaattaggagcgaacatatgagcgacactactcaaataggtgttatttatgcccggtattcctcggacaaacaacgg

SEQ ID NO: 18674 - DNA, 260 bp, Unknown
  Description of Unknown: LeftRegion for integrase B5675 sequence
catccagtgattttttacaacaaaattttaaaataccgccctactctttcaagcaaggcggcttgcttccgaataatacgaaagccctaagcaagcatattgtatcattccggaagcagctacgcaagcggaacacccgttcctcgctggctgttatttttgtacccattttttcatacacttaacaaaggagtgataacatgaccgacaacacctctatgcgtactggtgccctctacatccgggtatctaccggtaag

SEQ ID NO: 18675 - DNA, 260 bp, Unknown
  Description of Unknown: LeftRegion for integrase B5676 sequence
tcataatgcaacagttaaatttacaatgattgcagaagctacacaatatcgcgaaagtttaaaacttgccaacacataataaaattcccccggctgttcgtgcagctgggggaaaaggagtgcatgcgataaacacacgcaccaatgacgtgtttattatatcatatacgctccgaaaaagcaagaaaaggagtatttttatgaacgcagtaatatatgccagattttcttcagataatcaatcggaggaaagcattacg

SEQ ID NO: 18676 - DNA, 260 bp, Unknown
  Description of Unknown: LeftRegion for integrase B5677 sequence
ctacctgctgggatatactgataagattgagaagccggcaggcgatgaaacagaccccgccgctaataagtttctggccgtaactctggccgagatcgacctgatcgaagcataccggcacgccggagctgagacccaggcagcggtcagagcgatcctgcacatttaacgggaggaccccgggaagggaggacggtgccatgcgcggcgtcatttatgcgagatattcaccaggcccgcaccagacggagcagtccatt

SEQ ID NO: 18677 - DNA, 260 bp, Unknown
  Description of Unknown: LeftRegion for integrase B5678 sequence
atgaagaaataattggagctttattacacctatctggtactttaaatggattggctctccattttaatgttactgaagaaatcataaaatataagttattatcaatctacctaaaggaagataagtttagaatatctaaatcaatgattatggaagatgaaataatttataattcttgttctgtttaatggaggtctattatgaaaaaagttgctatttattcaaggaaatctgttttagttgaaggatcagtatccata

SEQ ID NO: 18678 - DNA, 260 bp, Unknown
  Description of Unknown: LeftRegion for integrase B5679 sequence
tttcgatcaagggcttatgacagtcttgcccgatcttacgattcaggtctcggactatgtgaaggacagctatgacgaccagaatacaagagactggctgcttggcgtagagggtacaaaaatcatcaggccaaagagattcgcgccaaatcgcgatatgctggcctatcacaatgagttcgtcttcctgaggtgattccatgcagcgagcagtgatatatgccaggtacagccctggaccaaatcagacagagcagtcg

SEQ ID NO: 18679 - DNA, 260 bp, Unknown
  Description of Unknown: LeftRegion for integrase B5680 sequence
gttttgtatttagtttaaaactaataattacccgccctaacaactttaaagaaatgattaaaaatgctaaaataatgaactcatatagaaataatgggtatgcagtagactacaaaacaaccgaagaagaacaaaaacgatttgaaaaaaaatacaaagaatacaattacagctacaaaaactataaaaaaggataaaatatggctaataacgcagttttatatacaagggtttcgtccgacgaacaaaagaaaacgggc

SEQ ID NO: 18680 - DNA, 260 bp, Unknown
  Description of Unknown: LeftRegion for integrase B5681 sequence
ttattggttgtaggattaaatcctggaaaaagcaaattattaaaagctaaagatttaaatttagttattatttctgaagataaattttgggatattattaattctaaaacttatccttattaaacttatatatttatttaaggacaagtaaactattttatttgttcttaaatagtttattttaccaaggagtgttataaatgaataataaaatatgtatgtatcttagaaaaagtcgtgctgatgaagaacttgaaaaa

SEQ ID NO: 18681 - DNA, 260 bp, Unknown
  Description of Unknown: LeftRegion for integrase B5682 sequence
gtcattcagtaattttttacaacaaaatttttaaaaaccgccccactctaaagcaaggcggtcagcttccgaataatacgaaagccctaagcaagcatattgtatcattccggaagcagctacgcaagcggaacacccgttcctcgctggctgttatttttgtacccattttttcatacacttaacaaaggagtgataacatgcccgacaacacctccatgcgtaccggtgccctctacatccgggtatcgaccggcaag

SEQ ID NO: 18682 - DNA, 260 bp, Unknown
  Description of Unknown: LeftRegion for integrase B5683 sequence
cgtccgggatctgatcgttcgctgcttccagaaggcccagctgaacgccgagaagctgaagacagagaagggaaagctcggccagtttgagaagttccagagctctctggaggtgtacttcttccggatgtctggcgagaacgcccggctggtccaggatctacacgatgaagcactgaagcagatcggagggtgagcctatgcgtggcgttatttatgccagatactcaccgggcccacgccagacggagcagtccatc

SEQ ID NO: 18683 - DNA, 260 bp, Unknown
  Description of Unknown: LeftRegion for integrase B5684 sequence
tacttgctggggtattctgataaaatcacgcggctgtccggggaccacaccgaccccacatccggcccctatgttgaagtcactgctgcggagctggagctgctgaaggctttccggcacgccggagctgagacccaggcggcgatcagagcgatcctgcacatttaacgggaggacccccgggaagggaggacggtgccatgcgcggcgtcatttatgcgagatattcaccgggcccacgtcagacagagcagtccatc

SEQ ID NO: 18684 - DNA, 260 bp, Unknown
  Description of Unknown: LeftRegion for integrase B5685 sequence
tatatcccctgcaaacgctgttgtaaataaaaataccgccccactctttcaagcaaggcggtatgcttccgaataatacgaaagccctaagcaagcatattgtatcattccggaagcagctacgcaagcggaacacccgttcctcgctggctgttatttttgtacccattttttcatacacttaacaaaggagtgataacatgaccaacaacacctccatgcgtaccggtgccctctacatccgggtatctaccggcaag

SEQ ID NO: 18685 - DNA, 260 bp, Unknown
  Description of Unknown: LeftRegion for integrase B5686 sequence
atacaaaaggggataaaaataaatataaacctaaagattatgaaatttcttaaaagttaaactctcaaaaattatacgaaggaaagtttgaaatgaaccgtaacataatttatacataataataaaatacacttaataatctcataagaataactaattatctatcttttgaaaatatatctttagaaggaggtgcttatatgaaaagaatagcaatttacagtagaaaatctgtatatatagaaggttctatatcaata

SEQ ID NO: 18686 - DNA, 260 bp, Unknown
  Description of Unknown: LeftRegion for integrase B5687 sequence
acgaagaaataattggagctttattacatatatcaggtactttaagtggattatctctccattttaatgttactgaagaaattataaaatataagttattatcaatctacctaaaagaagataagtttagaatatctaaattaatggttatggaagatgaaataatttataattcttgttacgtttaatggaggtctattatgaaaaaagttgctatttattcaagaaaatctgttttagttgaaggatcagtatccata

SEQ ID NO: 18687 - DNA, 260 bp, Unknown
  Description of Unknown: LeftRegion for integrase B5688 sequence
tggcaaagaagaaaaagttgtatcttttacattagataaaaatactatacaaggtataaaagacggaaatatagtagccaatgaaatagtaaatacatatgcaaatgatgtatacatacatcaaagtttaaaataatattaataatataataaacatcagggcagtccacagctgctctttttaattaggagggaataaaatgaaaacatgtatatatttaagaaaaagccgtgctgatgaagaactggagaaaaaagaa

SEQ ID NO: 18688 - DNA, 260 bp, Unknown
  Description of Unknown: LeftRegion for integrase B5689 sequence
ctacctgctgggatttactgataaaatcgagaagccggcaggcgatgaaacggatcctgctgccaataagttcctggccgtaactctggccgagatcgacctgatcgaagcataccggcacgccggagctgagacccaggcggcgatcagagcgatcctgcacatttaacgggaggaccccgggaagggaggacggtgccatgcgcggcgtcatttatgcgagatattcaccgggcccacgtcagacggagcagtccatc

SEQ ID NO: 18689 - DNA, 260 bp, Unknown; identical to SEQ ID NO: 13412
  Description of Unknown: LeftRegion for integrase B5690 sequence

SEQ ID NO: 18690 - DNA, 260 bp, Unknown
  Description of Unknown: LeftRegion for integrase B5691 sequence
actatatagaaaataaaaataactatagaagtcaaaatatatcaagtgatgcagatgaattaatgaaattcaaaaaacttctagatatgggtgctataactgaagaagaatatgaaaataaaaaagaacaaatattaaaattatagacaaacatcagggcagttttaccagctgctctttttttataaggagggttaccaatgaaaacatgtatataccttagaaaatctagggctgatgaagaattagaaaagaaagaa

SEQ ID NO: 18691 - DNA, 260 bp, Unknown; identical to SEQ ID NO: 13468
  Description of Unknown: LeftRegion for integrase B5692 sequence

SEQ ID NO: 18692 - DNA, 260 bp, Unknown
  Description of Unknown: LeftRegion for integrase B5693 sequence
tagattcacaaaatcaacaaaagtaaaaataaaaaccgccctactctttcaagcaaggcggcatgcttccgaataatacgaaagccctaagcaagcatattgtatcattccggaagcagctacgcaagcggaacacccgttcctcgctggctgttatttttgtacctattttttcatacacttaacaaaggagtgataacatgaccgacaacacctccatgcgtaccggtgccctctacatccgggtatcgaccggcaag

SEQ ID NO: 18693 - DNA, 260 bp, Unknown
  Description of Unknown: LeftRegion for integrase B5694 sequence
aatatttaaaaggcggcaaatttgcagtcaagccaacagataggggtatagcaatgatagcatcaatgaattaaaataaaaaattccccgctcgatgttggcgcatcgaacggggagagggatatgtataaaatacacaccacagtaactgtattttatcatatcctgacgaaaaaatcaataggagtgataacaaatatatgaaaaccgccgtaatatacgcccggtattcgtccgacaagcagacggagcagtccatc

SEQ ID NO: 18694 - DNA, 260 bp, Unknown
  Description of Unknown: LeftRegion for integrase B5695 sequence
ctggaaagcctcacgccggtacttcccccgaaggagaaagaacagcgcaaaaaagaaattgagcgttgtctttacgaggtgttcagcaaatatggggacagatttccctaatcattcgcaacattgttgtccggggctgctgatggtataatatagttgtaaggttggtagctccattccaacaaggaaaggagcccaatatggaatttatcagagaagattgtatttacgcaagacagtcagtagaccgcaaggacagt

SEQ ID NO: 18695 - DNA, 260 bp, Unknown
  Description of Unknown: LeftRegion for integrase B5696 sequence
atgcaataatagttgcaaatttgtaaaaaaaatagtcaaatttgttgatttttttttacaaaacatctataatataagaacaaagaggtttagcctcaaactaaaattattataagcggttcagccgcaactagagataaggtcttgttcttatacgttcaggaccttatctctttttatttgccattaggagcgaacatatgagcgaaactactcagataggtgttatttatgcccgatattcctcagacaaacaacgg

SEQ ID NO: 18696 - DNA, 260 bp, Unknown
  Description of Unknown: LeftRegion for integrase B5697 sequence
atgcaataaaagttgtaattttctacagaaaaattgacaaatttgttgatttttttatataaaaaatctataatataagaacaaagaggttaagcctcaaactaaaattattataagcggtttagccgaaaaaaagataaggtcttgttcttatacgttcaaggccttatctttttttatttgtcataaggagcgaacatatgagcgaaactactcagacaggtgttatttatgcccgatattcctcggacaaacaacgg

SEQ ID NO: 18697 - DNA, 260 bp, Unknown
  Description of Unknown: LeftRegion for integrase B5698 sequence
tatttgctgggttattctgataaaatcacgcggctgtccggggatcacaccgaccccacacccggcccctgtgttgaagttaccgctgcggagctggagctgctgaaggctttccggcacgccggagctgagacccaggcagcgatcagagcgatcctgcacatttaacgggggggaccccgggaagggaggacggtgccatgcgcggcgtcatttatgcgagatattcaccaggcccgcaccagacggagcagtccatc

SEQ ID NO: 18698 - DNA, 260 bp, Unknown
  Description of Unknown: LeftRegion for integrase B5699 sequence
gctacatccttcctgccggtgctgaaaaaattatctgattactataaagaaatttaaataaaaaatcccccttccctgttggcgcagggaaaggagattcataaagcggtcgcatgatacaaccactcctcgcaacagtattgtatcataagaccgctttctttgctatacatttttataagcagaaggaggtcttttttatgattgcgatttatgcacggcaatccgtcgagaaaaaggacagcatcagcatcgaatct

SEQ ID NO: 18699 - DNA, 260 bp, Unknown
  Description of Unknown: LeftRegion for integrase B5700 sequence
caaaaaattcactcatttagatgttccatagactatttatggttgttttaacaactacataccatacatagttacagagagttacacaaaatactattagaaggtgccattcaacatagactctccctaacagtattggtaaattcttaagcaactagcttatataagtttgtctagagacccataggattcaccataccatgaagaaagcgtattcatacatccggtttagctcagaagctcaaagacaaggtgactca

SEQ ID NO: 18700 - DNA, 260 bp, Unknown
  Description of Unknown: LeftRegion for integrase B5701 sequence
ctggaaagcctcacgccggtacttcccccgaaggagaaagcacagcgcaaaaaagaaattgagcgttgtctttatgaggtgttcagaaaatatggggacagatttccctaatcattcgcaacattgttgtccggggctgctgatggtataatatagttgtaaggttggtagctccattccaacaaggaaaggagcccaatatggaatttatcagagaagattgtatttacgcaagacagtcagtagaccgcaaggacagt

SEQ ID NO: 18701 - DNA, 260 bp, Unknown; identical to SEQ ID NO: 18653
  Description of Unknown: LeftRegion for integrase B5702 sequence

SEQ ID NO: 18702 - DNA, 260 bp, Unknown
  Description of Unknown: LeftRegion for integrase B5703 sequence
gtccgtcgccgtatgccgccaagagataataggctcccaatgtcgggagcgatgatagtcaaaaagcacggagggaaaaatatatcggtaaaagttcttgataagggttttgaatacgaagggcgcaattatcgttcattgtcggcaatcgcccgcgaaattacgggaactaactggaacggatttaaatttttcgatctatgaaaacggatagcaataaagaattgagatgtgcaatatacacgagaaagtctgtcgca

SEQ ID NO: 18703 - DNA, 260 bp, Unknown
  Description of Unknown: LeftRegion for integrase B5704 sequence
atatatcccctgcaaacgctgttgtaaataaaaaaccgccctactctttcaagcaaggcggcatgcttccgaataatacgaaagccctaagcaagcatattgtatcattccggaagcagctacgcaagcggaacacccgttcctcgctggctgttatttttgtacccattttttcatacacttaacaaaggagtgatcacatgaccaacaacacctccatgcgtaccggtgccctctacatccgggtatctaccggtaag

SEQ ID NO: 18704 - DNA, 260 bp, Unknown
  Description of Unknown: LeftRegion for integrase B5705 sequence
tattgaaaagttagttgaagctaatttgaatcaaataaaacattatgaactagcagaatatttaaatgtaacagatgaatttttaaccgaagctatactatattataaaagcaaatatggcatgtatgttaactataagaattatattttaatgtttgaaccttttggtttactagaatcttttgataggagataaatatatgaataaagtttgtatctacttaagaaaatctagagctgacgaagaaatagaaaaagct

SEQ ID NO: 18705 - DNA, 260 bp, Unknown; identical to SEQ ID NO: 16075
  Description of Unknown: LeftRegion for integrase B5706 sequence

SEQ ID NO: 18706 - DNA, 260 bp, Unknown
  Description of Unknown: LeftRegion for integrase B5707 sequence
aatatattttagactaaaacaatagaaaataaaaaccgccctactctttcaagcaaggcggtatgcttccgaataatacgaaagccctaagcaagcatattgtatcattccggaagcagctacgcaagcggaacacccgttcctcgctggctgttatttttgtacccattttttcatacacttaacaaaggagtgataacatgaccgacaacacctccatgcgtaccggtgccctctacatccgggtatcgaccggtaag

SEQ ID NO: 18707 - DNA, 260 bp, Unknown
  Description of Unknown: LeftRegion for integrase B5708 sequence
actagaacgtaatgaaaagatagttgtattgggtgtcaagctaaaaattataaaaaatattgctaaagctcttaatgtcagtgaaagaaaaatattaattttagacaaggactaggttatatacttttaataacctagtttttattttcttgaattacatacattaaatacatataatgaatgtaaaggaggttattttcatgaataataaaatatgtatgtatcttagaaaaagtcgtgctgatgaagaacttgaaaaa

SEQ ID NO: 18708 - DNA, 260 bp, Unknown
  Description of Unknown: LeftRegion for integrase B5709 sequence
agccgagaaagcggtatatctaatcaaaaagttgctttctgatggcgatatgagatctagagaaatctatatacggctaagcgatgaaggcatcagccgcagaacggcagaaaacataaaaaaggcactcggcatccgaagttaccggaggatgcgtcagtggtattggagcatccagccggaagattgagaggaaacaaatgacaaaaagtgaacagcaagagcgtaaacaaaaaattagagaacgttataaaggcgca

SEQ ID NO: 18709 - DNA, 260 bp, Unknown
  Description of Unknown: LeftRegion for integrase B5710 sequence
tcatccagtgattttttacaacaaaattttaaaaaccgccctactctttcaagcaaggcggcatgcttccgaataatacgaaagccctaagcaagcatattgtatcattccggaagcagctacgcaagcggaacacccgttcctcgctggctgttatttttgtacccattttttcatacacttaacaaaggagtgataacatgaccgacaacacctctatgcgtaccggtgccctctacatccgggtatctaccggtaag

SEQ ID NO: 18710 - DNA, 260 bp, Unknown
  Description of Unknown: LeftRegion for integrase B5711 sequence
acaccctttcaaatcttgtaatagcgatatgtatatatttatattatatcatatattttattacatatcaagagataaataaaaaaaacgccccaaaagatgctggaacatctctcggagcgcaggagaatgtggtacattcaccattcatacaatgtgaattataccatatcctccaagaaaagtcaaggaggaattaaatgaaaaccgccgtaatatacgcccgatactcttcggacaagcagacggagcagtccatc

SEQ ID NO: 18711 - DNA, 260 bp, Unknown
  Description of Unknown: LeftRegion for integrase B5712 sequence
gctggaaaacctgacgccgatactctccccggaggaaaagaagaagcgaaaaagagaaatcgaaaataacctgtacgatatattcagcaagtacggggacaggtttcgctaatcaatcgcaacattgtcgtccggggctgctaatggtataatatagttgtaaggttggtagctccattccatacggaaaggagcccaatatggacattatcagagaagattgtatttacgcaaggcagtcagtagaccgaaaggacagt

SEQ ID NO: 18712 - DNA, 260 bp, Unknown
  Description of Unknown: LeftRegion for integrase B5713 sequence
agcaataattatatctagatatataaatattatacttactaatagtatatacaattataaaaaaataattcattttattaaaataaaaataatttgagtagtctaaaagctactcttcttatatactttttattcgtatatatatattctataatatcaatcaaaatacattaataaaatatgataaggaggtaataaacatgaaaacatgtatctatctaagaaaaagccgtgccgatgaggaagcagaaaagcagggc

SEQ ID NO: 18713 - DNA, 260 bp, Unknown
  Description of Unknown: LeftRegion for integrase B5714 sequence
gtatcaatgatttactccattcgaacataaaaaaaccgccctactctttcaagcaaggcggcatgcttccgaataatacgaaagccctaagcaagcatattgtatcattccggaagcagctacgcaagcggaacacccgttcctcgctggctgttatttttgtacccattttttcatacacttaacaaaggagtgataacatgaccgacaacacctccatgcgtaccggtgccctctacatccgggtatcgaccggcaag

SEQ ID NO: 18714 - DNA, 260 bp, Unknown
  Description of Unknown: LeftRegion for integrase B5715 sequence
gagtatcccgtgttttttgctgaaaaaggaaccaaaggaacggatcaccgaccggcttggtatatccgattccaataaaaaatccgcccaggctgctacctgtgcggatcaaacgcaaggaaaatgcaaacaccactaagcactttccgcagtcagtatatcacaagctgcctgcgttgtaaagtcggaaaggattaagattgaacgctgtaatctacgcccgtttctcgtcgcacagccagcgggagcagtccatcgaa

SEQ ID NO: 18715 - DNA, 260 bp, Unknown
  Description of Unknown: LeftRegion for integrase B5716 sequence
tgctacatccttcctgccggtgctgaaaaaattatctgattactataaagaaatttaaataaaaaatccccttccctgttggcgcagagaaagaggattcataaagcggtcgcatgatacaaccactccttgcaacagtattgtatcataagaccgctttctttgctatacatttttatagacagaaggaggtcttttttatgattgcgatttatgcacggcaatccgtcgagaaaaaggacagcatcagcatcgaatct

SEQ ID NO: 18716 - DNA, 260 bp, Unknown
  Description of Unknown: LeftRegion for integrase B5717 sequence
ataatgaaataatcggagctatactccaaaatgtaaatactatatatggactctcaatccattttaatgttactgaagaaattataaaatataagttattatcaatctacctaaaggaagataagtttagaatatctaaattaatgattatggaagatgaaataatttataattcttgttctgtttaatggaggtctattatgaaaaaagttgctatttattcaaggaaatctgttttagttgaaggatcagtatccata

SEQ ID NO: 18717 - DNA, 260 bp, Unknown; identical to SEQ ID NO: 18700
  Description of Unknown: LeftRegion for integrase B5718 sequence

SEQ ID NO: 18718 - DNA, 260 bp, Unknown
  Description of Unknown: LeftRegion for integrase B5719 sequence
gtatcaatgatttactccattcgaacataaaaaaaccgccctactctttcaagcaaggcggcatgcttccgaataatacgaaagccctaagcaagcatattgtatcattccggaagcagctacgcaagcggaacacccgttcctcgctggctgttatttttgtacccattttttcatacacttaacaaaggagtgataacatgaccgacaacacctccatgcgtaccggtgccctctacatccgggtatctaccggtaag

SEQ ID NO: 18719 - DNA, 260 bp, Unknown
  Description of Unknown: LeftRegion for integrase B5720 sequence
gctacatccttcctgccggtgctgaaaaaattatctgattactataaagaaatttaaataaaaaatcccctctccctgttggcgcagagaaagaggattcataaagcggtcgcatgatacaaccactcctcgcaacagtattgtatcataagaccgctttctttgctatacatttttatagacagaaggaggtcttttttatgattgcgatttatgcgcggcaatccgtcgagaaaaaggacagcatcagcattgaatcc

SEQ ID NO: 18720 - DNA, 260 bp, Unknown; identical to SEQ ID NO: 18706
  Description of Unknown: LeftRegion for integrase B5721 sequence

SEQ ID NO: 18721 - DNA, 260 bp, Unknown; identical to SEQ ID NO: 18657
  Description of Unknown: LeftRegion for integrase B5722 sequence

SEQ ID NO: 18722 - DNA, 260 bp, Unknown
  Description of Unknown: LeftRegion for integrase B5723 sequence
gaacaggacaatcctgattgaaaacgcaacgcctgtttatcgttgggaagaacgagagactgtcaaaaaagccattgaagaacggctttatgatattttctgtaaatatgcgtcaagttaaagcttgagttgttggagctgctcccttataattaaggtgttagcagctccgcttctttttgcgaagaagggagcaacaagtgaacctaatcgacgcaatttatacacggcaatcggttgaccggatcgacagcatatcc

SEQ ID NO: 18723 - DNA, 260 bp, Unknown
  Description of Unknown: LeftRegion for integrase B5724 sequence
gtacgccgccgtatgccgccaagggacaataggctcccaatgtcgggagcgatgatagtcaaaaagcacgaagggaaaaacatatcggtaaaagttcttgataagggctttgaatacgaagggcgcaattatcgttcattgtcggcaatcgcccgtgaaattacgggaactaactggaacggatttaaatttttcgatctatgaaaacggataaaaagaaagaattgagatgcgcgatatacacgagaaagtctgtcgcc

SEQ ID NO: 18724 - DNA, 260 bp, Unknown
  Description of Unknown: LeftRegion for integrase B5725 sequence
aacagagtaatatctgcaatgcttgttatggtatttgtcacctgatggctgtacggaaatgaccaaggatcaagccgaacagtcaggatacgaagcttgtaaagtctgcggcggataaataaaaaacgccgtccgagctttgctggtgctcggacggcaataaattatgcaattaaaaccactgcaaaggaggtcaaaaaatgccctactgcatatatctgagaaaatcccgaaaagacatggagttggagcaatacggt

SEQ ID NO: 18725 - DNA, 260 bp, Unknown
  Description of Unknown: LeftRegion for integrase B5726 sequence
ttaaataaaaactataattttgtacaaaaaaatagtcaaatttgttgatttttttgtacaaaccatctataatataagaacaaagaggttaagcctcaaactaaaattattataagcggttcagccgcaactagagataaggtcttgttcttatacgttcaagaccttatctctttttatttgtcacaaggagcgaacatatgagcgaaactactcaaataggtgttatttatgcccggtattcctcggacaaacaacgt

SEQ ID NO: 18726 - DNA, 260 bp, Unknown
  Description of Unknown: LeftRegion for integrase B5727 sequence
aaattgctgattttttaggggttactgaaagttacttagaagatgcaatagattattatagatgtaaatacggtgtttcttacaaaatagataattatgaagttagatttattcctaacttaatgattggtaagttcttttaaaattaaagtctcttagacaattttgactaagagattttttaatatggagggattaacatgaaaaaagtagcaatttacagtagaaaatctgtttatatagaaggttctgtttcaata

SEQ ID NO: 18727 - DNA, 260 bp, Unknown
  Description of Unknown: LeftRegion for integrase B5728 sequence
atatattttagactaaaacaatagaaaataaaaaccgccctactctttcaagcaaggcggtcagcttccggattaatacgaaagccctacgcaagcatattgtatcattccggaagcagctacgcaagcggaacacccgttcctcgccggctgttatttttgtacccattttttcatacacttaacaaaggagtgataacatgactgacaacacctccatgcgtaccggtgccctctacatccgggtatcgaccggcaag

SEQ ID NO: 18728 - DNA, 260 bp, Unknown
  Description of Unknown: LeftRegion for integrase B5729 sequence
acgaagaaaacaagaaaaatatttcttttgaagtcagtgaatcactacatagtaaaataacagaatttgcaaaaactcataatgtgtctaaaaaggaactttttaatgcttttattataggactttgcaaagattaacatttagtatatagagcagtttattagctgctctttttaattgaatgacaaggaggaccaccaatgaaaacatgtatataccttagaaaatctagggctgatgaagaactagagaaaaaagaa

SEQ ID NO: 18729 - DNA, 260 bp, Unknown
  Description of Unknown: LeftRegion for integrase B5730 sequence
agaaaacgagggtgacaaaattactagcgatgaacgcgaaatcgtcgataactaccgtgacagctcgccggaatggcaacagaacatttcgatgaccgccagagctgcggcatctgaatcaaaaagaaaataaaaaagccccagcgctaccgtccaaagtctcgcaggggcatacctaaaaaaggcaaggtgattttatcatgccaaagggcacgcgtgccgccatctatgcacgtttcagttcgcataaccagcgaagt

SEQ ID NO: 18730 - DNA, 260 bp, Unknown
  Description of Unknown: LeftRegion for integrase B5731 sequence
ctacctgctgggatatactgataagattgagaagccggcaggcgatgaaacggaccccgccgctaataagtttctggccgtaactctggccgagatcgacctgatcgaagcataccggcacgccggagctgagacccaggcagcgatcagagcgatcctgcacatttaacgggaggaccccgggaagggaggacggtgccatgcgcggcgtcatttatgcgagatattcaccaggcccgcaccagacggagcagtccatc

SEQ ID NO: 18731 - DNA, 260 bp, Unknown
  Description of Unknown: LeftRegion for integrase B5732 sequence
ttacatatttcagaatatggtatcagaaagatgatgatgcagccagcagatccgataatggaaatctttgatttataaataaaaatccccgctcgatgttgcagcaccgaacgggggaagaagctgtgatacaatcacaaccttagacaagcttattgtatcacagctccctgaaaatgtcaaggagtgataacaaatatatgaaaaccgccgtaatatacgcccgatattcatcggacaagcagacagagcagtccatt

SEQ ID NO: 18732 - DNA, 260 bp, Unknown
  Description of Unknown: LeftRegion for integrase B5733 sequence
ctatttgctggggtattctgataaaatcacgcggctgtccggggatcacaccgaccccacatccggcccctgcgttgaagttactgctgcggagctggagctgctgaaggctttccggcacgccggagctgagactcaggcagcgatcagagcgatcctgcacatttaacgggaggaccccgggaagggaggacggtgccatgcgcggcgtcatttatgcgagatattcaccaggcccgcaccagacggagcagtccatc

SEQ ID NO: 18733 - DNA, 260 bp, Unknown; identical to SEQ ID NO: 18700
  Description of Unknown: LeftRegion for integrase B5734 sequence

SEQ ID NO: 18734 - DNA, 260 bp, Unknown
  Description of Unknown: LeftRegion for integrase B5735 sequence
aatatattttagactaaaacaatagaaaataaaaaccgccctactctttcaagcaaggcggcatgcttccgaataatacgaaagccctaagcaagcatattgtatcattccggaagcagctacgcaagcggaacacccgttcctcgctggctgttatttttgtacccattttttcatacacttaacaaaggagtgataacatgactgacaacacctccatgcgtaccggtgccctctacatccgggtatctaccggtaag

SEQ ID NO: 18735 - DNA, 260 bp, Unknown
  Description of Unknown: LeftRegion for integrase B5736 sequence
tcgaagcaaacgaaacacacaacaacgaagcaagagagcattattgcatacgcgccgtttccaaccagtaaattctacaaaaaaccgccccggctttcgccgggacggaacatttggaaagcgaaaacaccactaaacgccctccgccaccagtatagcactgccgcgcggagatgtaaagcacagagagggaaatttacatgaacgcagttatctacgcgcgtttttcatcgcataaccaacgggaacaatccatcgaa

SEQ ID NO: 18736 - DNA, 260 bp, Unknown
  Description of Unknown: LeftRegion for integrase B5737 sequence
actagagcgtaatgaaaaagtcgttgtattaggtgttagactaaagattattaaaaatattgctaaagctcttaatgtaagtgaaggaaaaatattaatattagacaaggactaggttatatatttttaataacctagtttttattttattgaattacatacattaaatacatataatgaatgtaaaggaggttgttttcatgaataataaaatatgtatgtatcttagaaaaagtcgtgctgatgaagaacttgaaaaa

SEQ ID NO: 18737 - DNA, 260 bp, Unknown
  Description of Unknown: LeftRegion for integrase B5738 sequence
tcatccagtgattttttacaacaaaattttaaaaaccgccctactctttcaagcaaggcggtatgcttccgaataatacgaaagccctaagcaagcatattgtatcattccggaagcagctacgcaagcggaacacccgttcctcgctggctgttatttttgtacccattttttcatacacttaacaaaggagtgataacatgaccgacaacacctccatgcgtaccggtgccctctacatccgggtatcgaccggcaag

SEQ ID NO: 18738 - DNA, 260 bp, Unknown
  Description of Unknown: LeftRegion for integrase B5739 sequence
ctacctgctgggatatactgataagattgagaagccggcaggcgatgaaacggaccccgccgccaataagtttctggccgtaactctggccgagatcgacctggtcgaagcataccggcacgccggagctgagacccaggcagcgatcagagcgatcctgcatatctaacgggaggcccccgggaagggaggacggtgccatgcgcggcgtcatttatgcgagatattcaccaggcccgcaccagacggagcagtccatc

SEQ ID NO: 18739 - DNA, 260 bp, Unknown; identical to SEQ ID NO: 18715
  Description of Unknown: LeftRegion for integrase B5740 sequence

SEQ ID NO: 18740 - DNA, 260 bp, Unknown
  Description of Unknown: LeftRegion for integrase B5741 sequence
cttccctatttgcatatattgttttatgaggtgaggaacaaatggatataaagaacatctaccccaatctgaccgacgatcttagcactttagccattattgccaatcagcttttaactgaaattgatttgcaattatcccaagcacaggttataattaaatcaagcgatgacgtgtactgtgtaaattaggagggacacatgaatgcagtatacgccagacaatcattagataaaaaagacagtttatctatcgaaaca

SEQ ID NO: 18741 - DNA, 260 bp, Unknown
  Description of Unknown: LeftRegion for integrase B5742 sequence
ctgtgccgacagcggcctgggatattccccgccggggatgcgtggcaaatgcggcgaacctgatttacagcagattgaaatggatattctatgctttcttctggccatccttgccccaccgcatccttgccgctccgtgccgcccgaggtataatataggtgtaaggtttggtagctcctgaaacagaaaggagtaccaaatgaacattcgggaagatgcaatttacggacggcaatcggtagaccgcaaggacagtatc

SEQ ID NO: 18742 - DNA, 260 bp, Unknown
  Description of Unknown: LeftRegion for integrase B5743 sequence
cttccctattcgcatatattgttttatgaggtgaggaacaaatggatataaagaacatctaccccaatctgaccgacgatcttagcactttagccattattgccaatcagcttttaactgaaattgatttgcaattatcccaagcacaggttataattaaatcaagcgatgacgtgtactgtgtaaattaggagggacacatgaacgcggtatacgccagacaatcgttagataaaaaggacagtttatctatcgaaaca

SEQ ID NO: 18743 - DNA, 260 bp, Unknown
  Description of Unknown: LeftRegion for integrase B5744 sequence
cttccctatttgcatatattgttttatgaggtgaggaacaaatggatataaagaacatctaccccaatctgaccgacgatcttagcactttagccattattgccaatcagcttttaactgaaattgatttgcaattatcccaagcacaggttataattaaatcaagcgatgacgtgtactgtgtaaattaggagggacacatgaacgcggtatacgccagacaatcgttagataaaaaggacagtttatctatcgaaaca

SEQ ID NO: 18744 - DNA, 260 bp, Unknown
  Description of Unknown: LeftRegion for integrase B5745 sequence
cacgccccaacaagaagctgtcccaaagtggcaagaattttcaagaattgaaaatttgtggccacgggacgattcttgctctcacctttttcgctgcgtttcgcaattttcacatttcaatctgctcgcagattgttgacaagctgcgcttgacccgatactataaaggcaagtcgaatacacgccaaggaggtgcaaccatgaccgccgtgatctacgcccgctattcatccgacagccagcgtgaagcgtccattgag

SEQ ID NO: 18745 - DNA, 260 bp, Unknown
  Description of Unknown: LeftRegion for integrase B5746 sequence
tgtcggaattggaatcattgcaatcccgaccggcatcatttctgccggctttacatctttacttaaagaggatggagctgaagcagacgaaaaaaggtactgtccgtattgcggtcataagctcgatgaataaccgcccgattttttaagcaaaatagtctgaatgcagtctgtttttagtattagaagtaggtgattgaatgaacgccgtcatatacgcccgtttttccagccacaatcaacgcgaagaatccattgag

SEQ ID NO: 18746 - DNA, 260 bp, Unknown
  Description of Unknown: LeftRegion for integrase B5747 sequence
cttccctattcgcatatattgttttatgaggtgaggaacaaatggatataaagaacatctaccccaatctgaccgacgatcttagcactttagccattattgccaatcagcttttaactgaaattgatttgcaattatcccaagcacaggttataattaaatcaagcgatgacgtgtactgtgtaaattaggagggacacatgaatgcagtatacgccagacaatcgttagataaaaaagacagtttatctatcgaaaca

SEQ ID NO: 18747 - DNA, 260 bp, Unknown
  Description of Unknown: LeftRegion for integrase B5748 sequence
gtctttagtttttattcattcttttgtgctttcaagattatggtgtaagaaaattgcaatacgattattgttgtatattcaagataatgtgaccttaattgtctttttaaataaaaattaaacaaaaatcatatctcaccactaaggtttataaaagcatactttagcaggtgtcaccatgaaaaaaagccatagcatatatgcgattttcatcaccaggtcagatgtctggtgattcattaaaccgccagagaaggctt

SEQ ID NO: 18748 - DNA, 260 bp, Unknown
  Description of Unknown: LeftRegion for integrase B5749 sequence
aaacctgaccccgatgctctctccccgagcacgggacaagcgcaagcgtgaaattgaaagctgtctgtatgaggtctttgtaaagtatgcgccggggcgggcgcagatgcactaatgcgggacatccttgagatgcggggctgccagaggtataatataggtgtaaggtttggtagctcctacacggaaaggagcaccaaatgattattcgtgaagatgccatttatggcagacagtccgttgaccgcaaggacagtatc

SEQ ID NO: 18749 - DNA, 260 bp, Unknown; identical to SEQ ID NO: 18742
  Description of Unknown: LeftRegion for integrase B5750 sequence

SEQ ID NO: 18750 - DNA, 260 bp, Unknown
  Description of Unknown: LeftRegion for integrase B5751 sequence
cttccctattagcatatattgttttatgaggtgaggaacaaatggatataaagaacatctaccccaatctgaccgacgatcttagcactttagccattattgccaatcagcttttaactgaaattgatttgcaattatcccaagcacaggttataattaaatcaagcgatgacgtgtactgtgtaaattaggagggacacatgaacgcggtatacgccagacaatcgttagataaaaaggacagtttatctatcgaaaca

SEQ ID NO: 18751 - DNA, 260 bp, Unknown
  Description of Unknown: LeftRegion for integrase B5752 sequence
agaaaattacgaataggatatactcgtgctcttaaaataattaatacgttagaatatttgaaaatactaaatcgaaataatggttctttttatgtaaatcatgatgttgcacttaactttttaaattcaaataaaaaaaatagtattttcaaaaaggtaatttgtaaaatattaagaaataatatttaggaggttcttgtatgaaaagaatagcaatttatagtagaaaatcagtgtatatagaaggttctatatcaata

SEQ ID NO: 18752 - DNA, 260 bp, Unknown
  Description of Unknown: LeftRegion for integrase B5753 sequence
cttccctattagcatatattgttttatgaggtgaggaacaaatggatataaagaacatctaccccaatctgaccgacgatcttagcactttagccattattgccaatcagcttttaactgaaattgatttgcaattatcccaagcacaggttataattaaatcaagcgatgacgtgtactgtgtaaattaggaggggcacatgaatgcagtatacgccagacaatcgttagataaaaaagacagtttatctatcgaaacc

SEQ ID NO: 18753 - DNA, 260 bp, Unknown
  Description of Unknown: LeftRegion for integrase B5754 sequence
gaggaagatagccagtaaataaaaaaagcgccgaccctctggaaagggtcagcgctggggccagtgctacaaaatataaaagggtgaggcggctgcttcctgctggaacaggggctgcgccacaaagcacaggcagttgacatggaaaccaactgcctttattgtagcacgtcgccctgaatttgaaaaggggtgattttatgcgcgatatggattccgcccgcctgcgggtggtgtgctatgtccgcgtcagcacgaga

SEQ ID NO: 18754 - DNA, 260 bp, Unknown
  Description of Unknown: LeftRegion for integrase B5755 sequence
atgaggaagatagccagtaaataaaaaaagcgccgaccctctggaaagggtcagcgctggggccagtgctacaacataaaaaggtgaggtggccgcttcctgctggaacagggggctgcgccacaaagcacaggcagttggcatggaaccgactgcctttattgtagcacgtcgccctgaatttgaaaaggggtgattttatgcgcgatatggattccgcccgcctgcgggtggtgtgctatgtccgcgtcagcacgaga

SEQ ID NO: 18755 - DNA, 260 bp, Unknown
  Description of Unknown: LeftRegion for integrase B5756 sequence
agtcttacgccggtactctctccgaaggaaaaggaaaagcggaaaaaggagattgaacgctgtctttatgaggtgttcagcaagtacagaagggccagcgataccccggcctgaccatcgacaacattgtccttcggggctatcaatggtataatatacttgtaggttggtagctccattccacaggaaaggagcccaacatgaatatcagagaagatgtaatttatgcaagacaatccgtagaccgcaaggacagtatc

SEQ ID NO: 18756 - DNA, 260 bp, Unknown
  Description of Unknown: LeftRegion for integrase B5757 sequence
cttccctatttgcatatattgctttatgaggtgagcaacaaatggagataaagaacatctaccctaatctgaccgacgatctcagcactttagccattatcgccagccagcttttaactgaaattgatttgcaattatcccaagcacaagctataattaaatcaagcgatgacgtgtgctgcgtaaattaggagggacgcatgaatgcagtatacgccagacaatcgttagataaaaaagacagtctatctatcgaaaca

SEQ ID NO: 18757 - DNA, 260 bp, Unknown
  Description of Unknown: LeftRegion for integrase B5758 sequence
tttcaaatatgataacggtgttttgagctatgaggctaccgccatgggaaccacgacgaccgtgaaaatggagcggcaataattacctattcccatagtaatctgaaaaatgctacttttgtagtagtaaaagatggaagggcggcgacatcaagcgaaacgccgcccttcccacttatgaaaggcagtgacgttttaacatgagaagacgtatagacccgaacggtcgctactgcgcgtacctgcgcaagtcccgcgac

SEQ ID NO: 18758 - DNA, 260 bp, Unknown
  Description of Unknown: LeftRegion for integrase B5759 sequence
tttttttatcaaacggaaataacattggctcaaatggtttaagcatagttagcacctcttttcttcctattttatattatatccatatttttaattttatacaacaattttatttaaaaaaatgttctaacattatttttttaatatagttcattggtttttctgtccctataaatcttagcaaaaaggaggctcatgctatgcaaaacgccatatatttgcgtaaatctcgtgccgaccagggcaccgtggaagacacc

SEQ ID NO: 18759 - DNA, 260 bp, Unknown
  Description of Unknown: LeftRegion for integrase B5760 sequence
caagcgagtgataccgctggagaacatagccccggtactaagtatcgacgaggagagccggacaaaacagtcgatcgagtcaaagctctacgacgtgttcgtgcggtacatgaaaaaatagcttgtcagagcggggccacgcatcctataatcagggtgatgatggctccgatcctttttagaggaggagggagcttcggatgtttgacgccatttacacaaggcaaagtgtggacaaggctgacagcatatctgttacg

SEQ ID NO: 18760 - DNA, 260 bp, Unknown
  Description of Unknown: LeftRegion for integrase B5761 sequence
gtcggctcaaggtcgccgccgaggatcttcataaaggtggatttaccactaccgttcgcgccaatcaggccgtaacggttgccgccgccaaatttgacggaaatgttttcaaacaacggcttactgccgaactgcatggtgatgttgttgctaaggagcaaaattgatactctctactaagtgattgaaaggattagaatatgcaaaagcaaaacgggttagcttacagttacatacgattttcgagcaagaaacaagaa

SEQ ID NO: 18761 - DNA, 260 bp, Unknown
  Description of Unknown: LeftRegion for integrase B5762 sequence
atttttctccgttgccttttgcaacgtctattatagaacaaatgttctaattttgcaataacaaattgtggatatgaatatataaatacgtcattgaaccacagggggctatctcgtggcggaaaaatccgccaccaaatatccggaatgaactgaacgagattttccgttcaccccaaaacccacatggaggtgatctcatgtcagaaaagtccgctgttatttatgcccgatacagcagccacaaccaacgggaggaa

SEQ ID NO: 18762 - DNA, 260 bp, Unknown
  Description of Unknown: LeftRegion for integrase B5763 sequence
cttccctatttgcatatattgttttatgaggtgaggaacaaatggagataaagaacatctaccccaatctgaccgacgatcttagcactttagccattatcgccaatcagcttttaactgaaattgatttgcaattatctcaagcacaggttataattcaatcaagcgatgacgtgtactgtgtaaattaggagggacacatgaacgcggtatacgccagacaatcgttagataaaaaagacagtttatctatcgaaaca

SEQ ID NO: 18763 - DNA, 260 bp, Unknown
  Description of Unknown: LeftRegion for integrase B5764 sequence
acttactgggtcttagtgaagtcagaaaaccggaagtcttagtattgtcagaaaaagagaaaatcctcattgacgcataccgtactgctaatgacatgggacagttgaacataatctatgtctgcatggatgaaatgaaaaaagcaaaaggagaaggcgtacttgtagggtaattgatttcatagaatggaggaagaaccatgtatgaggatataaaaacagcctgcctatacgttagattctcaagccataaccagact

SEQ ID NO: 18764 - DNA, 260 bp, Unknown
  Description of Unknown: LeftRegion for integrase B5765 sequence
ataagtaaagcccttgattttacgcaagggcttattttttatggttgaatatgatatactaaaatcaaaaaatgaggtgataaaatgtcacgaggcggaaaacgtgaaggcgctggtagaccttcgatatatccgaaagatgcaaaactaaaatgttataaatttagattgacaccagaacaggagaaggttgttgacgaatggataaaacaaataaggaaaaaaatacaaaatacgcaggacgcgcagtaatatatgca

SEQ ID NO: 18765 - DNA, 260 bp, Unknown; identical to SEQ ID NO: 17513
  Description of Unknown: LeftRegion for integrase B5766 sequence

SEQ ID NO: 18766 - DNA, 260 bp, Unknown
  Description of Unknown: LeftRegion for integrase B5767 sequence
aaacctgaccccgatgctctctccccgagcacgggataagcgcaagcgtgaaattgaaagctgtctgtatgaggtctttgtgaagtatgcgccgggacgggcgcagatgcactaatgcgggacatccttgagatgcggggctgccagaggtataatataggtgtaaggtttggtagctcctacacggaaaggagcaccaaatgattattcgtgaagatgccatttatggcagacagtccgttgaccgcaaggacagtatc

SEQ ID NO: 18767 - DNA, 260 bp, Unknown
  Description of Unknown: LeftRegion for integrase B5768 sequence
agatggcttacaacatgaccatggtgatggctaagagcttgcttgaaaaaggaaccattacaaaggatgagtatgctgatttccacgctaaaattctaaaaaaatataatctgaagaatagctcattatttgccgacattaacttgctatagttcggatagtatgggaatatagctatgccaaaggaggcgatgataataatggctatagtaaaaaagattatgcctatggttttgagcttggataccagaaagcgtgtg

SEQ ID NO: 18768 - DNA, 260 bp, Unknown
  Description of Unknown: LeftRegion for integrase B5769 sequence
cttcgatcaagggcttatgacggtcttgcctgattttacaattcaggtctcggactacgtgaaggacagctacgacgaccaaaatacgagagactggctactcggcgtagagggtacaaaaatcatcaggccgaagaggttcgcaccaaatcgcgatatgctggcctaccacaatgagtttgtattcctgaggtgattccatgcagcgagcagtgatatacgccagatacagccctggaccaaatcagacagagcagtcg

SEQ ID NO: 18769 - DNA, 260 bp, Unknown; identical to SEQ ID NO: 18757
  Description of Unknown: LeftRegion for integrase B5770 sequence

SEQ ID NO: 18770 - DNA, 260 bp, Unknown
  Description of Unknown: LeftRegion for integrase B5771 sequence
tatgaggaagatagccagtaaataaaaaagcgccgaccctctggaaagggtcagcgctggggccagtgctacaacataaaaaggtgaggtggccgcttcctgctggaacagggggctgcgccacaaagcacaggcagttggcatggaaccgactgcctttattgtagcacgtcgccctgaatttgaaaaggggtgattttatgcgcgatatggattccgcccgcctgcgggtggtgtgctatgtccgcgtcagcacgaga

SEQ ID NO: 18771 - DNA, 260 bp, Unknown
  Description of Unknown: LeftRegion for integrase B5772 sequence
cgtaaaataagcccttgcaaaagcaggggcttattttttatggttgaatatgatatactaaaatcaaaaaaatgaggtgataaaatgtcacgaggcggaaaacgtgaaggcgctggtagaccttcgatatatccgaaagatgcaaaattaaaatgttataaatttagattgacaccagaacaggagaaggttgttgacgaatggataaaacaaataaggaaaaaaatacaaaatacgcaggacgcgcagtaatatatgca

SEQ ID NO: 18772 - DNA, 260 bp, Unknown
  Description of Unknown: LeftRegion for integrase B5773 sequence
tatgcttgccattttaaataaattgaatcaaaccggaagattaaaaaccgaattttacgatttacacaaaaaatggctggaaaggatacgggtcactgaaatatgggaaagccgccctccaaccactttgtattccgctgtaaagccacaatcctgattttaaatagatcgaacttgataggtgaaaggagcctgtgattatggatgtattcatgtacctgcgaaaatcgcgggcagataacccggaatccagcgtggaa

SEQ ID NO: 18773 - DNA, 260 bp, Unknown
  Description of Unknown: LeftRegion for integrase B5774 sequence
tgcacatcaaaacaaaaccaatccttacatatacgttcgacaacccgaacgccagagacactatagtgcaaacattacgcgaaatgataatcagcaaaatcgtcgagaaagaccaatccgtttacataccaacccaacgtgcacataatcaagaccaataagcgcgtggcgcggaatttcgacgataagaggtacaaaaaatgagaattgcggcttattgcagagtatcaacaggcaaggaagatcagcttgacagctta

SEQ ID NO: 18774 - DNA, 260 bp, Unknown
  Description of Unknown: LeftRegion for integrase B5775 sequence
aaacctgaccccgatgctctctccccgagcacgggataagcgcaagcgtgaaattgaaagctgtctgtatgaggtctttgtgaagtatgcgccgggacgggcgcagatgcactaatgcgggacatccttgagatacgggactgccagaggtataatataggtgtaaggtttggtagctcctacacggaaaggagcaccaaatgattattcgtgaagatgccatttatggcagacagtccgttgaccgcaaggacagtatc

SEQ ID NO: 18775 - DNA, 260 bp, Unknown
  Description of Unknown: LeftRegion for integrase B5776 sequence
cttccctatttgcatatattgttttatgaggtgaggaacaaatggagataaagaacatctaccccaatctgaccgacgatcttagcactttagccattatcgccaatcagcttttaactgaaattgatttgcaattatctcaagcacaggttataattcaatcaagcgatgacgtgtactgtgtaaattaggagggacacatgaacgcggtatacgccagacaatcgttagataaaaaagacagtttatctatcgaaacc

SEQ ID NO: 18776 - DNA, 260 bp, Unknown; identical to SEQ ID NO: 15631
  Description of Unknown: LeftRegion for integrase B5777 sequence

SEQ ID NO: 18777 - DNA, 260 bp, Unknown
  Description of Unknown: LeftRegion for integrase B5778 sequence
ataagcaaagcccttgattttacgcaagggcttattttttatggttgaatatgatatactaaaatcaaaaaatgaggtgataaaatgtcacgaggcggaaaacgtgaaggcgctggtagaccttcgatatatccgaaagatgcaaaactaaaatgttataaatttagattgacaccagaacaggagaaggttgttgacgaatggataaaacaaataaggaaaaaaatacaaaatacgcaggacgcgcagtaatatatgca

SEQ ID NO: 18778 - DNA, 260 bp, Unknown; identical to SEQ ID NO: 18505
  Description of Unknown: LeftRegion for integrase B5779 sequence

SEQ ID NO: 18779 - DNA, 260 bp, Unknown
  Description of Unknown: LeftRegion for integrase B5780 sequence
atgaggaagatagccagtaaataaaaaaagcgccgaccctctggaaagggtcagcgctggggccagtgctacaacataaaaaggtgaggcggccgcttcctgctggaacagggggctgcgccacaaagcacaggcagttggcatggaaccgactgcctttattgtagcacgtcgccctgaatttgaaaaggggtgattttatgcgcgatatggattccgcccgcctgcgggtggtgtgctatgtccgcgtcagcacgaga

SEQ ID NO: 18780 - DNA, 260 bp, Unknown
  Description of Unknown: LeftRegion for integrase B5781 sequence
agtctgacgccggtactctccccgaaggaaaaggagaagcggaagaaagacattgaacgctgtctgtatgaagtgttcagcaagtacagaagggccggggacagccctgcttgaccatcgacaacattgtcctgcggggctatcaatggtataatatacttgtaggttggtagctccattccacaggaaaggagcccaacatgaatatcagagaagatgtaatttatgcaagacaatccgtagaccgcaaggacagtatc

SEQ ID NO: 18781 - DNA, 260 bp, Unknown
  Description of Unknown: LeftRegion for integrase B5782 sequence
ttacatttacacttttgtcaaactaaataccgccctgctctaccaaagcaaggcggcaagctcccgaatgatacgaaagccctcaacaagcacattatatcattctcggagcagcttcgcaagcggaacacccgtttgacgcaggctgttatttttgtacccaaaaaccaatacaatatagagaaagaggtgcatgtgctatgaaagaaaaagtttcagaacgcaaaacaggcgcgatctatatccgtgtatccacagac

SEQ ID NO: 18782 - DNA, 260 bp, Unknown
  Description of Unknown: LeftRegion for integrase B5783 sequence
aaacctgaccccgatgctctctccccgagcacgggataagcgcaagcgtgaaattgaaagctgtctgtatgaggtctttgtgaagtatgcgccgggacgggcacagatgcactaatgcgggacatccttgagatgcggggctgccagaggtataatataggtgtaaggtttggtagctcctacacggaaaggagcaccaaatgattattcgtgaagatgccatttatggcagacagtccgttgaccgcaaggacagtatc

SEQ ID NO: 18783 - DNA, 260 bp, Unknown
  Description of Unknown: LeftRegion for integrase B5784 sequence
tgtggtctttggtagtaaaaacaaaagagcgccgaccctctggaaagggtcggcgctggggccagtgctacaacacaaaaaggtgaggtggccgcttcctgctggaacagggggctgcgccacaaagcacaggcagttgacatggaaggcaactgcccttattgtaacacgtcgccctgaatttgaaaaggggtgattttatgcgcgatatggattccgcccgcctgcgggtggcgtgctatgtccgcgtcagcacgaga

SEQ ID NO: 18784 - DNA, 260 bp, Unknown; identical to SEQ ID NO: 13468
  Description of Unknown: LeftRegion for integrase B5785 sequence

SEQ ID NO: 18785 - DNA, 260 bp, Unknown; identical to SEQ ID NO: 18762
  Description of Unknown: LeftRegion for integrase B5786 sequence

SEQ ID NO: 18786 - DNA, 260 bp, Unknown
  Description of Unknown: LeftRegion for integrase B5787 sequence
ctacctgctgggatatactgataagattgagaagccggcaggcgatgaaacggaccccgccgccaataagtttctggccgtaactctggccgagatcgacctgatcgaagcataccggcacgccggagctgagacccaggcagcggtcagagcgatcctgcacatttaacgggagggccccgggaagggaggacggtgccatgcgcggcgtcatttatgcgagatattcaccaggcccgcaccagacggagcagtccatt

SEQ ID NO: 18787 - DNA, 260 bp, Unknown; identical to SEQ ID NO: 18743
  Description of Unknown: LeftRegion for integrase B5788 sequence

SEQ ID NO: 18788 - DNA, 260 bp, Unknown
  Description of Unknown: LeftRegion for integrase B5789 sequence
tatctttaacaactgttggctatggcgatatatacccggtatcaaccgctgggcgtgttttcactatgctgtcgtcgctggttggtattgccgttgtggccttgcctgccggtatcataacggcggggtacatggacgcactgcgcgaagattccgacaaaaagaaatagcccgccgatcggcgggcagggggtgcttatatgcgagcgtttatctattgccgattttccagccataagcagcaagagcttagcatagag

SEQ ID NO: 18789 - DNA, 260 bp, Unknown
  Description of Unknown: LeftRegion for integrase B5790 sequence
accgaggcctcataacgatcaccccgtccatgaaaatccatgtttcgccgtcaattctcaatgcccctcaggacgcatttacagcccgctggctgacttctctcgacgggaatgttttacccccccccccgatttccgccgcgtagagagctcctggagtaccataacgacgtaatttttaagagggaggcagaaagtacatgaatacagtaatctacgcacgctattctgccggcccgagacagaccgatcagagtatc

SEQ ID NO: 18790 - DNA, 260 bp, Unknown
  Description of Unknown: LeftRegion for integrase B5791 sequence
cttcgatcaagggcttatgacggtcttgcctgatcttacaattcaagtctcggactacgtgaaggacggctacgacgaccaaaatacgagagactggctactcggcgtagagggtacaaaaatcatcaggccgaagaggttcgcaccaaatcgcgacatgctggcctaccacaatgagtttgtattcctgaggtgatttcatgcagcgagcagtgatatacgccagatacagccctggaccaaatcagacagagcagtca

SEQ ID NO: 18791 - DNA, 260 bp, Unknown
  Description of Unknown: LeftRegion for integrase B5792 sequence
ttgtgttacttatcctgtcatatattgaagaggtcggcagaagaagataaatcaggggtcctcttctatgcacatttttctacaataaaattgcagtttcggcacaaaatgttacgaatcggtggttttaatgccgaaaaattgcgttaaatatatactacgccgccgaggtgcggcgttttttagtgaggtgatacacagtgagaaacgcggttatttatgctaggtattcgtcagataggcagagagaggaatctatc

SEQ ID NO: 18792 - DNA, 260 bp, Unknown
  Description of Unknown: LeftRegion for integrase B5793 sequence
acttactgggtcttagtgaagtcagaaaaccagaagtcttagttttgtcagaaaaagaaaaaatcctcattgacgcataccgtactgctaatgacatgggacagttgaacataatctatgtctgcatggatgaaatgaaaaaagcaaaaggagaaggcgtacttgtagggtaattgatttcatagaatggaggaagaaccatgtatgaggatataaaaacagcctgcctatacgttagattctcaagccataaccagact

SEQ ID NO: 18793 - DNA, 260 bp, Unknown
  Description of Unknown: LeftRegion for integrase B5794 sequence
ttagatgtgacacctgcgtacctgatgggctgggaggaaaaagatgcaggggtagagctgccggaggatgttttgcagaaagccaaggctctgtatgaggacccgggcctcaagatccttctggatgtaaaggaaaagctgagcgctgaggagctgaatgctctgctgctgtttgcgaaaagtctgatggagaagaaaaaatgagagctgtgatatatgcgagatactcgccggggcctaagcagacagatctgtctatc

SEQ ID NO: 18794 - DNA, 260 bp, Unknown
  Description of Unknown: LeftRegion for integrase B5795 sequence
ccagccttgccacactggatagccaaactcttactctatccgcagaggaagtgcgcttaatcctcaagtaccgtgctttagacaaagagggacgcacgatggtagagtctacccttattcaggaaacccgcagaatggatacggagaaaggggaaactgtaagtgccgggtaatcagccttgccgaatggaggaagaaccatgtatgaagaagtgaaaaatgcctgcatctatgccagatattccagcagcaatcaaacc

SEQ ID NO: 18795 - DNA, 260 bp, Unknown
  Description of Unknown: LeftRegion for integrase B5796 sequence
taaactgttgggcgaaaatctcataaccgaggcgcagcgcaggaaaatcgaaagtgctgtcataaagcggctttcggatgtttgaacccatgtccgcttttgttggttatgatacaaaccgccgcagatattttagtggcattggtgatagataaacccgaatcgtttcggtatactgtgttgtgaaagggagtgatgagatggcggaaattacaatcatacctgctaaaaatcatgcggacgaaatcgtcagaaccgcc

SEQ ID NO: 18796 - DNA, 260 bp, Unknown; identical to SEQ ID NO: 18755
  Description of Unknown: LeftRegion for integrase B5797 sequence

SEQ ID NO: 18797 - DNA, 260 bp, Unknown
  Description of Unknown: LeftRegion for integrase B5798 sequence
ggtcggctgaaaacatcagcttgcagacgctaaagaagctgtcggaatacttcggcatcagcatcgaggagcttgtccacggtacgaagacacggcgcgagctggtattcacgagcgacacatacacggaagaagaactcgcacagattaagcaattcgcgcactttttaatagggcaacgagaaaggaatgattgatgaatggcatacgcaatgtacctgcgcaaatcccgcgcagacgaggaactaggatacgaaaac

SEQ ID NO: 18798 - DNA, 260 bp, Unknown
  Description of Unknown: LeftRegion for integrase B5799 sequence
gcagcgccgagaacatcagcttgcagacgctgaagaagctgtctgattacttcgggataagcatcgaagagcttgtccacggtacgaagacgcggcacgagctggtattcacgagcgatacatacacggaagatgaactcgcgcagattaagcaattcgcgcactttttaataggacaacgagaaaggaatgaatgatggatggcatacgcaatgtacctgcgcaagtcacgcgcagacgaggaattgggatacgaaaac

SEQ ID NO: 18799 - DNA, 260 bp, Unknown
  Description of Unknown: LeftRegion for integrase B5800 sequence
ccctgcggcatctgcagaccgtgagggatccacgccccaacaaaaaaaaatcccgccaccgtgctaccaacacgatgccgggaagtgcagctttgtactggtaatactcagctgcagtctaaaccacccccacaggaggtcgactatgctaatagtatatcacgtcggcctccatctagccatagaaggaggctattattatgcaaaaaaacaccactattgaaaatacaacaaaggctgtcatttatgctcggtactct

SEQ ID NO: 18800 - DNA, 260 bp, Unknown
  Description of Unknown: LeftRegion for integrase B5801 sequence
attattaaatgctgcgttaaacgacataaattcaaagattgaaaagggctatgtatataagcccagaggaaagagtaggaaataaaaaatccccgcccggcgctggaacaccgaacggggaagaagctgtgatacaatcacaaccttagacaagtttattgtatcatagctccctgaaaatgtcaaggagtgatttaaatttgaaaaccgccgtaatatacgcccggtattcgtccgacaagcagacggagcagtccatt

SEQ ID NO: 18801 - DNA, 260 bp, Unknown
  Description of Unknown: LeftRegion for integrase B5802 sequence
gcagcgccgagaacatcagcttgcagacgttgaagaagctgtcggactacttcggtataagcatcgaggagcttgtccacggcagcaagcaaacgcgcgagataacattttcgagcagcgcgtacactgacgaagaattgaaacagataaaacagttcgcacactttttgataaggcaacgagaaaggaatgaatgatggatggcatacgcaatgtacctgcgcaagtcacgcgcagacgaggaactaggatacgagaac

SEQ ID NO: 18802 - DNA, 260 bp, Unknown; identical to SEQ ID NO: 16104
  Description of Unknown: LeftRegion for integrase B5803 sequence

SEQ ID NO: 18803 - DNA, 260 bp, Unknown; identical to SEQ ID NO: 15792
  Description of Unknown: LeftRegion for integrase B5804 sequence

SEQ ID NO: 18804 - DNA, 260 bp, Unknown
  Description of Unknown: LeftRegion for integrase B5805 sequence
tatttaccttgtaaaaaatgttatagcgattaaaaaaccgcccctgcgccaacaggaacggtctaacatatatccgaagatatacagttattctgaacaaatatattgtatcatcttcggaacagccttgcaatcggaacatactttcgatggctgttatttttatactctttttgaataaaataaagaaggtgatgaaattgtctagcacagaaactcttaaatccggtgctctctatatacgtgtgagtacccatgga

SEQ ID NO: 18805 - DNA, 260 bp, Unknown
  Description of Unknown: LeftRegion for integrase B5806 sequence
ttgaattgtaaaataattgtgtatataatgaaagcacgaaatcccgatgtggatacaccgggatttcgttttcccttgcgggaatgtgatatattattcgcaatccaattatatcgcatttctcataagtccacaagggcttattttttataccattttttatttacgcatcggttgcaccggtgcaactggaggtttatatgagaaagaaagctattgattcaactgctgccgttgtgtacgcaagatattctgccgga

SEQ ID NO: 18806 - DNA, 260 bp, Unknown
  Description of Unknown: LeftRegion for integrase B5807 sequence
cagcgccgagaacataagcttgcagacactcaagaagctgtctgactacttcggggtaagcatcgaggagcttgtccacggcaagcagcgacggcgcgagataacattttcaagcaacacatacacagacgacgagctgaaccagatagcgcagttcgcgcaatttttgatagggcaacgaggaaaggggtaattgatgaatggcatatgcaatgtatctgcgcaaatcccgcgcagacgaggaactaggatacgaaaac

SEQ ID NO: 18807 - DNA, 260 bp, Unknown
  Description of Unknown: LeftRegion for integrase B5808 sequence
gtaggttaatagcctactctttcttttttacataaacatttaaaataaaataatctttttatttaatagtaaatgaatattatttaaataattaaaataaagggtaaatttgttatctcaaatatttctttttttatgcattgatgtaaaataactattacaaagagttcttaaatatttatgaggtgatttttgtgaaaatgaaaagcgttttatatgcaagagttagtacagaagatttagaacaaaacaatagttat

SEQ ID NO: 18808 - DNA, 260 bp, Unknown; identical to SEQ ID NO: 15483
  Description of Unknown: LeftRegion for integrase B5809 sequence

SEQ ID NO: 18809 - DNA, 260 bp, Unknown; identical to SEQ ID NO: 13967
  Description of Unknown: LeftRegion for integrase B5810 sequence

SEQ ID NO: 18810 - DNA, 260 bp, Unknown
  Description of Unknown: LeftRegion for integrase B5811 sequence
taaaaaatgggcagtaaaatgcccatttgaatcatttgttgatatagaatctttgagtcaatttataaatacgttcaataaattgtatatcgttgattctatgtaagtatctaatgatacattcaatcatttcttctttagtcatatttatcacccctacgaaattgtaaaacagaaaggaagtgtttattgtgtatgctatgtatttgagaaaatcacgtgctgatgatccacatgaaagtatagaggatactttgagg

SEQ ID NO: 18811 - DNA, 260 bp, Unknown
  Description of Unknown: LeftRegion for integrase B5812 sequence
gaatactatgaaaacaaaaatcatttatcgtctttcgcatcgggagcgtaaacgaaaactgcggtttgtcaagggtaaaatgtatgcttgaagcacccttgacaaacctataaaactactatgatatagacaatatcgtttccgtttttctctctcttgtcgaaagacaaatcaatcgtaaaaggagaaagaaaaacaatatgaaaacagcagcaatatacgcaagatactcttgcgagaatcaaacggaacagtccatc

SEQ ID NO: 18812 - DNA, 260 bp, Unknown; identical to SEQ ID NO: 13967
  Description of Unknown: LeftRegion for integrase B5813 sequence

SEQ ID NO: 18813 - DNA, 260 bp, Unknown
  Description of Unknown: LeftRegion for integrase B5814 sequence
taaagccttcgaccgaggccttataactatcactccttccatgaaaatctatgtttctccgataattttggatagccctcaggacgcttttacagcccgctggctggcttctctcgacggaatggttttacccccccccgatttccgccgcgtagagagcttctggagtaccataacgacgaaatttttaggagggtcacatgaatacagtaatttatgctcggtattctgccggcccgagacagaccgaccagagtatc

SEQ ID NO: 18814 - DNA, 260 bp, Unknown; identical to SEQ ID NO: 15702
  Description of Unknown: LeftRegion for integrase B5815 sequence

SEQ ID NO: 18815 - DNA, 260 bp, Unknown
  Description of Unknown: LeftRegion for integrase B5816 sequence
gtagcgccgagaacatcagcctgcaaacactgaagaagctgtcggaatacttcggcataagcatcgaggagcttgtccacggtacgaagacgcggcacgagctggtattcacaagcgacgcatacacggaagaagagctcgcgcagattaagcaattcgcgcactttttaataggacaacgagaaaggaatgattgatgaatggcatacgcaatgtatctgcgcaagtcacgcgcagacgaggaacttggatacgagaac

SEQ ID NO: 18816 - DNA, 260 bp, Unknown
  Description of Unknown: LeftRegion for integrase B5817 sequence
ctcagaagattatttctgattttgacaaggaaataaaaaagctcacgaagaaaaaataaaaaaccgcccgcttctgttggcgcagaaacgagcgacgaaaatagaacagcttacccaaagtggataatgcgtccgaacaacgaaattataccactttctgggtaggcttggcaagtcttactttggaggtggtttttattatgaaagcggcggcttatgctcgctactcaacagacaagcaaacggaaaatagtatagcg

SEQ ID NO: 18817 - DNA, 260 bp, Unknown
  Description of Unknown: LeftRegion for integrase B5818 sequence
gcagcgccgagaacatcagcttgcagacgttgaagaagctgtcggattacttcggcataagcatcgaggaacttgtacgcggcagcaggcaaacgcgcgagataacattttcaagcagcgcatacacggacgcagagcttgaccagataacgcagttcgcacactttttgataaggcaacgaggaaggaatgaataatggatggcatacgcaatgtatctgcgcaagtcacgcgcagacgaggaactaggatacgagaac

SEQ ID NO: 18818 - DNA, 260 bp, Unknown
  Description of Unknown: LeftRegion for integrase B5819 sequence
gcagcgccgagaacatcagcttgcagacgctgaagaagctgtcggattacttcggtataagcatcgaggaacttgtccacggcaagcaacaacggcgcgagataacattttcaagcagcgcgtacactgacgcagagcttgaccagataaagcagttcgcacactttttgataaggcaacgagaaaggaatgaataatggatggcatatgcaatgtacctgcgcaagtcacgcgcagacgaggaactgggatacgagaac

SEQ ID NO: 18819 - DNA, 260 bp, Unknown
  Description of Unknown: LeftRegion for integrase B5820 sequence
accgagaggaattagagggggataaagaatcttctacgcacagcgaagataatccccatagaattgctcaggcataagaagcacttggaggtgatactacgaaagcggtaatctatgccagatattcgagccataaccagagagaggaatccatagagggacagctccgtgagtgtcacgactttgcactgaaaaatggaatgacgatcatcggtgaatattgcgacagagcaatctcaggtaaaaccgataatcgtcca

SEQ ID NO: 18820 - DNA, 260 bp, Unknown
  Description of Unknown: LeftRegion for integrase B5821 sequence
cttatgttagttttatagataacgcagtatgcatttcgattatgtactcaataaaatagaataaaaaaatcctgcaatcgtctgccaacggttgcaggatataaatggtaaggtgttaaataatagataattcacacgtccttaacctctgttattttaccacctttccgggcaaatgtcaaaagaaaggtgttttttttatgccacaaaatacaaattatggaaatctctctcattccgacagcacaaagcgagccgca

SEQ ID NO: 18821 - DNA, 260 bp, Unknown
  Description of Unknown: LeftRegion for integrase B5822 sequence
gtttcaggtgaaaaagccaacacaagtggtatttaccatcgaatgcggtgcgactcctgacgaactaatgcaggccattcaagatatcgtgctttcaaaactgcttgccggccgagcggaggtagcatcttgaacgagcgggatgtgcgtggtataatcgaaccagcagaatttggctggcatcgaaaggaggccggcacatgagaatgtgcggatacgcacgagttagcaccgacgaggaacggcaattagatagctta

SEQ ID NO: 18822 - DNA, 260 bp, Unknown
  Description of Unknown: LeftRegion for integrase B5823 sequence
taaacttttttgaaatgaaaacagtcaaagacaaaaaagagagtgaaaaaagcgaataaaaaaccgcccgcttctgttggcgcagaaacgagcggcaaaaatagaacagcttacccaaagtggataatgcgtccaaacaatgaaattataccactttcggggtaaacttggcaagtcttactttggaggtggtttttattatgaaagcggcggcttatgcgcgctactcaacggacaagcaaacggaaaatagtatagcg

SEQ ID NO: 18823 - DNA, 260 bp, Unknown
  Description of Unknown: LeftRegion for integrase B5824 sequence
gtttcaggtgaaaaagccaacacaagtggtatttaccatcgaatgcggtgcgactcctgacgaactaatgcaggccattcaagatatcgtgctttcaaagctgcttgccggccgagcggaggtagcatcttgaacgagcgggatgtgcgtggtataatcgaaccagcagaatttggctggcatcgaaaggaggccggcacatgagaatgtgcggatacgcacgagttagcaccgacgaggaacggcaattagatagctta

SEQ ID NO: 18824 - DNA, 260 bp, Unknown
  Description of Unknown: LeftRegion for integrase B5825 sequence
ttgcggttgtggctattgatggagaaacagcaacagtaaaaagaattaagtgccaaaatgagatttgcatattgatgccttcaaaccctaagctgcagccgactatcgttgatgcatctaaagttgaaattattggtaaagttgtagaagtcagacggagatattagagtttacgggcctctggaaaggaggtgaaataaatggtggtacgagcccgtgaaacgaatgaagaaatagaagcgatcggatatatacgacaa

SEQ ID NO: 18825 - DNA, 260 bp, Unknown
  Description of Unknown: LeftRegion for integrase B5826 sequence
tcatacggtaccgtgttttcattatacacctttcttgtcgaaatgtcactatgtttgttgcctattggcaaaatttttccgcatatatcctattttttagcagattgttacccgctgaaattataaactgtgcccgaatcgggtacaaaaatcgataaggccgtcctccggggcggcctttgtcgcaaaaggaggctgccgtgaaagaccgaagcgcgctgtatttgcgaaaatcccaggcggaccagcctgacgaaagc

SEQ ID NO: 18826 - DNA, 260 bp, Unknown
  Description of Unknown: LeftRegion for integrase B5827 sequence
tatttcattctttgcatctgaaaatagttaataaaaaccgcccggtgttggcgcaccagacggtctgagatatatccgaagatataccaaattttagcaaatatattgtatcatcttcggaaacagtttgcaagcagaacaaaagtttgctggctgttatttttatactctttttgaataaaataaagaaggtgatgaaattgtctaacacagaaactcttaaatccggcgctctctatatacgtgtgagcacccacggc

SEQ ID NO: 18827 - DNA, 260 bp, Unknown
  Description of Unknown: LeftRegion for integrase B5828 sequence
gtctgaattgatggacgaacaggattttctaaatgctaccatctctatgacacaggaagaaatggacgatttgcacaaggtagataaaggcacacaagatgcactaaaaagaagaatggaagaaaacgaacgctttagaacgatgtaaataaaaaaagagccacctacacaggtggctttatttgtagagaggattaactatggaattatcaaagggagtaatatacgctagatattcatcagacaaacaacgtgatgaa

SEQ ID NO: 18828 - DNA, 260 bp, Unknown
  Description of Unknown: LeftRegion for integrase B5829 sequence
gtttcaggtgaaaaagtcaacacaagtggtatttaccatcgaatgcggtgcgactcctgacgaactaatgcaggccattcaagatatcgtgctttcaaagctacttgccggccgagcggaggtagcatcttgaacgagctggatgcgcgtggtataatcgaaccagcagaatttggctggcatcgaaaggaggccggcacatgagaatgtgcggatacgcacgagttagcaccgacgaggaacggcaattagatagctta

SEQ ID NO: 18829 - DNA, 260 bp, Unknown; identical to SEQ ID NO: 16696
  Description of Unknown: LeftRegion for integrase B5830 sequence

SEQ ID NO: 18830 - DNA, 260 bp, Unknown
  Description of Unknown: LeftRegion for integrase B5831 sequence
ccgaacaaagggacgaaataatcaataaaaataaactttcttttctttcctaattaagagccttttgtctggacttccttcgatttatacgctattgtttgtgctaccctgactgcggggtggcacaaatttttttatcaagttaaagtcctacataagtcaagggtaagtaaaataaaaagtctaaaaaggaggctcgtatggataaaaaactaaaagttgcggcatacggaagagtatctactaacagtaaacagcaa

SEQ ID NO: 18831 - DNA, 260 bp, Unknown; identical to SEQ ID NO: 18810
  Description of Unknown: LeftRegion for integrase B5832 sequence

SEQ ID NO: 18832 - DNA, 260 bp, Unknown
  Description of Unknown: LeftRegion for integrase B5833 sequence
tcgtttgtaatcttttttactttcttcccattgagtatacagattatcattttgtgatatgagattgtcaattattccatctttttcttttgatttttctcgatacccgtacgctgccatcaaagatatcaaaagcactgttattataacaaaatccatactaaacacctcaatactattttatcaaaggagatgactctatgcaaagagcagttatctacgcgcgcttttcctcggacatgcagcgcgaagagtctatt

SEQ ID NO: 18833 - DNA, 260 bp, Unknown
  Description of Unknown: LeftRegion for integrase B5834 sequence
ctgcgtcatatggggtttaaatatacacaccgcaaaagacatacaagatgtatttgacgtaagttacacagacgccgaaatacgtgctgagcgaatgcaaatattgtacgaaagaaatagatttttgacgagcccgttggaaaaacgggtatacgataggtttgaatcctatataaaagcaaacaggagggtttaaggcaatgaatgttgttctgtatatgagatacagtagcgatagacaaacggagcagtctatagag

SEQ ID NO: 18834 - DNA, 260 bp, Unknown
  Description of Unknown: LeftRegion for integrase B5835 sequence
atcaaagacttagatagttataaactatctagcttgtgcgaggagcagaatatacaatgtagcaactatcacactgcacttgctgatgcactagcgtgtggaatactctttattgatattgttaagattgtcaaagaagttaaaagcatagaagatttatagaaattaaaaataatcaaaaataaaaaggtgaattaaaaatgaatgaaaaaattaatgcagtgatttatgctcgattttcgagtcataaccaacaagaa

SEQ ID NO: 18835 - DNA, 260 bp, Unknown
  Description of Unknown: LeftRegion for integrase B5836 sequence
aatatcattttgtttagaacataaaaaccgcccagtgttggcgcactgaacggtcccgatatatacccgaagatatactaaaaacgcaaatatattgtatcatcttcggaaacagcttgcaagtggaacaaatgttctttgctggctgttatttttgtactcttttttgagtaaatgaataagattaagaaggtgatgttatgtctaataaagaaactcttaaatctggtgctctctatatacgtgtgagcacccacggg

SEQ ID NO: 18836 - DNA, 260 bp, Unknown
  Description of Unknown: LeftRegion for integrase B5837 sequence
aaatcaaagacttagatagttataaactatctagcttgtgcgaggagcagaacatacagtgtagtaactatcatactgcacttgctgatgcactagcgtgtggaatactctttgtcgatattgttaagattgtcaaagaagttaaaagcgtagaaaatttataaaaaactaaaaatactcaaaaataaaaaggtgaaataatgaatgaaaaaattaatgcagtgatttatgctagattttctagccataatcaacaagag

SEQ ID NO: 18837 - DNA, 260 bp, Unknown
  Description of Unknown: LeftRegion for integrase B5838 sequence
taaaaaatgagcagtaaaatgcccatttgaatcatttgttgatatagaatctttgagtcaatttataaatacgttcaataaattgtatatcgttgattctatataagtatctaatgatacattcaatcatttcttctttagtcatatttatcacccctacgaaattgtaaaacaaaaaggaagtgtttattgtgtatgctatgtatttaagaaaatcgcgtgctgatgatccgcatgaaagtatagaagaaactttgaga

SEQ ID NO: 18838 - DNA, 260 bp, Unknown
  Description of Unknown: LeftRegion for integrase B5839 sequence
agccttcgaccgaggccttataactatcactccttccatgaaaatctatgtttctccgataattttggatagccctcaggacgcttttacagcccgctggctggcttctcttgacggaatggttttaccccccccccccgatttccgccgcgtagagagcttctggagtaccataacgacgaaatttttaggagggtcacatgaatacagtaatttatactcggtattctgccggcccgagacagaccgaccagagtatc

SEQ ID NO: 18839 - DNA, 260 bp, Unknown
  Description of Unknown: LeftRegion for integrase B5840 sequence
ttggcgttaacaaaatggtggattttaaccccctcgaatttgatggggttaaccgggataataaaaaatcccccaccggttgcagccggaaggggatcaaatagaacagcttacccaaagtggataatgcgtccaaacaatgaaattataccactttctgggtaaacttggcaagtcttactttggaggtggtttttattatgaaagcggcggcttatgcgcgctactcaacggacaagcaaacggaaaatagtatagcg

SEQ ID NO: 18840 - DNA, 260 bp, Unknown
  Description of Unknown: LeftRegion for integrase B5841 sequence
atctgaattaatggacgaacaggactttctaaacgctacaatctctatgacacaggaagaaatggacgatttacacaagactgataaaggcacacaagatgcgttaaaaagaagaatggaagaaaacgaacgttttagaacaatgtaaataaaaaaagagccacctacacaggtggctttgtttgtagagaggattaactatggaattgtcaaaaggagttatatacgctcgttattcatcagataaacaacgtgatgaa

SEQ ID NO: 18841 - DNA, 260 bp, Unknown
  Description of Unknown: LeftRegion for integrase B5842 sequence
tcaaagacttagatagttataaactatctagcttgtgtgaggaacagaacatacagtgtagtaactatcatactgcacttgctgatgcactagcgtgtggaatactctttgtcgatattgttaagattgtcaaagaagttaaaagcgtagaagaattatagacatttaaaaaatactcaaaaataaaaaggtgacgaaaaatgaatgaaaaaattaatgcagtgatttatgctcgattttcgagtcacaatcagcaagaa

SEQ ID NO: 18842 - DNA, 260 bp, Unknown
  Description of Unknown: LeftRegion for integrase B5843 sequence
cttatgttagttttatagataacgcagtatgcatttcgattatgtactcaataaaatagaataaaaaaaatcctgcaaccgtccgccaacggttgcaggatataaacggtaaggtgttaaataatagataattcacacttccttaacctctgttattttaccacctttccgggcaaatgtcaaaagaaaggtgtatttttatgccaaaaaattcaaattatggaaatctctcacattccgacagcacaaagcgagccgca

SEQ ID NO: 18843 - DNA, 260 bp, Unknown
  Description of Unknown: LeftRegion for integrase B5844 sequence
taaaaaatgggcagtaaaatgcccatttgaatcatttgttgatatagaatctttgagtcaatttataaatacgttcaataaattgtatatcgttgattctatataagtatctaatgatacattcaatcatttcttctttagtcatatttatcacccctacgaaattgtaaaacagaaaggaagtgtttattgtgtatgctatgtatttgagaaaatcacgtgctgatgatccacatgaaagtatagaggatactttgagg

SEQ ID NO: 18844 - DNA, 260 bp, Unknown; identical to SEQ ID NO: 17493
  Description of Unknown: LeftRegion for integrase B5845 sequence

SEQ ID NO: 18845 - DNA, 260 bp, Unknown
  Description of Unknown: LeftRegion for integrase B5846 sequence
ccgatgaccggggaactgtaacaatccctattcaggaatctattcaactttctgaggaagaacgtattttgatttccgcatttaggagtgcttctatagaaggacgcatgagaattatccaagtctgcatgaatgaaaaggattcaaaaggggaaaatatcattgcaggataataagcatcgaagaatggaggaagaaccatgtacgaagagattaagactgcttgtctatatctacgatattcaagtagcaaccaaacc

SEQ ID NO: 18846 - DNA, 260 bp, Unknown
  Description of Unknown: LeftRegion for integrase B5847 sequence
atcaaagacttagatagttataaactatctagcttgtgtgaggaacagaacatacagtgtagtaactatcatactgcactttctgatgcactagcgtgtggaatactctttattgacattgttaagcttgtcaaagaagttaaaaatgtagaagaattataaacgttaaaaatactcaaaaataaaaaggtgaattaaaaatgaatgaaaaaattaatgcggtgatttatgctagattttctagccacaatcagcaagaa

SEQ ID NO: 18847 - DNA, 260 bp, Unknown
  Description of Unknown: LeftRegion for integrase B5848 sequence
accgaggccttataactatcactccttccatgaaaatctatgtttctccaataattttggatagccctcaggacgcttttacagcccgctggctggcttctcttgacggaatggttttaccccccccccccccccccccgatttccgccgcgtagagagcttctggagtaccataacgacgaaatttttaggagggtcacatgaatacagtaatttatgctcggtattctgccggcccgagacagaccgaccagagtatc

SEQ ID NO: 18848 - DNA, 260 bp, Unknown
  Description of Unknown: LeftRegion for integrase B5849 sequence
attatctgttctgtttatccgattcaccttacccaaaagtagagatttccctaacggaagaagagcaattactgcttgacgcattccgttccgctaccccacaaggtagattcaacattattactacctgtatgtgtgagaagcgaaaaggggacaacgaaagtgccgggtaattgatttcatagaatggaggaagaaccatgtatgaggatataaaaacagcctgcctatacgttagattctcaagccataaccagact

SEQ ID NO: 18849 - DNA, 260 bp, Unknown
  Description of Unknown: LeftRegion for integrase B5850 sequence
attacaatttcagagcttttaaactaaagaaaaaccgcccctgcgccaacaggaacggctttctatatatcccgaagatataccatataacataagcaactatattgtatcatcttcggaaacagcttgcaatcggaacatattttcgatagctgttatttttatacactttttgaataaaataaagaaggtgatgtaaaatgtctagcaaagaaactcttaaatccggtgctctctatatacgtgtcagcacccacgga

SEQ ID NO: 18850 - DNA, 260 bp, Unknown
  Description of Unknown: LeftRegion for integrase B5851 sequence
aacatatgccttcaagttcgctgttgaaagcggtaagatggcgaaagcaaaggcaaagagcaaataaaaaaaggccctattaagggcctttctttctaactaaaataaaataaccgccgatgtatacgttcggcggttatctgataacacatgtctaatcttctctaatgcaattatatcattaaaaggaacattacacaatgaatagtttaaaagctgtaatatacgcaagatactcatcagataagcaacgagatgaa

SEQ ID NO: 18851 - DNA, 260 bp, Unknown; identical to SEQ ID NO: 18828
  Description of Unknown: LeftRegion for integrase B5852 sequence

SEQ ID NO: 18852 - DNA, 260 bp, Unknown
  Description of Unknown: LeftRegion for integrase B5853 sequence
gactactttgacgtatcgctggactacattttcggcaggacggacgacccgcatggcatgatctataacaactgcgtgaagctcggcctgaacaatcccgaaatggcgcggttcgtggaaatgtgcttcgaccccggctcggccatgaacgaacgattgaaagcaacgcttgtgcagatgctctcggaggtggatacgaaatgaaagccgtgatctatgcccgctattcctcggacagccagcgagaggaatccattgaa

SEQ ID NO: 18853 - DNA, 260 bp, Unknown
  Description of Unknown: LeftRegion for integrase B5854 sequence
ggtcggctgagaacatcagcttgcagacgctgaagaagctgtcggattacttcggtataggcatcgaggagcttgtccacggaaagcaacaacggcgtgagataacattttcaagcggcgcgtacacggacgcagagcttgaccagataaagcagttcgcacactttttgataaggcaacgagaaaggaatgattaatggatggcatacgcaatgtacctgcgcaagtcacgcgcagacgaggaactaggatacgagaac

SEQ ID NO: 18854 - DNA, 260 bp, Unknown
  Description of Unknown: LeftRegion for integrase B5855 sequence
cttggaatgtaaaacatgataataaaaccgcccagtgttggcgcactgaacggtcccgatatatacccgaagatatactaaaaacgcaaatatattgtatcatcttcggaaacagcttgcaagtggaacaggtgttctttgccggctgttatttttgtactcttttttgagtaaatgaataagattaagaaggtgatgttatgtctaataaagaaactcttaaatctggtgctctctatatacgtgtgagcacccacggg

SEQ ID NO: 18855 - DNA, 260 bp, Unknown; identical to SEQ ID NO: 18797
  Description of Unknown: LeftRegion for integrase B5856 sequence

SEQ ID NO: 18856 - DNA, 260 bp, Unknown
  Description of Unknown: LeftRegion for integrase B5857 sequence
ctaaaagcctcccacaagtcaatatgtatgtatttatattatatcatatattttattacatatcaatggatatataaaaaaacgccccaaaagatgctggaacatctctcggagcgcaggagaatgtggtacattcaccattctttcaatgtgaattataccatatcctcctccaaatgtcaaggagtgataacaaatatatgaaaaccgccgtaatatacgcccgatactcttcggacaagcagacggagcagtccatt

SEQ ID NO: 18857 - DNA, 260 bp, Unknown
  Description of Unknown: LeftRegion for integrase B5858 sequence
atcacacaactatgcacagccgcgtcactgtcgcgcgggcaatcttggaaaactatgagatggaagccgcgcaaggcaatcttgtcgcgacagatcacattgcgccggatctagaccgtttgcgtgcagccgtggaaagcggaaaagatgccgcgcaggaaggcaaaatcggatatgtacacgcaggggaggtgtgatacatggatgctatatacgcccgtcagtcaattgagaaaaaagactctctatccatcgagcag

SEQ ID NO: 18858 - DNA, 260 bp, Unknown
  Description of Unknown: LeftRegion for integrase B5859 sequence
ctgcgtaatatggggtttaaatatacacaccgcaaaagacatacaagatgtgtttgatgtaagttacacagccgccaaaatacgtgctgaacgaatgcaaatattgtacgaaagaaatagatttttgacgagcccgttggaaaaacgggtatatgataggtttgaaccatatataaaagcaaacaggagggcataaggcaatgaatgttgttctatatatgagatacagtagcgatagacaaacggagcagtctatagag

SEQ ID NO: 18859 - DNA, 260 bp, Unknown
  Description of Unknown: LeftRegion for integrase B5860 sequence
ctgcgtcatatggggtttaaatatacacaccgcaaaagacatacaagatgtatttgatgtaagttacacatccgccagaatacgcgccgaacgaatgcaaatattgtatgaaagaaatagctttttgacgagcccgttggaaaaacgggtatatgataggtttgaaccatatataaaagcaaacaggaggatataaggcaatgaatgttgttctatatatgagatacagtagcgatagacaaacggagcagtctatagaa

SEQ ID NO: 18860 - DNA, 260 bp, Unknown
  Description of Unknown: LeftRegion for integrase B5861 sequence
gatgcattaaaacaacagatcaatcagatataaatgaaataataatcaaaaagaccgccctttgcgggcggtcaagaccttacactttacccacaaaagaatatggctaaaatataaagataacgcatatttattttaacataagccacttcttttgtataggcttatttttttatactcaactttaaggaggaagacgcatgagtgaaaagttaaaagaagtctgtgcatatatccgtgtctctactgacaaacaggaa

SEQ ID NO: 18861 - DNA, 260 bp, Unknown
  Description of Unknown: LeftRegion for integrase B5862 sequence
tatgccggcaaagttggaaccggaattatatggtttttaaccgctggcttttttgtatttggctggatttacgatatcataaagattgcttccggaacatttactgacggcatgggtttcacaatcagaaaataaaaaaatcccccaccagccgaggctgatgggggaacagttttataaattataaagagggtaagaacatgtcactttatgcgttatatttaagaaaaagccgttccgatgatccagaaaaaagcgta

SEQ ID NO: 18862 - DNA, 260 bp, Unknown
  Description of Unknown: LeftRegion for integrase B5863 sequence
ctgcgtcatatggggcttaaatatacacaccgcaaaagacatacaagatgtatttgatgtaagttacacatccgccagaatacgcgccgaacgaatgcaaatattgtatgaaagaaatagctttttgacgagcccgttggaaaaacgggtatatgataggtttgaaccgtatatacaagcaaacaggaggatataaggcaatgaatgttgttctatatatgagatacagtagcgatagacaaacggagcagtctatagaa

SEQ ID NO: 18863 - DNA, 260 bp, Unknown
  Description of Unknown: LeftRegion for integrase B5864 sequence
tgcaaataatggggtttaaaaggataaaaaaataaaaaaataaaaaaacaccccctgctggaacagggggctgcattaaaaacaagagtacgaaaatgacactgtacgaactcacgccgttttcaatgctacatttattatagcattgaaacccatactccgcaagtgtatttttgtacacagaaggaggatataaggcaatgaatgttgttctatatatgagatacagtagcgatagacaaacggagcagtctatagag

SEQ ID NO: 18864 - DNA, 260 bp, Unknown
  Description of Unknown: LeftRegion for integrase B5865 sequence
ctgcgtaatatggggtttaaatatacacaccgtgaaagacatacaagatgtatttgatgtaagttacacagccgccaaaatacgtgctgaacgaatgcaaatattgtacgaaagaaatagatttttgacgagcccgttggaaaaacgggtatatgataggtttgaaccatatataaaagcaaacaggagggcataaggcaatgaatgttgttctatatatgagatacagtagcgacaggcaaacggagcagtctatagag

SEQ ID NO: 18865 - DNA, 260 bp, Unknown
  Description of Unknown: LeftRegion for integrase B5866 sequence
gtgatggggctgtaccacatggtatggttcgcgccctcacggaagaccttgcatcccgcctttttcagttctttttccagctcgctgtatcgcactgcatcacctgctttctgatattgattatagcacgtattcgcacgtgtgtcaatacatttttacgtatttatacgtatttattttgctaatttgaggtaatcgaaatgaaggacaagtacgcgctgtacctgcgcaaatcccaggctgaccagcccgacgagagc

SEQ ID NO: 18866 - DNA, 260 bp, Unknown; identical to SEQ ID NO: 18861
  Description of Unknown: LeftRegion for integrase B5867 sequence

SEQ ID NO: 18867 - DNA, 260 bp, Unknown
  Description of Unknown: LeftRegion for integrase B5868 sequence
ttaaaacaacaaatcaatcagatataaatgaggtatatttaatataacaaaaagaccgccctttgcgggcggtcaagaccttacactttacccacaaaagaatatggctaaaatataaagataacgcatatttattttaacataagccacttcttttgtataggcttattttttatactcaattttaaggaggaagacgcatgagtgaaaagttaaaagaagtctgtgcatatatccgtgtctctactgacaaacaggaa

SEQ ID NO: 18868 - DNA, 260 bp, Unknown
  Description of Unknown: LeftRegion for integrase B5869 sequence
tactaacatatcatagcacctcccttataatatataatatacctatttacaaatattatgtcaatttttttgtgattttttcacaatttctttaattttaatttatttttatgtgattttatattcaaaaatcttagcattatatggcaactcaagacaaatagtgctataataaaatgctaagaaggagggcacgcattatgagtgaaaagttaaaagaagtctgtgcatatatccgtgtctctactgacaaacaggaa

SEQ ID NO: 18869 - DNA, 260 bp, Unknown
  Description of Unknown: LeftRegion for integrase B5870 sequence
aagtggatatgccgtcttatcttaaatgcatcaaggaaaatattaattattcctgatgaaaacaaaaaagaggttaaatattcccttgaatctatctacgatattgaaaattacagggatcagttaatcgaagtagcgaagagatttttataggatgggaacgaggcttaacttaacataaggcgaatagaggtggatttatggcctacgccgaatatctccgaaaaagccggtacgacaatccggatgaaacgctggaa

SEQ ID NO: 18870 - DNA, 260 bp, Unknown
  Description of Unknown: LeftRegion for integrase B5871 sequence
ctatgccggcaaagttggaaccggaattatatggtttttaaccgctggcttttttgtatttggctggatttacgatattataaagattgcttccggaacatttactgacggcatgggtttcacaatcagaaaataaaaaatcccccaccagccgaggccgatgggggaacagttttataaattataaagagggtaagaacatgtcactttatgcgttatatttaagaaaaagccgttccgatgatccagaaaaaagcgta

SEQ ID NO: 18871 - DNA, 260 bp, Unknown; identical to SEQ ID NO: 17630
  Description of Unknown: LeftRegion for integrase B5872 sequence

SEQ ID NO: 18872 - DNA, 260 bp, Unknown; identical to SEQ ID NO: 15831
  Description of Unknown: LeftRegion for integrase B5873 sequence

SEQ ID NO: 18873 - DNA, 260 bp, Unknown
  Description of Unknown: LeftRegion for integrase B5874 sequence
ctgcgtcatatggggtttaaatatacacaccgcaaaagacatacaagatgtatttgatgtaagttacacagccgccgaaatacgtgctgaacgaatgcaaatattgtacgaaagaaatagatttttgacgagcccgttggaaaaacgggtatacgataggtttgagccatatatacaagcaaacaggagggtataaggcaatgaatgttgttctatatatgagatacagtagcgatagacaaacggagcagtctatagaa

SEQ ID NO: 18874 - DNA, 260 bp, Unknown
  Description of Unknown: LeftRegion for integrase B5875 sequence
ctgcgtcatatggggcttaaatatacacaccgcaaaagacatacaagatgtatttgatgtaagttacacagccgccgaaatacgtgctgaacgaatgcaaatattgtacgaaagaaatagatttttgacgagcccgttggaaaaacgggtatacgataggtttgaaccgtatatacaagcaaacaggagggtataaagcaatgaatgttgttctatatatgagatacagtagcgacaggcaaacggagcagtctatagag

SEQ ID NO: 18875 - DNA, 260 bp, Unknown
  Description of Unknown: LeftRegion for integrase B5876 sequence
cattgcaactaattagtctttcggatcgggaaaggttaaacgaaaacgactttttcgtcaagggtaaagtgcattgcttggcgcaacccttgacgataaaagtcgcaagccacgaaagaaaacaattttaattcgtttccgttttttccgttcccgtcgaaagacaaatctaaaaaataaaattaaaggagtaacaaattttgaaaacagcagttatttacgctcgttattcgagcgatacacaaacggaacagtccata

SEQ ID NO: 18876 - DNA, 260 bp, Unknown
  Description of Unknown: LeftRegion for integrase B5877 sequence
ggcctcaagtgccccaagtgcggctccgaggacgtcgccctcgtcggcgacaccggaaggccgctgtctgccggaaaggcgctggtcggcggcgcggtcgcggggcctgcgggcgcggcggtgggtgcgatgctcggcaagcgcggccacagggagtacgtgtgcctctcgtgcggccacaggtacagggccaagtgacgatggcaaggaggaggcgctgcgcgatatacgcccgcttctccagcgagaggcagcgcgag

SEQ ID NO: 18877 - DNA, 260 bp, Unknown
  Description of Unknown: LeftRegion for integrase B5878 sequence
aaattgatgaaattttaattgatatgcaacaggatggatatgaaattattgatgttaaatttaactctctagcaaatcaaggaatgacaggttctgcagagatgtttcatactctaataatttataaataaaaactttttatttttataatataaatttgctctcttttagagagctttttttaaaaaagaggtgtaataatgaaaaaagcattcgcttatgctcgtttttcaacagatatgcaaagagaagaaagtatt

SEQ ID NO: 18878 - DNA, 260 bp, Unknown; identical to SEQ ID NO: 18868
  Description of Unknown: LeftRegion for integrase B5879 sequence

SEQ ID NO: 18879 - DNA, 260 bp, Unknown
  Description of Unknown: LeftRegion for integrase B5880 sequence
ctgcgtcatatggggcttaaatatacacaccgcaaaagacatacaagatgtatttgacgtaagttacacagccgccgaaatacgtgctgagcgaatgcaaatattgtacgaaagaaatagatttttgacgagcccgttggaaaaacaggtgtatgataggtttgaaccatatatacaagcaaacaggaggatataaggcaatgaatgttgttctatatatgagatacagtagcgatagacaaacggagcagtctatagaa

SEQ ID NO: 18880 - DNA, 260 bp, Unknown
  Description of Unknown: LeftRegion for integrase B5881 sequence
ctgcgtcatatggggtttaaatatacacaccgcaaaagatatacaagatgtatttgatgtaagttacacagccgccaaaatacgtgctgaacgaatgcaaatattgtacgaaagaaatagatttttgatgagcccgttggaaaaacgggtatacgataggtttgaaccgtatatacaagcaaacaggagggtataaagcaatgaatgttgttctatatatgagatacagtagcgatagacaaacggagcagtctatagaa

SEQ ID NO: 18881 - DNA, 260 bp, Unknown
  Description of Unknown: LeftRegion for integrase B5882 sequence
ctgaaataatcatattgttttgtcggattccgacagacatacataacaaaaagaccgccctttgcgggcggtcaagaccttacactttacccacaaaagaatatggctaaaatataaagataacgcatatttattttaacataagccacttcttttgtataggcttatttttttatactcaactttaaggaggaagacgcatgagtgaaaagttaaaagaagtctgtgcatatatccgtgtctctactgacaaacaggaa

SEQ ID NO: 18882 - DNA, 260 bp, Unknown
  Description of Unknown: LeftRegion for integrase B5883 sequence
tatatattgtaaacttttgctatttatattatactatttacaaaaaagaaaaagaccgtccaaaaaggacggtcaagacattacactttacccacaaaaaatatggctaaaatataaagataacgcatatctattttagcataagccttttcttttgtataggcttattttttataccaaattttaaggaggaagaaaccatgtctgaaaaattaaaagaagtctgtgcatacatccgagtctctactgacaaacaggaa

SEQ ID NO: 18883 - DNA, 260 bp, Unknown
  Description of Unknown: LeftRegion for integrase B5884 sequence
aaagcccccgtcaacaagcgtctgaaagaggcgctgttccgtatcatggaggagggggagcagaaatgaaagccgtgatttatgcccgctattccagcgacaaccagcgggaggaaagcatagaaggccagcttcgggagtgtacggcctactgttagaagaacgacattaccatcttacggacatacattgaccgggccatgtccgccaagaccgaccaccgcccggacttccagcggatgattaaagacagcgcaaag

SEQ ID NO: 18884 - DNA, 260 bp, Unknown
  Description of Unknown: LeftRegion for integrase B5885 sequence
ctctaatatcttttaacagaaacattcgcccgtttcattacaacttatctgtatggaatattttcttctcttttgttatgctgaattcgcagacgtctgtgaattttatccctgattttatctcttattatcaaatcagggacaaaataccttcaatggcgttatactgcttacaacaagcaataaaaggagatgcctcaatgaaaaaggcagtaatctatgccagatacagttccgatatgcagcgtgaggagtccatc

SEQ ID NO: 18885 - DNA, 260 bp, Unknown
  Description of Unknown: LeftRegion for integrase B5886 sequence
aaatagcaatttaatgaactaattcatataaatgaaatctaatcaaaaaaatgaccgcccataaaggacggtcaaaatcttacgctttacccacaaaagaatatggctaaaagctaaagataacgcatatctattttagcataagccttttcttttgtataggcttattttttataccaaattttaaggaggaagaaacaatgtctgaaaaattaaaagaagtctgtgcatacatccgagtctctactgacaagcaagag

SEQ ID NO: 18886 - DNA, 260 bp, Unknown
  Description of Unknown: LeftRegion for integrase B5887 sequence
ctgcgtcatatggggtttaaatatacacaccgcaaaagacatacaagatgtatttgatgtaagttacacatccgccagaatacgcgccgaacgaatgcaaatattgtacgaaagaaatagatttttgacgagcccgttggaaaaacgggtatacgataggtttgaaccgtatatacaagcaaacaggagggtataaagcaatgaatgttgttctatatatgagatacagtagcgatagacaaacggagcagtctatagaa

SEQ ID NO: 18887 - DNA, 260 bp, Unknown
  Description of Unknown: LeftRegion for integrase B5888 sequence
actatgcctataactgcggcttcaacgatggttacaaggacggccatacccacggcgagaaaactgggcacagctccggttactcccagggttacatggaggcaaaacgcgagtatggcccgcgtgaggagccacccaatgtgcgctatgtcggcggcgcccagggcaattaaatcgttttcgccataagaggtaggagtatgaaagacaagtatgcgcagtacctgcgtaaatcccaggctgaccagcccgacgagagc

SEQ ID NO: 18888 - DNA, 260 bp, Unknown
  Description of Unknown: LeftRegion for integrase B5889 sequence
ttaaaacaacaaatcaatcagatataaatgcggtatatttaatataacaaaaagaccgccctttgcgggcggtcaataccttacactttacccacaaaagaatatggctaaaatataaagataacgcatatttattttaacataagccacttcttttgtataggcttattttttatactcaattttaaggaggaagacgcatgagcgaaaaattaaaagaagtctgtgcatatatccgagtctctactgacaaacaggaa

SEQ ID NO: 18889 - DNA, 260 bp, Unknown
  Description of Unknown: LeftRegion for integrase B5890 sequence
tattcgctgcaatacatcaacggtggcgaggaaaacccagaggttgaagtcgtttacctgatcgctgaatgtaaataaaaaatccgcccaggctgctacctgtgcggatcaaacgcaaggaaaatgcaaacaccactaagcactttccacagtcagtatatcacaagctgcctgcgttgtaaagtcggaaaggattaagattgaacgctgtaatctatgcccgtttctcgtcgcacagccagcgggagcagtccatcgaa

SEQ ID NO: 18890 - DNA, 260 bp, Unknown
  Description of Unknown: LeftRegion for integrase B5891 sequence
aacactgaaataatatattgtttgtcggaatccgacagacatatacaacaaaaagaccgtccacaaaggacggtcaagacattacactttacccacaaaaaatatggctaaaatataaagataacgcatatttattttaacataagccatcttttttgtataggcttattttttatacataaatttaaggaggaagatacatgagtgaaaatttaaaagaagtatgtgcatatatccgagtttctactgacaagcaagaa

SEQ ID NO: 18891 - DNA, 260 bp, Unknown
  Description of Unknown: LeftRegion for integrase B5892 sequence
tcgggaaatgacgtatcagatggtgatgcgtgcttcatggaaaatgctgcagagcggacttttgtcagaggacgagtatcttgcgtttgaagcgaaaatgcgcgagaaatatcgtcccgtcatcggacttttattttcagatattgacttgctatcgtgcggatagtacgggaatatgggactggaaaggagggagcaccatgaagatacgaagagtccaaccaagccctatattgcagaaaaagctacgtgtggcggca

SEQ ID NO: 18892 - DNA, 260 bp, Unknown
  Description of Unknown: LeftRegion for integrase B5893 sequence
tttgacagcaaaccgaatctcacgattggtcagcgcgtgacgatatccgggcagttaagtaccggaacaatcagcgacaacagcgtgtttctgaggaactgcaaggtcaagtagcaaaacgtcaccaggcgatgcaaacgggcatcgcctgggaatgtgcttgcgggccagcttggaacgggcacgaggtgaggtgaagaatggcaaggaggaggcgctgcgcgatatacgcccgcttctcaagcgagaggcagcgcgag

SEQ ID NO: 18893 - DNA, 260 bp, Unknown
  Description of Unknown: LeftRegion for integrase B5894 sequence
ctgcgtcatatggggtttaaatatacacaccgcaaaagatatacaagatgtatttgatgtaagttacacagccgccaaaatacgtgctgaacgaatgcaaatattgtacgaaagaaatagatttttgacgagcccgttggaaaaacgggtatacgataggtttgaaccgtatatacaagcaaacaggagggtataaagcaatgaatgttgttctatatatgagatacagtagcgatagacaaacggagcagtctatagaa

SEQ ID NO: 18894 - DNA, 260 bp, Unknown
  Description of Unknown: LeftRegion for integrase B5895 sequence
atttcattttaatacctcttttattattattataaggttcgtttcctttaccttacatatattattatacgcctttacccgtagtttgtcaagcgtttttcaaaaattttttcaattttttcaaaaaaactcttggaatttatttaaaaatcaatataattttaattacatcaatttgataataaaagaggtaattaaaaatggaaaatgcggttatttacgcgcgatttagttcgcataatcagcaagaacaaagtatt

SEQ ID NO: 18895 - DNA, 260 bp, Unknown; identical to SEQ ID NO: 17630
  Description of Unknown: LeftRegion for integrase B5896 sequence

SEQ ID NO: 18896 - DNA, 260 bp, Unknown
  Description of Unknown: LeftRegion for integrase B5897 sequence
ctgcgtcatatggggtttaaatatacacaccgcaaaagatatacaagatgtatttgatgtaagttacacagccgccaaaatacgtgctgaacgaatgcaaatattgtacgaaagaaatagatttttcacgagcccgttggaaaaacgggtatatgatatgtttgaaccatatatacaagcaaacaggagggtataaggcaatgaatgttgttctatatatgagatacagtagtgacaggcaaacggagcagtctatagag

SEQ ID NO: 18897 - DNA, 260 bp, Unknown
  Description of Unknown: LeftRegion for integrase B5898 sequence
gatgcattaaaacaacagatcaatcagatataaatgaaataataatcaaaaagaccgccctttgcgggcggtcaagaccttacactttacccacaaaagaatatggctaaaatataaagataacgcatatttattttaacataagccatcttttttgtataggcttattttttatactcaattttaaggaggaagaaactatgtctgaaaagttaaaagaagtctgtgcatatatccgtgtctctactgacaagcaagag

SEQ ID NO: 18898 - DNA, 260 bp, Unknown; identical to SEQ ID NO: 18858
  Description of Unknown: LeftRegion for integrase B5899 sequence

SEQ ID NO: 18899 - DNA, 260 bp, Unknown
  Description of Unknown: LeftRegion for integrase B5900 sequence
aatattaaaaataatagttttgtcggattccgacagacatacataacaaaaagaccgccctttgcgggcggtcaagaccttacactttacccacaaaagaatatggctaaaatataaagataacgcatatttattttaacataagccacttcttttgtataggcttatttttttatactcaactttaaggaggaaggcgcatgagtgaaaagttaaaagaagtctgtgcatatatccgtgtatctactgacaaacaggaa

SEQ ID NO: 18900 - DNA, 260 bp, Unknown
  Description of Unknown: LeftRegion for integrase B5901 sequence
atttgtggatataccaagtgctgaacagtatagagtttctttgaagatgaagcaaaataacacggtttgatagcagtagaataaaaaatccccgcccggcgctggaacaccgaacggggaagaagctgtgatacaatcacaaccttagacaagtttattgtatcatagctccctgaaaatgtcaaggagtgataaaaaatatgcaaaccgccgtgatatacgcccggtattcgtccgacaagcaaacggagcagtccatc

SEQ ID NO: 18901 - DNA, 260 bp, Unknown
  Description of Unknown: LeftRegion for integrase B5902 sequence
ctgcgtcatatggggcttaaatttacacaccgcaaaagatatacaagatgtatttgatgtaagttacacagccgccgaaatacgtgctgaacgaatgcaaatattgtacgaaagaaatagatttttgacgagcccgttggaaaaacgggtatatgataggtttgaaccatatataaaagcaaataggagggtataaggcaatgaatgttgttctatatatgagatacagtagcgatagacaaacggagcagtctatagaa

SEQ ID NO: 18902 - DNA, 260 bp, Unknown
  Description of Unknown: LeftRegion for integrase B5903 sequence
gtcggctccaggtcgccgccgaggatcttcataaaggtggattttccgctaccgttggcaccaatcaggccgtaacggttgccgccgccaaatttgacggaaatgttttcgaacagcggcttactgccaaactgcatagtgatattgttgcaaagaagcaaaattgatattctctcgtaagtgattgaaaggaatagattatgcaaaaacaaaacgggttagcattcagttacataagattctcaagcaagaagcaagaa

SEQ ID NO: 18903 - DNA, 260 bp, Unknown
  Description of Unknown: LeftRegion for integrase B5904 sequence
gaacatagtggaaaatctatagattattggatggatggtattgatgaatttgaagctcctaactctgtagaccttgtattagataaaatgattgaagaaggattaattactgatacaaacttaaatagtgaagtttgggaaataataaagaaagcagtacaactagaaattgaaagaaaattaaagtaggaaggtttaaaatgaaggttgctatttatttaagaaaatcaagagctgatgaagaattagaaagaacagta

SEQ ID NO: 18904 - DNA, 260 bp, Unknown
  Description of Unknown: LeftRegion for integrase B5905 sequence
tcgtaaaatacctaaccgaaatgatgatccaataagagaacagttactcaacgaaatgatatcttttttgaattcacttaccacagaaaaattaagctcgctaatctggatttttagaggtatggaattttctttacaaacagatccaaacaaacaagaagaattgatacagaaaatggtaaataacagatattgagagcatgaaacagagcaaagcgaaaatttcggtagacattcgttttgctcttctttgtattata

SEQ ID NO: 18905 - DNA, 260 bp, Unknown
  Description of Unknown: LeftRegion for integrase B5906 sequence
gcggagaaaggtgataaatactacctgctctcaatcaaccaaagcggaaaagactacgaattcaggaaagatgaatataatcccgtccgcgcagtctataccgtgattcagtctatgcgggatgaaaaggctcttgatcgagcaatggctgaagcgggaatccatcatttctgggaaacaaaacttaaggaacttgactgatgaaatacttgatatatgctcgaatttcggaacgcggctcgtcttttgaccataaagcg

SEQ ID NO: 18906 - DNA, 260 bp, Unknown
  Description of Unknown: LeftRegion for integrase B5907 sequence
agtaagcaagaataacttcctgattctcaggggtaagctcgcggaactttgcaaggatctctcgatcaagtcggtcaaacattgtgacctctctttccctcagaagctcccgatgattgtattcggcgccgcgcatcagtatataccattctgtcccgccccgccacaggtaaaaattcccagcaaaggagtgacctcttatgaccccgccgaaaggcttttcttcttccacccacgcgccgctgcctgatcttcgtatt

SEQ ID NO: 18907 - DNA, 260 bp, Unknown
  Description of Unknown: LeftRegion for integrase B5908 sequence
agggacgaaatcatgagcaaaaataaagcatcttttctttcataaaataagcggttttgtctggactttatttggtttacgcgctattgtttgtgctaccctgacctgaaatacggggtagcacaaaattttttaatctaaatgaaatcctacacaggtcggggagaaagtaaacaaaaagtctaacgaggaggtaaagcgtggatagaaagataagagcggctgcatacggtcgagtgtctactaacagtaaagagcaa

SEQ ID NO: 18908 - DNA, 260 bp, Unknown
  Description of Unknown: LeftRegion for integrase B5909 sequence
gtaaagcaacttatgaaaatagcaaaagtattagatgtaccacctaaaaagttagctggatggtgtgacgaaccaactcaaaaagaagaaatggttaataagtggattgataaagtcggcgagctgaatttcaatgaaaaagaattggatgaattgataagctacgcacagtttattgtttctaagcgaggtgataaataatgtctgaatatttaatgtacttgagaaagtccagacaagatgatccaaatgaaaatgta

SEQ ID NO: 18909 - DNA, 260 bp, Unknown
  Description of Unknown: LeftRegion for integrase B5910 sequence
gatagccagtaaataaaaaagcgctgaccctctggaaagggtcagcgctggggccagtgctacaacacaaaaaagtgaggtggccgcttcctgctggaacagggggctgcgccacaaagcacaggcagttggcatggaaccgactgcctttattgtagcacgtcgccctgaatttgaaaaggggtgattttatacgcgatatggattccgcccgcctgcgggtggcgtgctatgtccgcgtcagcacgagagagcaggcc

SEQ ID NO: 18910 - DNA, 260 bp, Unknown
  Description of Unknown: LeftRegion for integrase B5911 sequence
caagccatttggctcttttagcccaatgagcaagagcattcgaaaaatgatccgtatgggataccgggtcaagatcaggtgcaaaaacgttggatggtacgcgcaggggatacctgagattgttgccatgattccagatccagaagctgtgttctcttggcttgacgagtgcgagagaagtggcgaggaggttccgttcaatgccaacagctaaaactgcggtgatatacgcccgcttttcgtgcaataagcagcgcgag

SEQ ID NO: 18911 - DNA, 260 bp, Unknown
  Description of Unknown: LeftRegion for integrase B5912 sequence
agtaagcaagaatagcttcctgattctcaggggtaagctcgcggaactttgcaaggatctctcgatcgagtcggtcaggcattgtgacctctctttccctcagaagctcccgatgattgtattcggcgccgcgcatcagtatataccattccgtcccgccccgccaccggtaaaaattcccagcaaaggagtgacctcttatgaccccgccgaaaggcttttcttcttccgcccacgcgccgctgcctgatcttcgtatt

SEQ ID NO: 18912 - DNA, 260 bp, Unknown
  Description of Unknown: LeftRegion for integrase B5913 sequence
aatctcgccagttctgggtatgtgatattcttttcaagcataatctcccccagcagtattttcatgtggtgtacctcgtactccctattttattctgtttttcaataaattaaaacaagaaatgttttccagtttgcctatcttgattttttaataatatcagcgtatttttatactatactttaagaaggaggcacgttatggcaaatatccaaccagtaaaaaatggagctttatatatccgcgtatccacgcacttg

SEQ ID NO: 18913 - DNA, 260 bp, Unknown
  Description of Unknown: LeftRegion for integrase B5914 sequence
taagcaagaatagcttcctgattctcaggggtaagctcgcggaactttgcaagaatctctcgatcaagtcggtcaaacattgtgacctctctttccctcagaagctcccgatgattgtattcggcgccgcgcatcagtatataccattctgtcccgccccgccaccggtaaaaatcccccccgcaaaggagtgacctcttatgaccccaccaaaaggcttttcttcttccgcccacgcgccgctgcctgatcttcgtatt

SEQ ID NO: 18914 - DNA, 260 bp, Unknown
  Description of Unknown: LeftRegion for integrase B5915 sequence
caagaatagcttcctgattctcagggttcagtctacggaacttttcaaggatctcttgatcgagtcggtttggcatggtttgcctctctttcctctcagaatcttccgatgataatattttggcgccgcgcatcagtatataccattctgtcccgccccgccaccggtaaaaatccccccccgcaaaggagtgacctcttatgaccccgccgaaaggctttacttcttccgtccccgcgccgctgcctgatcttcgcatc

SEQ ID NO: 18915 - DNA, 260 bp, Unknown
  Description of Unknown: LeftRegion for integrase B5916 sequence
taagcaagaatagcttcctgattctcaggggtaagctcgcggaactttgcaagaatctctcgatcaagtcggtcaaacattgtgacctctctttccctcagaagctcccgatgattgtattcggcgccgcgcatcagtatataccattctgtcccgccccgccaccggtaaaaatcccccccgcaaaggagtgacctcttatgaccccgccgaaaggctttacttcttctgtccccgcgccgctgcctgatcttcgtatt

SEQ ID NO: 18916 - DNA, 260 bp, Unknown; identical to SEQ ID NO: 18085
  Description of Unknown: LeftRegion for integrase B5917 sequence

SEQ ID NO: 18917 - DNA, 260 bp, Unknown
  Description of Unknown: LeftRegion for integrase B5918 sequence
taagcaagaatagtttcctgattctcaggggtaagctcgcggaactttgcaaggatctctcgatcaagtcggtcaaacattgtgacctctctttccctcagaagctcccgatgataaaatttcggcgccgcgcatcagtatataccattctgtcccgccccgccactggtaaaaaattcccagcaaaggagtgaccttttatgaccccgccgaaaggctttacttcttccgtccccgcgccgctgcctgatcttcgtatt

SEQ ID NO: 18918 - DNA, 260 bp, Unknown
  Description of Unknown: LeftRegion for integrase B5919 sequence
aggaaattgccgcactttgcaacgtgtccatgcaggcggcagaaatccgctccaggcgaatgcaaatcttgcttgcaagaaataaatttttgacgcatccgctggaacgacaggtgtttgaacagtttcaacagtttatcaacaatcagtaaaaaaccgccctgcaaggaattgtggggcggtacaattaaggagcgattatgaaaagagcagtgttttatggtcgttattccagcgaccgacagaccgagcagagcatt

SEQ ID NO: 18919 - DNA, 260 bp, Unknown
  Description of Unknown: LeftRegion for integrase B5920 sequence
attgacaaggaatcctttgaggcagttgaaggtgaacttagcaagcgttccacaaaacttggacgcaatgaccgctacaatgcaccaaaagcaaaaaggccacctacagcctttcgccttggtgacattacagagaataatgacaatccaatcagacaggccgagtacttatacagtctgatagaaagcgaggttatttgatgggaaatgttatggtcatccctgcaaaaaggcaagttggaaatactgccagacagcag

SEQ ID NO: 18920 - DNA, 260 bp, Unknown
  Description of Unknown: LeftRegion for integrase B5921 sequence
tgatagagatgttgcgtcagttgaatcctgacgggcaacgctacattttgcagcaagcggaatttgctaattctcgggaagaataccgtctatcccccgcccctaccgcaaagtcgggcgcgtgattcacgtcgacttccgcggaaaagattaaagtcccgccaccggtaaaaattcccctcgcaaaggagtgacctcttatgaccccgccgaaaggcttttcttcttccgcccacgcgccgctgcctgatcttcgcatc

SEQ ID NO: 18921 - DNA, 260 bp, Unknown
  Description of Unknown: LeftRegion for integrase B5922 sequence
ttcaacagtttatcaacaatcagtgaatttatcaacaatcagtgaaaaagcaatcattctcgtgaggtcacgaaaatgaaaaaagccgccccacggcggcaaccgtgaagcggcaagagggaactattgctataatagtccaaaccagaacggtactattatagcacattctctcaaaaaatgcaaggaggaagtgcaaaatgcaagcagcagcatatgcaagatacagcacagagcatcagacagagagcagtattgct

SEQ ID NO: 18922 - DNA, 260 bp, Unknown
  Description of Unknown: LeftRegion for integrase B5923 sequence
ccattatcgagtcataatggtcagccagtaaccattatcaagttattgcaaaacttgcaacaacttgcaaccaacttgcaaccacttgcaactaaaaaaagccccatccggagatggagcttcatttgtaaaaagccgtgaaaatgcaaacaagccttttcttcattggtacttttggcactttttaacaaggagaaatcatggagaataagagagcagtcatctatgcacgttattcatccgacaggcagagagaagaa

SEQ ID NO: 18923 - DNA, 260 bp, Unknown
  Description of Unknown: LeftRegion for integrase B5924 sequence
gaagaaccgatataactcaccctcgacaagtgaaattataccattctcccggtaaaaatacaagttaccgggcatttttatgcctaatttagggggatgatatgatgacaaaaaacctatctgtgtctcactatcatttcttttctattttttttaatacccaaatgttttcgtaatatattataagaaggaggcacgtcatgtcagatattcaaccagtaaaaaatggagctttatatatccgagtatctacgcactta

SEQ ID NO: 18924 - DNA, 260 bp, Unknown
  Description of Unknown: LeftRegion for integrase B5925 sequence
tacctgatagagatatttcgtagtatgaataatgaggggcgccgaaagctcatcggctatcttgatgatttggtaaggaatgaagataatcttctgtcttcctctgccataaaagtcgggcgcgtgattcacgtcgactttcgcggaaaagattaaagtcccgccactggtgaaaattcccagcaaaggagtgacctcttatgaccccgccgaaaggctttacttcttccgtccccgcgccgctgcctgatcttcgtatt

SEQ ID NO: 18925 - DNA, 260 bp, Unknown; identical to SEQ ID NO: 16544
  Description of Unknown: LeftRegion for integrase B5926 sequence

SEQ ID NO: 18926 - DNA, 260 bp, Unknown
  Description of Unknown: LeftRegion for integrase B5927 sequence
tacgagcagtattcattaaaagcctcacatttgtggggctttttttgtaaaaacataaaaaatcccccctgcgccaacaggagggaaatggatataccattgctgatataaccacaaaagcaatcatattatatcagctctggtagtaaattgcaaataccagggtatttttatacccttttttaagaaagggtgattctatgaaccaaaatgaatctttgaaaacagcgttcggatacatacgagtttctacacacatg

SEQ ID NO: 18927 - DNA, 260 bp, Unknown
  Description of Unknown: LeftRegion for integrase B5928 sequence
atccctgaacatcctgccagagcgctgtgcgctagtggaaagtgagccggagcgcactcaagggctgcggcagatgctggtggacaactactcggtgttctacattgtgggcgaggataccgtgtcggtggctcgtgtgctgtacagtgcatccgaccttgtgcgccgcctgcggagaatgaagtgaaaggggtgtttgcatgaccgccgtgatttacgcccgctattccagcgataaccagcgtgaggaatccatcgaa

SEQ ID NO: 18928 - DNA, 260 bp, Unknown
  Description of Unknown: LeftRegion for integrase B5929 sequence
tcattcttgaagcaactacgcaagcggaacaccagttccatgctagctgctatttttatactcatttttaagagaatgaaatgatatgatgacaagaagaaacatccaaccaaaaacctatctgtgtctcactatcatttcttttctatttttttaatacccaaatgttttcgtaatatattataagaaggaggcacgtcatgtcagatattcaaccagtaaaaaatggagctttatatatccgagtatctacgcactta

SEQ ID NO: 18929 - DNA, 260 bp, Unknown
  Description of Unknown: LeftRegion for integrase B5930 sequence
caggtatttgaacagtttcaacagtttatcaacaatcagtgaaaaagcaatcattctcgtgaggtcacgaaaatgaaaaaaaaagccgccccacggcggcaaccgtgaagcggcaagagggaactattgctataatagtccaaaccagaacggtactattatagcacattctctcaaaaaatgcaaggaggaagtgcaaaatgcaagcagcagcatatgcaagatacagcacagagcatcagacagagagcagtattgct

SEQ ID NO: 18930 - DNA, 260 bp, Unknown
  Description of Unknown: LeftRegion for integrase B5931 sequence
cacttcactttttatgcaatatgccgaaaagaaatacggtaagtctgtggtcaaaacgcacgttactttcgatgagaggacaaatacagttgtttttgatgcaagtcctatagcccagacgcttaaacaagattatctttccggaaaacgataaagaatgctgccaaattgaaaacgcattccatacatggaggttcacattgaacgctgttatctatgcccggtacagcacgcgaaaccaaaaagaattgtccattgag

SEQ ID NO: 18931 - DNA, 260 bp, Unknown
  Description of Unknown: LeftRegion for integrase B5932 sequence
gtaaagcaacttatgaaaatagcaaaagcattagatgtaccacctaaaaagttagctggatggtgtgacgagccaactcaaaaagaagaaatggttaataagtggattgataaagtcggcgagctgaatttcaatgaaaaagaattggatgaattgataagctacgcacagtttattgtttctaagcgaggtgataaataatgtctgaatatttaatgtacttgagaaagtccagacaagatgatccaaatgaaaatgta

SEQ ID NO: 18932 - DNA, 260 bp, Unknown
  Description of Unknown: LeftRegion for integrase B5933 sequence
aaacaagaatagcttcctgattctcagggttcagtctacggaacttttcaaggatctcttgatcgagtcggtcgggcatggtttgcctctctttcctctcagaaacttccgatgataaaatttcggcgccgcgcatcagtatataccattccgtcccgccccgccactggtaaaaattcccagcaaaggagtgaccttttatgaccccgccgaaaggctttacttctcccgtccccgcgccgctgcctgatcttcgcatc

SEQ ID NO: 18933 - DNA, 260 bp, Unknown
  Description of Unknown: LeftRegion for integrase B5934 sequence
ataaagccttcgaccgaggccttataactatcactccttccatgaaaatctatgtttctccgataattttggatagccctcaggacgcttttacagcccgctggctggcttctcttgacggaatggttttaccccccccgatttccgccgcgtagagagcttctggagtaccataacgacgaaatttttaggagggtcacatgaatacagtaatttatgctcggtattctgccggcccgagacagaccgaccagagtatc

SEQ ID NO: 18934 - DNA, 260 bp, Unknown
  Description of Unknown: LeftRegion for integrase B5935 sequence
ttcttgctctctatcgcggtgtgaatcctgacgggcaacgctacattttgcagcaagcggaatttgctaattctcgggaagaataccgtctatcccccgcccctaccgcaaagtcgggcgcgtgattcacgttgacttccgcggaaaagattaaagccccgccactggtaaaaaatcccccagcaaaggagtgacctcttatgaccccgccgaaaggctttacttcttccgtccacgcgccgctgcctgatcttcgcatc

SEQ ID NO: 18935 - DNA, 260 bp, Unknown
  Description of Unknown: LeftRegion for integrase B5936 sequence
ttgctctctatcgcggtgtgaatcctgacgggcagcgctacattttgcagcaagcggaatttgccaattctcgggaagaataccgtctatctcccgcccctaccgcaaagtcgggcgcgtgattcacgttgattttcaaagaaaatattaaagccccgccgttctatctgtaatgtttcccagcaaaggagtgaccttttatgaccccgccgaaaggctttacttctcccgtccccgcgcccctgcctaatcttcgcatt

SEQ ID NO: 18936 - DNA, 260 bp, Unknown
  Description of Unknown: LeftRegion for integrase B5937 sequence
gttcacgccggaacaggaagtggccaaacgccgggaactggagcagcagctttatgaggtgttccgcaaatatgccgataagcggcagaaagaggaagccggggcataaatcccgaagccatcgttgatttgcggggctgctggcggtataatagaactgtcagcagctccgtttcttttttaagaaaaggagcgacaatatgaacaatcgaatagacgcaatctatgcaagacaatcggtggacaaaaaggacagcatt

SEQ ID NO: 18937 - DNA, 260 bp, Unknown
  Description of Unknown: LeftRegion for integrase B5938 sequence
ggagttgttttgagtgtctccctctttacgagggagtggattgaaatgtgccagacggatgcaaatcttgcttgcaagaaataaatttttaacgcatccgctggaacgacaggtgtttgaacagtttcaacagtttatcaacaatcagtaaaaaagccgccctgcaaggaattgtggggcggtcatattaaggagcgattatgaaaagagcagtgttttatggtcgttattccagcgaccgacaaacagaacagagcatt

SEQ ID NO: 18938 - DNA, 260 bp, Unknown
  Description of Unknown: LeftRegion for integrase B5939 sequence
agcaagaatagcttcctgattctcaggggtaagctcgcggaactttgcaaggatctcttgatcgagtcggtctggcatggtttgcctctctttcctctcagaagctcccgatgataaaatttcggcgccgcgcatcagtatataccattctgtcccgccccgccaccggtaaaaaaatcccagcaaaggagtgacctcttatgaccccgccgaaaggctttacttcttccgtccacgcgccccttcctgttatccgcatc

SEQ ID NO: 18939 - DNA, 260 bp, Unknown; identical to SEQ ID NO: 18926
  Description of Unknown: LeftRegion for integrase B5940 sequence

SEQ ID NO: 18940 - DNA, 260 bp, Unknown
  Description of Unknown: LeftRegion for integrase B5941 sequence
gtaagcaagaatagcttcctgattctcaggggtaagctcgcggtactttgcaaggatctctcaatcaagtcggtcaggcattgtgacctctctttccctcagaagctcccgatgataaaatttcggcgccgcgcattagtatataccattctgtcccgccccgccacatgtaaaaattcccagcaaaggagtgacctcttatgaccccgccgaaaggcttttcttcttccgcccacgcgccgctgcctgatcttcgtatt

SEQ ID NO: 18941 - DNA, 260 bp, Unknown
  Description of Unknown: LeftRegion for integrase B5942 sequence
gtttagattatcttgaaggatttacaactgagaaaaatggactatctgataaaagagaaagtttagtaactaactttttacaattcttaattaaaagtggaattatcgaaaatgaaaatgaaattgacgaaaaaactgaggaaatgattttagaaatggttaaaaaggagatatcaaacttaaaacgaggtgaatagaaagtgaagatagcgatatacacaagaaaatctgttgcagttgaacgaagtgaaagcatacaa

SEQ ID NO: 18942 - DNA, 260 bp, Unknown
  Description of Unknown: LeftRegion for integrase B5943 sequence
tgcgcattgattggtcttgcaatcgctgttttaggtactgcaatcgttggtgttccaattgcgatatttggcgctttgcttgccgtaggttcaatgggaaggaaatagaaaaccctgcgcggcttcttggcggtcggcgcgcagggcaagtgcaaagaacgaagcgcataagcgcactcgctctaaggggtgattttagcatggtgaagaacagagcagccatatacgcgcgcttcagctcgcacaatcagcgctctgag

SEQ ID NO: 18943 - DNA, 260 bp, Unknown
  Description of Unknown: LeftRegion for integrase B5944 sequence
gtaccgcttttgtctgtatctatcgtcttttgatagatatattctcacccttattataaagtcactttctatgggatatttcctgctgatttgctatgcttaaattcacagacgtctgttattttttatcaaatcgaggacaaaacagacttccctgcgatatactactcacagcatccggcaggaaaggagaaggttccgtgaaaaaggcagtaatctatgctcgatacagttccgatatgcagcgtgaagaatccatt

SEQ ID NO: 18944 - DNA, 260 bp, Unknown
  Description of Unknown: LeftRegion for integrase B5945 sequence
acttactgggtcttagtgaagtcagaaaaccagaagtcttagttttgtcagaaaaagaaaaaatcctcattgacgcataccgtactgctaatgacatgggacaattaaacataatctatgtctgcatggatgaaatgaaaaaagcaaaaggggaaggcgtacttgtagggtaattgatttcatagaatggaggaagaaccatgtatgaggatataaaaacagcctgcctatacgttagattctcaagccataaccagact

SEQ ID NO: 18945 - DNA, 260 bp, Unknown; identical to SEQ ID NO: 18937
  Description of Unknown: LeftRegion for integrase B5946 sequence

SEQ ID NO: 18946 - DNA, 260 bp, Unknown
  Description of Unknown: LeftRegion for integrase B5947 sequence
cgggaaaaacctgattataacgtccattgtgtcgtttgtgctgtacgtgattgtcgtgtctgtaatctccaaccataaagcaaaaaaggcagaagaggaactgtcaagcttgtatgatagttatagctacagctataacattgatgattaaaaaagccgccttgcatttttttgcagggcggtacaattaaggagcgattatgaaaagagcagtgttttatggtcgttattccagcgacagacagaccgaacagagcatt

SEQ ID NO: 18947 - DNA, 260 bp, Unknown
  Description of Unknown: LeftRegion for integrase B5948 sequence
tctgatagagatgttgcgtcagttgaatcctgacgggcaacgctacattttgcagcaagcggaatttgctaattctcgggaagaataccgtctatctcccgcccctaccgcaaagtcgggcgcgtgattcacgtcgacttccgcggaaaagattaaagtcccgccactggtaaaaattcccagcaaaggagtgacctcttatgaccccgccgaaaggcttttcttcttccgcccacgcgccgctgcctgatcttcgtatt

SEQ ID NO: 18948 - DNA, 260 bp, Unknown
  Description of Unknown: LeftRegion for integrase B5949 sequence
taaacaagaatagcttcctgattctcagggttcagtctacggaacttttcaaggatctcttgatcaagtcggtttggcatggtttgcctctctttcctctcagaagctcccgatgattatattcggcgccgcagaacagtatataccattctgtcccgccgttccaccggcaaaaattcccagcaaaggagtgaccctttatgaccccgccgaaaggctttacttctcccgtccccgcgccgctgcctgatcttcgcatc

SEQ ID NO: 18949 - DNA, 260 bp, Unknown
  Description of Unknown: LeftRegion for integrase B5950 sequence
cagaaaaactttatgaaatgatgttaaaaatctttgactaataatgcattttaataaaaaaatcccccctgcgccaacaggagggaaatggatataccattgctgatataaccacgaaagcaatcatattatatcagctctggtagtaaattgcaaataccagggtatttttatacccttttttaagaaagggtgattctatgaaccaaaatgaatctttgaaaacagcgttcggatacatacgagtttctactcacatg

SEQ ID NO: 18950 - DNA, 260 bp, Unknown
  Description of Unknown: LeftRegion for integrase B5951 sequence
tgaagctcgacgaactcccgcagggaataattcttgatcaaattgaaagtttggcaaacaatccgaagaattgcaaagaaaagtatcgttcttccgcccctaccgcaaagtcgggcgcgtgattcacgttgattttcaaagaaaatattaaagtcccgccgttctatctgtaatgtttccccgcaaaggagtgacctcttatgaccccgccgaagggctttacttctcccgcccccgcgccgctgcctgatcttcgtatc

SEQ ID NO: 18951 - DNA, 260 bp, Unknown
  Description of Unknown: LeftRegion for integrase B5952 sequence
cagaaaaactttatgaaatgatgttaaaaatctttgactaataatgcattttaataaaaaaatcccccctgcgccaacaggagggaaatgaatataccattgctgatatatccacgaaagcaatcatattatatcagctctggtagtaaattgcaaataccagggtatttttatacccttttttaagaaagggtgattctatgaaccaaaatgaatctttgaaaacagcgttcggatacatacgagtttctacacacatg

SEQ ID NO: 18952 - DNA, 260 bp, Unknown
  Description of Unknown: LeftRegion for integrase B5953 sequence
agaagcatcgtcctgacaagaattttgagaaaataagtaggggagttgttttgagtgtctccctctttacgagggagtggattgaaatttaacgcatccgctggaacggcaggtatttgaacagtttcaacagtttatcaacaatcagtaaaaaaaccgccctgcaaggaattgtggggcggtacaattaaggagcgattatgaaaagagcagtgttttatggtcgttattccagcgacagacagaccgaacagagcatt

SEQ ID NO: 18953 - DNA, 260 bp, Unknown
  Description of Unknown: LeftRegion for integrase B5954 sequence
ttggtggtaaaacaaaaaagcgccgaccctctggaaagggtcagcgctggggccagtgctacaacacaaaaaaagtgaggtggccgcttcctgctggaacagggggctgcgccacaaagcacaggcagttggcatggaaccgactgcctttattgtagcacgtcgccctgaatttgaaaaggggtgattttattcgcgatatggattccgcccgcctgcgggtggcgtgctatgtccgcgtcagcacgagagagcaggcc

SEQ ID NO: 18954 - DNA, 260 bp, Unknown
  Description of Unknown: LeftRegion for integrase B5955 sequence
cgaccgaacaaagggacgaaataatcaataaaaataaactttcttttctttcgtaattacaagtcttttgtctggactttaattgttttatacgctattgtttgtgctaccctgaccatgggtggcacaaattttttataatcttgaaatcctacaaaggtcagggaaataatagacaaaaggtctaaaaggaggttgtaatggaagaaaaattaagagctgcggcatacggacgagtatctacaaatagtaaggaacaa

SEQ ID NO: 18955 - DNA, 260 bp, Unknown
  Description of Unknown: LeftRegion for integrase B5956 sequence
tcattcttgaagcaactacgcaagcggaacaccagttccatgctagctgctatttttatactcatttttaagagaatgaaatgatatgatgacaagaagaaacatccaaccaaaaacatatctgtgtctcaatatcacttcttttttatttttttaatacccgcgtattttcgtaatatattataaggaggaggcacattatggcagatatccaaccagtaaaaaatggagctttatatatccgcgtatccacgcacttg

SEQ ID NO: 18956 - DNA, 260 bp, Unknown
  Description of Unknown: LeftRegion for integrase B5957 sequence
gagccgacatgggaaaaggcgtgcgcgatagtcgatgcgttcggcctaacggttgacgaatttagacagattcagaacgcagaatgacatgcagataacactaggccccggtaccgtccgccaagacaacacaccggggcctcaatggaacgcggggccgtaaccttccgcattcatacccatagaagggcaatcaaattatgacacagaagacagcggttatatacgcccgcttcagctgctccaagcagcgcgaggcg

SEQ ID NO: 18957 - DNA, 260 bp, Unknown
  Description of Unknown: LeftRegion for integrase B5958 sequence
ggggtgatggtggtggttatcaccgtgataaccaccactattcatatgtatcgacctaaaagcctctctggatatagtgtctcactttttcatctaaaatgtattgcaaattcttatagaatatggtatatacattatacgaaacaatgttttgaatgaacgcactgccgttctatgatgtgtaaagtgaggtgcctgccatgaccgccgtaatttacgcccgctattccagcgacaaccagcgtgaagaatccatcgaa

SEQ ID NO: 18958 - DNA, 260 bp, Unknown
  Description of Unknown: LeftRegion for integrase B5959 sequence
gactttgccccatctgcttcacagtatggcgacacgcttattgacgcacaaaatcagattgttgctttatctgaatttgtcacgctgcaaggtgataaccctaaacaggatttagaaaaatattcttcattgataaatcagaaaataagagcctttacagacgacattctgaaaggttaataaaataaaatgccccggtcgtgctgggaacacttccggggtgtgcaaagatatatcataccagatacaacataccgtct

SEQ ID NO: 18959 - DNA, 260 bp, Unknown
  Description of Unknown: LeftRegion for integrase B5960 sequence
tccattttctcgccacttgaccgtttccgttttttcttctataatgcaaataaaaaaatgcccctggcgaaccaggggcttatatgtagcatttttacgaaagatgatactacatatcggctttattagtgtatcatcaatcgggtgctgtgtcaattattactgcgctctttttttgcgctcttttggaggtacagactatgaaaaaagaacttattaacggtgttatttatgctagatattctcctggtccgaatcag

SEQ ID NO: 18960 - DNA, 260 bp, Unknown
  Description of Unknown: LeftRegion for integrase B5961 sequence
cagaaaaactttatgaaatgatgttaaaaatctttgactaataatgcattttaataaaaaaatcccccctgcgccaacaggagggaaatggatataccattgctgatataaccacgaaagcaatcatattatatcagctctggtagtaaattgcaaataccagggtatttttatacccttttttaagaaagggtgattctatgaaccaaaatgaatctttgaaaacagcgttcggatacatacgagtttctacacacatg

SEQ ID NO: 18961 - DNA, 260 bp, Unknown
  Description of Unknown: LeftRegion for integrase B5962 sequence
acccttacatatttcagaatatggtatcagaaagatgatgatgcagccagcagatccgataatggaaatctttgatttataaataaaaatccccgcccggcgctggaacaccgaatggggaagaagctgtgatacaatcacaaccttagacaagtttattgtatcatagctccctgaaaatgtcaaggagtgatataaatttgaaaaccgccgtaatatacgcccgatattcatcggacaagcagacggagcagtccatt

SEQ ID NO: 18962 - DNA, 260 bp, Unknown
  Description of Unknown: LeftRegion for integrase B5963 sequence
atctcgccagttctgggtatgtgatattcttttcaagcataatctcccccagcagtattttcatgtggtgtacctcgtactccctattttattctgtttttcaataaattaaaacaagaaatgttttccagtttgcctatcttgattttttaataatatcagcgtatttttatactatactttaaaaagggggttacattatggcagacatccaaccagtaaaaaacggagctttatatatccgcgtatccacgcaccta

SEQ ID NO: 18963 - DNA, 260 bp, Unknown; identical to SEQ ID NO: 18951
  Description of Unknown: LeftRegion for integrase B5964 sequence

SEQ ID NO: 18964 - DNA, 260 bp, Unknown
  Description of Unknown: LeftRegion for integrase B5965 sequence
cactgaaataatcatattgttttgtcggattccggcagacatatataataaaaagaccgccctttgcgggcggtcaagaccttacactttacccacagaaaatatggctaaaagctaaagataacgcatatctattttagcataagccttttcttttgtataggcttattttttataccaaattttaaggaggaagacgcatgagtgaaaagttaaaagaagtctgtgcatatatccgagtctctactgacaaacaggaa

SEQ ID NO: 18965 - DNA, 260 bp, Unknown
  Description of Unknown: LeftRegion for integrase B5966 sequence
ccgatttacaagtgtcattatacaagtttatgtaagacttgtcaataatattcagtaaaaaatcccccctgcgccaacaggagggaaatggatataccattgctgatataacctcaaaagcaatcatattatatcagctctggtagtaaattgcaaataccagggtatttttatacccttttttaagaaagggtgattctatgaaccaaaatgaatctttgaaaacagcgttcggatacatacgagtttctacacacatg

SEQ ID NO: 18966 - DNA, 260 bp, Unknown
  Description of Unknown: LeftRegion for integrase B5967 sequence
tcattctgataaaaagaaaaaagccccgccggtgctaccaacaccgacgaggccgcccgggtcaccccggtggacaatatagtcccaagcaagctatattgtaccacctgacccgggcaaaagcaatagcccgggcatttttatgcccaattttaaacgcatataaatagagcgggataaaaacaggaggtacataaacaatgagatacgcgatatatctgcgcaaaagccgtgcggatgatacgtccgagccgctggag

SEQ ID NO: 18967 - DNA, 260 bp, Unknown
  Description of Unknown: LeftRegion for integrase B5968 sequence
gaactggatgatgttgagaaaggaaaaacattatcagtttccacgtctacaaattctttagaaaaagaagattataaaaataaaagagcataaaaacagccatgatgttataaataacatcatgactgtttttaatttaatcattatataatattactatacagtaatagacctgcttttttataggaggttttcatattatggaaaacatttttcatacagcagcaatatatgctagagtatctactaaaaaacaagct

SEQ ID NO: 18968 - DNA, 260 bp, Unknown
  Description of Unknown: LeftRegion for integrase B5969 sequence
tacgagcagtattcattaaaagcctcacatttgtggggctttttttgtaaaaatataaaaaatcccccctgcgccaacaggagggaaatggatataccattgctgatataaccacaaaagcaatcatattatatcagctctggtagtaaattgcaaataccagggtatttttatacccttttttaagaaagggtgattctatgaaccaaaatgaatctttgaaaacagcgttcggatacatacgagtttctactcacatg

SEQ ID NO: 18969 - DNA, 260 bp, Unknown
  Description of Unknown: LeftRegion for integrase B5970 sequence
tcgcgactgcagatatttcaacaaaaacagtaatatacgcaactgccaattttgtggtggactgaaaaaaagataatttttgactgccgttttatctatttctctaaacttgccatttttttcctatacagatatgagacttttgcaatctattaatttcccgatacaataaaaaatagtatagattttcaggaagaagtatgaaatatttgatttatgcgcgtgtcagcgaacgcggttccggctttgaaggacagaca

SEQ ID NO: 18970 - DNA, 260 bp, Unknown
  Description of Unknown: LeftRegion for integrase B5971 sequence
aaacagcaatttaatgaactaattcatataaatgaaatctaatcaaaaaaatgaccgcccacaaaggacggtcaaaatcttacgctttacccacaaaagaatatggctaaaagctaaagataacgcatatctattttagcataagccttttcttttgtataggcttattttttataccaaattttaaggaggaagaaaccatgtctgaaaaattaaaagaagtctgtgcatacatccgagtctctactgacaaacaggaa

SEQ ID NO: 18971 - DNA, 260 bp, Unknown
  Description of Unknown: LeftRegion for integrase B5972 sequence
tacgagcagtattcattaaaagcctcacatttgtggggctttttttgtaaaaacataaaaaatcccccctgcgccaacaggagggaaatgaatataccattgctgatatacccacaaaagcaatcatattatatcagctctggtagtaaattgcaaataccagggtatttttatacccttttttaagaaagggtgatcctatgaaccaaaatgaatctttgaaaacagcgttcggatacatacgagtttctactcacatg

SEQ ID NO: 18972 - DNA, 260 bp, Unknown
  Description of Unknown: LeftRegion for integrase B5973 sequence
ccaagtttcgcacacagttggcaaagtgaatttcacttacttagagatcctcttaatttattagagtttctcagaaataaaaaaagccgccccagtgctgcaacaccaggacggctgattggaggcccgaaagaatttgagcaaaccccgggcaggaacagtataccacctcccgggcgtattgtctaggaggtggttttttgaacagatacgcagaatacatccgaaaaagccgcgcggatgacccccacgaaagcttg

SEQ ID NO: 18973 - DNA, 260 bp, Unknown
  Description of Unknown: LeftRegion for integrase B5974 sequence
ggaatctacgcccttgcatggtatgcagcccgtagcataaactatttcatacaacaaaaaaatcccccctgcgccaacaggagggaaatgaatataccattgctgatataaccacaaaagcaatcatattatatcagctctggtagtaaattgcaaataccagggtatttttatacccttttttaagaaagggtgattctatgaaccaaaatgaatctttgaaaacagcgttcggatacatacgagtttctactcacatg

SEQ ID NO: 18974 - DNA, 260 bp, Unknown
  Description of Unknown: LeftRegion for integrase B5975 sequence
gcccgccacaaaacaaaaaaaagccccgccggtgctaccaacaccgacgaggctgcccgggtcaccccggtggacaatatagtcccagacaagctatattgtaccacctgacccgggcaaaagcaatagcccgggcatttttatgcccaattttaaacgcatataattgagaacggataaaaacaggaggtacataaacaatgagatacgcgatatatctgcgcaaaagccgtgcggatgatacgtccgagccgctggag

SEQ ID NO: 18975 - DNA, 260 bp, Unknown
  Description of Unknown: LeftRegion for integrase B5976 sequence
cagcctcaaaaaactgctgggcatcaaggcctagaaacaaacaaaataaaaagcccctgccatatcgcgagatatgacaggggaatgcagccaggcattaccagtaccaggttgcggttataatccactcttgcggaggcagattatgtatacattatatcataaagcctccatgcaccatagaaggaggctctatttttatgcctaaaacagaagaaaagcaagccataaaggccgtaatatatgcaagatattcgtca

SEQ ID NO: 18976 - DNA, 260 bp, Unknown; identical to SEQ ID NO: 18951
  Description of Unknown: LeftRegion for integrase B5977 sequence

SEQ ID NO: 18977 - DNA, 260 bp, Unknown
  Description of Unknown: LeftRegion for integrase B5978 sequence
gaggctgcccggcgaaccgggtggacaatatagtcctcgacaagctatattgtaccacctgacccgggcaaaagcaatagcccgggcatttttatgcccaaaattagtcgttcccctttgaggacatggatagaaataggacgtgtatagaaatagccgcatataaatagagcgggataaaaacaggaggtacataaacaatgagatacgcgatatatctgcgcaaaagccgtgcggatgatacgtccgagccgctggag

SEQ ID NO: 18978 - DNA, 260 bp, Unknown; identical to SEQ ID NO: 16083
  Description of Unknown: LeftRegion for integrase B5979 sequence

SEQ ID NO: 18979 - DNA, 260 bp, Unknown; identical to SEQ ID NO: 18965
  Description of Unknown: LeftRegion for integrase B5980 sequence

SEQ ID NO: 18980 - DNA, 260 bp, Unknown
  Description of Unknown: LeftRegion for integrase B5981 sequence
agatgaatcattatgtgaggacctcgtagaaatacgaggttctttacgtttaataaaaaaatccccccctgcgccaacaggagggaaatggatataccattgctgatataacctcaaaagcaatcatattatatcagctctggtagtaaattgcaaataccagggtatttttatacccttttttaagaaagggtgattctatgaaccaaaatgaatctttgaaaacagcgttcggatacatacgagtttctactcacatg

SEQ ID NO: 18981 - DNA, 260 bp, Unknown
  Description of Unknown: LeftRegion for integrase B5982 sequence
aaaagccatgattcgaattgaaaacctctcccctcaacttaccgctgaagagtgcatggagcagcggcgatgtattgaagagggccttttcgagatttttatcaaatacgagaaacaacaggaaaatgatagctatttaggagctgctgcggtatgatgtacctgtcagcagctcttttctatgagaaaggagctacaaaatgaatgcaatatacgcaagacaatccgttgacagagccgatagcatttccatcgaaagc

SEQ ID NO: 18982 - DNA, 260 bp, Unknown
  Description of Unknown: LeftRegion for integrase B5983 sequence
gaatctacgcccttgcatggtatgcagcccgtagcataaactatttcatacaacaaaaaaatccccccctgcgccaacaggagggaaatggatataccattgctgatataaccacaaaagcaatcatattatatcagctctggtagtaaattgcaaataccagggtatttttatacccttttttaagaaagggtgattctatgaaccaaaatgaatctttgaaaacagcgttcggatacatacgagtttctactcacatg

SEQ ID NO: 18983 - DNA, 260 bp, Unknown
  Description of Unknown: LeftRegion for integrase B5984 sequence
aagcccgccacaaaacaaaaaaagccccgccggtgctaccaacaccgacgaggccgcccggcgaaccgggtggacagtatagtcccgaacaaactatattgtaccacctgacccgggcaaaagcaatagcccgggcatttttatgcccaattttaaacgcatataattgagaacggataaaaacaggaggtacataaacaatgagatacgcgatatatctgcgcaaaagccgtgcggatgatacgtccgagccgctggag

SEQ ID NO: 18984 - DNA, 260 bp, Unknown
  Description of Unknown: LeftRegion for integrase B5985 sequence
taaagcccgccacaaaaaaaaagccccgccggtgctaccaacaccgacgaggccgcccggcgaaccgggtggacaatataagtcctgaacaaactatattgtaccacctgacccgggcaaaagcaatagcccgggcatttttatgcccaattttaaacgcatataaatagagcgggataaaaacaggaggtacataaacaatgagatacgcgatatatctgcgcaaaagccgtgcggatgatacgtccgagccgctggag

SEQ ID NO: 18985 - DNA, 260 bp, Unknown
  Description of Unknown: LeftRegion for integrase B5986 sequence
gcccgccacaaaacaaaaaaaagccccgccggtgctaccaacaccgacgaggccgcccggcgaaccgggtggacaatataagtcccagacaagctatattgtaccacctgacccgggcaaaagcaatagcccgggcatttttatgcccaattttaaacgcatataattgagaacggataaaaacaggaggtacataaacaatgagatacgcgatatatctgcgcaaaagccgtgcggatgatacgtccgagccgctggag

SEQ ID NO: 18986 - DNA, 260 bp, Unknown
  Description of Unknown: LeftRegion for integrase B5987 sequence
ggaatctacgcccttgcatggtatgcagcccgtagcataaactatttcatacaacaaaaaaatcccccctgcgccaacaggagggaaatgaatataccattgctgatatatccacgaaagcaatcatattatatcagctctggtagtaaattgcaaataccagggtatttttatacccttttttaagaaagggtgattctatgaaccaaaatgaatctttgaaaacagcgttcggatacatacgagtttctacacacatg

SEQ ID NO: 18987 - DNA, 260 bp, Unknown
  Description of Unknown: LeftRegion for integrase B5988 sequence
ggaatctacgcccttgcatggtatgcagcccgtagcataaactatttcatacaacaaaaaaatcccccctgcgccaacaggagggaaatgaatataccattgctgatatacccacaaaagcaatcatattatatcagctctggtagtaaattgcaaataccagggtatttttatacccttttttaagaaagggtgattctatgaaccaaaatgaatctttgaaaacagcgttcggatacatacgagtttctactcacatg

SEQ ID NO: 18988 - DNA, 260 bp, Unknown; identical to SEQ ID NO: 13967
  Description of Unknown: LeftRegion for integrase B5989 sequence

SEQ ID NO: 18989 - DNA, 260 bp, Unknown
  Description of Unknown: LeftRegion for integrase B5990 sequence
atatatattgtaaacttttgctatttatattatactatttacaaaaagaaaaagaccgtccacaaaggacggtcaagacattacactttacccacaaaaaatatggctaaaatataaagataacgcatatttattttaacataagccatcttttttgtataggcttattttttatacccaaatttaaggaggaagataccatgtctgaaaaattaaaagaagtctgtgcatacatccgagtctctactgacaagcaagag

SEQ ID NO: 18990 - DNA, 260 bp, Unknown
  Description of Unknown: LeftRegion for integrase B5991 sequence
gaggccgcccggcgaaccgggtggacaatatagtcccagacaagctatattgtaccacctgccccgggcaaaagcaatagcccgggcatttttatgcccaaaattagtcgttctcttttgagaacgtggatagaaataggacgtgtatagaaatagccgcatataaatagagcgggataaaaacaggaggtacataaacaatgagatacgcgatatatctgcgcaaaagccgtgcggatgatacgtccgagccgctggag

SEQ ID NO: 18991 - DNA, 260 bp, Unknown
  Description of Unknown: LeftRegion for integrase B5992 sequence
agtcgctgaacatcctgccggaacgctgtgcgctggttgaaagcgagccggagcgcacccaaggactgcggcagatgctggtggacaactactcggtgttctacatcgtgagcgaggatgcggtgtcggtagcccgtgtgctgtacagtgcatccgaccttgtgcgccgtctgcggaaaatgaagtaaggaggtgcagccatgactgccgtgatttacgcccgctattccagcgataatcagcgcgaagaatccatcgaa

SEQ ID NO: 18992 - DNA, 260 bp, Unknown
  Description of Unknown: LeftRegion for integrase B5993 sequence
gtgctaccaacaccggcgaggctgcccgggtcaccccggtggacaatatagtcccagacaagctatattgtaccacctgacccgggcaaaagcaatagcccgggcatttttatgcccaaaattagtcgttctcttttgagagcgtggatagaaatagccgcatataatagagcgggataaaaacaggaggtacataaacaatgagatacgcgatatatctgcgcaaaagccgtgcggatgatacgtccgagccgctggag

SEQ ID NO: 18993 - DNA, 260 bp, Unknown
  Description of Unknown: LeftRegion for integrase B5994 sequence
aatttaaataataaaagcattgggaaaattaaagcgtttatttgggataatacagaaaatttagttcctgtatcaaatgttaaaacttattaaattattttttcaataagcgtggactgtaaatgaggttaaattgatatgcaatgcaaaaaatgtagaaaagaaatcccggacaaaagaaatactcaaaggagcacacaatggtagcaatatacgcacgtcagtcaatagataaaaaagacagcatctctatagacagt

SEQ ID NO: 18994 - DNA, 260 bp, Unknown; identical to SEQ ID NO: 17524
  Description of Unknown: LeftRegion for integrase B5995 sequence

SEQ ID NO: 18995 - DNA, 260 bp, Unknown
  Description of Unknown: LeftRegion for integrase B5996 sequence
tacttaaaagagggctaattacgaatgcagaaaaggaaaaaattataaataaatttgcataataagcgcaaatttatctggacttgcggaaaagataacggtataattcatgctaccaaaagcagaattataccgtttattttttacatgattcaacccctgtttgaaaggtagggtaatgcacgaaaaaggaggcttgaatggaagtaacgaaaataccgaagcaaaaggcacaaaagccaaaaatcggagtttatgtt

SEQ ID NO: 18996 - DNA, 260 bp, Unknown
  Description of Unknown: LeftRegion for integrase B5997 sequence
ggaatctacgcccttgcatggtatgcagcccgtagcataaactatttcatacaacaaaaaaatcccccctgcgccaacaggagggaaatggatataccattgctgatataaccacaaaagcaatcatattatatcagctctggtagtaaattgcaaataccagggtatttttatacccttttttaagaaagggtgattctatgaaccaaaatgaatctttgaaaacagcgttcggatacatacgagtttctactcacatg

SEQ ID NO: 18997 - DNA, 260 bp, Unknown
  Description of Unknown: LeftRegion for integrase B5998 sequence
acaaataaaagttaaagaaaaagccccgccggtgctaccaacaccgacgaggccgcccggcgaaccgggtggacaatataagtcccagacaagctatattgtaccacctgacccgggcaaaagcaatagcccgggcatttttatgcccaattttaaacgcatataattgagaacggataaaaacaggaggtacataaacaatgagatacgcgatatatctgcgcaaaagccgtgcggatgatacgtccgagccgctggag

SEQ ID NO: 18998 - DNA, 260 bp, Unknown
  Description of Unknown: LeftRegion for integrase B5999 sequence
gccacaacacaaaaataaaaaagccccgccggtgctaccaacaccgacgaggccgcccggcgaaccgggtggacaatataagtcccagacaagctatattgtaccacctgacccgggcaaaagcaatagcccgggcatttttatgcccaattttaaacgcatataattgagaacggataaaaacaggaggtacataaacaatgagatacgcgatatatctgcgcaaaagccgtgcggatgatacgtccgagccgctggag

SEQ ID NO: 18999 - DNA, 260 bp, Unknown
  Description of Unknown: LeftRegion for integrase B6000 sequence
agtcgctgaacatcctgccggaacgctgtgcgctggtagagagcgagccggagcgcactcaagggctgcggcagatgctggtggacaactactcggtgttctacatcgtgggcgaggatgccgtgtcggtggcgcgtgtgctgtacagtgcatccgaccttgtgcgccgtctgcggagaatgaaataaggaggtgcagccatgaccgctgtgatttacgcccgctattccagcgacaaccagcgtgaggaatccatcgaa

SEQ ID NO: 19000 - DNA, 260 bp, Unknown
  Description of Unknown: LeftRegion for integrase B6001 sequence
aaaagccatgattcgaatcgaaaacctctcccctcaacttaccgctgaagagtgcatggagcagcggcgatgtattgaagagggccttttcgagatttttatcaaatacgaaaaacaacaggaaaataatagctatttagaagctgctgcggtatgatgtacctgtcagcagctcttttctatgagaaaggagctacaaaatgaatgcaatatacgcaagacaatccgttgacagagccgatagcatttccatcgaaagc

SEQ ID NO: 19001 - DNA, 260 bp, Unknown
  Description of Unknown: LeftRegion for integrase B6002 sequence
attaaaaataggctattacaagtaaaaaccgcccggtgcttccaacaccgaacggccaaacatatacccgaagatatacactatactaacaaaaatattgtatcatcttcggagcagccttgcaagcggaacaccagttcctcgctggctgtcatttttatacccatttttacatatagaattaagaaggagatgatacaatgaagcaacgatacgcttatggctacgtccgtgtcagcacagacaagcaggaagaactc

SEQ ID NO: 19002 - DNA, 260 bp, Unknown
  Description of Unknown: LeftRegion for integrase B6003 sequence
atagagcaggagattccgttgaattatagcagtccagtttaatattgttatgctgagataaagctcaggaggtaaaaatcctgggctttattttttgacaaatgataccaaagattagtcattgtacccgttataaatgacttgctatctttggtactcagaggtaatatgtcactacccaaaggaaaggagctgatttcatgaaaatacacgtcataactccgacaagtgaaacgccggaaaaattgcgtgtttgtgcg

SEQ ID NO: 19003 - DNA, 260 bp, Unknown
  Description of Unknown: LeftRegion for integrase B6004 sequence
ctaccaacaccgacgaggccgcccgggtcaccccggtggaacaataatattccaagcaagtaatattgtaccacctgacccgggcaaaagcaatagcccgggcatttttatgcccaaaattagtcgttctctttatgaggacgtggatagaaatagccgcatataaatagagcgggatagaaacaggaggtacataaacaatgagatacgcgatatatctgcgcaaaagccgtgcggatgatacgtccgagccgctggag

SEQ ID NO: 19004 - DNA, 260 bp, Unknown
  Description of Unknown: LeftRegion for integrase B6005 sequence
gccacaacacaaaaataaaaaagccccgccggtgctaccaacaccagcgaggccgcccgggtcaccccggtggaacaataatattccaagcaagtaatattgtaccacctgacccgggcaaaagcaatagcccgggcatttttatgcccaaaatagccgcatataaatagagcgggataaaaacaggaggtacataaacaatgagatacgcgatatatctgcgcaaaagccgtgcggatgatacgtccgagccgctggag

SEQ ID NO: 19005 - DNA, 260 bp, Unknown
  Description of Unknown: LeftRegion for integrase B6006 sequence
tgtgggccgacattaagcccgatttgtttgaacacatcgacggcctgaaaagtcaatggaaaaagaaagaagataaataaaaaaagccgccccagtgctgcaacaccaggacggctgattggaggcccgaaagaatttgagcaaaccccgggcaggaacagtataccacctcccgggcgtattgtctaggaggtggttttttgaacagatacgcagaatacatccgaaaaagccgcgcggatgacccccacgaaagcttg

SEQ ID NO: 19006 - DNA, 260 bp, Unknown
  Description of Unknown: LeftRegion for integrase B6007 sequence
cgaagctgccgttgtactccccgtacaccgcgtggaaatgcggcggattgtgttctctggtcaaaaagatcttgatgatgattccgtaaaaacgagctatctcaggcattgtctttccctctctttctgtaatatattataactcaaaagttattaaaagtcaataactttttcgcattattttcaaaaaaggtgatcatatgcgttatgcgatgtacctgcgcaaaagccgcgcggacgatgcttcggagccgattgaa

SEQ ID NO: 19007 - DNA, 260 bp, Unknown
  Description of Unknown: LeftRegion for integrase B6008 sequence
gagatgaatcattatgtgaggacctcgtagaaatacgaggttctttacgtttaataaaaaaatcccccctgcgccaacaggagggaaatgaatataccattgctgatatacccacaaaagcaatcatattatatcagctctggtagtaaattgcaaataccagggtatttttatacccttttttaagaaagggtgattctatgaaccaaaatgaatctttgaaaacagcgttcggatacatacgagtttctactcacatg

SEQ ID NO: 19008 - DNA, 260 bp, Unknown
  Description of Unknown: LeftRegion for integrase B6009 sequence
actgaaataatcatattgttttgtcggattccgacagacatacataacaaaaagaccgccctttgcgggcggtcaagaccttacactttacccacaaaagaatatggctaaaatataaagataacgcatatttattttaacataagccacttcttttgtataggcttattttttatactcaattttaaggaggaagacgcatgagtgaaaagttaaaagaagtctgtgcatatatccgagtctctactgacaaacaagag

SEQ ID NO: 19009 - DNA, 260 bp, Unknown
  Description of Unknown: LeftRegion for integrase B6010 sequence
tcaacggaagaacgagatgcgattatagccaaaaacaaacgcacttttctttccgaataaagcggtttttctctggactttcgtcgcaaagtacgctatcgtttgtcctgccctgggatgggcaggacaaattttttatcgtcaataagtcctcacatcacatagggagaataagacgaaaagtctaaaaggaggttggaatgaacaaaaagagagctgcagcatacgccagagtatctaccaacagtcgggcgcaggaa

SEQ ID NO: 19010 - DNA, 260 bp, Unknown
  Description of Unknown: LeftRegion for integrase B6011 sequence
aagcaaatattaggaatttagaataaagaaaaagcccgccgtagctattggcgtagcggcggcgggactggttttggaaccatgcacaactttacgataatgcacttttcaagcaagtccattatacaatgcaaggctccaaagcacaagtagaattttggggctatttttatgcccttttttagaaaggctgtgttgtgatgaaagtaaaaaagaataatgaaatcccggccgcgactgggacaatccgtgttgctgtt

SEQ ID NO: 19011 - DNA, 260 bp, Unknown; identical to SEQ ID NO: 18201
  Description of Unknown: LeftRegion for integrase B6012 sequence

SEQ ID NO: 19012 - DNA, 260 bp, Unknown
  Description of Unknown: LeftRegion for integrase B6013 sequence
actgaaataatcatattgttttgtcggattccgacagacatacataacaaaaagaccgccctttgcgggcggtcaagaccttacactttacccacaaaagaatatggctaaaatataaagataacgcatatttattttaacataagccacttcttttgtataggcttattttttatactcaattttaaggaggaagacgcatgagtgaaaagttaaaagaagtctgtgcatatatccgtgtctctactgacaaacaggaa

SEQ ID NO: 19013 - DNA, 260 bp, Unknown
  Description of Unknown: LeftRegion for integrase B6014 sequence
aatgtaacatccaatacatatgttttgggattgtaattatattcaaacattctatattctcccctatttttataagtatatagtaacatttgtaacacattcctgcaagtaagccagcatatattttctatatcctattgacgcattttttaattagctttacaattttaaatcattaaaacacttgggaggaaattgtgatggggaaatccataaccaaaacaggggcattatatattcgagtttctaccggcaaacag

SEQ ID NO: 19014 - DNA, 260 bp, Unknown
  Description of Unknown: LeftRegion for integrase B6015 sequence
gagatgaatcattatgtgagagcctcgtagaaatacgaggttctttacgtttaataaaaaaatcccccctgcgccaacaggagggaaatggatataccattgctgatataacctcaaaagcaatcatattatatcagctctggtagtaaattgcaaataccagggtatttttatacccttttttaagaaagggtgattctatgaaccaaaatgaatctttgaaaacagcgttcggatacatacgagtttctactcacatg

SEQ ID NO: 19015 - DNA, 260 bp, Unknown
  Description of Unknown: LeftRegion for integrase B6016 sequence
gccaacgggtccatcgccgtggtggagaccgaggactaccgcgcggtcatgcgccgctggtacaagggaagcaccaagctgatgctgtcggcggacagcttcgaggactacgaggacatgattttcggcatggacgacggacccgtgcgcgtgatcggcacggtggtgtggttccaggccgccgacgagatggagtagccgtgggcgggcgcgcggcgatatacgcccgcttctcgagccacaaccagcgcggcgagtcc

SEQ ID NO: 19016 - DNA, 260 bp, Unknown; identical to SEQ ID NO: 18968
  Description of Unknown: LeftRegion for integrase B6017 sequence

SEQ ID NO: 19017 - DNA, 260 bp, Unknown
  Description of Unknown: LeftRegion for integrase B6018 sequence
gagatgaatcattatgtgagagcctcgtagaaatacgaggttctttacgtttaataaaaaaatcccccctgcgccaacaggagggaaatggatataccattgctgatataaccacaaaagcaatcatattatatcagctctggtagtaaattgcaaataccagggtatttttatacccttttttaagaaagggtgattctatgaaccaaaatgaatctttgaaaacagcgttcggatacatacgagtttctactcacatg

SEQ ID NO: 19018 - DNA, 260 bp, Unknown
  Description of Unknown: LeftRegion for integrase B6019 sequence
aagggcttaatcaacgatacagaaagggatcgtatgaaagagaaaaataaattgaaaattctttcttaattacggcgatttcgtctggacttaagtgagattatacgctattgtttgtcctgcccaaacgggcgggacaaattttttagcctacattcaagtccataaatgaaaagagtgtggcggacaaggaggtagtaatgaacgacaggaaacgagcagtcgcgtatatccgtgtgtcaacgaagagcgatgcacag

SEQ ID NO: 19019 - DNA, 260 bp, Unknown
  Description of Unknown: LeftRegion for integrase B6020 sequence
agatattattacagttcagcaaatcagacattaataaaaaatcgccctggcgctaccaacaccaaggcgatgtaacctgtactccgaagagtataagtcccagacaagacatattataccctgcggagcaccatctgtcaaaagattggtgttatttttgtaccctttttttcatacatttacagagaggcaggtatattatggaaaaattacgaaatggagcactctatatacgagtgtcaaccgacaagcaggaggaa

SEQ ID NO: 19020 - DNA, 260 bp, Unknown
  Description of Unknown: LeftRegion for integrase B6021 sequence
aaacaagctactttctttaaaatagaataatatattaaaaatcgccctagtgctaccaacaccaaggcgatgtaacccgtactccgaagagtataataggtccagacaaccatattatacctttcggaacaccatctgtcaaaggataggtgttatttttgtaccttttttcatatatttttagaaaggataggtgtaatatggaaaaactacgcactggtgctctgtatatcagagtctcaacagacaaacaggaagag

SEQ ID NO: 19021 - DNA, 260 bp, Unknown
  Description of Unknown: LeftRegion for integrase B6022 sequence
tgcgcattagttgggcttgtaatcgctgttttaggcgctgcaattgtcggcgttccaattgcgatattgggcgctttgcttgcctttgggtcaaagggaaggaaatagaaaaccctgcgcggcttcttggcggtcagcgcgcagggcaagtgcaaagaacgaagcgcaatagcgcactcgctctaaggggtgattttagcatggtgaagaaccgagctgccatatacgcgcggttcagctcgcacaaccaacgctcagaa

SEQ ID NO: 19022 - DNA, 260 bp, Unknown
  Description of Unknown: LeftRegion for integrase B6023 sequence
tctcattcccgttcccgattgatgaggtaagggattcggacacgtaccagctaacgacgaggtggagagcttacttggagagacataggaagctgctcaaataaaaaagaagccccgtgcggcttcttggcggttggcgcacggggcaaaggtgaagaacagagcgcttaaccgcgcccgtcctgagaggtgattttagcatggtgaagaaccgagccgccatatatgcgcgcttcagctcgcacaaccagcgttcggaa

SEQ ID NO: 19023 - DNA, 260 bp, Unknown
  Description of Unknown: LeftRegion for integrase B6024 sequence
aagggcttaatcaacgatatagaaagggatcgtatgaaagagaaaaataaattgaaaattctttcttaattacggcgatttcgtctggacttaagtgagattatacgctattgtttgtcctgcccaaacgggcgggacaaattttttagcctacattcaagtccataaatgaaaagagtgtggcggacaaggaggtagtaatggacgacaggaaacgagcagtcgcgtatatccgtgtgtcaacgaagagcgatgcacag

SEQ ID NO: 19024 - DNA, 260 bp, Unknown
  Description of Unknown: LeftRegion for integrase B6025 sequence
tgggacttactccttgcaaacgttgctactaaatttaaaaatcgccctggcgctaccaacaccaaggcgatgtaacctgtactccgaagagtataagtcccagacaagacatattatacctttcggagtggcatttgtcgagagacagatgttatttttgtacccttttttcatatatttttagaaaggataggtgtaatatggaaaaactacgcactggtgctctgtatatcagagtctcaacagacaaacaggaagag

SEQ ID NO: 19025 - DNA, 260 bp, Unknown
  Description of Unknown: LeftRegion for integrase B6026 sequence
tgtgaggtcttttacgttatacaaagctttataataaaaaatcgccctggcgctaccaacaccaaggcgatgtaacctgtactccgaagagtataataggtccagacaaccatattatacctttcggaacgccatctgtcaaaggataggtgttatttttgtacctttttgcatatatttttagaaaggataggtgtaatatggaaaaattacgaaatggagcactctatatacgagtgtcaaccgacaagcaggaagag

SEQ ID NO: 19026 - DNA, 260 bp, Unknown
  Description of Unknown: LeftRegion for integrase B6027 sequence
agacatgggaaaagatccttgtaagaaatgctactaaaatatattgcttttgtgctaccaacactaagcaatgtaacctgtactccgaagagtataagtcccagacaagacatattataccctgcggagcaccatctgtcaaagattggtgttatttttgtaccctttttttcatacatttacagagaggcagggatattatggaaaaattacgaaatggagcactctatatacgagtgtcaaccgacaagcaggaggaa

SEQ ID NO: 19027 - DNA, 260 bp, Unknown
  Description of Unknown: LeftRegion for integrase B6028 sequence
tgggacttactccttgcaaacgttgctactaaatttaaaaatcgccctagtgctaccaacaccaaggcgatgtaacccgtactccgaagagtataataggtccagacaaccatattatacctttcggaacaccatctgtcaaaggataggtgttatttttgtaccttttttcatatatttttagaaaggataggtgtaatatggaaaaactacgcactggcgctctgtatatcagagtctcaacagacaaacaggaagag

SEQ ID NO: 19028 - DNA, 260 bp, Unknown
  Description of Unknown: LeftRegion for integrase B6029 sequence
tgtgaggtcttttacgttatacaaagctttataataaaaaatcgccctggcgctaccaacaccaaggcgatgtaacctgtactccgaagagtataagtcctaagcaagacatattatacctttcggagtggcatttgtcgagagacagatgttatttttgtacccttttttcatatatttttagaaaggataggtgtaatatggaaaaactacgcactggcgctctgtatatcagagtctcaacagacaaacaggaagag

SEQ ID NO: 19029 - DNA, 260 bp, Unknown
  Description of Unknown: LeftRegion for integrase B6030 sequence
tgttctgtttatccgattcaccttacccaaaagtagagatttccctaacagaaaaagagaaaatccttattgacgcataccgtgctgctgatgacatgggacagttgaacataatctatgtctgcctggatgaaatgaaaaaagcaaaaggggacagcgaaagtgccgtgtgattgattttgtagagtggaggaagaaccatgtatgaggatataaaaacagcctgcctatatgttagattctcaagccataaccagact

SEQ ID NO: 19030 - DNA, 260 bp, Unknown
  Description of Unknown: LeftRegion for integrase B6031 sequence
tgtgaggtcttttacgttatacaaagctttataataaaacatcgccctggcgctaccaacaccaaggcgatgtaacctgtactccgaagagtataagtcctaagcaagacatattatacctttcggagtggcatttgtcgagagacagatgttatttttgtacccttttttcatatatttttagaaaggataggtgtaatatggaaaaactacgcactggtgctctgtatatcagagtctcaacagacaaacaggaagag

SEQ ID NO: 19031 - DNA, 260 bp, Unknown
  Description of Unknown: LeftRegion for integrase B6032 sequence
cgacaaggcatataccactcatactaaaaaataataaataatcgccctggcgctaccaacaccaaggcgatgtaacctgtactccgaagagtataataggtccagacaaccatattatacctttcggaacaccatctgtcaaaggataggtgttatttttgtacctttttgcatatatttttagaaaggataggtgtaatatggaaaaactacgcactggtgctctgtatatcagagtctcaacagacaaacaggaagag

SEQ ID NO: 19032 - DNA, 260 bp, Unknown; identical to SEQ ID NO: 19020
  Description of Unknown: LeftRegion for integrase B6033 sequence

SEQ ID NO: 19033 - DNA, 260 bp, Unknown
  Description of Unknown: LeftRegion for integrase B6034 sequence
ttactgggtcttagtgaagtcagaaaaccagaagtcttagttttgtcagaaaaagagaaaattctcattgacgcataccgtactgctaatgacatgggacagttgaacataatctatgtctgcatggacgaaatgaaaaaaaagcaaaaggagaaggcgtacttgtagggtaattgatttcatagaatggaggaagaaccatgtatgaggatataaaaacagcttgcctatacgttagattctcaagccataaccagact

SEQ ID NO: 19034 - DNA, 260 bp, Unknown
  Description of Unknown: LeftRegion for integrase B6035 sequence
aaacaagctactttctttaaaatagaataatatattaaaaatcgccctggcgctaccaacaccaaggcgatgtaacctgtactccgaagagtataagtcccagacaagacatattatacctttcggagtggcatttgtcgagagacagatgttatttttgtacccttttttcatatatttttagaaaggataggtgtaatatggaaaaactacgcactggtgctctgtatatcagagtctcaacagacaaacaggaagag

SEQ ID NO: 19035 - DNA, 260 bp, Unknown
  Description of Unknown: LeftRegion for integrase B6036 sequence
aaacaagctactttctttaaaatagaataatatattaaaaatcgccctggcgctaccaacaccaaggcgatgtaacctgtactccgaagagtataagtcctaagcaagacatattatacctttcggagtagcatttgtcgagagacagatgttatttttgtacccttttttcatatatttttagaaaggataggtgtaatatggaaaaactacgcactggcgctctgtatatcagagtctcaacagacaaacaggaagag

SEQ ID NO: 19036 - DNA, 260 bp, Unknown
  Description of Unknown: LeftRegion for integrase B6037 sequence
tatagaattcaagctatgatttgcgccggcgcaattgaaataagcgccctgcaggtaccaactgcagagcgctcatatatccgtactccgaaaagtaaggaccagacacatatattatacctttcggagtggcatttgtcgagagacaggtgttatttttgtaccctttttgcatatattttagaaaggataggtgtaatatggaaaaactacgtactggtgctctgtatatcagagtctcaacagacaaacaggaagag

SEQ ID NO: 19037 - DNA, 260 bp, Unknown
  Description of Unknown: LeftRegion for integrase B6038 sequence
gcagaacagtattatcaaagtcagtctatggataagcctttggaacaagcagattttgaagaagtataaataaaaaaaaaccgccccacggcggcaaccgtgaagcggtaagaggaaaaactattgcgataatagcccccaaacaaggtctattatagcatatttcctctgaaattgcaagtacaaggaggaaatttatcatgcaggcagcagcatatgcacgatacagcacagagcatcaaaccgacagcagcatcgcc

SEQ ID NO: 19038 - DNA, 260 bp, Unknown
  Description of Unknown: LeftRegion for integrase B6039 sequence
ggtgctggcaactacgagcctttcgacgtccccgctgatgccgtcgctgctgtggtgtctcgccggttcgatgcactgctcgtagatcgcgcctctgtgctttctgaggacgcggagaaacttgccgcaaccgtggcgtatataattgcctacggcggatccgtcgtgacgcctgagggcgctctgggaggccctgccgcgtgaatgccgcaatctacgctcgcgtctctactgactggcaggccgaacatggctactcg

SEQ ID NO: 19039 - DNA, 260 bp, Unknown
  Description of Unknown: LeftRegion for integrase B6040 sequence
tgggacttaccccttgcaaacgttgctactaaatttaaaaatcgccctggtgctaccaacaccaaggcgatataacccgtactccgaagagtataataggtccagacaaccatattatacctttcggaacaccatctgtcaaaggataggtgttatttttgtacctttttgcatatatttttagaaaggataggtgtaatatggaaaaactacgcactggcgctctgtatatcagagtctcaacagacaaacaggaagag

SEQ ID NO: 19040 - DNA, 260 bp, Unknown
  Description of Unknown: LeftRegion for integrase B6041 sequence
tcgataaagaagtccaaaaaatgctaaacaagcattaaaaaatcgccctggcgctaccaacaccaaggcgatgtaacctgtactccgtagagtataagtcccagacaagacatattataccctgcggagcaccatctgtcaaagattggtgttatttttgtaccctttttttcatacatttacagagaggcaggtatattatggaaaaattacgaaatggagcactctatatacgagtgtcaaccgacaagcaggaggaa

SEQ ID NO: 19041 - DNA, 260 bp, Unknown
  Description of Unknown: LeftRegion for integrase B6042 sequence
tagtagctattgctaaagaacatggttacataatttaataatcgccccggtgctaccaacaccaaggcgatataacccgtactccgaagagtataataggtccagacaaccatattatacctttcggaacaccatctgtcaaaggataggtgttatttttgtaccttttttcatatatttttagaaaggataggtgtaatatggaaaaactacgcactggcgctctgtatatcagagtctcaacagacaaacaggaagag

SEQ ID NO: 19042 - DNA, 260 bp, Unknown
  Description of Unknown: LeftRegion for integrase B6043 sequence
tgtgaggtcttttacgttatacaaatctttataataaaaaatcgccctggcgctaccaacaccaaggcgatgtaacctgtactccgaagagtataagtcccagacaagacatattatacctttcggagtggcatttgtcgagagacagatgttatttttgtacccttttttcatatatttttagaaaggataggtgtaatatggaaaaactacgcactggtgctctgtatatcagagtctcaacagacaaacaggaagag

SEQ ID NO: 19043 - DNA, 260 bp, Unknown
  Description of Unknown: LeftRegion for integrase B6044 sequence
tagaaacattcgcatctctgccggaaagctggttgctatgggatatttcctccccttttgttatgctaaattcacagacgtctgtgaatttgacacctgatttcacgcctttctatcaaatcagggacaaaatagcgtccgctgcgctatactgctcacaacggccgtattttacaagcaacaccaaaggagatgctcccatgaaaaaggcagtgatctatgctcgatacagttctgatatgcagcgcgaggaatctatc

SEQ ID NO: 19044 - DNA, 260 bp, Unknown; identical to SEQ ID NO: 19034
  Description of Unknown: LeftRegion for integrase B6045 sequence

SEQ ID NO: 19045 - DNA, 260 bp, Unknown
  Description of Unknown: LeftRegion for integrase B6046 sequence
aaagacatccagattccataaacagaaaaagggccgtgccctcagcgccggcacggcccttctccgcttacaacagagtgaaaaatatgaatcttcaaaagaaaaacgcaatgggaagtgatcccttctactactgaccctcttttattgtaacatacgctaatgttttgacaagcatttattataggaggtttttaactatgaaaaacgccgttatctacgcccgctattccagcgataagcagcgggatgaaagcatt

SEQ ID NO: 19046 - DNA, 260 bp, Unknown
  Description of Unknown: LeftRegion for integrase B6047 sequence
gaaataattattagtttaattgcgccggcgcaaattaaaagccaccctgcagctaccaacaccaaggcgatgtaacctgtactccgaagagtataaaatccagacaagacatattatacctttcggagtggcatttgtcgagagacagatgttatttttgtacccttttttcatatatttttagaaaggataggtgtaatatggaaaaactacgcactggtgctctgtatatcagagtctcaacagacaaacaggaagag

SEQ ID NO: 19047 - DNA, 260 bp, Unknown
  Description of Unknown: LeftRegion for integrase B6048 sequence
acattcccgaaggatgatgcaacccaaaaatccaaaagtattgtatcatccttccgggcagccttgcaagcggaacttttgttccccgctggctgtattttttatagccttttttaccggttgcaaattgcgccggcgcaaattacaagatcattttgctgacgtcaacaaaatggtcagagaaggaggatgatcatattatgaaacatatactatctcctgcctctgttcttgacaatgtcgttgatctctatatcaga

SEQ ID NO: 19048 - DNA, 260 bp, Unknown
  Description of Unknown: LeftRegion for integrase B6049 sequence
tgctttaaaatatcgtataaattcagacataaatttaaaaatcgccctggtgctaccaacaccaaggcgatgtaacccgtactccgaagagtataataggtccagacaactatattatacctttcggaacaccatctgtcaaaggataggtgttatttttgtacctttttgcatatatttttagaaaggataggtgtaatatggaaaaactacgcactggcgctctgtatatcagagtctcaacagacaaacaggaagag

SEQ ID NO: 19049 - DNA, 260 bp, Unknown
  Description of Unknown: LeftRegion for integrase B6050 sequence
cacgccggagcaggaagcggcaaaacgccgggaactggaacagcaactttatgaggtgttccgcaagtatgccgacaaacggcagagtgaggaagccggggcataaggttttccaaagccatcgttgatttgcggggctgctgacggtataataaaggtgtcagcagctccgtttcttttttaagaaaaggagcgacaatatgaataatcgaatagacgcaatctatgcaaggcaatcggtagacaaaaaggacagcatt

SEQ ID NO: 19050 - DNA, 260 bp, Unknown
  Description of Unknown: LeftRegion for integrase B6051 sequence
aaattcttaaaagcaactaaattcagacataaatttaaaaatcgccttggcgctaccaacaccaaggcgatgtaacctgtactccgaagagtataagtcccagacaagacatattatacctttcggagtggcatttgtcgagagacagatgttatttttgtacccttttttcatatatttttagaaaggataggtgtaatatggaaaaactacgcactggtgctctgtatatcagagtctcaacagacaaacaggaagag

SEQ ID NO: 19051 - DNA, 260 bp, Unknown
  Description of Unknown: LeftRegion for integrase B6052 sequence
gccttttatgttgtcgatacgtaaaacataaatagaaaaatcccctgccataccgcgaaatatgacagggggatgcagccggtattaccagtaccaggctacggttataatctaccatacaggaggcaatcccagaggccgattacctttatattataccatgtcggcctcacattgccatagaagggggctttatttttatgccaaaagcagataaacaaccagtaaaagccgttatatatgcccgctattcatcagac

SEQ ID NO: 19052 - DNA, 260 bp, Unknown
  Description of Unknown: LeftRegion for integrase B6053 sequence
cccacttttcatgaatgatgacaatttggctgagcgagagcttgcaatattcatggatgtaatccttctcggtaaatgtgacgagctctgggtatttggagatagcatttcagaacgcatggcggttgagattgaagttgcaaagaagcgtagacagccaattcgctattttaattctgctatgcaggaggtgaccgatcatgaatgagattagagcgattcaaacggaatacagaggttaccttttccgatccaggttg

SEQ ID NO: 19053 - DNA, 260 bp, Unknown
  Description of Unknown: LeftRegion for integrase B6054 sequence
ctcttggtttgacaccatgtaaaagatgctgtaactaaaaatcgccctggcgctaccaacaccaaggcgatgtaacctgtactccgaagagtataagtcccagacaagacatattatacctttcggagtggcatttgtcgagagacagatgttatttttgtacccttttttcatatatttttagaaaggataggtgtaatatggaaaaactacgcactggcgctctgtatatcagagtctcaacagacaaacaggaagag

SEQ ID NO: 19054 - DNA, 260 bp, Unknown
  Description of Unknown: LeftRegion for integrase B6055 sequence
aatacaagcttattatcaggcaagacaaaaacaattagaactacaaaactaaaaaaatcctctcagcaccacctgagaggatatgacagaatgcagatacaccacatatctgcagtacagaaaaagtttatctaccacgatatatgctttttctgtacccattttaccaaatttagatatgaaaagaaaggatgggtactatgttttactatatcatgtatttacgtaaatctcgtgcagacgatccaaatgaaagcata

SEQ ID NO: 19055 - DNA, 260 bp, Unknown
  Description of Unknown: LeftRegion for integrase B6056 sequence
taagggattaatcaacgatacagaaagggaccatatgaaagagaaaaataaattgaaaattctttcttagttacggcgatttcgtctggacttaagtgagattatacgctattgtttgtcctgcccaaacgggcgggacaaattttttagcctacattcaagtccataaatgaaaagagtgtggcggacaaggaggtagtatggacgacaggaaacgagcagtcgcgtatatccgtgtgtcaacgaagagcgatgcacag

SEQ ID NO: 19056 - DNA, 260 bp, Unknown; identical to SEQ ID NO: 19031
  Description of Unknown: LeftRegion for integrase B6057 sequence

SEQ ID NO: 19057 - DNA, 260 bp, Unknown
  Description of Unknown: LeftRegion for integrase B6058 sequence
accgaacaaagggacgaaataatcaataaaaataaactttcttttctttcctaattaagagccttttgtctggacttccttcgatttatacgctattgtttgtgctaccctgactgtggggtagcacaaatttttttatcaagttaaagtcctacataagtcaagggtaagtaaaataaaaagtctaaaaggaggctcgtatggatagaaaactgaaagttgcggcatacggaagggtatctactaacagtaaacagcaa

SEQ ID NO: 19058 - DNA, 260 bp, Unknown
  Description of Unknown: LeftRegion for integrase B6059 sequence
ggcttcggtccagacgtttcatactacggtcaagccttgattgacgtacaaaatcagattgttgctttatctgaatttgtcatgctgcaaggtgataaccctaaacaggatttagaaaactattcttcttttgtaagtcagaaaataacagcctttacagacgacattctgaaagactaataaaacaaaatgccccggtcgtgctgggaacacttccggggcgtgcaaagatatgtcataccagatacaacaataccgtc

SEQ ID NO: 19059 - DNA, 260 bp, Unknown; identical to SEQ ID NO: 19027
  Description of Unknown: LeftRegion for integrase B6060 sequence

SEQ ID NO: 19060 - DNA, 260 bp, Unknown
  Description of Unknown: LeftRegion for integrase B6061 sequence
acccttacatatttcagaatatggtatcagaaagatgatgatgcagccagcagatccgataatggaaatctttgatttataaataaaaatccccgcccggcgctggaacaccgaacggggaagaagctgtgatacaatcacaaccttagacaggtttattgtatcatagctccctgaaaatgtcaaggagtgatttaaatttgaaaaccgccgtaatatacgcccggtattcgtccgacaagcaaacggagcagtccatc

SEQ ID NO: 19061 - DNA, 260 bp, Unknown
  Description of Unknown: LeftRegion for integrase B6062 sequence
ggtgctggcaaatacgagcctttcgacgccccctctgatgccgttgccgccgtggtgtctcgccggtgcgatgcgctacttgtagatcgtgcctatgtgctcgctgaggacgcgcagaaacgcgctgccgccgtggcgtatataatcgcctatggcggctccgtcgtgacgcctgatggcgttctgggaggccctgccgcatgaatgccgcaatctacgcccgcgtctctaccgactggcaggccgaacacggctactct

SEQ ID NO: 19062 - DNA, 260 bp, Unknown
  Description of Unknown: LeftRegion for integrase B6063 sequence
tgtgaggtcttttacgttatacaaagctttataatgaaaaatcgccctggcgctaccaacaccaaggcgatgtaacctgtactccgtagagtataagtcccagacaagacatattataccctgcggagcaccatctgtcaaaagattggtgttatttttgtaccctttttttcatacatttacagagaggcaggtatattatggaaaaattacgaaatggagcactctatatacgagtgtcaaccgacaagcaggaggaa

SEQ ID NO: 19063 - DNA, 260 bp, Unknown
  Description of Unknown: LeftRegion for integrase B6064 sequence
cgacaaggcatataccactcatactaaaaaataataaataatcgccctggcgctaccaacaccaaggcgatgtaacctgtactccgaagagtataagtcctaagcaagacatattatacctttcggagtggcatttgtcgagagacagatgttatttttgtacccttttttcatatatttttagaaaggataggtgtaatatggaaaaactacgcactggtgctctgtatatcagagtttcaacagacaaacaggaagag

SEQ ID NO: 19064 - DNA, 260 bp, Unknown
  Description of Unknown: LeftRegion for integrase B6065 sequence
aagctcgtaaccggcagaacaaaaagcccgacttgggaaaaggctgtccatattgtcgagaatcttggcatgactccgtcagaattcagagcaattgagattgaatatgacagtcaagagtccaaaagaaaagcccactgagtggtcaagactcagcgggctttggtccaattccaaacggcagaacggacaattacattatggcagaaaaagcggtcatctacgcgagattcagctcagataagcagcgcgaggaatcg

SEQ ID NO: 19065 - DNA, 260 bp, Unknown
  Description of Unknown: LeftRegion for integrase B6066 sequence
ggcttcggtccagacgtttcatactacggtcaagccttgattgacgtacaaaatcagattgttgctttatctgaatttgtcatgctgcaaggtgataaccctaaacaggatttagaaaactattcttcttttgtaagtcagaaaataacagcctttacagacgacattctgaaagactaataaaacaaaatgccccggtcgtgctgggaacacttccgaggcatgcaaagatatgtcataccagatacaacaataccgtc

SEQ ID NO: 19066 - DNA, 260 bp, Unknown
  Description of Unknown: LeftRegion for integrase B6067 sequence
cgttatataaacattttttcaaaacaaaaccgctcctgcgccaacaggaacggctcaagactaatgccccgaaggatacaccagtacgttcaaaatatagtgtatcatcttcgggcagccaccgcaagcagaactcatgttcttctgctggctgttatttttgtacccttttttacataaaatacaaaggagctgatacaatgagcctaaaatatgcatacggatatatccgtgtatccacgcacgatcaggaagaaatc

SEQ ID NO: 19067 - DNA, 260 bp, Unknown
  Description of Unknown: LeftRegion for integrase B6068 sequence
atatgtcaaataagtaaagaccgcccctgttggcgcaaggacggctcaaagactaatgccccgaaggatacaccagtacgttcaataaatagtgtatcatcttcggagcagtcacgcaagcggaacacttgttcctcgctggctgttatttttatacgcaaaattgtgcgacgtcgcacatatatactaaggaaggtgatatgatgagtgaattaagatatgcctatggctatatccgtgtatccacgcacgatcaggaa

SEQ ID NO: 19068 - DNA, 260 bp, Unknown
  Description of Unknown: LeftRegion for integrase B6069 sequence
aaataaaaaaccgctcctgcgccaacaggaacggtcgagcgatgaaacatacaccaatatgtttctattaagttctccgaagagatacccaattccaaataatattgtatcatctccggagcagccacgcaagagaacaaaagttctcaggctgttatttttgtacccttttttacataaaatacaaaggagctgatacaatgagcctaaaatatgcatacggatatatccgtgtatccacgcacgatcaggaagaaatc

SEQ ID NO: 19069 - DNA, 260 bp, Unknown
  Description of Unknown: LeftRegion for integrase B6070 sequence
aaaaaaccgctcctgcgccaacaggaacggtcgagcgatggaaacatacgccaatatgtttctctattaagtactccgaagagatacccaatttccaaataatattgtatcatctccggagcagccgcgcaagagaacaaaagttctagggctgttatttttgtacccttttttacataaaatacaaaggagctgatacaatgagcctaaaatatgcatacggatatatccgtgtatccacgcacgatcaggaagaaatc

SEQ ID NO: 19070 - DNA, 260 bp, Unknown
  Description of Unknown: LeftRegion for integrase B6071 sequence
cattcagacagatatgtcaaataagtaagaaacgcccctgttgataacagaggcgaatcaattgaatactatacagtgccaaggcacgtacaatactccctcaacaagaatattgtatcacatttccttggcatctgtacaggtgttatttttatacgcaaatttgtgcgacgtcgcacatatatactaaggaaggtgatatgatgagtgaattaagatatgcctatggctatatccgtgtatccacgcacgatcaggaa

SEQ ID NO: 19071 - DNA, 260 bp, Unknown
  Description of Unknown: LeftRegion for integrase B6072 sequence
accgctcctgcgccaacaggaacggtcgagcgatggaaacatacgccaatatgtttctctattaagtactccgaagagatacccaatttccaaataatagtgtatcatcttcaggcagccaccgcaagcagaactcatgttcttctgctggctgttatttttgtacccttttttacataaaatacaaaggagctgatacaatgagcctaaaatatgcatacggatatatccgtgtatccacccacgatcaggaagaaatc

SEQ ID NO: 19072 - DNA, 260 bp, Unknown; identical to SEQ ID NO: 19066
  Description of Unknown: LeftRegion for integrase B6073 sequence

SEQ ID NO: 19073 - DNA, 260 bp, Unknown
  Description of Unknown: LeftRegion for integrase B6074 sequence
taaaagaaccgctcctgcgccaacaggaacggtcgagcgatggaaacatacgccaatatgtttctcattaagttctccgaagagatacctaaatccaaataatattgtatcatctccggagcagccacgcaagagaacaaaagttctcgggctgttatttttgtacccttttttacataaaatacaaaggagctgatacaatgagcgtaaaatatgcatacggctacatccgggtatccacgcacgatcaggaagaaatc

SEQ ID NO: 19074 - DNA, 260 bp, Unknown
  Description of Unknown: LeftRegion for integrase B6075 sequence
ctgcgccaacaagaacggtttcctcataatcaatatgaggtcgtatataacgtatatatccgaagagatacatacaatactcacaaaaatattgtatcatcttcgggcagctatcgcaagcggaacacttgttcctcgctggctgttatttttatacgcaaaattgtgcgacgtcgcacatatatactaaggaaggtgatatgatgagtgaattaagatatgcctatggctatatccgtgtatccacgcacgatcaagaa

SEQ ID NO: 19075 - DNA, 260 bp, Unknown
  Description of Unknown: LeftRegion for integrase B6076 sequence
ataaaaaccgctcctgcgccaacaggaacggtcgagcgatgaaacatacaccaatatgtttctctattaagtactccgaagagatacccaattttcaaataatattgtatcatctccggagcagccacgcaagagaacaaaagttctcgggctgttatttttgtacccttttttacataaaatacaaaggagttgatacaatgagcctaaaatatgcatacggatatatccgtgtatccacgcacgatcaggaagaaatc

SEQ ID NO: 19076 - DNA, 260 bp, Unknown
  Description of Unknown: LeftRegion for integrase B6077 sequence
attaaaaccgctcctgcgccaacaggaacggtcgagcgatgaaacatacgccaatatgtttctctattaagtactccgaagagatacccaatttccaaataatattgtatcatcttcggagcagccacgcaagagaacaaaagttctcgggctgttatttttgtacccttttttacataaaatacaaaggagctgatacaatgagcctaaaatatgcatacggatatatccgtgtatccacgcacgatcaggaagaaatc

SEQ ID NO: 19077 - DNA, 260 bp, Unknown
  Description of Unknown: LeftRegion for integrase B6078 sequence
atagcaaaaccgctcctgcgccaacaggaacggtcataggatgaaacatacgccaatatgtttctttcagtactccgaagagatacactgatttccaacaaatattgtatcatctccggagcagccacgcaagagaacaaaagttctcaggctgttatttttgtacccttttttacataaaatacaaaggagctgatacaatgagcctaaaatatgcatacggatatatccgtgtatccacgcacgatcaggaagaaatc

SEQ ID NO: 19078 - DNA, 260 bp, Unknown
  Description of Unknown: LeftRegion for integrase B6079 sequence
aaacgcccagcaggtcatggccatgctgggcgaaattgaacagtataatagacaacagaatgcaaagtctgctgatgaaaaagttatatctatccctgagcagataaaggaatacaaaagcctgctcgattgtggagccataacgcaggaagaatacgatattaagaaaaaagagttattgaagtcttaaggagaacactatgagcaatgcagttatatatgcaagatactcttcagacaagcagtctgaggatagcatt

SEQ ID NO: 19079 - DNA, 260 bp, Unknown
  Description of Unknown: LeftRegion for integrase B6080 sequence
aggaaaacgatgctgagattcttgagggcatccagggaaccgctatttccatttccatggagaacggagacgatgccatggagtacatcgaccagctgcgtgaggcgcttggcgaaacagaataaaagaagccccggtgcgtccgccaagacacatcaccggggctgcaaacaaaggcctcgaaaggaggcatgaacattatgtcacagaagaccgccgttctctacgcgcggttctcgtgctctaagcagcgcgaggct

SEQ ID NO: 19080 - DNA, 260 bp, Unknown
  Description of Unknown: LeftRegion for integrase B6081 sequence
aaataaaaaccgctcctgcgccaacaggaacggtcgagcgatgaaacatactccaatatgtttctgttaagttctccgaagagataccttaactccaaacaacattgtatcatctccggagcagccatgcaagagaacaaaagttctcgggctgttatttttgtacccttttttacataaaatacaaaggagctgatacaatgagcctaaaatatgcatacggatatatccgtgtatccacgcacgatcaggaagaaatc

SEQ ID NO: 19081 - DNA, 260 bp, Unknown
  Description of Unknown: LeftRegion for integrase B6082 sequence
ataaaaaaccgctcctgcgccaacaggaacggtcataggatgaaacatacgccaatatgtttctttcagtactccgaagagatacatcaattttccatttaatattgtatcatctccggagcagccacgcaagagaacaaaagttctcaggctgttatttttgtacccttttttacataaaatacaaaggagctgatacaatgagcctaaaatatgcatacggatatatccgtgtatccacgcacgatcaggaagaaatc

SEQ ID NO: 19082 - DNA, 260 bp, Unknown
  Description of Unknown: LeftRegion for integrase B6083 sequence
aataaaaaccgttcctgcgccaacaggaacggtcgagcgatgaaacatacgccaatatgtttctcattaagttctccgaagagatactcaaactgcaaataatattgtatcatctccggagcagccacgcaagagaacaaaagttctcaggctgttatttttgtacccttttttacataaaatacaaaggagctgatacaatgagcctaaaatatgcatacggatatatccgtgtatccacgcacgatcaggaagaaatc

SEQ ID NO: 19083 - DNA, 260 bp, Unknown
  Description of Unknown: LeftRegion for integrase B6084 sequence
aggagaacgacgccgagatacttgagggcatccaaggaaccgcgatatcagtttcgatggagaacggcgacgacgccatggagtacatcgaccagctgcgcgaggcacttggccaagctgaatagaagaagccccggtgcgtccgccaagacacatcaccggggcagcaaacaaaggcctcgaaaggaggcatgaacattatgtcacagaagaccgccgttctctacgcgcggttctcgtgctccaagcagcgcgaggcg

SEQ ID NO: 19084 - DNA, 260 bp, Unknown
  Description of Unknown: LeftRegion for integrase B6085 sequence
tagaattacagtaaaatactaaaaaatccccggtgttaccagcaccagggaaaacgagaaaactatagggtgtttggaacacagtacaattctctccctcacaaagattattgtatcacaaaaatccggcaccgtataggtgttatttttgtacccatttttgtgcgacgtcgcacatataattacaggaaggtgatacaatgagcctaaaatatgcatacggatatatccgtgtatccacgcacgatcaggaagaaatc

SEQ ID NO: 19085 - DNA, 260 bp, Unknown
  Description of Unknown: LeftRegion for integrase B6086 sequence
caagccatttggctcttttagcccaatgagcaaaagcattcgaaaaatgatccgtatgggataccgggtcaagattaggtgcaaaaacgttggatggtacgcgcaggggatacctgagattgttgccatgattccagatccagaagctgtgttctcttggcttgacgagtgcgagagaagtggtgaggaggttccgttcaatgccaacagctagaactgcggtgatatacgcccgcttttcgtgcaacaagcagcgcgag

SEQ ID NO: 19086 - DNA, 260 bp, Unknown
  Description of Unknown: LeftRegion for integrase B6087 sequence
aaacaagctactttctttaaaatagaataatatattaaaaatcgccctggcgctaccaacaccaaggcgatgtaacccgtactccgaagagtataataggtccagacaaccatattatacctttcggaacaccatctgtcaaaggataggtgttatttttgtacctttttgcatatatttttagaaaggataggtgtaatatggaaaaactacgcactggcgctctgtatatcagagtctcaacagacaaacaggaagag

SEQ ID NO: 19087 - DNA, 260 bp, Unknown
  Description of Unknown: LeftRegion for integrase B6088 sequence
catgggtgtcttttatttttattaaagtaaaaaccgctcctgctaccaacaggaacggcttaatgaatactatacagtgccaaggcacgtacaataccccgtgacaagagtattgtatcacatttccttggcacctgtacaggtgttatttttatacacaaatttgtgcgacgtcgcacatatatactaaggaaggtgatatgatgagtgaattaagatatgcctatggctatatccgtgtatccacgcacgatcaggaa

SEQ ID NO: 19088 - DNA, 260 bp, Unknown
  Description of Unknown: LeftRegion for integrase B6089 sequence
aaaacaggcggtttatcgcttagcttcaaagctgtgaactggtgttattcggttttagttgtgttgggaagtggtgaaaaacggcaacataaagtgctgttttcagagagaaaccccgcgcgggaacttggcggaacgcgcgcggggctggtcaagaagcagagcgctttaccgcgctcgctctaaggggtgattttagcatggtaaagaaccgcgccgccatatatgcgcgcttcagctcgcacaatcagcgctcagag

SEQ ID NO: 19089 - DNA, 260 bp, Unknown; identical to SEQ ID NO: 19084
  Description of Unknown: LeftRegion for integrase B6090 sequence

SEQ ID NO: 19090 - DNA, 260 bp, Unknown
  Description of Unknown: LeftRegion for integrase B6091 sequence
tactgctagaaaaatgattgctcagcttcaggcaatacaactttataacgaagaacagcgattgaagcctgctgatgaaaaagttatatctatccctgagcagataaaggaatacaaaagcctgctcgattgtggagccataacgcaggaagagtacgatattaagaaaaaagagttattgaagtcttaaggagaacactatgagcaatgcagttatatatgcaagatactcgtcggacaagcagtctgaggatagcatt

SEQ ID NO: 19091 - DNA, 260 bp, Unknown; identical to SEQ ID NO: 19080
  Description of Unknown: LeftRegion for integrase B6092 sequence

SEQ ID NO: 19092 - DNA, 260 bp, Unknown
  Description of Unknown: LeftRegion for integrase B6093 sequence
ctacctgctgggatatactgataagattgagaagccggcaggcgatgaaacggaccccgccaccaataagtttctggccgtaactctggccgagatcgacctgattgaagcataccggcacgccggagctgagacccaggcagcgatcagagcgatcctgcacatttaacgggaggaccccgggaagggaggacggtgccatgcgcggcgtcatttatgcgagatattcaccaggcccgcaccagacggagcagtccatc

SEQ ID NO: 19093 - DNA, 260 bp, Unknown
  Description of Unknown: LeftRegion for integrase B6094 sequence
tgggacttactccttgcaaacgttgctactaaatttaaaaatcgccctagtgctaccaacaccaaggcgatgtaacccgtactccgaagagtataataggtccagacaaccatattatacctttcggaacaccatctgtcaaaggataggtgttatttttgtacctttttgcatatatttttagaaaggataggtgtaatatggaaaaactacgcactggtgctctgtatatcagagtctcaacagacaaacaggaagag

SEQ ID NO: 19094 - DNA, 260 bp, Unknown; identical to SEQ ID NO: 19080
  Description of Unknown: LeftRegion for integrase B6095 sequence

SEQ ID NO: 19095 - DNA, 260 bp, Unknown
  Description of Unknown: LeftRegion for integrase B6096 sequence
aaaaaccgctcctgctaccaacaggaacggtcataggacgaaacatacgccaatatgtttctcattaagtactccgaagagatactcattttttccaaacaatattgtatcatctccggagcagccatgcaagagaacaaaagttctcgggctgttatttttgtacccttttttacataaaatacaaaggagctgatacaatgagcctaaaatatgcatacggatatatccgtgtatccacgcacgatcaggaagaaatc

SEQ ID NO: 19096 - DNA, 260 bp, Unknown; identical to SEQ ID NO: 19080
  Description of Unknown: LeftRegion for integrase B6097 sequence

SEQ ID NO: 19097 - DNA, 260 bp, Unknown
  Description of Unknown: LeftRegion for integrase B6098 sequence
caaaaaaccgctcctgcgccaacaggaacggtcgagcgatgaaacatacgccaatatgtttctctattaagtactccgaagagatacccaatttccaaataatattgtatcatctccggagcagccatgcaagagaacaaaagttctcaggctgttatttttgtacccttttttacataaaatacaaaggagttgatacaatgagcctaaaatatgcatacggatatatccgtgtatccacgcacgatcaggaagaaatc

SEQ ID NO: 19098 - DNA, 260 bp, Unknown
  Description of Unknown: LeftRegion for integrase B6099 sequence
tgtaatgtactccgtggtctcgaagcatagcatcgacatcaacaagctcaaggccaaggtgggctgaccaccccaaatccgacagcgctgtcggatttgccacagccgaaaagggaatgccgcctctgcggaggcggctccttaatacccggcagatagaacacttgtattattttatcgttttcagggcaggtgatcttatggatgcggcgcaatacctccgcaaatcccgcatggaggagggcatggacacggaagag

SEQ ID NO: 19099 - DNA, 260 bp, Unknown
  Description of Unknown: LeftRegion for integrase B6100 sequence
aaaaaaccgctcctgcgccaacaggaacggtcgagcgatggaaacatacgccaatatgtttctctattaagtactccgaagagatacccaatttccaaataatattgtatcatctccggagcagccacgcaagagaacaaaagttctcgggctgttatttttgtacgcttttttacataaaatacaaaggagctgatacaatgagcctaaaatatgcatacggatatatccgtgtatccacgcacgatcaggaagaaatc

SEQ ID NO: 19100 - DNA, 260 bp, Unknown
  Description of Unknown: LeftRegion for integrase B6101 sequence
gtgtacaccagaaagggctagtatgtggaaaggatgtgtgattcatgaaatatgagtcgctttttttagcttaataatggacaaaccttgatgcatagcatatataaagaggtgatgctaggtgcatgtcacaagaaacaagattcctgatgacaagcaaatttttaagtgctatgattatttacgagaggtgataaataatgatagcgctctacgggagagtctcaacagaagaacaagcgaccaaaggttacagtcta

SEQ ID NO: 19101 - DNA, 260 bp, Unknown
  Description of Unknown: LeftRegion for integrase B6102 sequence
aaaaaaaccgctcctgcgccaacaggaacggtcgagcgatgaaacatacaccaatatgtttctctattaagtactccgaagagatacccaatttccaaataatattgtatcatctccggagcagccatgcaagagaacaaaagttctcaggctgttatttttgtacccttttttacataaaatacaaaggagttgatacaatgagcctaaaatatgcatacggatatatccgtgtatccacgcacgatcaggaagaaatc

SEQ ID NO: 19102 - DNA, 260 bp, Unknown
  Description of Unknown: LeftRegion for integrase B6103 sequence
aacagttttataagtaaaaaccgcccctgttggcgcaaggacggttcaaagactaatgccccgaaggatacaccagtacgttcaataattagtgtatcatcttcgggcagtcactgcaagcggaacacttgttccttgctggctgttatttttatacgcaaaattgtgcgacgtcgcacatatatactaaggaaggtgatatgatgagtgaattaagatatgcctatggctatatccgtgtatccacgcacgatcaggaa

SEQ ID NO: 19103 - DNA, 260 bp, Unknown; identical to SEQ ID NO: 19102
  Description of Unknown: LeftRegion for integrase B6104 sequence

SEQ ID NO: 19104 - DNA, 260 bp, Unknown
  Description of Unknown: LeftRegion for integrase B6105 sequence
tcgcgtcacggatgaaaccggacatctcataagtaacaacgaagacctttttaggaacgccagagaaaaaagcgaagccgatttgatatgtaggctgttttgaaaaaagaaaaccccacgcgggaacttgccggaacgcgcgcggggctggtgagaaagcagagcgctttaccgcgctcgctctaaggagtgattttagcatggtgaagaaccgagctgccatatacgcgcgctttagctcgcacaatcagcgctcagag

SEQ ID NO: 19105 - DNA, 260 bp, Unknown
  Description of Unknown: LeftRegion for integrase B6106 sequence
aaaagaaaaccgctcctgcgccaacaggaacggtcgagcgatgaaacatacgccaatatgtttctctattaagtactccgaagagatacccaaatgcaataatattgtatcatctccggagcagccacgcaagagaacaaaagttctctggctgttatttttgtacccttttttacataaaatacaaaggagctgatacaatgagcctaaaatatgcatacggatatatccgtgtatccacacacgatcaggaagaaatc

SEQ ID NO: 19106 - DNA, 260 bp, Unknown
  Description of Unknown: LeftRegion for integrase B6107 sequence
aaatgcccagcaagtcatggccatgctgggcgaagtagaacagtataacagacggcagaatgcaaaacctgctgatgaaaaagctatatctattcctgagcagataaaggagtataaaagcctgcttgactgtggggctataacgcaggaagaatacgatattaagaaaaaagagttattgaagtcttaaggagaacactatgagcaatgcagttatatatgcaagatactcttcagacaagcagtctgaggatagcatt

SEQ ID NO: 19107 - DNA, 260 bp, Unknown
  Description of Unknown: LeftRegion for integrase B6108 sequence
ataaaaaccgctcctgcgccaacaggaacggtcgagcgatgaaacatacgccaatatgtttctctattaagtactccgaagagatacccaatttccaaataatattgtatcatcttcggagcagccacgcaagagaacaaaagttctcgggctgttatttttgtacccttttttacataaaatacaaaggagctgatacaatgagcctaaaatatgcatacggatatatccgtgtatccacccacgatcaggaagaaatc

SEQ ID NO: 19108 - DNA, 260 bp, Unknown; identical to SEQ ID NO: 19066
  Description of Unknown: LeftRegion for integrase B6109 sequence

SEQ ID NO: 19109 - DNA, 260 bp, Unknown
  Description of Unknown: LeftRegion for integrase B6110 sequence
atatgtcaaataagtaaagaccgtccctgttggcgcaaggacggctcaaagactaatgccccgaaggatacaccagtacgttcaatgaatagtgtatcatcttcggagcagtcacgcaagcggaacacctgttcctcgctggctgttatttttatacgcaaaattgtgcgacgtcgcacatatatactaaggaaggtgatatgatgagtgaattaagatatgcctatggctatatccgtgtatccacgcacgatcaagaa

SEQ ID NO: 19110 - DNA, 260 bp, Unknown
  Description of Unknown: LeftRegion for integrase B6111 sequence
attgccgatctgctgaaataaataaaaaaccgctcctgcgccaacaggaacggctcaagactaatgacccgaaggatacaccagtacgttcaaaatatagtgtatcatcttcgggcagccaccgcaagcagaactcatgttcttctgctggctgttatttttgtacccttttttacataaaatacaaaggagctgatacaatgagcctaaaatatgcatacggatatatccgtgtatccacccacgatcaggaagaaatt

SEQ ID NO: 19111 - DNA, 260 bp, Unknown
  Description of Unknown: LeftRegion for integrase B6112 sequence
aataaaaaccgctcctgcgccaacaggaacggtcataggacgaaacatacgccaatatgtttctttcagtactccgaagagatacatcaattttccaatcaatattgtatcatctccggagcagccgcgcaagagaacaaaagttctagggctgttatttttgtacccttttttacataaaatacaaaggagctgatacaatgagcctaaaatatgcatacggatatatccgtgtatccacgcacgatcaggaagaaatc

SEQ ID NO: 19112 - DNA, 260 bp, Unknown
  Description of Unknown: LeftRegion for integrase B6113 sequence
aataaaaaccgttcctgcgccaacaggaacggtcgagcgatgaaacatacgccaatatgtttctcattaagttctccgaagagatacctcaattccaatcaatattgtatcatctccggagcagccatgcaagagaacaaaagttctcgggctgttatttttgtacccttttttacataaaatacaaaggagctgatacaatgagcctaaaatatgcatacggatatatccgtgtatccacgcacgatcaggaagaaatc

SEQ ID NO: 19113 - DNA, 260 bp, Unknown
  Description of Unknown: LeftRegion for integrase B6114 sequence
attgccgatttgctgaaataaataaaaaaccgcccctgcgccaacaggaacggctcaagactaatgccccgaaggatacaccagtacgttcaaaatatagtgtatcatcttcgggcagccaccgcaagcagaactcatgttcttctgctggctgttatttttgtacccttttttacataaaatacaaaggagctgatacaatgagcctaaaatatgcatacggatatatccgtgtatccacgcacgatcaggaagaaatc

SEQ ID NO: 19114 - DNA, 260 bp, Unknown
  Description of Unknown: LeftRegion for integrase B6115 sequence
gctaaaagatttatagattaacaaaataaaaaccgctcctgctaccaacaggaacggcttaatgaatactatacagtgccaaggcacgtacaatactccctcaacaagaatattgtatcacatttccttggcatctgtacaggtgttatttttatacgcaaatttgtgcgacgtcgcacatatatactaaggaaggtgatatgatgagtgaattaagatatgcctatggctatatccgtgtatccacgcacgatcaggaa

SEQ ID NO: 19115 - DNA, 260 bp, Unknown
  Description of Unknown: LeftRegion for integrase B6116 sequence
cgagcaaccgacgagacaagaggttatatagagcgcaacgaagacctatttagaaacgcaaggaagagagacgaaggcgatttgatacgtaggatgttctgaaacagaaaaaagccccacgcggcttaacttggcggttgcgcgcggggcatggtcgaattgagcactttgcggtgctcgcttcaagaggtgattctagcatggtcaagaaccgagctgccatatatgcgcgctttagctcgcacaatcagcgctcagag

SEQ ID NO: 19116 - DNA, 260 bp, Unknown
  Description of Unknown: LeftRegion for integrase B6117 sequence
caattattccaattacttcaaaataattaaaaaccgcccctgtgccaacaggaacggcttaatgaatactatacagtgccgaggcacgtacaatactccctcaacaagaatattgtatcacatttccttggcacctgtacaggtgtattttttatacgcaaatttgtgcgacgtcgcacatatatactaaggaaggtgatatgatgagtgaattaagatatgcctatggctatatccgtgtatccacgcacgatcaggaa

SEQ ID NO: 19117 - DNA, 260 bp, Unknown; identical to SEQ ID NO: 19080
  Description of Unknown: LeftRegion for integrase B6118 sequence

SEQ ID NO: 19118 - DNA, 260 bp, Unknown
  Description of Unknown: LeftRegion for integrase B6119 sequence
cgttatataaacattttttcaaaataaaaccgctcctgcgccaacaggaacggctcaagactaatgccccgaaggatacaccagtacgttcaaaatatagtgtatcatcttcgggcagccaccgcaagcagaactcatgttcttctgctggctgttatttttgtacccttttttacataaaatacaaaggagctgatacaatgagcctaaaatatgcatacggatatatccgtgtatccacgcacgatcaggaagaaatc

SEQ ID NO: 19119 - DNA, 260 bp, Unknown
  Description of Unknown: LeftRegion for integrase B6120 sequence
aataaaaaaccgctcctgcgccaacaggaacggtcgagcgatgaaacatacgccaatatgtttctcattaagttctccgaagagatacctaaatccaaataatattgtatcatctccggagcagccacgcaagagaacaaaagttctcaggctgttatttttgtacccttttttacataaaatacaaaggagctgatacaatgagcctaaaatatgcatacgggtatatccgtgtatccacgcacgatcaggaagaaatc

SEQ ID NO: 19120 - DNA, 260 bp, Unknown
  Description of Unknown: LeftRegion for integrase B6121 sequence
atatgtcaaataagtaaagaccgtccctgttggcgcaaggacggctcaaagactaatgccccgaaggatacaccagtacgttcaatgaatagtgtatcatcttcggagcagtcacgcaagcggaacacttgttcctcgctggctgttatttttatacgcaaaattgtgcgacgtcgcacatatatactaaggaaggtgatatgatgagtgaattaagatatgcctatggctatatccgtgtatccacgcacgatcaggaa

SEQ ID NO: 19121 - DNA, 260 bp, Unknown; identical to SEQ ID NO: 19071
  Description of Unknown: LeftRegion for integrase B6122 sequence

SEQ ID NO: 19122 - DNA, 260 bp, Unknown
  Description of Unknown: LeftRegion for integrase B6123 sequence
aaataaaaaaccgctcctgcgccaacaggaacggtcgagcgatgaaacatacaccaatatgtttctattaagttctccgaagagatacccaattccaaataatattgtatcatctccggagcagccacgcaagagaacaaaagttctcaggctgttatttttgtacccttttttacataaaatacaaaggagctgatacaatgagcctaaaatatgcatacggatatatccgtgtatccacccacgatcaggaagaaatt

SEQ ID NO: 19123 - DNA, 260 bp, Unknown; identical to SEQ ID NO: 19107
  Description of Unknown: LeftRegion for integrase B6124 sequence

SEQ ID NO: 19124 - DNA, 260 bp, Unknown
  Description of Unknown: LeftRegion for integrase B6125 sequence
ctcaaaaaccgctcctgctaccaacaggaacggtcataggacgaaacatacgccaatatgtttctttcagtactccgaagagatacactgatttccaacaaatattgtatcatctccggagcagccacgcaagagaacaaaagttctcgggctgttatttttgtacccttttttacataaaatacaaaggagctgatacaatgagcctaaaatatgcatacggatatatccgtgtatccacgcacgatcaggaagaaatc

SEQ ID NO: 19125 - DNA, 260 bp, Unknown
  Description of Unknown: LeftRegion for integrase B6126 sequence
aaacaagctactttctttaaaatagaataatatattaaaaatcgccctggcgctaccaacaccaaggcgatgtaacctgtactccgaagagtataagtcctaagcaagacatattatacctttcggagtggcatttgtcgagagacagatgttatttttgtacccttttttcatataattttagaaaggataggtgtaatatggaaaaactacgcactggtgctctgtatatcagagtctcaacagacaaacaggaagag

SEQ ID NO: 19126 - DNA, 260 bp, Unknown
  Description of Unknown: LeftRegion for integrase B6127 sequence
atctttagattatttagaaggtttaacaactgaaaagactggtttaggaaaagaaaaggaagctttagtttctaattttcttgaatttttaattgaaaatggaataatcaaagatgaaaagaatattgatgaaaaaactgaaaaaatgataatggatatggtaaaaaaggaaattgctaatttaaaaaaggggagataatatgagaattgcgatatataccagaaaatctgttgctgtagaaaatagtgagagtatagaa

SEQ ID NO: 19127 - DNA, 260 bp, Unknown
  Description of Unknown: LeftRegion for integrase B6128 sequence
aatgtataaataaaatagaaatcgccaccccgttggctcagggtggctcgcatatccgaagatatactatatctgattgttcaagtcatattgtatcattttcggagcagtcttgcaagcggaactgttgttctgtgcttggctgttatttttatacgcaaatttgtgcgacgtcgcacatatatactaaggaaggtgatatgatgagtgaattaagatatgcctatggctatatccgcgtatctacacacgatcaggaa

SEQ ID NO: 19128 - DNA, 260 bp, Unknown; identical to SEQ ID NO: 19066
  Description of Unknown: LeftRegion for integrase B6129 sequence

SEQ ID NO: 19129 - DNA, 260 bp, Unknown
  Description of Unknown: LeftRegion for integrase B6130 sequence
gatcagacagaataatataaataaaagaaccgctcctgcgccaacaggaacggctcaagactaatgccccgaaggatacaccagtacgttcaaaatatagtgtatcatcttcgggcagccaccgcaagcagaactcatgttcttctgctggctgttatttttgtacccttttttacataaaatacaaaggagctgatacaatgagcctaaaatatgcatacggatatatccgtgtatccacccacgatcaggaagaaatc

SEQ ID NO: 19130 - DNA, 260 bp, Unknown; identical to SEQ ID NO: 19076
  Description of Unknown: LeftRegion for integrase B6131 sequence

SEQ ID NO: 19131 - DNA, 260 bp, Unknown; identical to SEQ ID NO: 19070
  Description of Unknown: LeftRegion for integrase B6132 sequence

SEQ ID NO: 19132 - DNA, 260 bp, Unknown
  Description of Unknown: LeftRegion for integrase B6133 sequence
gtacacgtacgtcaacggcgagcttgcccccggctcaacggccccgttctctacgatttctcatgaggttcccgagcatgcgagcgttgaggcctacgttgactgcggctggcctatgaccgaataaaagaaccccggtgcgtccgccaagacacatcaccggggcagcaaacccctcctagaaaggaggcaagcacattatgtcacagaagaccgccgttctctacgcgcggttctcgtgctccaagcagcgcgaggag

SEQ ID NO: 19133 - DNA, 260 bp, Unknown
  Description of Unknown: LeftRegion for integrase B6134 sequence
catgggtgtcttttatttttattaaagtaaaaaccgctcctgctaccaacaggaacggcttaatgaatactatacagtgccaaggcacgtacaataccccgtgacaagagtattgtatcacatttccttggcacctgtacaggtgttatttttatacacaaatttgtgcgacgtcgcacatatatactaaggaaggtgatatgatgagtgaattaagatatgcctatggctatatccgcgtatccacgcacgatcaggaa

SEQ ID NO: 19134 - DNA, 260 bp, Unknown
  Description of Unknown: LeftRegion for integrase B6135 sequence
ataaaaaccgctcctgcgccaacaggaacggtcgagcgatgaaacatacaccaatatgtttctctattaagtactccgaagagatacccaattttcaaataatattgtatcatcttcggagcagccacgcaagagaacaaaagttctcaggctgttatttttgtacccttttttacataaaatacaaaggagctgatacaatgagcctaaaatatgcatacggatatatccgtgtatccacgcacgatcaggaagaaatc

SEQ ID NO: 19135 - DNA, 260 bp, Unknown
  Description of Unknown: LeftRegion for integrase B6136 sequence
taatccacctcaataagacataagaaaaaccgcccagtgttaccagcactgaacggtcaatacatatccgaagatatgcaagtatacttagcacatatattgtatcatcttcggagcagccacgcaatcggaacatattttcggtggctgttatttttatacccattttttaatatattttaccgaggagttgatataacatgaaagacggcgctctttatatacgagtaagcacgcatatgcaggacgaactttcgcct

SEQ ID NO: 19136 - DNA, 260 bp, Unknown
  Description of Unknown: LeftRegion for integrase B6137 sequence
atatgtcaaataagtaaagaccgtccctgttggcgcaaggacggctcaaagactaatgccccgaaggatacaccagtacgttcaataaatagtgtatcatcttcggagcagtcacgcaagcggaacacttgttcctcgctggctgttatttttatacgcaaaattgtgcgacgtcgcacatatatactaaggaaggtgatatgatgagtgaattaagatatgcctatggctatatccgtgtatccacgcacgatcaagaa

SEQ ID NO: 19137 - DNA, 260 bp, Unknown
  Description of Unknown: LeftRegion for integrase B6138 sequence
gcacaacaaaatagtatgcttacataagacaacaaaaaaccgtccctactttacatagagacggctaatacacccgaagatgtacagtaattctgaacaaatatattgtatcatcttcggaaacacccgtcaacggaacatattttcgttgggtgttatttttatacatttttttaatatatatagacgaggtgatatgaatgaaaacaggagcattatatatacgtgtaagtacacacatgcaagacgaactgtccccc

SEQ ID NO: 19138 - DNA, 260 bp, Unknown; identical to SEQ ID NO: 19118
  Description of Unknown: LeftRegion for integrase B6139 sequence

SEQ ID NO: 19139 - DNA, 260 bp, Unknown
  Description of Unknown: LeftRegion for integrase B6140 sequence
aagtaaaaaccgcccctactccaatagggacggtcgagcgatggaaacatactccaatatgtttctattaagttctccgaagagatacctaaatgcaaataatattgtatcatctccggagcagccacgcaagagaacaaaagttctcaggctgttatttttgtacccttttttacataaaatacaaaggagttgatacaatgagcctaaaatatgcatacggatatatccgtgtatccacgcacgatcaggaagaaatc

SEQ ID NO: 19140 - DNA, 260 bp, Unknown
  Description of Unknown: LeftRegion for integrase B6141 sequence
tagaattacagtaaaatactaaaaaatccccggtgttaccagcaccagggaaaacgagaaaactatagggtgtttggaacacagtacaattctctccctcacaaagattattgtatcacaaaaatccggcaccgtataggtgttatttttgtacccatttttgtgcgacgtcgcacatataattacaggaaggtgatacaatgagcgtaaaatatgcatacggatatatccgtgtatccacgcacgatcaggaagaaatc

SEQ ID NO: 19141 - DNA, 260 bp, Unknown
  Description of Unknown: LeftRegion for integrase B6142 sequence
acagttttataagtaaaaaccgcccctgttggcgcaaggacggttcaaagactaatgccccgaaggatacaccagtacgttcaataattagtgtatcatcttcgggcagtcactgcaagcggaacacttgttcctcgctggctgttatttttgtactcatttttagtgcgacgtcgcacatatatactaaggaaggtgatatgatgagtgaattaagatatgcctacggttatatccgtgtatccacgcacgatcaggaa

SEQ ID NO: 19142 - DNA, 260 bp, Unknown
  Description of Unknown: LeftRegion for integrase B6143 sequence
taaaaaaaccgctcctgcgccaacaggaacggtcgagcgatgaaacatacaccaatatgtttctcattaagttctccgaagagatactcaaactgcaaataatattgtatcatctccggagcagccacgcaagagaacaaaagttctcgggctgttatttttgtacccttttttacataaaatacaaaggagctgatacaatgagcctaaaatatgcatacggatatatccgtgtatccacgcacgatcaggaagaaatc

SEQ ID NO: 19143 - DNA, 260 bp, Unknown; identical to SEQ ID NO: 19120
  Description of Unknown: LeftRegion for integrase B6144 sequence

SEQ ID NO: 19144 - DNA, 260 bp, Unknown
  Description of Unknown: LeftRegion for integrase B6145 sequence
tttaaaagaataagtaaaaaccgctcctgcgtcaacaggaacggctcaaagactaatgccccgaaggatacaccagtacgttcaataaatagtgtatcatcttcggagcagtcacgcaagcggaacacttgttcctcgctggctgttatttttatacgcaaaattgtgcgacgtcgcacatatatactaaggaaggtgatatgatgagtgaattaagatatgcctatggctatatccgcgtatccacgcacgatcaggaa

SEQ ID NO: 19145 - DNA, 260 bp, Unknown
  Description of Unknown: LeftRegion for integrase B6146 sequence
cgttatataaacattttttcaaaacaaaaccgctcctgcgccaacaggaacggctcaagactaatgccccgaaggatacaccagtacgttcaaaatatagtatatcatcttcgggcagccaccgcaagcagaactcatgttcttctgctggctgttatttttgtacccttttttacataaaatacaaaggagctgatacaatgagcctaaaatatgcatacggatatatccgtgtatccacgcacgatcaggaagaaatc

SEQ ID NO: 19146 - DNA, 260 bp, Unknown
  Description of Unknown: LeftRegion for integrase B6147 sequence
taaaagcgcattgattccttcagatgaaatccggtcagaagaacttctggcggaacaaaaatttgaagcgtttatcacttcgctggcacatatcatcgagaaatatggtatgagagtgctgggcgaggttgacggagctgcgtgagaatcgcagctttacataggatattttccaaaagtaaattttggaggtatgaattatgaatcgatatggaaaacgctgtgttttgtatccgagggtcagcacagagatgcaagtg

SEQ ID NO: 19147 - DNA, 260 bp, Unknown
  Description of Unknown: LeftRegion for integrase B6148 sequence
gctgaataaaaaaaagaaatcgccaccccgttggctcagggtggctcgcatatccgaagatatactatatctgattgttcaagtcatattgtatcatcttcggagcagtcttgcaagcggaacacttgttccttgctggctgttatttttatacgcaaatttgtgcgacgtcgcacatatatactaaagaaggtgatatgatgagtgaattaagatatgcctatggctatatccgtgtatccacgcacgatcaggaagaa

SEQ ID NO: 19148 - DNA, 260 bp, Unknown
  Description of Unknown: LeftRegion for integrase B6149 sequence
tataataactatttttcgaaaatatgtcaacagcccggacggcaatccggactgctgataaaaacactctgatgtgatacgcaatacatacagaatgccccaaacaagcatattgtatcacatcagaacacccgattcaacgcaacaggtgttctttttgtacccatttttagataaacataggataaggatgtgatcgtatgaaacaattaaaagaagtatgcgcctatattcgagtctctaccggcaagcaggaggag

SEQ ID NO: 19149 - DNA, 260 bp, Unknown
  Description of Unknown: LeftRegion for integrase B6150 sequence
caacaaaaaactcgaaataaaatgaagaaaaccgcccctgcgccaacagagacggtaatacatatccgaagatatgcaatctgaagccaagaatattgtatcatcttcgaaacagtttaacaatcagaacatatattctattgttagctgttatttttgtaccctttcatcaatacaatcagataaaggagtgatacagtatgaaaatcggagcattatatgtccgtgtcagtactcataaccaagatgagttatcacca

SEQ ID NO: 19150 - DNA, 260 bp, Unknown
  Description of Unknown: LeftRegion for integrase B6151 sequence
gcttcgcaatttggaaaacatctgcaagctaaaatccaagagcaagtgaacagcgaaagcaattcttctcttttacttgaacagatgaacgaattgtttaacaatgtttccaaattgtccgaaactgaacaaaaagctttttataccggacttgtaaaagggatagagcgttgggaaaatgaacagaagggggaataataatgccggaagcattaaacgcggtcatatacgcccgctattcctccgatcgtcagacagaa

SEQ ID NO: 19151 - DNA, 260 bp, Unknown
  Description of Unknown: LeftRegion for integrase B6152 sequence
agagagttatcatgttaacgaagaaaaaccgcccggtattggcgtaccgaacggctttgaatatatccgaagatataccataatttagcaaatatattgtatcatcttcgggcacagcctgcaatcggaacatttgttcaacgctggctgttatttttgtacctatttttacatacattattcaagcaagaggtgatataatgcaagatattatttatggtgccctctatatccgtgtaagcacccacggaaaacaggaa

SEQ ID NO: 19152 - DNA, 260 bp, Unknown
  Description of Unknown: LeftRegion for integrase B6153 sequence
ccgttacgctggaagaatccggctatacctataccgcaaactaaaaaaaacgccgcccgctgcaaacaggcgacgttcttgccgggcgcgtgttccggcgctctgctgctgcaaacggcaaagcgcccgcgtcgggcggcggttcgttagaccgcccttattataacacgcgccctcgaaaaataaaagggggctatctcatgcgcgttgttggttatgcgcgtgtatctaccagggaacaggccgaccacggctattct

SEQ ID NO: 19153 - DNA, 260 bp, Unknown
  Description of Unknown: LeftRegion for integrase B6154 sequence
accgttacgctggaagaatccggctatacctataccgcaaactaaaaaaacgccgcccgctgcaaacaggcgacgttcttgccgggcgcgtgttccggcgctctgctgctgcaaacggcaaagcgcccgcgtcgggcggcggttcgttagaccgcccttattataacacgcgccctcgaaaaataaaagggggctatctcatgcgcgttgttggttatgcgcgtgtatctaccagggaacaggccgaccacggctattct

SEQ ID NO: 19154 - DNA, 260 bp, Unknown
  Description of Unknown: LeftRegion for integrase B6155 sequence
gtatcgttggattatcttgaggggttatcggatgatagaaacggaataactaaagagaaggaagctcttgtatctaattttttaaaatatttagttgaaactgggataataaaagatgaaaataatatagataaatccaccgaagaattaatattagcaatggttagaaaagaaattgcaaaattaaaggatggtgattaatgttgagaatagctatttatactagaaagtcagtttttaaagagaatagcgagagtata

SEQ ID NO: 19155 - DNA, 260 bp, Unknown
  Description of Unknown: LeftRegion for integrase B6156 sequence
ttttggaaagattacaaatacaataacaaacagcccggacggcaatccggactgctgataaaaacactctgatgtgatacgcaatacatacagaatgccccaaacaagcatattgtatcacatcagagcacccgattcaacgcaacaggtgttctttttgtacccatttttagataaacataggataaggatgtgatcgtatgaaacagttaaaagaagtatgcgcctatattcgcgtctctaccggcaagcaggaggag

SEQ ID NO: 19156 - DNA, 260 bp, Unknown
  Description of Unknown: LeftRegion for integrase B6157 sequence
accgttacgctggaagaatccggctatacctataccgcaaactaaaaaaacgccgcccgctgcaaacaggcgacgttcttgccgggcgcgtgttccggcgctttgctgctgcaaacggcaaagcgcccgcgtcgggcgtcggttcgttagaccgcccttattataacacgcgccctcgaaaaataaaagggggctatctcatgcgcgttgttggttatgcgcgtgtatctaccagggaacaggccgaccacggctattct

SEQ ID NO: 19157 - DNA, 260 bp, Unknown
  Description of Unknown: LeftRegion for integrase B6158 sequence
aggaaatcacagaaaaatggataggctattttggacagatcgattactattgctaaaataaaaaaatcccccttcctgcgccaacaggaaagggaatttcataaagcggtcgtaagatacaaccacacttagcaactgtattgtatcataagaccgctctttttgctataccctaaatataggaaaaggaggtcttttgtatggtagctatttacgcaagacaatccatcgacaaaaaagacagcatcagcatcgaaagc

SEQ ID NO: 19158 - DNA, 260 bp, Unknown; identical to SEQ ID NO: 19154
  Description of Unknown: LeftRegion for integrase B6159 sequence

SEQ ID NO: 19159 - DNA, 260 bp, Unknown
  Description of Unknown: LeftRegion for integrase B6160 sequence
gtcctcaacgcgcttcaagataagggccttgagattatcagggtagaaaccaactctgttcctgaccaaggtatcagcggcgcagaccgttacgacacgctcataacgtacagatagcaaaatgccctgtatccatccgccaagaccagatacagggcgcgccattccgtagacaactgaaaaggcaaggtgataataccatggcaaagggaaaccgtgctgccatttatgcacgttttagctcgcacaaccagcgagac

SEQ ID NO: 19160 - DNA, 260 bp, Unknown
  Description of Unknown: LeftRegion for integrase B6161 sequence
accgttacgctggaagaatccggctatacctataccgcaaactaaaaaaacgccgcccgctgcaaacaggcgacgttcttgccgggcgcgtgttccggcgctctgctgctgcaaacggcaaagcgcccgcgtcgggcggcggttcgttagaccgcccttattataacacgcgccctcgaaaaataaaagggggctatttcatgcgcgttgttggttatgcgcgtgtatctaccagggaacaggccgaccacggctattct

SEQ ID NO: 19161 - DNA, 260 bp, Unknown
  Description of Unknown: LeftRegion for integrase B6162 sequence
caccgttacgctggaagaatccggctatacctataccgcaaactaaaaaacgccgcccgctgcaaacaggcgacgttcttgccgggcgcgtgttccggcgctctgctgctgcaaacggcaaagcgcccgcgtcgggcggcggttcgttagaccgcccttattataacacgcgccctcgaaaaataaaagggggctatctcatgcgcgttgttggttatgcgcgtgtatctaccagggaacaggccgaccacggctattct

SEQ ID NO: 19162 - DNA, 260 bp, Unknown
  Description of Unknown: LeftRegion for integrase B6163 sequence
ctcctgcgccaacaggaacggtcaactggggaagcacacgccaatgtgctttagtaactccgaagagatactgtcttaccaaagaatattgtatcatcttcggtgcagccacgcaagcggaacacttgttcctcgctggctgttatttttatactcatcttccggctcttgccggaataaactcaaccgaggtgatgtaaatggaaactaaatatggatatggttatgtcagagtgtctacagataagcaggaagaactc

SEQ ID NO: 19163 - DNA, 260 bp, Unknown
  Description of Unknown: LeftRegion for integrase B6164 sequence
taatttcacaatcacagcgcaaagtaaaaaccgctcctgctaccaacaggaacggcttaatgaatactatacagtgccaaggcacgtacaataccccgtgacaagagtattgtatcacacttccttggcacctgtacaggtgttatttttatactcattttttgtgcgacgtcgcacatatattataggaaggtgatactatgaatgaagtaagatatgcttttgcatatatccgtgtatccacgcacgatcaggaagaa

SEQ ID NO: 19164 - DNA, 260 bp, Unknown
  Description of Unknown: LeftRegion for integrase B6165 sequence
tcttttgtatatataataactatttttcgaaaatatgtcaacagcccggacggcaatccggactgctgattcaaacactctgatatgatacagaatgccccaaacaagcatattgtatcacatcagagcacctgattcaacgcaacaggtgttctttttgtacccatttttagataaacataggataaggatgtgatcgtatgaaacaattaaaagaagtatgcgcctatattcgtgtctctaccggcaagcaggaggaa

SEQ ID NO: 19165 - DNA, 260 bp, Unknown
  Description of Unknown: LeftRegion for integrase B6166 sequence
aaaatgttgttaatcatagaataaagtcaacagcccggacggcaatccggactgctgataaaaacactctgatgtgatacgcaatacatacagaatgccccaaacaagcatattgtatcacatcagaacacccgattcaacgcaacaggtgttctttttgtacccatttttagataaacataggataaggatgtgatcgtatgaaacaattaaaagaagtatgcgcctatattcgagtctctaccggcaagcaggaggag

SEQ ID NO: 19166 - DNA, 260 bp, Unknown; identical to SEQ ID NO: 19152
  Description of Unknown: LeftRegion for integrase B6167 sequence

SEQ ID NO: 19167 - DNA, 260 bp, Unknown; identical to SEQ ID NO: 19152
  Description of Unknown: LeftRegion for integrase B6168 sequence

SEQ ID NO: 19168 - DNA, 260 bp, Unknown
  Description of Unknown: LeftRegion for integrase B6169 sequence
gcagccgtcgcccattgttaggagatgcgggagtgccgccccgcctgctataccattttgttgatattaacaaaatggtataaaaaataacccccagtgttggcacaccgaggactattttttattatttacacaattatttgttagtacacttttattataccacacattggtgtaatatgcaagcagaaaggattaagatgaaagcagtaatatacgcccgctatagcagcaacaatcaaacagagcagagcatagaa

SEQ ID NO: 19169 - DNA, 260 bp, Unknown
  Description of Unknown: LeftRegion for integrase B6170 sequence
tgccggtgctggaagatctggcggaatatttccgtgaaaattaacctaatctaaaaaataaaaaaatcccccttcctgcgccaacaggaaagggaatttcataaagcggtcgtaagatacaaccacatgtcgcaactgtattgtatcataagaccgctctttttgctataccctaaatataggaaaaggaggtcttttgtatggtagctatttacgcaagacaatccatcgacaaaaaagacagcatcagcatcgaaagc

SEQ ID NO: 19170 - DNA, 260 bp, Unknown; identical to SEQ ID NO: 19152
  Description of Unknown: LeftRegion for integrase B6171 sequence

SEQ ID NO: 19171 - DNA, 260 bp, Unknown
  Description of Unknown: LeftRegion for integrase B6172 sequence
tatgaatgaagctttttcttaaacagtaatgctacgtgatatggaattttatttaaaataaaaaaattccctctcctgttggcgcaggaaagggaatttcataaagcggtcgtaaaatacaaccacacttagcaactgtattgtatcataagaccgctctttttgctataccctaaatataggaaaaggaggtcttttgtatggtagctatttacgcaagacaatccatcgacaaaaaagacagcatcagcatcgaaagc

SEQ ID NO: 19172 - DNA, 260 bp, Unknown
  Description of Unknown: LeftRegion for integrase B6173 sequence
gtcgctgaacatcctgccggaacgctgtgcgctggtagagagcgagccggagcgcacccaagggctgcggcagatgctggtggacaactactcggtgttctacattgtgggcgaggataccgtgtcggtggctcgtgtgctgtacagtgcatccgaccttgtgcgccgcctgcggagaatgaagtgaaaggggtattcgcatgaccgccgtaatctacgctcgctattccagcgataatcagcgcgaagaatccatcgaa

SEQ ID NO: 19173 - DNA, 260 bp, Unknown; identical to SEQ ID NO: 19153
  Description of Unknown: LeftRegion for integrase B6174 sequence

SEQ ID NO: 19174 - DNA, 260 bp, Unknown
  Description of Unknown: LeftRegion for integrase B6175 sequence
cgttgtatttgcaagcgaaaagtatcaacctatatatgcaaatgaaattagtcacttccaaatattaggaaggctatgtactgtaatcacaagttatgatgatgaagaataacgaaaaataaccatctttcgatgattattcccctacctcattcggctatctaggctcacattataacattttaagaaaaggaaacaatatgaaagaacttataccagccgttatatatgcaagattttcttcatctggacaacgtgaa

SEQ ID NO: 19175 - DNA, 260 bp, Unknown
  Description of Unknown: LeftRegion for integrase B6176 sequence
gtcactgaacatcctgccggaacgctgtgcgctagtggaaagcgagccggagcgcacccaagggctgcggcagatgctggtggataactactcggtgttctacattgtgggcgatgataccgtgtcggtggctcgtgtgctgtacagtgcatctgaccttgtgcgccgcctgcggagaatgaagtgaaaggggtgtttgcatgaccgccgtgatctatgcccgctattccagcgacaaccagcgcgaagaatccatcgaa

SEQ ID NO: 19176 - DNA, 260 bp, Unknown
  Description of Unknown: LeftRegion for integrase B6177 sequence
ataaaaaccgccccttcgccaaaagggacggctccggaagaaacactcgccaatgtgcttcttgggtaactccgaagagatactactcaaccaaggaatattgtatcatcttcggtcagtcagtgcaagtggaacgcacgttcctcgctggctgttatttttatacttattttcacataaaataaagaaggtgatgtaacatggaaactaaatatggatacggttatgtccgggtgtccacagataagcaggaagaactt

SEQ ID NO: 19177 - DNA, 260 bp, Unknown
  Description of Unknown: LeftRegion for integrase B6178 sequence
aaaagaaataaaaaagaaatcgccacccagttggctcagggtggctcgcatatccgaagatatactatatctgattgttcaagtcatattgtatcatcttcgggcagctatcgcaagcggaacatctgttctttgctggctgttatttttgtactcatttttagtgcgacgtcgcacatatattataggaaggtgatactatgaatgaagtaagatatgcttttgcatatatccgtgtatccacgcacgatcaggaagaa

SEQ ID NO: 19178 - DNA, 260 bp, Unknown
  Description of Unknown: LeftRegion for integrase B6179 sequence
aaacacgacgttcgtcgataccccgtccaagggcgagtccgagccgttcgagatttcctgcttcaacatgcccgagcactcctcgttcgaggtatacgcccaggtctggtagcggcaaagtgaaaccccgcaggtcgaagcgcgccaacgctgctgcggggtttaccagatagccgcccgtttggagggcatcctagattatgccagaagatataaagaccgccgtcatatacgcccgcttctcgtgctcgaagcagcgc

SEQ ID NO: 19179 - DNA, 260 bp, Unknown
  Description of Unknown: LeftRegion for integrase B6180 sequence
tattctcctgataaaatcgggattcaaagtttttaattgggtactacacgcacaacatttattaaaacctgcttaaataaaaacgctccgcccatgttaccattatgaacgaagcaaagtattcaattcacttttttcctcgatgcggctcatcaagggattcattcaactgttatcactatttaagggggtgatccaatttgaaagccgttatatatgcccgcttttccagccacaaccagcgcgaagagtccatcgaa

SEQ ID NO: 19180 - DNA, 260 bp, Unknown
  Description of Unknown: LeftRegion for integrase B6181 sequence
aaacacgacgttcgtcgataccccgtccaagggcgagtccgagccgttcgagatttcctgcttcaatatgcccgagcactcctcgttcgaggtatacgcccaggtctggtagcggcaaagtgaaaccccgcaggtcgaagcgcgccaacgctgctgcggggtttaccagatagccgcccgtttggagggcatcctagattatgccagaagatataaagaccgccgtcatatacgcccgcttctcgtgctcgaagcagcgc

SEQ ID NO: 19181 - DNA, 260 bp, Unknown; identical to SEQ ID NO: 19153
  Description of Unknown: LeftRegion for integrase B6182 sequence

SEQ ID NO: 19182 - DNA, 260 bp, Unknown
  Description of Unknown: LeftRegion for integrase B6183 sequence
aaaaaaccgtcccttcgccaaaagggacggcactggaagaaacacacgccaatgtgcttcttttggtaactccgaagagatactactcaaccaaagaatattgtatcatcttcggtcagtcagtgcaagcggaacgcacgttcctcgctggctgttatttttatacttattttcacataaaataaagaaggtgatgtaacatggaaactaaatatggatacggttatgtccgggtgtccacggataagcaggaagaactt

SEQ ID NO: 19183 - DNA, 260 bp, Unknown
  Description of Unknown: LeftRegion for integrase B6184 sequence
cgttacgctggaagaatccggctatacctataccgcaaactagaaaaaaacgccgcccgctgcaaacaggcgacgttcttgccgggcgcgtgttccggcgctctgctgctgcaaacggcaaagcgcccgcgtcgggcggcggttcgttagaccgcccttattataacacgcgccctcgaaaaataaaagggggctatctcatgcgcgttgttggttatgcgcgtgtatctaccagggaacaggccgaccacggctattct

SEQ ID NO: 19184 - DNA, 260 bp, Unknown
  Description of Unknown: LeftRegion for integrase B6185 sequence
ctcctgcgccaacaggaacggtcaactggggaagcacacgccaatgtgctttagtaactccgaagagatactgtcttaccaaagaatattgtatcatcttcggtgcagccacgcaagcggaacacttgttcctcgctgactgttatttttatactcatcttccggctcttgccggaataaactcaaccgaggtgatgtaaatggaaactaaatatggatatggttatgtcagagtgtctacagataagcaggaagaactc

SEQ ID NO: 19185 - DNA, 260 bp, Unknown; identical to SEQ ID NO: 19153
  Description of Unknown: LeftRegion for integrase B6186 sequence

SEQ ID NO: 19186 - DNA, 260 bp, Unknown
  Description of Unknown: LeftRegion for integrase B6187 sequence
atccctgaacatcctgccagagcgctgtgcgctagtggaaagtgagccggagcgcactcaagggctgcggcagatgctggtggacaactactcggtgttctacattgtgggcggggatgctgtttcggtggctcgtgtgctgtacagcgcatccgaccttgtgcgccgcctgcggagaatgaagtgaaaggggtgtttgcatgaccgccgtgatttacgcccgctattccagcgataaccagcgcgaagaatccatcgaa

SEQ ID NO: 19187 - DNA, 260 bp, Unknown
  Description of Unknown: LeftRegion for integrase B6188 sequence
ataaaaccgccccttcgccaaaagggacggcactggaagaaacacacgccaatgtgcttctttgggtaactccgaagagatactactcaaccaaagaatattgtatcatcttcgggcagtcagtgcaagcggaacacacgttcctcgctggctgttatttttatacttattttcacataaaataaagaaggtgatgtaacatggaaactaaatatggatacggttatgtccgggtgtccacggataagcaggaagaactt

SEQ ID NO: 19188 - DNA, 260 bp, Unknown
  Description of Unknown: LeftRegion for integrase B6189 sequence
aagtgctcaacggactccaggataaaggactcgaaattatccgcgttgagacaaactcggttcccaatcagggtatcggcggagcagaccgctacgacacgctcattacgtatcgatagcaaaatgccctgcactcggtcttggcggattagtgcagggctcgccattccagaaaaatgaaaaggcaaggtgataataccatgaccaaaggtagtcgtgcggccatctatgcacgctttagctcgcacaaccagcgcgat

SEQ ID NO: 19189 - DNA, 260 bp, Unknown
  Description of Unknown: LeftRegion for integrase B6190 sequence
accgttacgctggaagaatccggctatacctataccgcaaactaaaaaaacgccgcccgctgcaaacaggcgacgttcttgccgggcgcgtgttccggcgctctgctgctgcaaacagcaaagcgcccgcgtcgggcggtggttcgttagaccgcccttattataacacgcgccctcgaaaaataaaagggggctatctcatgcgcgttgttggttatgcgcgtgtatctaccagggaacaggccgaccacggctattct

SEQ ID NO: 19190 - DNA, 260 bp, Unknown
  Description of Unknown: LeftRegion for integrase B6191 sequence
ttgaaaagtggctttcctacttcggtagtatctcttacttctgctaactggttgtcacctctctcgcgggaggtgtggattgaaaaaaagaaatatcaaaatgtgtccgacttggacacattagcaccccgtcccggctgtggccggggcagggtgcttgttaattatcaaaatccctagctatggacaggggggattccatggacgcagcacaatacctccgcaagagccgtatggaggagggcctggacaccgaggag

SEQ ID NO: 19191 - DNA, 260 bp, Unknown
  Description of Unknown: LeftRegion for integrase B6192 sequence
gtacaaaaaaaggctgataacctttctggagtatgggaaaatctcaaaaaagttagaaaaaagaagcgatttgtgatagactttccaaacctttgacggtataatccttgctaatcctagcggggctataccgtcaaatttttatacactgttcgaagcccgtcgcaaaggatgaagaaacaagggaaataggagaaaacatgcaggtaacaaagataacaaaaacaatatgcgaaaagccaagggtgtgcgcttatgca

SEQ ID NO: 19192 - DNA, 260 bp, Unknown
  Description of Unknown: LeftRegion for integrase B6193 sequence
accgttacgctggaagaatccggctatacctataccgcaaactaaaaaaacgccgcccgctgcaaacaggcgacgttcttgccgggcgcgtgttccggcgctctgctgctgcaaacggcaaagcgcccgcgtcgggcggcggttcgttagaccgcccttattataacacgcgccctcgaaaaataaaagggggctatctcatgcgcgttgttggttatgcgcgtgtatctaccagagaacaggccgaccacggctattct

SEQ ID NO: 19193 - DNA, 260 bp, Unknown
  Description of Unknown: LeftRegion for integrase B6194 sequence
cgggcagccgtcacccattgttaggagatgcgggagtgccgccccgcctgctataccattttgccgacgttgacaaaatggtataaaagaaaaccgcccagtgcggcaacactggacggaaaaaataaaaataacaaaaagtttgtgcattgcttattatatcatattttgatatggtaagcaagcggaaaggaattaaaatgaaagcagtaatctacgcccgctatagcagtaataaccaaacagagcagagcatagag

SEQ ID NO: 19194 - DNA, 260 bp, Unknown
  Description of Unknown: LeftRegion for integrase B6195 sequence
cttgaatacgcgaattaattaagaaaaaccgcccggtattggcgtaccgaacggctttgaatatatccgaagatataccataatttagcaaatatattgtatcatcttcggaaacagcccgcaagcagaacgtctgttcaacgttggctgttatttttgtacctatttttacatacattattcaagcaagaggtgatataatgcaagatatgatttatggtgccctctatatccgtgtaagtacccacggaaaacaggaa

SEQ ID NO: 19195 - DNA, 260 bp, Unknown
  Description of Unknown: LeftRegion for integrase B6196 sequence
ttcacatgtaaataacttaaaaccgccccggtacgccaataccggagcagttctagcacaatccgtagattatgcggtgttctctcacaagaatattgtatcatcttcggtgcagccgcacaatccagaacatttgtgcgctgttatttttatacacattttttatgctatttttgaataaaatcaaccgaggtgatgtaatgaaaactaaatatggatatggctatgtacgcgttagcacagacaagcaggaagaactt

SEQ ID NO: 19196 - DNA, 260 bp, Unknown
  Description of Unknown: LeftRegion for integrase B6197 sequence
aaaacattgctttcttctgcaaaataacaacagcccggacggcaatccggactgctgataaaaacactctgatgtgatacgcaatacatacagaatgccccaaacaagcatattgtatcacatcagaacacccgattcaacgcaacaggtgttctttttgtacccatttttagataaacataggataaggatgtgatcgtatgaaacaattaaaagaagtatgcgcctatattcgagtctctaccggcaagcaggaggag

SEQ ID NO: 19197 - DNA, 260 bp, Unknown
  Description of Unknown: LeftRegion for integrase B6198 sequence
caaacgattggaaaacattgctttcttctgcaaaataacaacagcccggactgcaatccaggctgctgataaaaacactctgatgtgatacagaatgccccaaacaagcatattgtatcacatcagagcacccgattcaacgcaacaggtgttctttttgtacccatttttagataaacataggataaggatgtgatcgtatgaaacaattaaaagaagtatgcgcctatattcgtgtctctaccggcaagcaggaggag

SEQ ID NO: 19198 - DNA, 260 bp, Unknown
  Description of Unknown: LeftRegion for integrase B6199 sequence
gtcgctggacatcctgccggaacgatgtgcgctggtggaaagtgagccggagcgcacccaagggctgcggcagatgctggtggacaactactcggtgttctacattgtgggcgaggatgccgtgtcggtggctcgtgtgctgtacagtgcatccgaccttgtgcgccgcctgcggagaatgaagtgaaaggggtgttcgcatgaccgccgtgatctatgctcgctattccagcgataaccagcgtgaggaatccatcgaa

SEQ ID NO: 19199 - DNA, 260 bp, Unknown
  Description of Unknown: LeftRegion for integrase B6200 sequence
aaataaaacggaaaaaccgctcctgctaccaacaggaacggctcaaagactaatgccccgaaggatacaccagtacgttcaataattagtgtatcatcttcggagcagtcacgcaagcggaacatctgttctttgctggctgttatttttatactcattttttgtgcgacgtcgcacatatattataggaaggtgatactatgaatgaagtaagatatgcttttgcatatatccgtgtatccacgcacgatcaggaagaa

SEQ ID NO: 19200 - DNA, 260 bp, Unknown; identical to SEQ ID NO: 19187
  Description of Unknown: LeftRegion for integrase B6201 sequence

SEQ ID NO: 19201 - DNA, 260 bp, Unknown
  Description of Unknown: LeftRegion for integrase B6202 sequence
aaacacgacgttcgtcgataccccgtccaagggcgagtccgagccgttcgagatttcctgcttcaacatgccagagcactcctcgttcgaggtatacgcccaggtctggtagcggcaaagtgaaaccccgcaggtcgaagcgcgccaacgctgctgcggggtttaccagatagccgcccgtttggagggcatcctagattatgccagaagatataaagaccgccgtcatatatgcccgcttctcgtgctcgaagcagcgc

SEQ ID NO: 19202 - DNA, 260 bp, Unknown; identical to SEQ ID NO: 19152
  Description of Unknown: LeftRegion for integrase B6203 sequence

SEQ ID NO: 19203 - DNA, 260 bp, Unknown
  Description of Unknown: LeftRegion for integrase B6204 sequence
ataaaaaccgccccttcgccaaaagggacggctccggaagaaacactcgccaatgtgcttcttgggtaactccgaagagatactactcaaccaaggaatattgtatcatcttcggtcagtcagtgcaagcggaacgcacgttcctcgctggctgttatttttatacttattttcacataaaataaagaaggtgatgtagcatgaaaactaaatacggatacggttatgtccgggtgtccacagataagcaggaagaactt

SEQ ID NO: 19204 - DNA, 260 bp, Unknown
  Description of Unknown: LeftRegion for integrase B6205 sequence
tcacacgaacatttttgtcaatttaaaaccgccctgctctaccaaagcaaggcggcaagctcccgaatgatacagaagccctcaacaagcacattgtatcattctcggagcagctacgcaagcggaacacccgttccacgctggctgttatttttgtatccaaaaatcaatacaatatagagaaagaggtgtaatgtgctatgaaagaaaaagtttcagaacgcaaaacaggggcaatctacatccgtgtatccaccgac

SEQ ID NO: 19205 - DNA, 260 bp, Unknown
  Description of Unknown: LeftRegion for integrase B6206 sequence
taacaaaagaataataaaaattccccggtgtctaccaaacaccagggaaaatcccgagtaatatatacggcgaaggattcgctcgatacagtactccctcaacaagaatattgtatcacaaaaatccggcaccgtataggtgttatttttgtacccatttttgtgcgacgtcgcacatataattacaggaaggtgatacaatgagcgtaaaatatgcatacggctatatccgggtatccacacacgatcaggaagaaatc

SEQ ID NO: 19206 - DNA, 260 bp, Unknown
  Description of Unknown: LeftRegion for integrase B6207 sequence
aataacagtagttacaaataaaaacgccccagtgttaccagcactggggcattgagaaaactatactttgaaaggaacttgcggtataatcctctccctcacagagactattatatcacaaattcctggcaccgtataggtgttatttttgtacccatttttgtgcgacgtcgcacatataattacaggaaggtgatacaatgagcgtaaaatatgcatacggctatatccgggtatccactcacgatcaagaagaaatt

SEQ ID NO: 19207 - DNA, 260 bp, Unknown
  Description of Unknown: LeftRegion for integrase B6208 sequence
caccacatttaaatgaataattaataaaaccgtccctgctaccaacagaaacggcttattgaatactatacagtgccaaggcacgatataacattccctgaacaagaatattgtatcacaaaaatccagcaccgtataggtgttatttttgtacccatttttgtgcgacatcgcacatataattacaggaaggtgatgcaatgagcgtaaaatatgcatacggctacatccgtgtatccacacacgatcaggaagagatc

SEQ ID NO: 19208 - DNA, 260 bp, Unknown
  Description of Unknown: LeftRegion for integrase B6209 sequence
gtacctaaaaagtcaagaaccgctcctgcgccaacaggaacggctcaagtaacattccgaagaatgataccccaactcaaaaatattgtatcatcttcggtcagctatcgcaatcagaacatttgtttcttgatagctgttatttttatactcattttcctgctctgtcaggaatagaatgaatcaaccgaggtgatgtcatgaaaactaaatattgttatggttatgttagggtatccacatccggccaagaagaactc

SEQ ID NO: 19209 - DNA, 260 bp, Unknown
  Description of Unknown: LeftRegion for integrase B6210 sequence
aggtaaataatatgagaaccaccactctatagatttataattcctaatttaaagtataatctcattcaattcttttttcatctaaataattaaattatattaatataaatttactatatgctcctccttttttattttatacttctctgttctaactgtattttacacatgatataattatcttgaaaggtggttttataatgaaaacgtgtatatatttaagaaaatctcgtgctgatattgaagcagaaaaagaaggg

SEQ ID NO: 19210 - DNA, 260 bp, Unknown
  Description of Unknown: LeftRegion for integrase B6211 sequence
ttttacataagaaagaaccgcccctgcgccaacaggaacggctctggaatatatccgaagatatacacctaatcaacgaaaatattgtatcatcttcggaacagtcacgcaagccggaacactcgttccatgctggctgttatttttatactcattttcctgctctgtcaggaatagaatgaatcaaccgaggtgatgtcatgaaaactaaatattgttatggttatgttagggtatccacatctggccaagaagagctc

SEQ ID NO: 19211 - DNA, 260 bp, Unknown
  Description of Unknown: LeftRegion for integrase B6212 sequence
tgcagatctgctgaaataaaaaaagaaacgcccctgctgacaacagaggcggatctattgaatactatacagtgccaaggcacgatataacattccgtgaacaagagtattatatcacatttccccggcacctgcataggtgttatttttgtacccatttttgtgcgacgtcgcacatataattacaggaaggtgatacaatgagcgtaaaatatgcatacggctacatccgggtatccactcacgatcaagaagaaatt

SEQ ID NO: 19212 - DNA, 260 bp, Unknown
  Description of Unknown: LeftRegion for integrase B6213 sequence
caatataatacacttttgtcaaactaaataccgccctgctctaccaaagcaaggcggcaagctcccgaatgatacagaagccctcgacaagcatattgtatcattctcggagcagctatgcaagcggaacacccgttccacgctggctgttatttttgtgccccaaaacatacactatagagaaagaggtgtaatatgccatgaaagaaaccttatctgaacgcaaaaccggcgcgatctacatccgtgtatccaccgac

SEQ ID NO: 19213 - DNA, 260 bp, Unknown
  Description of Unknown: LeftRegion for integrase B6214 sequence
aataaatgtaattaataaaaaatccccggtgcctatcaaacaccggggaaatcccgagtaatatatacggcgaaggattcgctcgatacagtactccctcaacaagaatattgtatcacaaaaatccggcaccgtataggtgttatttttgtacccatttttgtgcgacgtcgcacatataattacaggaaggtgatacaatgagcgtaaaatatgcatacggctacatccgggtatccactcacgatcaagaagaaatt

SEQ ID NO: 19214 - DNA, 260 bp, Unknown
  Description of Unknown: LeftRegion for integrase B6215 sequence
aaatttatccatacaaaaaaattccccggtgcctatcaaacaccggggaaatcccgagtaatatatacggcgaaggattcgctcgatacagtactccctcaacaagaatattgtatcacaaaaatccggcaccgtataggtgttatttttgtacccatttttgtgcgacatcgcacatataattacaggaaggtgatacaatgagcgtaaaatatgcatacggctacatccgggtatccactcacgatcaagaagaaatt

SEQ ID NO: 19215 - DNA, 260 bp, Unknown
  Description of Unknown: LeftRegion for integrase B6216 sequence
accatgtaaaaactgctattaaataaaaattccccggtgtctaccaaacaccagggaaaatcccgagtaatatatacggcgaaggattcgctcgatacagtactccctcaacaagattattgtatcacaaaaatctggcaccgtataggtgttatttttgtacccatttttacgtacacttaagaaggaaaggtgatacaatgagcgtaaaatatgcatacggctacatccgggtatccactcacgatcaagaagaaatt

SEQ ID NO: 19216 - DNA, 260 bp, Unknown
  Description of Unknown: LeftRegion for integrase B6217 sequence
tgcattgcagatctgttgaaataaaaaaccgcccctgctaccaacaggaacggcctaatgaatactatacagtgccaaggcacgatataacattccgtgaacaagagtattatatcacatttccctggcacctgcataggtgttatttttatacccatttttgtgcgacatcgcacatataattacaggaaggtgatacaatgagcgtaaaatatgcatacggctatatccgggtatccacacacgatcaggaagaaatc

SEQ ID NO: 19217 - DNA, 260 bp, Unknown
  Description of Unknown: LeftRegion for integrase B6218 sequence
tttttacataagaaagaaccgcccctgcgccaacaggaacggttcaagtaacattccgaagaatgataccccaattcaaagaatattgtatcatcttcggtcagctatcgcaatcagaacatttgtttcttgatagctgttatttttatactcattttcctgctctgtcaggaatagaatgaatcaaccgaggtgatgtcatgaaaactaaatattgttatggttatgttagggtatccacatccggccaagaagagctc

SEQ ID NO: 19218 - DNA, 260 bp, Unknown
  Description of Unknown: LeftRegion for integrase B6219 sequence
tgcagatctgctgaaataaaaaaagaaacgcccctgctgacaacagaggcggatctattgaatactatacagtgccaaggcacgatataacattccgtgaacaagagtattatatcacatttccccggcacctgcataggtgttatttttgtacccatttttgtgcgacatcgcacatataattactggaaggtgatacaatgagagtaaaatatgcatacggctacatccgggtatccactcacgatcaagaagaaatt

SEQ ID NO: 19219 - DNA, 260 bp, Unknown
  Description of Unknown: LeftRegion for integrase B6220 sequence
acaaattattagaattacagtaaaatactaaaaaatccccggtgttaccagcaccagggaaaacgagaaaactatagggtgtttggaacacagtacaattctctccatcacaaagattattgtatcacaaaaatccggcaccgtataggtgttatttttgtacccatttttacgtacacttaagaaggaaaggtgatacaatgagcgtaaaatatgcatacggctacatccgggtatccactcacgatcaagaagaaatt

SEQ ID NO: 19220 - DNA, 260 bp, Unknown
  Description of Unknown: LeftRegion for integrase B6221 sequence
cgttatataataatttcataaataaaaaccgtccctgctaccaacaggaacggcttaatgaatactatacagtgccaaggcacgatataacattccgtgaacaagagtattatatcacatttccctggcacctgcataggtgttatttttgtacccatttttgtgcgacatcgcacatataattacaggaaggtgatacaatgagcgtaaaatatgcatacggctacatccgggtatccactcatgatcaggaagagatc

SEQ ID NO: 19221 - DNA, 260 bp, Unknown; identical to SEQ ID NO: 19208
  Description of Unknown: LeftRegion for integrase B6222 sequence

SEQ ID NO: 19222 - DNA, 260 bp, Unknown
  Description of Unknown: LeftRegion for integrase B6223 sequence
caccacatttaaatgaataattaataaaaccgtccctgctaccaacagaaacggcttattgaatactatacagtgccaaggcacgatataacattccctgaacaagaatattgtatcacaaaaatccagcaccgtataggtgttatttttgtactcatttttgtgcgacgtcgcacatataattacaggaaggtgatacaatgagcgtaaaatatgcatacggctacatccgtgtatccactcatgatcaggaagagatc

SEQ ID NO: 19223 - DNA, 260 bp, Unknown; identical to SEQ ID NO: 19208
  Description of Unknown: LeftRegion for integrase B6224 sequence

SEQ ID NO: 19224 - DNA, 260 bp, Unknown
  Description of Unknown: LeftRegion for integrase B6225 sequence
ataagcagcttaaaaaccgcggcagaatcgctaaaattcagcgattgggaaggcgaatcagacctctctaagctgatcgacgacaggaacagctttgctgaagatttcggagtttctaacagatcatactaaaaaagcgtaaaatatcacacaaaaaacgccctgcggtttcccgcggggtgttgatatatcggaaaggaatggtacttttggacacatactgcatatatctacgaaaatcccgtgccgacgcagaagca

SEQ ID NO: 19225 - DNA, 260 bp, Unknown
  Description of Unknown: LeftRegion for integrase B6226 sequence
gaaacaatcgaagaagcttacgaaatggcttttgacgcattgggattagctatttcactttttgaagatgaaaaacgtccacttcctaagccctcttcacctgataaaattaagctcaataaaaacgaatttatagtaataataaattttgatattctcgaatataaaaagaatgtcaaaactaaaccaggagaccttatatgatagccatatacgcccgtcagtcaatagataaaaaagactccataagtattgagtct

SEQ ID NO: 19226 - DNA, 260 bp, Unknown
  Description of Unknown: LeftRegion for integrase B6227 sequence
gacaataaaataatgtaatataaaaaatccccggtgttaccagcaccagggaaaatgagaaaactataaggtgtttggaacacaatacaattctctccctcacgaagatattgtatcacaaaaatccggcaccgtataggtgttatttttgtacccatttttgtgcgacatcgcacatataattacaggaaggtgatacaatgagcgtaaaatatgcatacggctacatccgggtatccactcatgatcaggaagagatc

SEQ ID NO: 19227 - DNA, 260 bp, Unknown
  Description of Unknown: LeftRegion for integrase B6228 sequence
tagaattacagtaaaatactaaaaaatccccggtgttaccagcaccagggaaaacgagaaaactatagggtgtttggaacacagtacaattctctccatcacaaagattattgtatcacaaaaatccggcaccgtataggtgttatttttgtacccatttttgtgcgacgtcgcacatataattacaggaaggtgatacaatgagcgtaaaatatgcatacggctacatccgggtatccactcacgatcaagaagaaatt

SEQ ID NO: 19228 - DNA, 260 bp, Unknown
  Description of Unknown: LeftRegion for integrase B6229 sequence
aacaataagaatatataaagaaaaaccgccctgatgctggagcaccaaggcggcaaacactgatccgaagatacaatgccctagacaagcatattgtatcattctcggagcagctatgcaagcggaacacccgttccacgctggctgttatttttgtactcaaaaaacaatacaatatagagaaagaggtgtaatgtgctatgaaagaaaaagtatcagaacgcaaaacaggggcaatctacatccgtgtatccaccgac

SEQ ID NO: 19229 - DNA, 260 bp, Unknown
  Description of Unknown: LeftRegion for integrase B6230 sequence
ctatcgcacaataacagtagttacaaataaaaacgccccagtgttaccagcactggggcattgagaaaactatactttgcaaggaacttgcggtataatcctctccctcacagagactattatatcacaaattcctggcaccgtgtaggtgttatttttgtacccatttttacgtacacttaagaaggaaaggtgatacaatgagcgtaaaatatgcatacggctacatccgggtatccacacacgatcaggaagaaatc

SEQ ID NO: 19230 - DNA, 260 bp, Unknown; identical to SEQ ID NO: 19219
  Description of Unknown: LeftRegion for integrase B6231 sequence

SEQ ID NO: 19231 - DNA, 260 bp, Unknown
  Description of Unknown: LeftRegion for integrase B6232 sequence
gttatccacaataaaacaacagaagccccggtgttaccagcaccagagcctctatctttgaatactatacagtgccaaggcacgatataacattccgtgaacaagagtattatatcacatttccctggcacctgcataggtgttatttttgtacccatttttgtgcgatgtcgcacatataattacaggaaggtgatacaatgagcgtaaaatatgcatacggctacatccgggtatccactcatgatcaggaagagatc

SEQ ID NO: 19232 - DNA, 260 bp, Unknown
  Description of Unknown: LeftRegion for integrase B6233 sequence
tatacgcttattaaccgcctaaaaaaacacccctgataccgaaatatcagaggtgttgtgctcccgaatgatacgaaagccctagacaagcatattgtatcattctcggagcagcttcgcaagcggaacacccgtttgacgcaggctgttatttttgtacccaaaaaccaatacaatatagagaaagaggtgcatatgctatgaaagaaaaggtttctgaacgcaaaaccggcgcgatctacatccgtgtatccaccgac

SEQ ID NO: 19233 - DNA, 260 bp, Unknown
  Description of Unknown: LeftRegion for integrase B6234 sequence
tgctaccggacaataaaataatgtaatataaaaaatccccggtgttaccagcaccagggaaaatgagaaaactataaggtgtttggaacacaatacaattctctccctcacaaagattattgtatcacaaaaatccggcaccgtataggtgttatttttgtacccatttttacgtacacttaagaaggaaaggtgatacaatgagcgtaaaatatgcatacggctacatccgggtatccactcatgatcaggaagagatc

SEQ ID NO: 19234 - DNA, 260 bp, Unknown
  Description of Unknown: LeftRegion for integrase B6235 sequence
ttgcagatctgctgaaataaaaaagaaacgcccctgctgacaacagaggcggatctattgaatactatacagtgccaaggcacgatataacattccgtgaacaagagtattatatcacatttccccggcacctgcataggtgttatttttgtacccatttttgtgcgacatcgcacatataattactggaaggtgatacaatgagagtaaaatatgcatacggctacatccgggtatccactcacgatcaagaagaaatt

SEQ ID NO: 19235 - DNA, 260 bp, Unknown
  Description of Unknown: LeftRegion for integrase B6236 sequence
gcagatctgctgaaataaaaaaagaaacgcccctgctgacaacagaggcggatctattgaatactatacagtgccaaggcacgatataacattccctgaacaagagtattatatcacatttccctggcacctgcataggtgttattttttgtacccatttttgtgcgacgtcgcacatataattacaggaaggtgatacaatgagcgtaaaatatgcatacggctacatccgggtatccactcatgatcaggaagagatc

SEQ ID NO: 19236 - DNA, 260 bp, Unknown; identical to SEQ ID NO: 19228
  Description of Unknown: LeftRegion for integrase B6237 sequence

SEQ ID NO: 19237 - DNA, 260 bp, Unknown
  Description of Unknown: LeftRegion for integrase B6238 sequence
tggtgcaatagaaaaaattcaataaaaaattccccggtgtctaccaaacaccagggaaaatcccgagtaatatatacggcgaaggattcgctcgatacagtactccctcaacaagattattgtatcacaaaaatccggcaccgtataggtgttatttttgtacccatttttacgtacacttaagaaggaaaggtgatacaatgagcgtaaaatatgcatacggctacatccgggtatccactcatgatcaggaagaaatc

SEQ ID NO: 19238 - DNA, 260 bp, Unknown
  Description of Unknown: LeftRegion for integrase B6239 sequence
attcctacggagaaaggactcagcccaaaatacctgatgtttgaaggacaggaatttaccttttaagcaataaaaaaggacgtaccgtcccacaacgatacgtctaagtgcttcattggactggagcactatcacaaaaagtccctaccctaatagaggcctttttgcctcttcattataccacaggagagtaaaaaaccatgaatagttgtgtcatttatgctcgtttttcttcagataagcaaagagaggaatctatt

SEQ ID NO: 19239 - DNA, 260 bp, Unknown
  Description of Unknown: LeftRegion for integrase B6240 sequence
tgtcatacatacatttttgtcaatttaaaaccgccctgctctaccaaagcaaggcggcaagctcccgaatgatacagaagccctagacaagcatattgtatcattctcggagcagcttcgcaagcggaacacccgtttgacgcaggctgttatttttgtacccaaaaacatacactatagagaaagaggtgtaatatgccatgaaagaaaccttatctgaacgcaaaaccggcgccatctacatccgtgtatccaccgac

SEQ ID NO: 19240 - DNA, 260 bp, Unknown
  Description of Unknown: LeftRegion for integrase B6241 sequence
aagaaaaataacgaataaaaattccccggtgcctatcaaacaccggggaaatcccgagtaatatatacggcgaaggattcgctcgatacagtactccctcaacaagaatattgtatcacaaaaatccggcaccgtataggtgttatttttgtacccatttttgtgcgacatcgcacatataattacaggaaggtgatacaatgagcgtaaaatatgcatacggctacatccgggtatccactcatgatcaggaagagatc

SEQ ID NO: 19241 - DNA, 260 bp, Unknown
  Description of Unknown: LeftRegion for integrase B6242 sequence
cttacatatttcagaatatggtatcagaaagatgatgatgcagccagcagatccgataatggaaatctttgatttataaataaaaatccccgcccggcgctggaacaccgaacggggaagaagctgtgatacaatcacaaccttagacaagtttattgtatcatagctccctgaaaatgtcaaggagtgataacaaatatatgaaaaccgccgtaatatacgcccgatattcatcggacaagcaaacggagcagtccatc

SEQ ID NO: 19242 - DNA, 260 bp, Unknown; identical to SEQ ID NO: 19212
  Description of Unknown: LeftRegion for integrase B6243 sequence

SEQ ID NO: 19243 - DNA, 260 bp, Unknown
  Description of Unknown: LeftRegion for integrase B6244 sequence
aatatagataataataaaaattccccggtgcctatcaaacaccagggaaaatcccgagtaatatatacggcgaaggattcgctcgatacagtactccctcaacaagaatattgtatcacaaaaatccggcaccgtataggtgttatttttgtacccatttttgtgcgacgtcgcacatataattacaggaaggtgatacaatgagcgtaaaatatgcatacggctacatccgggtatccactcacgatcaggaagagatc

SEQ ID NO: 19244 - DNA, 260 bp, Unknown
  Description of Unknown: LeftRegion for integrase B6245 sequence
cgccaacaagaacggtttccccataatcaatatgaggacgtatataacgtatatatccgaagagatacatacaatactcacaaaaatattgtatcatcttcgggcagctatcgcaagcagaacacacgttccgtgctagctgttatttttatactcatttttgtgcgacatcgcacatataattacaggaaggtgatacaatgagcgtaaaatatgcatacggctacatccgggtatccactcatgatcaggaagaaatc

SEQ ID NO: 19245 - DNA, 260 bp, Unknown; identical to SEQ ID NO: 19226
  Description of Unknown: LeftRegion for integrase B6246 sequence

SEQ ID NO: 19246 - DNA, 260 bp, Unknown
  Description of Unknown: LeftRegion for integrase B6247 sequence
cgccaacaagaacggtttccccataatcaatatgaggacgtatataacgtatatatccgaagagatacatacaatactcacaaaaatattgtatcatcttcgggcagctatcgcaagcagaacacacgttccgtgctagctgttatttttatacccatttttgtgcgacgtcgcacatataattacaggaaggtgatacaatgagcgtaaaatatgcatacggctacatccgtgtatccactcatgatcaggaagagatc

SEQ ID NO: 19247 - DNA, 260 bp, Unknown
  Description of Unknown: LeftRegion for integrase B6248 sequence
cggcgctgatctggacgatgacgaataaataaaaaagcgccgtccctctggaaagggccagcgcttcgaggccgcgtgttacatttgcttcgtgctcctgctggaacaggggcgggctgtacacgggcagttgacatggaaggcaactgcctttattgtaacacgcaggccccagtttgaaaagggggtttttatcctttatgcgtgtgatctgctatgttcgggtatctacccgcgaacaggcggaaaagggctattct

SEQ ID NO: 19248 - DNA, 260 bp, Unknown
  Description of Unknown: LeftRegion for integrase B6249 sequence
tgtttttacgttatccacaataaaacaacagaagccccggtgttaccagcaccagagcctctatctttgaatactatacagtgccaaggcacgatataacattccgtgaacaagagtattatatcacatttccctggcacctgcataggtgttatttttgtacccatttttacgtacacttaagaaggaaaggtgatacaatgagcgtaaaatatgcatacggctacatccgggtatccactcacgatcaagaagaaatt

SEQ ID NO: 19249 - DNA, 260 bp, Unknown
  Description of Unknown: LeftRegion for integrase B6250 sequence
tagaattacagtaaaatactaaaaaatccccggtgttaccagcaccagggaaaatgagaaaactatagggtgtttggaacacagtacaattctctccctcacaaagattattgtatcacaaaaatccggcaccgtataggtgttatttttgtacccatttttgtgcgacgtcgcacatataattacaggaaggtgatacaatgagcgtaaaatatgcatacggctacatccgggtatccactcatgatcaggaagagatc

SEQ ID NO: 19250 - DNA, 260 bp, Unknown
  Description of Unknown: LeftRegion for integrase B6251 sequence
cccttacatatttcagaatatggtatcagaaagatgatgatgcagccagcagatccgataatggaaatctttgatttataaataaaaatccccgctcgatgcgccaacaccgaacggggaagaagctgtgatacaatcacaaccttagacaagtttattgtatcatagctccctgaaaatgtcaaggagtgataaaaaatatgcaaaccgccgtgatatacgcccggtattcgtccgacaagcaaacggagcagtccatt

SEQ ID NO: 19251 - DNA, 260 bp, Unknown
  Description of Unknown: LeftRegion for integrase B6252 sequence
aaataatgtaatataaaaaatcccctggtgcctatcaaacaccagggaaaatcccgagtaatatatacggcgaaggattcgctcgatacagtactccctcaacaagaatattgtatcacaaaaatccagcaccgtataggtgttatttttgtacccatttttgtgcgacgtcgcacatataattacaggaaggtgatacaatgagcgtaaaatatgcatacggctatatccgggtatccacacacgatcaggaagaaatc

SEQ ID NO: 19252 - DNA, 260 bp, Unknown
  Description of Unknown: LeftRegion for integrase B6253 sequence
accatgtaaaaactgctattaaataaaaattccccggtgtctaccaaacaccagggaaaatcccgagtaatatatacggcgaaggattcgctcgatacagtactccctcaacaagaatattgtatcacaaaaatccggcaccgtataggtgttatttttgtacccatttttacgtacacttaagaaggaaaggtgatacaatgagcgtaaaatatgcatacggctacatccgggtatccactcatgatcaggaagagatc

SEQ ID NO: 19253 - DNA, 260 bp, Unknown
  Description of Unknown: LeftRegion for integrase B6254 sequence
agaaaaaattcaataaaaaaatccccggtgtctaccaaacaccagggaaaatcccgagtaatatatacggcgaaggattcgctcgatacagtactccctcaacaagaatattgtatcacaaaaatccagcaccgtataggtgttatttttgtacccatttttgtgcgacgtcgcacatataattacaggaaggtgatacaatgagcgtaaaatatgcatacggctacatccgggtatccactcatgatcaagaagagatc

SEQ ID NO: 19254 - DNA, 260 bp, Unknown
  Description of Unknown: LeftRegion for integrase B6255 sequence
taacataacaataaaaaccgcccctgcgaatcggacactagtcaacaacaggagcggatgcgtgctccgaagatacacgccctagacaagcacattgtatcattctcggagcagctacgcaagcggaacatccgtttgatgtgagctgttatttttgtacccaaaaaccaatacaatatagagaaagaggtgcatatgctatgaaagaaaaagtctcagaacgcaaaaccggcgcgatctacatccgtgtatccaccgac

SEQ ID NO: 19255 - DNA, 260 bp, Unknown
  Description of Unknown: LeftRegion for integrase B6256 sequence
tgtcatacatacatttttgtcaatttaaaaccgccctgctctaccaaagcaaggcggtaagctcccgaatgatacgaaagccctaagcaagcatattgtatcattctcggagcagctatgcaagcggaacacccgttccacgctggctgttatttttgtaccaaaaaacatacactatagagaaagaggtgtaatatgccatgaaagaaaccttatctgaacgcaaaaccggcgcgatctacatccgtgtatccaccgac

SEQ ID NO: 19256 - DNA, 260 bp, Unknown
  Description of Unknown: LeftRegion for integrase B6257 sequence
ttgcagatctgctgaaataaaaaagaaacgcccctgctgacaacagaggcggatctattgaatactatacagtgccaaggcacgatataacattccgtgaacaagagtattatatcacatttccctggcacctgcataggtgttatttttgtacccatttttgtgcgacgtcgcacatataattacaggaaggtgatacaatgagcgtaaaatatgcatacggctacatccgggtatccactcatgatcaggaagagatc

SEQ ID NO: 19257 - DNA, 260 bp, Unknown
  Description of Unknown: LeftRegion for integrase B6258 sequence
ttagcacaataaaataaaaaatccccggtgtctaccaaacaccagggaaaatcccgagtaatatatacagcgaaggattcgctcgatacagtactccctcaacaagaatattgtatcacaaaaatccggcaccgtataggtgttatttttgtacccatttttgtgcgacgtcgcacatataattacaggaaggtgatacaatgagcgtaaaatatgcatacggctacatccgggtatccactcacgatcaagaagaaatt

SEQ ID NO: 19258 - DNA, 260 bp, Unknown
  Description of Unknown: LeftRegion for integrase B6259 sequence
taatacatacatttttgtcaatttaaaaccgccctgctctaccaaagcaaggcggcaagctcccgaatgatacgaaagccctgaacaagcatattgtatcattctcggagcagctacgcaagcggaacacccgttccacgctggctgttatttttgtatccaaaaatcaatacaatatagagaaagaggtgtaatgtgctatgaaagaaaaagtttcagaacgcaaaacaggggcaatctacatccgtgtatccaccgac

SEQ ID NO: 19259 - DNA, 260 bp, Unknown; identical to SEQ ID NO: 19218
  Description of Unknown: LeftRegion for integrase B6260 sequence

SEQ ID NO: 19260 - DNA, 260 bp, Unknown
  Description of Unknown: LeftRegion for integrase B6261 sequence
ttacatttacacttttgtcaaactaaataccgccctgctctaccaaagcaaggcggtaagctcccgaatgatacgaaagccctagacaagcatattgtatcattctcggagcagcttcgcaagcggaacacccgtttgacgcaggctgttatttttgtacccaaaaaccaatacaatatagagaaagaggtgcatatgctatgaaagaaaaggtttctgaacgcaaaaccggtgcgatctacatccgtgtatccaccgac

SEQ ID NO: 19261 - DNA, 260 bp, Unknown; identical to SEQ ID NO: 19256
  Description of Unknown: LeftRegion for integrase B6262 sequence

SEQ ID NO: 19262 - DNA, 260 bp, Unknown
  Description of Unknown: LeftRegion for integrase B6263 sequence
tcaccgtcaagaatgttacccccatttacccgccgcaggagcgggataagcgaagccgtgaggtcgagcggcggctgtttgatgtgtttgtaaagtacgccggacagagggggtaggccggagtcatccttgttgcatgggggcattagaggtataatatagttgtaggttggctcccatttatggaaagggagctaattatggataacagaattgacgcgatttatgggcggcagtcgattgacaaaaaggacagtatc

SEQ ID NO: 19263 - DNA, 260 bp, Unknown
  Description of Unknown: LeftRegion for integrase B6264 sequence
tacttttgaaatcttaaacaaaaataaaaccgttcctgctaccaacaagaacggcttaatgaatactatacagtgccaaggcacgatataacattccgtgaacaagagtattatatcacatttccctggcaccgtataggtgttatttttgtacccatttttgtgcgacgtcgcacatataattacaggaaggtgatacaatgagcgtaaaatatgcatacggctacatccgggtatccactcacgatcaagaagaaatt

SEQ ID NO: 19264 - DNA, 260 bp, Unknown
  Description of Unknown: LeftRegion for integrase B6265 sequence
catcgccgggtattggaacttcagcagaaaaagaaactgacgaattatcgtctctacacagacttgaagctgaatcccggcaatgtgaatgcatggctcaaacataacgattccagcaaaatgagcctcgactgtgcgcgccagatctacaagtatgcaaaaagctacccatctgttcgataaaaaaaggaagtgagtctatgaccgccgtaatctatgcccgctattcatcggataaccagcgcgaagaatctatcgaa

SEQ ID NO: 19265 - DNA, 260 bp, Unknown; identical to SEQ ID NO: 19219
  Description of Unknown: LeftRegion for integrase B6266 sequence

SEQ ID NO: 19266 - DNA, 260 bp, Unknown
  Description of Unknown: LeftRegion for integrase B6267 sequence
cgccaacaagaacggtttccccataatcaatatgaggacgtatataacgtatatatccgaagagatacatacaatactcacaaaaatattgtatcatcttcgggcagctatcgcaagcagaacacacgttccgtgctagctgttatttttatacccatttttgtgcgacatcgcacatataattacaggaaggtgatacaatgagcgtaaaatatgcatacggctacatccgtgtatccactcatgatcaggaagagatc

SEQ ID NO: 19267 - DNA, 260 bp, Unknown
  Description of Unknown: LeftRegion for integrase B6268 sequence
cggcgctgatctggacgatgacgaataaataaaaaagcgccgtccctctggaaagggccagcgcttcgaggccgcgtgttacatttgcttcgtgctcctgctggaacaggggcgggctatacacgggcagttgacatggaaggcaactgcctttattgtaacacgcaggccccagtttgaaaagggggtttttatcctttatgcgtgtgatctgctatgttcgggtatctacccgcgaacaggcggaaaagggctattct

SEQ ID NO: 19268 - DNA, 260 bp, Unknown
  Description of Unknown: LeftRegion for integrase B6269 sequence
tgcagatctgctgaaataaaaaaagaaacgcccctgctgacaacagaggcggatctattgaatactatacagtgccaaggcacgatataacattccgtgaacaagagtattatatcacatttccctggcacctgcataggtgttatttttatacccatttttgtgcgacatcgcacatataattacaggaaggtgatacaatgagcgtaaaatatgcatacggctacatccgggtatccactcatgatcaggaagagatc

SEQ ID NO: 19269 - DNA, 260 bp, Unknown
  Description of Unknown: LeftRegion for integrase B6270 sequence
tcacacaaacacttttgtcaaataaatagccgccctgctctaccaaagcaaggcggcaagctcccgaatgatacagaagccctcgacaagcacattgtatcattctcggagcagcttcgcaagcggaacacccgtttgtcgcaggctgttatttttgtactcaaaaaccaatacaatatagagaaagaggtgcatgtgctatgaaagaaaaggtttcagaacgcaaaaccggcgcgatctacatccgtgtatccaccgac

SEQ ID NO: 19270 - DNA, 260 bp, Unknown
  Description of Unknown: LeftRegion for integrase B6271 sequence
ttactgacatttaattaagaaaaaggtccccaacgctaccaacgcagaggaccaccaagctcccgaatgatacgaaagccctagacaagcatattgtatcattctcggagcagctgcgcaagcggaacacccgttccacgctggctgttatttttgtacccaaaaatcaatacaatatagagaaagaggtgtaatgtgctatgaaagaaaaagtttcggaacgcaagacaggggcgatctacatccgtgtatctaccgac

SEQ ID NO: 19271 - DNA, 260 bp, Unknown; identical to SEQ ID NO: 19208
  Description of Unknown: LeftRegion for integrase B6272 sequence

SEQ ID NO: 19272 - DNA, 260 bp, Unknown; identical to SEQ ID NO: 19235
  Description of Unknown: LeftRegion for integrase B6273 sequence

SEQ ID NO: 19273 - DNA, 260 bp, Unknown
  Description of Unknown: LeftRegion for integrase B6274 sequence
aataacagtagttacaaataaaaacgccccagtgttaccagcactggggcattgagaaaactatactttgcaaggaacttgcggtataatcctctccctcacagagactattatatcacaaattcctggcaccgtgtaggtgttatttttgtacccatttttgtgcgacgtcgcacatataattacaggaaggtgatacaatgagcgtaaaatatgcatacggctacatccgggtatccactcatgatcaggaagagatc

SEQ ID NO: 19274 - DNA, 260 bp, Unknown
  Description of Unknown: LeftRegion for integrase B6275 sequence
taccataaatgtcaagaaccgcccctgcgccaacaggaacggctctggaatatatccgaagatatacacctaatcaacgaaaatattgtatcatcttcggtcagctatcgcaatcagaacatttgtttcttgatagctgttatttttatactcatttttctgctctgtcaggaatagaatgaatcaaccgaggtgatgtcatgaaaactaaatattgttatggttatgttagggtatccacatccggccaagaagagctc

SEQ ID NO: 19275 - DNA, 260 bp, Unknown
  Description of Unknown: LeftRegion for integrase B6276 sequence
tagaaaaaattcaataaaaaatccccggtgtctaccaaacaccagggaaaatcccgagtaatatatacggcgaaggattcgctcgatacagtactccctcaacaagaatattgtatcacaaaaatccggcaccgtataggtgttatttttgtacccatttttgtgcaacgtcgcacatataattacaggaaggtgatacaatgagcgtaaaatatgcatacggctacatccgggtatccactcatgatcaggaagagatc

SEQ ID NO: 19276 - DNA, 260 bp, Unknown; identical to SEQ ID NO: 19255
  Description of Unknown: LeftRegion for integrase B6277 sequence

SEQ ID NO: 19277 - DNA, 260 bp, Unknown
  Description of Unknown: LeftRegion for integrase B6278 sequence
taaattaaataaacaatatagataataataaaaaatccccggtgttaccagcaccagggaaaatgagaaaactataaggtgtttggaacacaatacaattctctccctcacaaagaatattgtatcacaaaaatccggcaccgtataggtgttatttttgtacccatttttacgtacacttaagaaggaaaggtgatacaatgagcgtaaaatatgcatacggctacatccgggtatccactcatgatcaggaagagatc

SEQ ID NO: 19278 - DNA, 260 bp, Unknown
  Description of Unknown: LeftRegion for integrase B6279 sequence
tgtcatacatacatttttgtcaatttaaaaccgccctgctctaccaaagcaaggcggcaagctcccgaatgatacagaagccctagacaagcatattgtatcattctcggagcagcttcgcaagcggaacacccgtttgacgctggctgttatttttgtacccaaaaacatacactatagagaaagaggtgtaatatgccatgaaagaaaaagtctcagaacgcaaaaccggcgcgatctacatccgtgtatccaccgat

SEQ ID NO: 19279 - DNA, 260 bp, Unknown; identical to SEQ ID NO: 19233
  Description of Unknown: LeftRegion for integrase B6280 sequence

SEQ ID NO: 19280 - DNA, 260 bp, Unknown
  Description of Unknown: LeftRegion for integrase B6281 sequence
gttacatttacacttttgtcaaactaaataccgccctgctctaccaaagcaaggcggcaagctcccgaatgatacagaagccctagacaagcatattgtatcattctcggagcagctacgcaagcggaacacccgttccacgctggctgttatttttgtacccaaaaacatacactatagagaaagaggtgtaatatgccatgaaagaaaccctatctgaacgcaaaaccggcgcgatctacatccgtgtatccaccgac

SEQ ID NO: 19281 - DNA, 260 bp, Unknown
  Description of Unknown: LeftRegion for integrase B6282 sequence
gtcatctatcagctatcgacctgtcataggctaacctatcggtaaatgatatatatcatacaaagattaatatttcaaatttaaaaagcaagaaagcactgccaaacacagcgctctcttgaaatccattgttaccacatgtagtggattgccgtagttacgaaagaagtataacacaaacaacgaaaggagatgatcatatgtctgaaaaagcagtaatttatgcacgctattcctcttcaaatcagcgtgaagaatca

SEQ ID NO: 19282 - DNA, 260 bp, Unknown
  Description of Unknown: LeftRegion for integrase B6283 sequence
ctgcattgcagatctgttgaaataaaaaaccgcccctgctaccaacagagacggcttaatgaatactatacagtgccgaggcacgatataataatccctcaacaagaatattatatcacatttccctggcaccgtataggtgttatttttgtacccatttttgtgcgacgtcgcacatataattacaggaaggtgatacaatgagcgtaaaatatgcatacggctacatccgtgtatccactcatgatcaggaagagatc

SEQ ID NO: 19283 - DNA, 260 bp, Unknown
  Description of Unknown: LeftRegion for integrase B6284 sequence
tgcagatctgttgaaataaaaaaagaaacgcccctgctgacaacagaggcggatctattgaatactatacagtgccaaggcacgatataacattccgtgaacaagagtattatatcacatttccctggcacctgcataggtgttatttttatacccatttttgtgcgacatcacacatataattacaggaaggtgatacaatgagcgtaaaatatgcatacggttacatccgagtatccactcatgatcaggaagagatc

SEQ ID NO: 19284 - DNA, 260 bp, Unknown
  Description of Unknown: LeftRegion for integrase B6285 sequence
cggcgctgatctggacgatgacgaataaataaaaaagcgctgtccctctggaaagggccagcgcttcgaggccgcgtgttacatttgcttcgcgctcctgctggaacaggggcgggctgtacacgggcagttgacatggaaggcaactgcctttattgtaacacgcaggccccggtttgaaaagggggtttttatcctttatgcgtgtgatctgctatgttcgggtatctacccgcgaacaggcggaaaagggctattct

SEQ ID NO: 19285 - DNA, 260 bp, Unknown
  Description of Unknown: LeftRegion for integrase B6286 sequence
atatagataataataaaaaattccccggtgtctaccaaacaccagggaaaatcccgagtaatatatacggcgaaggattcgctcgatacagtactccctcaacaagaatattgtatcacaaaaatccagcaccgtataggtgttatttttgtacccatttttgtgcgacgtcgcacatataattacaggaaggtgatacaatgagcgtaaaatatgcatacggctacatccgggtatccactcacgatcaagaagaaatt

SEQ ID NO: 19286 - DNA, 260 bp, Unknown; identical to SEQ ID NO: 19208
  Description of Unknown: LeftRegion for integrase B6287 sequence

SEQ ID NO: 19287 - DNA, 260 bp, Unknown; identical to SEQ ID NO: 19219
  Description of Unknown: LeftRegion for integrase B6288 sequence

SEQ ID NO: 19288 - DNA, 260 bp, Unknown
  Description of Unknown: LeftRegion for integrase B6289 sequence
attataaaccagaacaacagatacccaccagcttatggcgaaaaccataggtcggtgggcatctgatttacgaaaagaattaaatgctgttcgctgattttcccattgcaaaccgttgtaaaatatggtatatattatacgaaactacattttgaaagaaccgttcgccgtttaatgatgtgtaaagtgaggtgcctgccatgaccgctgtgatctatgcccgctattcatcggataaccagcgcgaagaatccattgaa

SEQ ID NO: 19289 - DNA, 260 bp, Unknown
  Description of Unknown: LeftRegion for integrase B6290 sequence
tcgcgcatccaggacaaaggttgtcaagtcgtcgatgtcaagatggccgtcagcgccaacacgcgcgacagcgacatgatgctgtactcgtttaccgtcttatataggtaaagaaaaaaagaagccccacgtggtcacagcgttgcagcgctacccgtggggctttccacagaacctctgaaaggaggccgtttcatattatgccaaaaacagcggtgatatacgcccgcttttcatgcaacaagcagcgcgaggcctcg

SEQ ID NO: 19290 - DNA, 260 bp, Unknown
  Description of Unknown: LeftRegion for integrase B6291 sequence
ataggagattttatttccaaagattttactcatgatataaaataaaaaaacttcgtgctggaacacgaagtcaaaatgaaaaatcacaaaagtctgctaggactaaaaacaaaatatcaagtgatataatgcattggatctttcttatacattatatcacaaccaataataaaaataaagaaaaaggagtgtaataatgtatgattaatgatgatttttttagaaaaggtgcaatatcagttagagtatcaactgaaatg

SEQ ID NO: 19291 - DNA, 260 bp, Unknown
  Description of Unknown: LeftRegion for integrase B6292 sequence
cttctaataaataatttaatataaaaaccgctccagtgctggaacaccagagcggtcaacattgctccgaagatacaatgccctagacaagcatattgtatcattctcggagcagctatgcaagcggaacacccgttccacgctggctgttatttttgtacccaaaaacatacactatagagaaagaggtgtaatatgccatgaaagaaaccttatctgaacgcaaaaccggcgcgatctacatccgtgtatccaccgac

SEQ ID NO: 19292 - DNA, 260 bp, Unknown
  Description of Unknown: LeftRegion for integrase B6293 sequence
gtcgcgcatccaggacaaaggttgtcaagtcgtcgatgtcaagatggccgtcagcgccaacacgcgcgacagcgacatgatgctgtactcgtttaccgtcttatataggtagagaaaaaagaagccccacggggtcacagcgttgcagcgctacccgtggggctttccacagaacctctgaaaggaggccgtttcttattatgccaaaaacagcggtgatatacgcccgcttttcatgcaacaagcagcgcgaggcctcg

SEQ ID NO: 19293 - DNA, 260 bp, Unknown
  Description of Unknown: LeftRegion for integrase B6294 sequence
cacaaccatttttgtcaaataaataacgccgccccagtgttggcgcaccagagcggcaaatactgctccgaaaagcaatatactcacaaatcatattatacctttcggagcagccaaacgcaagcggaacacccgttccacgctggctgttatttttgtactcaaaaacatacactatagagaaagaggtgtaatatgccatgaaagaaaccttatctgaacgcaaaaccggcgcgatctacatccgtgtatccaccgac

SEQ ID NO: 19294 - DNA, 260 bp, Unknown; identical to SEQ ID NO: 19211
  Description of Unknown: LeftRegion for integrase B6295 sequence

SEQ ID NO: 19295 - DNA, 260 bp, Unknown; identical to SEQ ID NO: 19211
  Description of Unknown: LeftRegion for integrase B6296 sequence

SEQ ID NO: 19296 - DNA, 260 bp, Unknown
  Description of Unknown: LeftRegion for integrase B6297 sequence
cgccaacaagaacggtttccccataatcaatatgaggacgtatataacgtatatatccgaagagatacatacaatactcacaaaaatattgtatcatcttcgggcagctatcgcaagcagaacgcacgttctgtgctagctgttatttttgtacccatttttgtgcgacgtcgcacatataattacaggaaggtgatacaatgagcgtaaaatatgcatacggctacatccgggtatccactcatgatcaggaagaaatc

SEQ ID NO: 19297 - DNA, 260 bp, Unknown
  Description of Unknown: LeftRegion for integrase B6298 sequence
caaaagataaaaatgtattaaataaaaaccgtccctgctaccaacaggaacggcctaatgaatactatacagtgccaaggcacgatataacattccgtgaacaagagtattatatcacatttccctggcacctgcataggtgctatttttgtacccatttttgtgcgacgtcgcacatataattacaggaaggtgatacaatgagcgtaaaatatgcatacggctacatccgggtatccactcatgatcaggaagagatc

SEQ ID NO: 19298 - DNA, 260 bp, Unknown
  Description of Unknown: LeftRegion for integrase B6299 sequence
ttagcacaataaaataaaaaatccccggtgtctaccaaacaccagggaaaatcccgagtaatatatacggcgaaggattcgctcgatacagtactccctcaacaagaatattgtatcacaaaaatccagcaccgtataggtgttatttttgtacccatttttgtgcgacgtcgcacatataattacaggaaggtgatacaatgagcgtaaaatatgcatacggctacatccgtgtatccacacacgatcaggaagagatc

SEQ ID NO: 19299 - DNA, 260 bp, Unknown
  Description of Unknown: LeftRegion for integrase B6300 sequence
taccataaaagtcaagaaccgcccctgcgccaacaggaacggttcaagtaacattccgaagaatgataccccaattcaaagaatattgtatcatcttcggtcagctatcgcaatcagaacatttgtttcttgatagctgttatttttatactcattttcctgctctgtcaggaatagaatgaatcaaccgaggtgatgtcatgaaaactaaatattgttatggttatgttagggtatccacatccggccaagaagagctc

SEQ ID NO: 19300 - DNA, 260 bp, Unknown
  Description of Unknown: LeftRegion for integrase B6301 sequence
ttacagatctgctgaaataaaaaaagaaacgcccctgctgacaacagaggcggatctattgaatactatacagtgccaaggcacgatataacattccgtgaacaagagtattatatcacatttccctggcaccgtataggtgttatttttgtacccatttttgtgcgacgtcgcacatataattacaggaaggtgatacaatgagcataaaatatgcatacggctacatccgggtatccactcatgatcaggaagagatc

SEQ ID NO: 19301 - DNA, 260 bp, Unknown
  Description of Unknown: LeftRegion for integrase B6302 sequence
aaatttattttcaataaaaattccccggtgtctaccaaacaccggggaaaatcccgagtaatatatacggcgaaggattcgctcgatacagtactccctcaacaagaatattgtatcacaaaaatccggcaccgtataggtgttatttttgtacccatttttgtgcgacatcgcacatataattacaggaaggtgatacaatgagcgtaaaatatgcatacggctacatccgggtatccactcacgatcaggaagagatc

SEQ ID NO: 19302 - DNA, 260 bp, Unknown
  Description of Unknown: LeftRegion for integrase B6303 sequence
tgcagatctgctgaaataaaaaaagaaacgcccctgctgacaacagaggcggatctattgaatactatacagtgccaaggcacgatataacattccttgaacaagagtattatatcacatttccctggcacctgcataggtgttatttttatacccatttttgtgcgacatcgcacatataattacaggaaggtgatacaatgagcgtaaaatatgcatacggctacatccgtgtatccactcatgatcaggaagagatc

SEQ ID NO: 19303 - DNA, 260 bp, Unknown; identical to SEQ ID NO: 19219
  Description of Unknown: LeftRegion for integrase B6304 sequence

SEQ ID NO: 19304 - DNA, 260 bp, Unknown
  Description of Unknown: LeftRegion for integrase B6305 sequence
tttatagactacatagataaaactaaattataagacaaaaaagtcccctgctaccaacagaggaccaaaaactaacctaccaaggcagatgccaagatatagtatagcctagacaactatattatatcacaaataacacctgccttgcaaggtgttatttttgtacccaaaaacatatttttaataaggagtgatataatatgaaaacagctatctatgcccgacaaagcgtaaataaaaaagacagtatatctattgaa

SEQ ID NO: 19305 - DNA, 260 bp, Unknown; identical to SEQ ID NO: 19243
  Description of Unknown: LeftRegion for integrase B6306 sequence

SEQ ID NO: 19306 - DNA, 260 bp, Unknown
  Description of Unknown: LeftRegion for integrase B6307 sequence
cggcgctgatctggacgatgacgaataaataaaaaagcgctgtccctctggaaagggccagcgcttcgaggccgcgtgttacatttgcttcgtgctcctgctggaacaggggcgggctgtacacgggcagttgacatggaaggcaactgcctttattgtaacacgcaggccccggtttgaaaagggggtttttatcctttatgcgtgtgatctgctatgttcgggtatctacccgcgaacaggcggaaaagggctattct

SEQ ID NO: 19307 - DNA, 260 bp, Unknown
  Description of Unknown: LeftRegion for integrase B6308 sequence
ttactgacatttaattaagaaaaaggtccccaacgctaccaacgcagaggaccaccaagctcccgaatgatacgaaagccctagacaagcacattgtaccattctcggagcagctgcgcaagcggaacacccgttccacgctggctgttatttttgtacccaaaaatcaatacaatatagagaaagaggtgtaatgtgctatgaaagaaaaagtttcagaacgcaaaacaggcgcgatctacatccgcgtatctaccgac

SEQ ID NO: 19308 - DNA, 260 bp, Unknown
  Description of Unknown: LeftRegion for integrase B6309 sequence
ttaacaaaagaataataaaaattccccggtgcctatcaaacaccggggaaatcccgagtaatatatacggcgaaggattcgctcgatacagtactccctcaacaagaatattgtatcacaaaaatccagcaccgtataggtgttatttttgtacccatttttgtgcgacgtcacacatataattacaggaaggtgatacaatgagcgtaaaatatgcatacggctacatccgggtatccactcatgatcaggaagagatc

SEQ ID NO: 19309 - DNA, 260 bp, Unknown; identical to SEQ ID NO: 19218
  Description of Unknown: LeftRegion for integrase B6310 sequence

SEQ ID NO: 19310 - DNA, 260 bp, Unknown; identical to SEQ ID NO: 19256
  Description of Unknown: LeftRegion for integrase B6311 sequence

SEQ ID NO: 19311 - DNA, 260 bp, Unknown
  Description of Unknown: LeftRegion for integrase B6312 sequence
gtcatacaaccatttttgtcaatttaaaaccgccctgctctaccaaagcaaggcggtaagctcccgaatgatacgaaagccctcaacaagcacattgtaccattctcggagcagcttcgcaagcggaacacccgtttgacgcaggctgttatttttgtacccaaaaatcaatacaatatagagaaagaggtgcatgtgctatgaaagaaaaggtttcagaacgcaagacaggcgcgatctacatccgcgtatctaccgac

SEQ ID NO: 19312 - DNA, 260 bp, Unknown
  Description of Unknown: LeftRegion for integrase B6313 sequence
aataatgtaatataaaaaaatcccctggtgcctatcaaacaccagggaaaatcccgagtaatatatacggcgaaggattcgctcgatacagtactccctcaacaagaatattgtatcacaaaaatccagcaccgtataggtgttatttttgtacccatttttgtgcgacgtcgcacatataattacaggaaggtgatacaatgagcgtaaaatatgcatacggctacatccgggtatccactcatgatcaggaagagatc

SEQ ID NO: 19313 - DNA, 260 bp, Unknown; identical to SEQ ID NO: 19208
  Description of Unknown: LeftRegion for integrase B6314 sequence

SEQ ID NO: 19314 - DNA, 260 bp, Unknown; identical to SEQ ID NO: 19219
  Description of Unknown: LeftRegion for integrase B6315 sequence

SEQ ID NO: 19315 - DNA, 260 bp, Unknown
  Description of Unknown: LeftRegion for integrase B6316 sequence
tagaaaaaattcaataaaaattccccggtgtctaccaaacaccagggaaaatcccgagtaatatatacggcgaaggattcgctcgatacagtactccctcaacaagaatattgtatcacaaaaatccggcaccgtataggtgttatttttatacccatttttgtgcgacgtcgcacatataattacaggaaggtgatacaatgagcgtaaaatatgcatacggctacatccgagtatccacacacgaccaagaagagatc

SEQ ID NO: 19316 - DNA, 260 bp, Unknown
  Description of Unknown: LeftRegion for integrase B6317 sequence
atatagataataataaaaattccccggtgcctatcaaacaccagggaaaatcccgagtaatatatacggcgaaggattcgctcgatacagtactctcctcacaaagattattgtatcacaaaaatccggcaccgtataggtgttatttttgtacccatttttgtgcgacgtcgcacatataattacaggaaggtgatacaatgagcgtaaaatatgcatacggctacatccgtgtatccacacacgatcaggaagagatc

SEQ ID NO: 19317 - DNA, 260 bp, Unknown
  Description of Unknown: LeftRegion for integrase B6318 sequence
ggacagcggattgaaacgcacgtttgatataaaaaataaagtttttgatctgatagggaaatggacaccttatcaagcgcaaaagcgccttccgctgttggaactctgtcaagatttgtccgaagatgaattaaccgaagttataaactatatcaaatacgttcaatcaaagcgcgattgaacaggaagggggaatagtaatgccggaagcattaaacgcggtcatatacgcccgctattcctccgatcgtcagacagaa

SEQ ID NO: 19318 - DNA, 260 bp, Unknown
  Description of Unknown: LeftRegion for integrase B6319 sequence
tctctgctatatctttatactaaaaatccccggtgttaccagcaccagggaaaatgagaaaactataaggtgtttggaacacaatacaattctctccctcacaaagattattgtatcacaaaaatccggcaccgtataggtgttatttttgtacccatttttgtgcgacgtcgcacatataattacaggaaggtgatacaatgagcgtaaaatatgcatacggctacatccgggtatccactcatgatcaggaagagatc

SEQ ID NO: 19319 - DNA, 260 bp, Unknown
  Description of Unknown: LeftRegion for integrase B6320 sequence
aaatttatccatacaaaaaaattccccggtgcctatcaagcaccggggaaatcccgagtaatatatacggcgaaggattcgctcgatacagtactccctcaacaagaatattgtatcacaaaaatccagcaccgtataggtgttatttttgtacccatttttgtgcgacgtcgcacatataattacaggaaggtgatacaatgagcgtaaaatatgcatacggctacatccgggtatccactcatgatcaggaagagatc

SEQ ID NO: 19320 - DNA, 260 bp, Unknown; identical to SEQ ID NO: 19268
  Description of Unknown: LeftRegion for integrase B6321 sequence

SEQ ID NO: 19321 - DNA, 260 bp, Unknown; identical to SEQ ID NO: 19219
  Description of Unknown: LeftRegion for integrase B6322 sequence

SEQ ID NO: 19322 - DNA, 260 bp, Unknown
  Description of Unknown: LeftRegion for integrase B6323 sequence
tgtaaataaaaaagcgccgaccctctggaaagggtcagcgctttggccgcgtgttacaaggggggcgacattctggaagaggtcgcttggctgcatcctgctggaacaggggcgggccgtacacgggcagttgacatggaaagcaactgcctttattgtaacacgcaggccccagtttgaaaagggggtttttatcctttatgcgtgtgatctgctatgttcgggtgtctacccgcgaacaggcggaaaagggctattct

SEQ ID NO: 19323 - DNA, 260 bp, Unknown; identical to SEQ ID NO: 19239
  Description of Unknown: LeftRegion for integrase B6324 sequence

SEQ ID NO: 19324 - DNA, 260 bp, Unknown
  Description of Unknown: LeftRegion for integrase B6325 sequence
aaataatgtaatataaaaaatcccctggtgcctatcaaacaccagggaaaatcccgagtaatatatacggcgaaggattcgctcgatacagtactccctcaacaagaatattgtatcacaaaaatccagcaccgtataggtgttatttttgtacccatttttgtgcgacgtcgcacatataattacaggaaggtgatacaatgagcgtaaaatatgcatacggctacatccgggtatccactcatgatcaggaagagatc

SEQ ID NO: 19325 - DNA, 260 bp, Unknown
  Description of Unknown: LeftRegion for integrase B6326 sequence
tcggaggcccgggatgcttatacaacagtagagcgcaagtttgcccgggatctccagggctttgagctctaaataggcaacaaaaatccccacccgtgaggcaacacgagtggggataccacacaatcaaagcggaggctgattatgtatagatattataccatgtctgcctcctgcatgctataggaggctattttagtatgggacaaaaatgcgtcatatatacaagatacagctctgaccggcagcgggaggagtcc

SEQ ID NO: 19326 - DNA, 260 bp, Unknown
  Description of Unknown: LeftRegion for integrase B6327 sequence
aataacagtagttacaaataaaaacgccccagtgttaccagcactggggcattgagaaaactatactttgcaaggaacttgcggtataatcctctccctcacagagactattatatcacaaattcctggcaccgtgtaggtgttatttttgtacccatttttgtgcgacgtcgcacatataattacaggaaggtgatacaatgagcgtaaaatatgcatacggctacatccgggtatccactcacgatcaagaagaaatt

SEQ ID NO: 19327 - DNA, 260 bp, Unknown
  Description of Unknown: LeftRegion for integrase B6328 sequence
tgcagatctgctgaaataaaaaaagaaacgcccctgctgacaacagaggcggatctattgaatactatacagtgccaaggcacgatataacattccgtgaacaagagtattatatcacatttccctggcacctgcataggtgttatttttgtacccatttttgtgcgacatcgcacatataattactggaaggtgatacaatgagagtaaaatatgcatacggctacatccgggtatccactcacgatcaagaagaaatt

SEQ ID NO: 19328 - DNA, 260 bp, Unknown
  Description of Unknown: LeftRegion for integrase B6329 sequence
gaataaaaaaagcgccgaccctctggaaagggtcagcgctttggccgcgtgttgcaaggggggggcgacatcctggaagaggtcgcttggctgcatcctgctggaacaggggcgggccgtacacgggcagttgacatggacgacaactgcctttattgtaacacgcaggcctcagtttgaaaagggggtttttatcctttatgcgtgtgatctgctatgttcgggtgtctacccgcgaacaggcggaaaagggctattct

SEQ ID NO: 19329 - DNA, 260 bp, Unknown
  Description of Unknown: LeftRegion for integrase B6330 sequence
ttgcagatctgctgaaataaaaaagaaacgcccctgctgacaacagaggcggatctattgaatactatacagtgccaaggcacgatataacattccgtgaacaagagtattatatcacatttccctggcacctgcataggtgttatttttatacccatttttgtgcgacgtcgcacatataattacaggaaggtgatacaatgagcgtaaaatatgcatacggctacatccgggtatccactcatgatcaggaagagatc

SEQ ID NO: 19330 - DNA, 260 bp, Unknown; identical to SEQ ID NO: 19273
  Description of Unknown: LeftRegion for integrase B6331 sequence

SEQ ID NO: 19331 - DNA, 260 bp, Unknown
  Description of Unknown: LeftRegion for integrase B6332 sequence
tcacacgaacatttttgtcaatttaaaaccgccctgctctaccaaagcaaggcggcaagctcccgaatgatacagaagccctcaacaagcacattgtatcattctcagagcagctacgcaagcggaacacccgttccacgctggctgttatttttgcacccaaaaatcaatacaatatagagaaagaggtgtaatgtgctatgaaagaaaaagtatcagaacgcaaaacaggggcaatctacatccgtgtatccaccgac

SEQ ID NO: 19332 - DNA, 260 bp, Unknown
  Description of Unknown: LeftRegion for integrase B6333 sequence
aaaataatgtaatataaaaaatccccggtgtctaccaaacaccagggaaaatcccgagtaatatatacggcgaaggattcgctcgatacagtactccctcaacaagaatattgtatcacaaaaatccggcaccgtataggtgttatttttgtacccatttttgtgcgacgtcgcacatataattacaggaaggtgatacaatgagcgtaaaatatgcatacggctacatccgggtatccactcatgatcaggaagaaatc

SEQ ID NO: 19333 - DNA, 260 bp, Unknown
  Description of Unknown: LeftRegion for integrase B6334 sequence
taacataacaataaaaaccgcccctgcgaatcggacactagtcaacaacaggagcggatgcgtgctccgaagatacacgccttagacaagcacattgtatcattctcggagcagctacgcaagcggaacatccgtttgatgtgagctgttatttttgtacccaaaaaccaatacaatatagagaaagaggtgcatatgctatgaaagaaaaagtctctgaacgcaaaaccggcgcgatctacatccgtgtatccaccgac

SEQ ID NO: 19334 - DNA, 260 bp, Unknown
  Description of Unknown: LeftRegion for integrase B6335 sequence
acaaattattagaattacagtaaaatactaaaaaatccccggtgttaccagcaccagggaaaacgagaaaactatagggtgtttggaacacagtacaattctctccatcacaaagattattgtatcacaaaaatccggcaccgtataggtgttatttttgtacccatttttacgtacacttaagaaggaaaggtgatacaatgagcgtaaaatatgcatacggctatatccgtgtatccactcatgatcaggaagagatc

SEQ ID NO: 19335 - DNA, 260 bp, Unknown; identical to SEQ ID NO: 19240
  Description of Unknown: LeftRegion for integrase B6336 sequence

SEQ ID NO: 19336 - DNA, 260 bp, Unknown; identical to SEQ ID NO: 19318
  Description of Unknown: LeftRegion for integrase B6337 sequence

SEQ ID NO: 19337 - DNA, 260 bp, Unknown; identical to SEQ ID NO: 19302
  Description of Unknown: LeftRegion for integrase B6338 sequence

SEQ ID NO: 19338 - DNA, 260 bp, Unknown
  Description of Unknown: LeftRegion for integrase B6339 sequence
ataaacaatttaagaacggcgtcagaatcgataaaattcagcgattgggaaggcgaatcggacctctctaagctgatcgacgacaggaacagctttgctgaagatttcggagtttctgacagatcgtactaaaaaagcgtaaaatatcacacaaaaaacgccctgcagttccccgcggggtgttgatatatcggaaaggaatggtacttttggacacatactgtatatatctaagaaaatcgcgtgcagacgcagaagcc

SEQ ID NO: 19339 - DNA, 260 bp, Unknown
  Description of Unknown: LeftRegion for integrase B6340 sequence
aaaataatgtaatataaaaaatccccggtgcctatcaaacaccagggaaaatcccgagtaatatatacggcgaaggattcgctcgatacagtactccctcaacaagaatattgtatcacaaaaatccgacaccgtataggtgttatttttgtacccatttttgtgcgacgtcgcacatataattacaggaaggtgatacaatgagcgtaaaatatgcatacggctacatccgagtatccacacacgaccaagaagagatc

SEQ ID NO: 19340 - DNA, 260 bp, Unknown
  Description of Unknown: LeftRegion for integrase B6341 sequence
tatagataataataaaaaatcccccggtgtctaccaaacaccagggaaaatcccgagtaatatatacggcgaaggattcgctcgatacagtactctcctcacaaagattattgtatcacaaaaatccggcaccgtataggtgttatttttgtacccatttttgtgcgacgtcgcacatataattacaggaaggtgatacaatgagcgtaaaatatgcatacggctacatccgggtatccactcacgatcaggaagaaatc

SEQ ID NO: 19341 - DNA, 260 bp, Unknown; identical to SEQ ID NO: 19266
  Description of Unknown: LeftRegion for integrase B6342 sequence

SEQ ID NO: 19342 - DNA, 260 bp, Unknown
  Description of Unknown: LeftRegion for integrase B6343 sequence
aataacagtagttacaaataaaaacgccccagtgttaccagcactggggcattgagaaaactatactttgcaaggaacttgcggtataatcctctccctcacagagactattatatcacaaattcctggcaccgtgtaggtgttatttttgtacccatttttgtgcgacgtcgcacatataattacaggaaggtgatacaatgagcgtaaaatatgcatatggctacatccgtgtatccactcatgatcaggaagaaatc

SEQ ID NO: 19343 - DNA, 260 bp, Unknown
  Description of Unknown: LeftRegion for integrase B6344 sequence
aataaatgtaattaataaaaaatccccggtgcctatcaaacaccggggaaatcccgagtaatatatacggcgaaggatccgctcgatacagtactccctcaacaagaatattgtatcacaaaaatccggcaccgtataggtgttatttttgtacccatttttgtgcgacgtcgcacatataattacaggaaggtgatacaatgagcgtaaaatatgcatacggctacatccgggtatccactcatgatcaggaagagatc

SEQ ID NO: 19344 - DNA, 260 bp, Unknown
  Description of Unknown: LeftRegion for integrase B6345 sequence
ctgacaaataataaaataatataaaaccgctccagtgctggaacaccagagcggtcaacattgctccgaagatacaatgccctagacaagcacattgtatcattctcggagcagctacgcaagcggaacatccgtttgatgtgagctgttatttttgtacccaaaaaccaatacaatatagagaaagaggtgcatatgctatgaaagaaaccttatctgaacgcaaaaccggcgcgatctacatccgtgtatccaccgac

SEQ ID NO: 19345 - DNA, 260 bp, Unknown; identical to SEQ ID NO: 19229
  Description of Unknown: LeftRegion for integrase B6346 sequence

SEQ ID NO: 19346 - DNA, 260 bp, Unknown; identical to SEQ ID NO: 19293
  Description of Unknown: LeftRegion for integrase B6347 sequence

SEQ ID NO: 19347 - DNA, 260 bp, Unknown
  Description of Unknown: LeftRegion for integrase B6348 sequence
acctaaaagataatattcaaaacgacagaatttttgctattatactttgtcttaagtacttgctgaataaagatgaacagtggaactcattcataacaaaattaagtgcacttattgaagaatatgatgaaatagaatttaaatatataggatttcctgataattgggaaaatttattaatctaacaaaggaggtattttatgtccgcggcgatatacactcgacaatccatcgaaaagaaagacagcgaaagcatcgat

SEQ ID NO: 19348 - DNA, 260 bp, Unknown; identical to SEQ ID NO: 19332
  Description of Unknown: LeftRegion for integrase B6349 sequence

SEQ ID NO: 19349 - DNA, 260 bp, Unknown
  Description of Unknown: LeftRegion for integrase B6350 sequence
ctggtgcaatagaaaaaattcaataaaaaatccccggtgtctaccaaacaccagggaaaatcccgagtaatatatacggcgaaggattcgctcgatacagtactccctcacaaagattattgtatcacaaaaatccggcaccgtataggtgttatttttatacccatttttacgtacacttaagaaggaaaggtgatacaatgagcgtaaaatatgcatacggctacatccgggtatccactcatgatcaggaagaaatc

SEQ ID NO: 19350 - DNA, 260 bp, Unknown; identical to SEQ ID NO: 19332
  Description of Unknown: LeftRegion for integrase B6351 sequence

SEQ ID NO: 19351 - DNA, 260 bp, Unknown
  Description of Unknown: LeftRegion for integrase B6352 sequence
ctcaatacgccctctccgcacagcagagataggacgacttaactataacatctccggagatgctacagcatttcagtcaaaaatattgtatcatcttcggtcagctatcgcaatcagaacgtttgtttcttgatagctgttatttttatactcattttcctgctctgtcaggaatagaatgaatcaaccgaggtgatgtcatgaaaactaaatattgttatggttatgttagggtatccacatccggtcaagaagagctc

SEQ ID NO: 19352 - DNA, 260 bp, Unknown; identical to SEQ ID NO: 19227
  Description of Unknown: LeftRegion for integrase B6353 sequence

SEQ ID NO: 19353 - DNA, 260 bp, Unknown
  Description of Unknown: LeftRegion for integrase B6354 sequence
ttacatttacacttttgtcaaactaaataccgccctgctctaccaaagcaaggcggcaagctcccgaatgatacgaaagccctagacaagcatattgtatcattctcggagcagcttcgcaagcggaacacccgtttgacgcaggctgttatttttgtacccaaaaaccaatacaatatagagaaagaggtgcatatgctatgaaagaaaaagtctctgaacgcaaaaccggcgcgatctacatccgtgtatccaccgac

SEQ ID NO: 19354 - DNA, 260 bp, Unknown
  Description of Unknown: LeftRegion for integrase B6355 sequence
acaaatttcattaataatgactataagtaaaaaaccgcccggtgttaccagcaccgaacggcttttacatagattctcttgccggatgcccggaaagataattcagcttgaacacctgaattatatcatttctggtacatcctggcaaggggtgtattttttatacccatttatcgtataatccacaaggagatgatataatgtcacaattatccaccagcaatgcacaacccttggaaatcggggccgcctacatccgt

SEQ ID NO: 19355 - DNA, 260 bp, Unknown
  Description of Unknown: LeftRegion for integrase B6356 sequence
caacaggtcagccgagaatatcagcttgcctacactgcttaaattatctgaatatttcggagtatcaatcgaggaattagtacacggaacaccacaacgtgaaataaccttttcaaaccggatttatacggataaagagcttgaagaaatacaattatttgcacaatttttactacaccgaagaaaggactagatgatgaatggcatacgcaatgtacctgcgaaaatcccgcatagacgaagaagcgggacttgaaaac

SEQ ID NO: 19356 - DNA, 260 bp, Unknown
  Description of Unknown: LeftRegion for integrase B6357 sequence
caaccgctcggcggagaatatcagcttgccgacactactcaaattatcggaatatttcggcgtgacaattgaggaattagtacacggcacgccacaacgggagataactttttcaaaccggatttttactgatgaagaacttgaagaaatacaactatttgcacaatttttactacaccgacgaaaggactagatgatgaatggcatacgcactatatttacgaaaatcccgtgcagacgaagaactgggacacgagaac

SEQ ID NO: 19357 - DNA, 260 bp, Unknown
  Description of Unknown: LeftRegion for integrase B6358 sequence
caaccgctcggcggagaatatcagcttgcctacactgctcaagctatccgaatacttcggcgtgaccatcgaagaactcgtacacgggacaccgcaacgcgagataaccttctcaaaccggattttcactgatgaagaacttgaagaaatacaactatttgcacaatttttattacaccgacgaaaggactagatgatggatggcatacgcaatatacttgaggaaatcccgcatagacgaagaaacagggatagagaac

SEQ ID NO: 19358 - DNA, 260 bp, Unknown
  Description of Unknown: LeftRegion for integrase B6359 sequence
tcaaccggagcgccgaaaatatcagcttgccgacattgcttaaattatctgagtatttcggtgtaacgattgaggaattagtgcacggcacgccacaacgggagataactttttcaaaccggatttacaccgacaaagaacttgaagaaatacaactatttgcacaatttttattacaccgacgaaaggactagatatgcatggcatacgcgatgtacttaaggaaatcccgcatagatgaagaagcagggatagagaac

SEQ ID NO: 19359 - DNA, 260 bp, Unknown
  Description of Unknown: LeftRegion for integrase B6360 sequence
ttattaaaaaaatcccctcaaccgctaccaacagttgagggaaaaagaataaagtgcatttatacacaatatccaaaccaataatattgtatcataaatgcactctgttttcaatataaaaattagagaaaaggagtgttatttttgtgccgttttttagaaaaacgtgtactgcataacacaagaaagggagatttacgatgaatgtagctatgtatttacgaaaatcaagagcagacgaaaacaatccgcttgaaaca

SEQ ID NO: 19360 - DNA, 260 bp, Unknown
  Description of Unknown: LeftRegion for integrase B6361 sequence
actgggaacaatcagtagtttttcaatgtccttttatgaggtacatgggagtcctgagttttcatttacgaattttatcattccagaagcattcagccttgtaagtggaatcatgtttcttggttttggtgaaataattaagcttcttcaggatatatgcaataagatcaaatgattgtatgagttgaaacgaggttattatggctgctattgactttaataatgttgtagatctgtatattcgtgtcagcacttctgag

SEQ ID NO: 19361 - DNA, 260 bp, Unknown
  Description of Unknown: LeftRegion for integrase B6362 sequence
attcttgatagcgtgaaaactttttcaagcaccttaaccgtaacagttattgattatattgataccgcagcttaaataaaaaaatttccctgcctgctccaacaggcagaggaaacagaataaagtgcatttatacacatgtgtcacgctccccacggagcgtgtgagttgaaatataacacaagaaaggaagatttacgatgaatgtagccatgtatttacgaaaatcgagagcggacgaaaacaatccgcttgaaacg

SEQ ID NO: 19362 - DNA, 260 bp, Unknown
  Description of Unknown: LeftRegion for integrase B6363 sequence
atgtaatcactcacaataaataaatataacgcaaaaaccgcccctgcgccaacaggaacggttttcacatagattctcttgccggatgcccggaaagataattcagcttagacacctgaattatatcatttctggtacatcctggcaaggggtgtattttttatacccatttatcgtataatccacaaggagatgatataatgtcacaattatccaccagcaatacacaacccttggaaatcggggccgcctacatccgt

SEQ ID NO: 19363 - DNA, 260 bp, Unknown
  Description of Unknown: LeftRegion for integrase B6364 sequence
aaattgaaaaaatagtatacaaactcgaaaacattataaatgatattgcagttattgactatacaaattctgccgcgtaaaaaattcccctgcctgttggagcagacagaggaaaaagaataaagtgcatttatacacatatgtcacgctccccacggagtgtgtgagttgaaatataacacaagaaaggaagatttacgatgaatgtagccatgtatttacgaaaatcgagagcggacgaaaacaatccgcttgaaaca

SEQ ID NO: 19364 - DNA, 260 bp, Unknown; identical to SEQ ID NO: 19363
  Description of Unknown: LeftRegion for integrase B6365 sequence

SEQ ID NO: 19365 - DNA, 260 bp, Unknown
  Description of Unknown: LeftRegion for integrase B6366 sequence
gattaaaaaaattcccctgcctgttggagcagacagaggataaagaataaagtgcatttatacacaatactcaaaccaataatattgtatcataaatgcactctgttttcaatatacaaattagagaaaaggagtgttatttttgtaccgtttttttattaaaaacgagcattacataacacaagaaaggaagatttacgatgaatgtagctatatacttacgaaaatcgagagcggacgaaaacaatccgcttgaaacg

SEQ ID NO: 19366 - DNA, 260 bp, Unknown
  Description of Unknown: LeftRegion for integrase B6367 sequence
caatcggagcgccgaaaatatcagcttgccgacattgcttaaattatccgagtatttcggtgtgacgattgaggaattagtgcacggcacgccacaacgggagataactttttcaaaccggatttatacggataaagagctagaggaaatacagctattcgcacaatttttactgcatcgaagaaaggactagatgatgaatggcatacgcaatgtacctgcgaaaatcacgcatagacgaagaagcgggacttgaaaac

SEQ ID NO: 19367 - DNA, 260 bp, Unknown
  Description of Unknown: LeftRegion for integrase B6368 sequence
caaccggagcgccgaaaatatcagcttgccgacattgcttaaattatctgagtatttcggtgtaacgattgaggaattagtgcacggcactccacaacgggagataactttttcaaaccggatttacaccgacaaagaacttgaagaaatacaactatttgcacaatttttactacaccgaagaaaggactagatgatgaatggcatacgcaatgtacctgcgaaaatcccgcatagatgaggaagcaggacttgaaaac

SEQ ID NO: 19368 - DNA, 260 bp, Unknown
  Description of Unknown: LeftRegion for integrase B6369 sequence
gattaaaaaaattcccctgcctgttggagcagacagaggataaagaataaagtgcatttatacacaatactcaaaccaataatattgtatcataaatgcactctgttttcaatatacaaattagagaaaaggagtgttatttttgtaccgtttttttattaaaaacgagcattacataacacaagaaaggaagatttacgatgaatgtagccatgtatttacgaaaatcgagagcggacgaaaacaatccgcttgaaacg

SEQ ID NO: 19369 - DNA, 260 bp, Unknown
  Description of Unknown: LeftRegion for integrase B6370 sequence
agcatgccggcgaacgcccctatttcgcctgctgccaaaagcgcgaaggtcacgacggctctcccatatggagggtgaccgttgtctatctcggaagataaaagagccccgtcggcagcgctggtaccgctttagccgacggggcatccaaccagtgcacccatgcaaactcaacttgaaggaagggtgacattcacattatgccaaagagggcagtgatatacgcgaggttctcgtgcaacaggcagagagaagcgtcg

SEQ ID NO: 19370 - DNA, 260 bp, Unknown
  Description of Unknown: LeftRegion for integrase B6371 sequence
ataaagagcatcctcgctgattgcgggggagaccttgcagacgctttcccgcagattatggagaagcagaacacgctcaaggccaaaaccgcctctattctggatagcctcttgcaggccgatgttgcggccttaaaagacagcaacaagtaacctattggcctgcgctccggcgcgggcctttttgtttggaggtcatcatggagcagtatctcatatacctgcgcaagtctcgttccgacctcgaggccgaagcgcac

SEQ ID NO: 19371 - DNA, 260 bp, Unknown; identical to SEQ ID NO: 19359
  Description of Unknown: LeftRegion for integrase B6372 sequence

SEQ ID NO: 19372 - DNA, 260 bp, Unknown
  Description of Unknown: LeftRegion for integrase B6373 sequence
caaccggagcgccgaaaatatcagcttgccgacattgctcaaattatccgagtatttcggtgtaacgattgaggaattagtgcatggcacgccgcaacgggagataactttttcaaaccggatttacaccgacaaagaacttgaagaaatacaactatttgcacaatttttactacaccgaagaaaggactagatgatgaatggcatacgcaatgtacctgcgaaaatcccgcatagacgaagaagcgggacttgaaaac

SEQ ID NO: 19373 - DNA, 260 bp, Unknown
  Description of Unknown: LeftRegion for integrase B6374 sequence
actgggaacaatcagtagtttttcaatgtccttttatgaggtacatgggagtcctgagttttcatttacaaattttatcattccagaagcattcagccttgtaagcggaatcatgtttcttggttttggtgaaataattaagcttcttcaggatatatgcaataagatcaaatgattgtatgagttgaaacgaggttattatggctgctattgactttaataatgttgtagatctgtatattcgtgtcagcacttctgag

SEQ ID NO: 19374 - DNA, 260 bp, Unknown; identical to SEQ ID NO: 19361
  Description of Unknown: LeftRegion for integrase B6375 sequence

SEQ ID NO: 19375 - DNA, 260 bp, Unknown
  Description of Unknown: LeftRegion for integrase B6376 sequence
atttgccctagtaatttttcatttttaatctcttcaatcattttcactatttcttctttcaatcgggtagcctccctttccccaacttttcgaacatatgttctatttttttgttttattatatattatgctacaaaaaaatacaagtaagtatatctttaatttcttgtcaatattatagtttataaggagtgatttagatgacagcagctttatatatacgagtttctactgatgaacaattagagttttcaccagat

SEQ ID NO: 19376 - DNA, 260 bp, Unknown
  Description of Unknown: LeftRegion for integrase B6377 sequence
tatgatgatttagacgaataacttagaaaataaaaaccgcccctgcgccaacaggaacggttttcacatagattctcttgccggatactccggaaagatatatcagcttagacacctgaattatatcatttctggtacatcctggcaaggggtgtattttttatacccatttatcgtataatccacaaggagatgatataatgtcacaattatccaccagcaatacacaacccttggaaatcggggccgcctacatccgt

SEQ ID NO: 19377 - DNA, 260 bp, Unknown
  Description of Unknown: LeftRegion for integrase B6378 sequence
tcaaataaaaaaatcccctgcctgttggagcagacagaggaaaagaataaagtgcatttatacacaatactcaaaccaataatattgtatcataaatgcactctgttttcaatatacaaattagagaaaaggagtgttatttttgtaccatttttttattaaaaacgagcattacataacacaagaaaggaagatttacgatgaatgtagctatatacttacgaaaatcgagagcggacgaaaacaatccgcttgaaaca

SEQ ID NO: 19378 - DNA, 260 bp, Unknown
  Description of Unknown: LeftRegion for integrase B6379 sequence
actgggaacaatcggtagtttttcaatgtccttttatgaggtgcatggaagccctgagttttcatttacgaattttatcattccagaagcgttcagccttgtaagcggaatcatgtttcttggttttggcgaagtaattaagcttcttcaggatataagcaataagctcaaatgattgtatgagttgaaatgaggttattatggctgctattgactttaataatgttgtagatctgtatatccgtgtcagcacttctgag

SEQ ID NO: 19379 - DNA, 260 bp, Unknown
  Description of Unknown: LeftRegion for integrase B6380 sequence
attataaaaaaattcccccgaccgctaccaacagtcggaggaaacagaataaagtgcatttatacacaatactcaaaccaataatattgtatcataaatgcactctattttcaatataaaaattagaaaaggagtgttatttttgtaccgtttttttattaaaaacgagcattacataacacaagaaaggaagatttacgatgaatgtagccatgtatttacgaaaatcgagagcggacgaagacaatccgcttgaaaca

SEQ ID NO: 19380 - DNA, 260 bp, Unknown; identical to SEQ ID NO: 19363
  Description of Unknown: LeftRegion for integrase B6381 sequence

SEQ ID NO: 19381 - DNA, 260 bp, Unknown
  Description of Unknown: LeftRegion for integrase B6382 sequence
caatcggagcgccgaaaatatcagcttgccgacattgcttaaattatccgagtatttcggcgtgacgatcgaggaattagtgcatggcacgccgcaacgggagataactttttcaaaccggatttacaccgacaaagaacttgaagaaatacaactatttgcacaatttttactacaccgaagaaaggactagatgatgaatggcatacgcaatgtacctgagaaaatcccgcatagatgaggaagcaggacttgaaaac

SEQ ID NO: 19382 - DNA, 260 bp, Unknown
  Description of Unknown: LeftRegion for integrase B6383 sequence
actgggaacaatcggtagtttttcaatgtccttttatgaggtgcatggacgccctgagttttcatttacgaattttatcattccagaagcgttcagccttgtaagcggaatcatgtttcttggttttggcgaagtaattaagcttcttcaggatataagcaataagctcaaatgattgtatgagttgaaatgaggttattatggctgctattgactttaataatgttgtagatctgtatatccgtgtcagcacttctgag

SEQ ID NO: 19383 - DNA, 260 bp, Unknown
  Description of Unknown: LeftRegion for integrase B6384 sequence
ttgaaaaggggactaatcacttcggcagagaaggaaagaattatcaaaaaagtttcagaataaagcagtttttgtctggacttttataagtgagcacggtattgtttgtcctgcccgataaaaagggcgggacaaattttttatcgcagttcaagtccagtcggcagagccgaaaaacgaacgagaaaggagcgtgagaaatgaatattcaagagatacctacaacaaggaaggagaaaccacgggtatgtgcgtatgtt

SEQ ID NO: 19384 - DNA, 260 bp, Unknown
  Description of Unknown: LeftRegion for integrase B6385 sequence
ctcaaagcttactctatcacataccacagacgtcatagcaaacagcgggtagaataaaagaacataaaaaatggctcacttcgctattggcgtagcgaagtgagccggtattctactcatgtatgtgtacatgaatcaactaaagcatattcattatacatcacatgagctatgcgcacaagtaggaaaggaaaagtataatgaatgtgaatgtattagataacgtagtagacctgtatgtgcgggttagtactaccgag

SEQ ID NO: 19385 - DNA, 260 bp, Unknown
  Description of Unknown: LeftRegion for integrase B6386 sequence
attcttgatagcgtgaaaactttttcaagcaccttaaccgtaacagttattgattatattgataccgcagcttaaataaaaaaatttccctgcctgctccaacaggcagaggaaacagaataaagtgcatttatacacatatgtcacgctccccacggagcgtgtgagttgaaatataacacaagaaaggaagatttacgatgaatgtagccatgtatttacgaaaatcgagagcggacgaaaacaatccgcttgaaaca

SEQ ID NO: 19386 - DNA, 260 bp, Unknown
  Description of Unknown: LeftRegion for integrase B6387 sequence
attcttgatagcgtgaaaactttttcaagcaccttaaccgtaacagttattgattatattgataccgcagcttaaataaaaaaatttccctgcctgctccaacaggcagaggaaacagaataaagtgcatttatacacatgtgtcacgctccccacggagcgtgtgagttgaaatataacacaagaaaggaagatttacgatgaatgtagctatatacttacgaaaatcgagagcggacgaaaacaatccgcttgaaaca

SEQ ID NO: 19387 - DNA, 260 bp, Unknown
  Description of Unknown: LeftRegion for integrase B6388 sequence
caaccgctcggcagagaatatcagcctgccgacactactcaagctatccgaatacttcggcgtgaccatcgaggaactcgtacacgggacaccacaacgcgagataaccttctcaaaccgcattttcactgatgaagaacttgaagaaatacagttatttgcacaatttttactacaccgacgaaaggattagatgatggatggcatacgcgatgtacttaagaaaatcccgcatagatgaagaagcgggacttgaaaac

SEQ ID NO: 19388 - DNA, 260 bp, Unknown
  Description of Unknown: LeftRegion for integrase B6389 sequence
caatcggagcgccgaaaatatcagcttgccgacattgcttaaattatccgagtatttcggcgtgacgatcgaggaattagtgcatggcacgccgcaacgggagataactttttcaaaccggatttacaccgacaaagaacttgaagaaatacaactatttgcacaatttttactacaccgaagaaaggactagatgatgaatggcatacgcaatgtatctgcgaaaatcccgcatagacgaagaagctggacttgaaaac

SEQ ID NO: 19389 - DNA, 260 bp, Unknown
  Description of Unknown: LeftRegion for integrase B6390 sequence
attattaaaaaaatcccccgaccgctaccaacagtcggaggaaacagaataaagtgcatttatacacaatatccaaaccaataatattgtatcataaatgcactctgttttcaatataaaaattagagaaaaggagtgttatttttgtgccgttttttagaaaaacgtgtactgcataacacaagaaagggagatttacgatgaatgtagctatgtatttacgaaaatcaagagcagacgaaaacaatccgcttgaaaca

SEQ ID NO: 19390 - DNA, 260 bp, Unknown; identical to SEQ ID NO: 19361
  Description of Unknown: LeftRegion for integrase B6391 sequence

SEQ ID NO: 19391 - DNA, 260 bp, Unknown
  Description of Unknown: LeftRegion for integrase B6392 sequence
gtttgtagttgattttcaaaacaaataaaaaccgcccggtgttaccagcaccgaacggctttcacatagattctcttgccggatactccagccatgataaatccagaccaaacatctgaattatatcatttctggtacatcctggcaaggggtgtattttttacacccatttttcatacaatccacaaggagatgatataatgccgccattacccaccagtaattcacagactttggagatcggcgccgcctacatccgc

SEQ ID NO: 19392 - DNA, 260 bp, Unknown
  Description of Unknown: LeftRegion for integrase B6393 sequence
actgggaacaatcagtagtttttcaatgtccttttatgaggtacatgggagtcctgagttttcatttacaaattttatcattccagaaacattcagccttgtaagcggaatcatgtttcttggttttggtgaaataattaagcttcttcaggatatatgcaataagatcaaatgattgtatgagttgaaacgaggttattatggctgctattgactttaataatgttgtagatctgtatattcgtgtcagcacttctgag

SEQ ID NO: 19393 - DNA, 260 bp, Unknown
  Description of Unknown: LeftRegion for integrase B6394 sequence
tttcctcttcaggtgaaccagctatgattactttgcgatgcggtgtttttggatgccatatgagttattttaattccgaattgaaaaaaaagcttcctgaaaagcaagacgttaagaacttctcattataattgcaccggtgcaactctggccgctccccttgttggagcgtggattgaaataaatgattggaggttatcatgtcatctattgacattaacaatgttgtagatctgtatatccgtgtcagtacttccgaa

SEQ ID NO: 19394 - DNA, 260 bp, Unknown
  Description of Unknown: LeftRegion for integrase B6395 sequence
ttgaaaaggggactaatcacttcgtcagagaaggaaagaattatcaaaaaagtttcagaataaagcagtttttgtctggacttttataagtgagcacggtattgtttgtcctgcccgataaaaagggcggggcaaattttttatcgcagttcaaatccagtcggcagagccgaaaaacgaacgagaaaggagcgtgagaaatgaatattcaagagatacctacaacaaggaaggagaaaccacgggtatgtgcgtatgtt

SEQ ID NO: 19395 - DNA, 260 bp, Unknown
  Description of Unknown: LeftRegion for integrase B6396 sequence
attgattggatcactcaaaagattcaatagaaaacaaaaaccgcccctgcgccaacaggaacggctttcaataaatctgtacaggccgtaaggccaaatacaatatagattagacacctacattgtatcacaccttacggcacctgtataggtgtattttttatacccatttttaatataatccacaaggagatgatgcaatgtcagagttatcaacaaacaattcacagcccttggaaatcggtgccgcctacatccgt

SEQ ID NO: 19396 - DNA, 260 bp, Unknown
  Description of Unknown: LeftRegion for integrase B6397 sequence
ttgtcaatatttttttcattatgtaaataccgccctgctctaccaaagcaaggcggcaagctcccgaatgatacgaaagccctagacaagcatattgtatcattctcggagcagcttcgcaagcggaacacccgtttgacgcaggctgttatttttgtacccaaaaaccaatacaatatagagaaagaggtgcatgtgctatgaaagaaaaggtttcagaacgcaaaaccggcgcgatctacatccgtgtatccaccgac

SEQ ID NO: 19397 - DNA, 260 bp, Unknown
  Description of Unknown: LeftRegion for integrase B6398 sequence
attcttgatagcgtgaaaactttttcaagcaccttaaccgtaacagttattgattatattgataccgcagcttaaataaaaaaatttccctgcctgctccaacaggcagaggaaaaagaataaagtgcatttatacacatatgtcacgctccccacggagcgtgtgagttgaaatataacacaagaaaggaagatttacgatgaatgtagccatgtatttacgaaaatcgagagcggacgaaaacaatccgcttgaaaca

SEQ ID NO: 19398 - DNA, 260 bp, Unknown; identical to SEQ ID NO: 19363
  Description of Unknown: LeftRegion for integrase B6399 sequence

SEQ ID NO: 19399 - DNA, 260 bp, Unknown
  Description of Unknown: LeftRegion for integrase B6400 sequence
caatcggagcgccgaaaatatcagcttgccgacattgcttaaattatccgagtatttcggcgtgacgatcgaggaattagtgcatggcacgccgcaacgggagataactttttcaaaccggatttacaccgacaaagaacttgaagaaatacaactatttgcacaatttttactacaccgaagaaaggactagatgatgaatggcatacgcaatgtacctgcgaaaatcccgcatagacgaagaagcgggacttgaaaac

SEQ ID NO: 19400 - DNA, 260 bp, Unknown
  Description of Unknown: LeftRegion for integrase B6401 sequence
acaaatcggttatgacgtacctattaacgtcccaagacgttatcgcagacatatggactacttgaaaaattcggagtattaaaaaaattcacagaataagcctaatatgttattgataatttatagtagtctgcctttatgtgtcacgctccacaaggagcgtgtgagttgaaatataaaacaagaaaggaagatttacgatgaatgtagccatgtatttacgaaaatcgagagcggacgaaaacaatccgcttgaaacc

SEQ ID NO: 19401 - DNA, 260 bp, Unknown
  Description of Unknown: LeftRegion for integrase B6402 sequence
aattagttatttattttttacccttgttacagaacattagtttgccgtcgtgagataaggagatgttatatatagatagaatattaattaagaaaataaaataataatttgaaagaaggtggtactatgtgatatttaaattgattaaaagtaataaacttattatataaaatctaaaatctaaaagaggaggttttcttatgaaaaagatagcaatttattctcgtaaatcagtatttactggcaaaggtgaaagtgtt

SEQ ID NO: 19402 - DNA, 260 bp, Unknown; identical to SEQ ID NO: 19382
  Description of Unknown: LeftRegion for integrase B6403 sequence

SEQ ID NO: 19403 - DNA, 260 bp, Unknown
  Description of Unknown: LeftRegion for integrase B6404 sequence
gaaaatttataaaatgatttgaattttatcatttgtaaaatggtgtaatttaacaattatttaaaataatcaatattatttaattaaatatttaatgaaactatttttaaaataatactttgatatttttctaacaattggttaactttacctacgtttgaaaatttattattatttttttgaaagaaggaggttcttgtatgaaaaaaatagcaatttatattagaaaatctgtaaaaggtgatgaaaattcaatatct

SEQ ID NO: 19404 - DNA, 260 bp, Unknown
  Description of Unknown: LeftRegion for integrase B6405 sequence
caacaggtcagccgagaatatcagcttgcctacactgcttaaattatccgaatatttcggggtatcaatcgaggaattagtacacggaacaccgcaacgtgaaataaccttttcaaaccggatttatacggataaagagcttgaagaaatacaattatttgcacaatttttactacaccgaagaaaggactagatgatgaatggcatacgcaatgtacctgcgaaaatcccgcatagacgaagaagcgggacttgaaaac

SEQ ID NO: 19405 - DNA, 260 bp, Unknown; identical to SEQ ID NO: 19361
  Description of Unknown: LeftRegion for integrase B6406 sequence

SEQ ID NO: 19406 - DNA, 260 bp, Unknown; identical to SEQ ID NO: 19363
  Description of Unknown: LeftRegion for integrase B6407 sequence

SEQ ID NO: 19407 - DNA, 154 bp, Unknown
  Description of Unknown: LeftRegion for integrase B6408 sequence
aaatatatagtatatataagagaaaatgttaagaaaataatatttataaggaattgagaatttttttgttattctgttataaggaggtaattttatgaagtttaaaaacgtcgctctatatgtaagagtatcgaccgatatacaggtagacggc

SEQ ID NO: 19408 - DNA, 260 bp, Unknown
  Description of Unknown: LeftRegion for integrase B6409 sequence
agattgaaaaaatagtatacaaactcgaaaacattataaatgatattgcagttattgactatacaaattctgccgcgtaaaaaattcccctgcctgttggagcagacagaggaaaaagaataaagtgcatttatacacatatgtcacgctccccacggagtgtgtgagttgaaatataacacaagaaaggaagatttacgatgaatgtagccatgtatttacgaaaatcgagagcggacgaaaacaatccgcttgaaaca

SEQ ID NO: 19409 - DNA, 260 bp, Unknown
  Description of Unknown: LeftRegion for integrase B6410 sequence
caacaggtcagccgagaatatcagcttgccgacattgcttaaattatctgagtatttcggtgtaacgattgaggaattagtgcacggcacgccacaacgggaaataactttttcaaaccggatttacaccgacaaagagcttgaagaaatacaactatttgcacaatttttactacaccgaagaaaggactagatgatgaatggcatacgcaatgtacctgcgaaaatcccgcatagacgaagaagcgggacttgaaaac

SEQ ID NO: 19410 - DNA, 260 bp, Unknown
  Description of Unknown: LeftRegion for integrase B6411 sequence
acacaagataaaatatattttatcatcaaataacgaaaaaccgtccctgcgccaacaggaacggctttcaataaatctgtacaggccgtaaggccaaatacaatatagattagacacctacattgtatcacaccttacggcacctgtataggtgtattttttatacccatttttcatataatccacaaggagatgatacaatgtcagagttatcaacaaacaattcacagcccttggaaatcggggccgcttacatccgt

SEQ ID NO: 19411 - DNA, 260 bp, Unknown
  Description of Unknown: LeftRegion for integrase B6412 sequence
caatcggagcgccgaaaatatcagcttgccgacattgcttaaattatccgagtatttcggcgtaacgatcgaggaattagtgcatggcacgccgcaacgggagataactttttcaaaccggatttacaccgacaaagaacttgaagaaatacaactatttgcacaatttttactacaccgaagaaaggactagatgatgaatggcatacgcaatgtacctgcgaaaatcccgcatagatgaagaagcaggacttgaaaac

SEQ ID NO: 19412 - DNA, 260 bp, Unknown; identical to SEQ ID NO: 19394
  Description of Unknown: LeftRegion for integrase B6413 sequence

SEQ ID NO: 19413 - DNA, 260 bp, Unknown
  Description of Unknown: LeftRegion for integrase B6414 sequence
ttattaaaaaaatcccctcaaccgctaccaacagttgagggaaaaagaataaagtgcatttatacacaatatccaaagcaacattattgtatcataaatgcactctgttttcaatatacaaattagagaaaaggagtgttatttttgtgccgttttttagaaaaacacgcacgacataacacaagaaaggaagatttacgatgaatgtagctatgtatttacgaaaatcaagagcggacgaaaacaatccgcttgaaaca

SEQ ID NO: 19414 - DNA, 260 bp, Unknown
  Description of Unknown: LeftRegion for integrase B6415 sequence
ctggaaatccaaaaactaatataatataacgcaaaaaccgcccctgcaccaacaggaacggcttttacatagattctcttgccggatgcccggaaagataattcagcttgaacacctgaattatatcatttctggtacatcctggcaaggggtgtattttttgtacccacttttcatacaatccacaaggagatgatataatgtcacaattatccaccagcaatgcacaacccttggaaatcggggccgcctacatccgt

SEQ ID NO: 19415 - DNA, 260 bp, Unknown
  Description of Unknown: LeftRegion for integrase B6416 sequence
ttattaaaaaaaatcccccgaccgctaccaacagtcggaggaaacagaataaagtgcatttatacacaatatccaaaccaataatattgtatcataaatgcactctattttcaatataaaaattagaaaaggagtgttatttttgtaccgtttttttattaaaaacgagcattacataacacaagaaaggaagatttacgatgaatgtagctatatacttacgaaaatcgagagcggacgaaaacaatccgcttgaaacg

SEQ ID NO: 19416 - DNA, 260 bp, Unknown; identical to SEQ ID NO: 19383
  Description of Unknown: LeftRegion for integrase B6417 sequence

SEQ ID NO: 19417 - DNA, 260 bp, Unknown
  Description of Unknown: LeftRegion for integrase B6418 sequence
acgctattaccgattttcttaaacaaatcggttatgacgtgcccattaacgtcccaagacgttatcgcagacatatggattatttgaaaaattctgattattaaaaaaattcacagattgcgattgatgttatgggcattaagtcacgctccccacggagcgtgtgagttgaaatataacacaagaaaggaagatttacgatgaatgtagccatgtatttacgaaaatcgagagcggacgaaaacaatccgcttgaaaca

SEQ ID NO: 19418 - DNA, 260 bp, Unknown
  Description of Unknown: LeftRegion for integrase B6419 sequence
ttgaagagaggtttaatcacttcgtcagagaaggaaagaattatcaaaaaagtttcagaataaagcggcttttgtctggacttttataggtgagcacggtattgtttgtcctgcccaataaaaagggcgggacaaattttttatcgcagttcgaatccagtcgaaagagccaaaaggcgaacaagaaaggagcgtaagaaatgaatattcaagagatacctacgaaaaaagtggagaaaccacgagtatgtgcctatgtg

SEQ ID NO: 19419 - DNA, 260 bp, Unknown; identical to SEQ ID NO: 19365
  Description of Unknown: LeftRegion for integrase B6420 sequence

SEQ ID NO: 19420 - DNA, 260 bp, Unknown
  Description of Unknown: LeftRegion for integrase B6421 sequence
tcatggagctggggtcgatcgcggaagctcgtgcccacggcaagatgcgcatggagggcaaggactacgtcatgcaggacggggacgtggtcgaattccgcacagggcttacgtctaagaagtaaactggaggtatgaactagacctcctctcagccagtccgcgcagccatctatctccgtatctcactcgacagagagatggacgggctcgctatcgagcgccagcgtgaagactgcgagaacctcgcacggtttcgc

SEQ ID NO: 19421 - DNA, 260 bp, Unknown; identical to SEQ ID NO: 19386
  Description of Unknown: LeftRegion for integrase B6422 sequence

SEQ ID NO: 19422 - DNA, 260 bp, Unknown
  Description of Unknown: LeftRegion for integrase B6423 sequence
gttaagagacatgacggaaatggcagaattgcgggagtacatcgcccatgaatttttgcagctggacgatggagagcagcgagaaacgatgcttattgtcaagaaaaaaattgacgaaataaaagcgaaaaaggaacaatcagcgtaaaaaaagcacccctcggaaagccgtggggtgctaagtgtatccggaaagggaaatgattatggaaacgtattgtatatatctgcgtaagtcccgtgcggacgcagaggcagag

SEQ ID NO: 19423 - DNA, 260 bp, Unknown
  Description of Unknown: LeftRegion for integrase B6424 sequence
atcagccacagggaaagctctacgagtacaggcctgcgtattcgccggaacgcgaggacatgcgccgatttattgagatgtgctttgagcccggttccccggccaacgcaaagctgaaggaaatgctgctgaacaccgtcatggacgacgatcagtcaaagaacccctgatacaatcatgattccttcaatcggaaggtggtgaatcctacgaaagccgtcatctacgcccgctactcctccgataatcaacgcgaggaa

SEQ ID NO: 19424 - DNA, 260 bp, Unknown
  Description of Unknown: LeftRegion for integrase B6425 sequence
agcatgccggcgaacgcccctatttcgcctgctgccaaaagcgagaaggtcacgatggctctcccatatggagggtgaccgttgtctatctcggaagataaaagagccccgtcggcagcgccggtaccgctatagccgacagggcatccaaccagtgcacccatgcaaactcaacttgaaggaagggtgacatacacattatgccaaagaaggcagtgatatacgcgaggttctcgtgcaacaggcagcgcgaggcctca

SEQ ID NO: 19425 - DNA, 260 bp, Unknown
  Description of Unknown: LeftRegion for integrase B6426 sequence
ttattatttaaatcaaattagaacattcaactaaaaaccgcccctgcaccaacaggaacggcttttacatagattttctgtacaggctgtaagggccaatacgatatagcttagacacctacattgtatcacaccttacggcacctgtataggtgtatttttatacccatttttcatataatccacaaggagatgatacaatgtcagagttatcaacaaacaattcacagcccttggaaatcggggccgcttacatccgt

SEQ ID NO: 19426 - DNA, 260 bp, Unknown
  Description of Unknown: LeftRegion for integrase B6427 sequence
ttaaagagaggtttaatcacttcgtcagagaaggaaagaattatcaaaaaagtttcagaataaagcggcttttgtctggacttttataggtgagcacggtattgtttgtcctgcccaataaaaagggcgggacaaattttttatcgcagttcgaatccagtcgaaagagccgaaaggcgaacaagaaaggagcgtaagaaatgaatattcaagagatacctacgaaaaaagtggagaaaccacgagtatgtgcctatgtg

SEQ ID NO: 19427 - DNA, 260 bp, Unknown
  Description of Unknown: LeftRegion for integrase B6428 sequence
actgggaacaatcagtagtttttcaatgtccttttatgaggtacatgggagtcctgagttttcatttacgaattttatcattccagaagcattcagccttgtaagcggaatcatgtttcttggttttggtgaaataattaagcttcttcaggatatatgcaataagatcaaatgattgtatgagttgaaacgaggttattatggctgctattgactttaataatgttgtagatctgtatattcgtgtcagcacttctgag

SEQ ID NO: 19428 - DNA, 260 bp, Unknown
  Description of Unknown: LeftRegion for integrase B6429 sequence
caaccggagtgctgagaatatcagcttacctacactgttgaaattatctgaatatttcggagtatcaatcgaggaattagtacacggaaccccacaacgtgaaataaccttttcaaaccggatttacacagacaaagagctagaggaaatacagctcttcgcacaatttttactgcatcgaagaaaggactagatgatgaatggcatacgcactatatttacgaaaatcacgtgcagacgaagaactggggcacgagaac

SEQ ID NO: 19429 - DNA, 260 bp, Unknown
  Description of Unknown: LeftRegion for integrase B6430 sequence
agggacgcctctgtaagtggagtttatatattcctagccaatggtttatgtagatgtaaacgcttaaatatcactcttgacggacgcttagaggttaaatctgacaaccctaaatatgatatggagattgtaggccctaacgacaacatagagataaatattatcggtagagttatcaacaatttaagtagaggtttataatgtctgatattgctgttatatatgccagagtctctagcaaagaacaggagacagggggt

SEQ ID NO: 19430 - DNA, 260 bp, Unknown
  Description of Unknown: LeftRegion for integrase B6431 sequence
caacaggtcagccgagaatatcagcttacctacactgcttaaattatcagaatatttcggggtatcaatcgaggaattagtgcatggcacgccgcaacgtgagataactttttcaaaccggattttcactgatgaagaacttgaagaaatacagttatttgcacaatttttattacaccgacgaaaggactagatgatggatggcatacgcaatatacttgaggaaatcccgcatagatgaagaagcagggatagagaac

SEQ ID NO: 19431 - DNA, 260 bp, Unknown
  Description of Unknown: LeftRegion for integrase B6432 sequence
tataacaaatgatttaaaataaaaaatcgtccctgatgctaccaacatcaaggacgactctagctgatacttacagagcagtgctctgatataatatctctacacaagtcatattatatcattcatggcaccgcttttgcaagtaggtgtattttttatacccaaatttaatatatttacacataaggagcgtgatacatatgccaaaagcaaaagatttccggaccgcatgtgcatatataagagtgtcaaccgacaaa

SEQ ID NO: 19432 - DNA, 260 bp, Unknown
  Description of Unknown: LeftRegion for integrase B6433 sequence
agcatgccggcgaacgcccctatttcgcctgctgccaaaagcgcgaaggtcacgacggctctcccatatggagggtgaccgttgtctatctcggaagataaaagagccccgtcggcagcgctggcaccgctttagccgacggggcatccaaccagtgcacccatgcaaactcaacttgaaggaagggtgacattcacattatgccaaagagggcagtgatatacgcgaggttctcgtgcaacaggcagagagaagcgtcg

SEQ ID NO: 19433 - DNA, 260 bp, Unknown
  Description of Unknown: LeftRegion for integrase B6434 sequence
aaagagaaacatctatataaggaagcttgccatttcctctttgagcataaccataaagatgttacgattgtcagaggtcgtatctatacgcatgagtggttgcagttgtttgatgacttcattaataaaaaagccacattaggtaaagagttcttctctctggcagaaaaaacccttaaacggaagaaagaagagatagcatgagttacctttggggattggttgtagctatttatttgagaaagtcacgttcagatatt

SEQ ID NO: 19434 - DNA, 260 bp, Unknown; identical to SEQ ID NO: 19363
  Description of Unknown: LeftRegion for integrase B6435 sequence

SEQ ID NO: 19435 - DNA, 260 bp, Unknown
  Description of Unknown: LeftRegion for integrase B6436 sequence
gatacagaattagacgaataacttagaaaataaaaaccgcccctgcgccaacaggaacggctttcacatagattctcttgccggatactccggaaagatatatcagcttagacacctgaattatatcatttctggtacatcctggcaaggggtgtattttttatacccatttatcgtataatccacaaggagatgatataatgtcacaattatccaccagcaatgcacaacccttggaaatcggggccgcctacatccgt

SEQ ID NO: 19436 - DNA, 260 bp, Unknown
  Description of Unknown: LeftRegion for integrase B6437 sequence
caatcggagcgccgaaaatatcagcttgccgacattgcttaaattatccgagtatttcggcgtgacgatcgaggaattagtgcatggcacgccgcaacgggagataactttttcaaaccggatttacaccgacaaagaacttgaagaaatacaactatttgcacaatttttactacaccgaagaaaggactagatgatgaatggcatacgcaatgtacctgcgaaaatcccgcatagatgaagaagcaggacttgaaaac

SEQ ID NO: 19437 - DNA, 260 bp, Unknown; identical to SEQ ID NO: 19361
  Description of Unknown: LeftRegion for integrase B6438 sequence

SEQ ID NO: 19438 - DNA, 260 bp, Unknown
  Description of Unknown: LeftRegion for integrase B6439 sequence
tcgcgtcgaaagatggcggcagactgcggcatcagcccatcggcggtaaattcatggttcaaccggtcagccgaaaatatcagcttgccgacattgcttaaattatccgagtatttcggcgtgacgattgaggaattagtacacggcacgccgcaacgtgagataactttttcaaaccgaatttacaccgacaaatatgcatggcatacgccatttacttgaggaaatcccgcatagatgaagaagcagggatagagaac

SEQ ID NO: 19439 - DNA, 260 bp, Unknown; identical to SEQ ID NO: 19373
  Description of Unknown: LeftRegion for integrase B6440 sequence

SEQ ID NO: 19440 - DNA, 260 bp, Unknown
  Description of Unknown: LeftRegion for integrase B6441 sequence
gaaccgatttgaaaaaaatagaaaattaaataaaaatccgccccagtgttaccagcaccgaagcggatctgaatactcaccggagcaacccggtaaatatgtcctaagcaagcatattatatcatcattgctctggtttcgcaaccagggtatttttatacccttagttaagtatactcaaaaacaggagtgtgatggtaatgaaacaactgaatttcagagagtgtgccctgtacgtccgtgtttccactgacaaacag

SEQ ID NO: 19441 - DNA, 260 bp, Unknown
  Description of Unknown: LeftRegion for integrase B6442 sequence
tttataatattcgaattttcatttttaaaaatcaataaattttatatattcttctactactataacataattatatttttattattaaatagaaataaatatatagtatataaaagtaaaaaaataaagaaaaataatatttataaggaattaaagattttttagttattctgttatgacagtacaaaggaggttttattatgagatttttaaatgtagcattgtatgtaagagtatctacagatattcaggtcgatggt

SEQ ID NO: 19442 - DNA, 260 bp, Unknown
  Description of Unknown: LeftRegion for integrase B6443 sequence
tggctctcttgttaagtgtattatagcaaatctgctgtaaaagtcaactgcccccgatcaacgaccagaggcagtcaacacgtgtctggtgatacaaacacgccctaagcaagcttattgtatcacacacaggcacattttgcaaagatgtgttatttttttacacatttttataaattataccaaaggagtgtgtgaatatgataaaaacagcctgcgcctatgtgcgtgtatccactgacaaacaagaagaactgtcc

SEQ ID NO: 19443 - DNA, 260 bp, Unknown
  Description of Unknown: LeftRegion for integrase B6444 sequence
tggctctcttgttaagtgtattatagcaaatctgctgtaaaagtcaactgcccccggtcaacgaccagaggcagtcaacacgtgtctggtgatacaaacacgccctaagcaagcttattgtatcacacacaggcacattttgcaaagatgtgttatttttatacacatttttataaattataccaaaggagtgtgtgaatatgataaaaacagcctgcgcctatgtgcgtgtatccactgacaaacaagaagaactgtcc

SEQ ID NO: 19444 - DNA, 260 bp, Unknown
  Description of Unknown: LeftRegion for integrase B6445 sequence
gctataacttataactgtcaagaataatacaattaaaaaaagtcccctgctaccaacaggagaccaaaaaactaacctaccaaggtagatgccttgatatagtatagcctagacaactgtattatatcacataaaacacctgccttgcaaggtgttatttttatacccaaaaacatattttttataaggagtgatataatatgatagctatatatacaaggcaatctatcgataagaaagattccatttccattgaaaca

SEQ ID NO: 19445 - DNA, 260 bp, Unknown; identical to SEQ ID NO: 15597
  Description of Unknown: LeftRegion for integrase B6446 sequence

SEQ ID NO: 19446 - DNA, 260 bp, Unknown
  Description of Unknown: LeftRegion for integrase B6447 sequence
ccgcatagcagggctatacggcacgatatgaaccgcaaccatattgtaccatctcagccctgttaaatcaacagggcttcgttttgcccggccgcccccacgcgggagtgtggattgaaatggaaaaaaagcagatgctcggcattattctggctgtcgctccccacacggggcatggattgaaattaggaggttacaatatggatatcataacaagactgcgggctgctgcgtacggcaggtacagcaccgaattgcaa

SEQ ID NO: 19447 - DNA, 260 bp, Unknown
  Description of Unknown: LeftRegion for integrase B6448 sequence
tctttaggacaataaaacaaaataaaaaaccgccccagtgctaccaacacagagacggtctacatacccgaagatatgcgattaaaatccatgaatattgtatcatcttcggaaacagcttgcaatccagaacattcgttcatgtgctggctgttatttttataccatttttgcataaaattaaataaggagatgataacatggaaacgaaatacgcttttggatacgtccgtgtatccactgggaagcaggacgaatta

SEQ ID NO: 19448 - DNA, 260 bp, Unknown
  Description of Unknown: LeftRegion for integrase B6449 sequence
acaaaccatagatattgtcaaagacaaatataaaaaagatttatattcttccgattcacaaaaaataggttgaaaataaaaaaaatccccgaccgctactaacagtcggggaaatagtgtagtgttatggtacaccaattaaaaacatatatattgtaccataacaccgattaaaaatcaagttaagaggtgttatttttatgaacaaaaaaattaatgcagtcggatatgcacgatatagtacagaatttcaaacagat

SEQ ID NO: 19449 - DNA, 260 bp, Unknown
  Description of Unknown: LeftRegion for integrase B6450 sequence
ttctctcaattctttaggacaataaaataccgccccagtgctaccaacactgagacggtctacatatccgaagatatgcgattaaaatccaagaatattgtatcatcttcggaaacagcttgcaatccagaacattcgttcatgtgctggctgttatttttataccatttttgcataaaattaaataaggagatgataacatggaaacgaaatatgcttttggatacgtccgtgtatccactggaaagcaagatgaatta

SEQ ID NO: 19450 - DNA, 260 bp, Unknown
  Description of Unknown: LeftRegion for integrase B6451 sequence
tttgtaatattcgaattttcatttttaaaaatcaataaattttatatattcttctactactataacataattatatttttattattaaatagaaataaatatatagtatataaaagtaaaaaaataaagaaaaataatatttataaggaattaaagattttttggttattctgttatgaaaatacaaaggaggttttattatgagatttttaaatgtagcattgtatgtaagagtatctacagatattcaggtcgatggt

SEQ ID NO: 19451 - DNA, 260 bp, Unknown
  Description of Unknown: LeftRegion for integrase B6452 sequence
ataaataaaaaagcgccgaccctctggaaagggtcagcgctttggccgcgtgttacaagggggggcgacatcctggaagaggtcgcttggctgcatcctgctggaacaggggcgggccgtacacgggcagttgacatggaaagcaactgcctttattgtaacacgcaggccccagtttgaaaagggggtttttatcctttatgcgtgtgatctgctatgttcgggtgtctacccgcgaacaggcggaaaagggctattct

SEQ ID NO: 19452 - DNA, 260 bp, Unknown
  Description of Unknown: LeftRegion for integrase B6453 sequence
agcgattgggaagcacttctcacatcgtcaaacataaaataaaaaaccgcccccgaccaaatggtcaagggcagtcaacacgtgtctggtgatacaaacacgccctaagcaagcttattgtatcacacacaggcacattttgcaaagatgtgttatttttatacacatttttataaattataccaaaggagtgtgtgaatatgataaaaacagcctgcgcctatgtgcgtgtatccactgacaaacaagaagaactgtcc

SEQ ID NO: 19453 - DNA, 260 bp, Unknown
  Description of Unknown: LeftRegion for integrase B6454 sequence
aacttttattttattcaaacgacttaaatctgatataaaaaagtcccctgctaccaacagaggaccaaaaactaacctaccaaggcagatgccaagatatagtatagcctagacaactgtattatatcacaaataacacctgtcttgcaaggtgttatttttatacccaaaaacatattttttataaggagtgatataatatgatagctatatatacaaggcaatctatagataagaaagattctatatctattgaaaca

SEQ ID NO: 19454 - DNA, 260 bp, Unknown
  Description of Unknown: LeftRegion for integrase B6455 sequence
tccggagatagtgattttgttcctgccgcaaaacaagcacgccgtgaaggtattgattttattttagatccaatgagatcccccatcaaacctgatttatatgagcacattgatgggatacgtacaaaaattccacttccaaaatttgatgaaaaagatttaaacgataaccagtaaccattttccaaaggagtgatcctatgtccacaaccatcaaaacagctgctgcctacatccgcgtatcgacagatcgccaggaa

SEQ ID NO: 19455 - DNA, 260 bp, Unknown
  Description of Unknown: LeftRegion for integrase B6456 sequence
tggctctcttgttaagtgtattatagcaaatctgctgtaaaagtcaactgcccccggtcaacgaccagaggcagtcaaatcgtgtctggtgatacaaacacgccctaagcaagcttattgtatcacacacaggcacattttgcaaagatgtgttatttttatacacatttttataaattataccaaaggagtgtgtgaatatgataaaaacagcctgcgcctatgtgcgtgtatccactgacaaacaagaagaactgtcc

SEQ ID NO: 19456 - DNA, 260 bp, Unknown
  Description of Unknown: LeftRegion for integrase B6457 sequence
ttattagccagcaggaacgggaacggatcgcccgacgtacagccgaaggcgtgaaaaacggtgaatgttaactctttgataacaatcgattattgtctggatattccgaaaattgtctggtagttttgtccctgccaacacggcagggacaaaatttttaacgccaatcaaatccaccaaatcgaaaggaggaaacacaagtggagaacacaagaaagtgcaaacgagccgtggcctacgtgagagtgtcctccgggagc

SEQ ID NO: 19457 - DNA, 260 bp, Unknown
  Description of Unknown: LeftRegion for integrase B6458 sequence
attaaattctttaggagaataaaataaaaaccgccccggtgctaccaacacagagacggtctacatacccgaagatatgcgattaaaatccatgaatattgtatcatcttcggagcagctacgcaagcggaacatttgttttgcgctggctgttatttttgtactcgtttttgcataaaattaaataaggagatgacgacatggaaacgaaatacgcttttggatacgtccgtgtatccacaggaaaacaggatgaatta

SEQ ID NO: 19458 - DNA, 260 bp, Unknown
  Description of Unknown: LeftRegion for integrase B6459 sequence
aaagcaaaaaagtcccctgctaccaacagaggacctacactgacaatccaatgctaccaataaaggattgtcaaagtaccatacaaggcagatgccctgatataatacaccaacaaagatattatatcacaaataacacctgccttgcaaggtgttatttttatacccaaaaacatattttttataaggagtgatataatatgatagctatatatacaaggcagtctatcgataagaaagattccatttccattgaaaca

SEQ ID NO: 19459 - DNA, 260 bp, Unknown
  Description of Unknown: LeftRegion for integrase B6460 sequence
aagcaccaacagacaaagttaaagaaagcaagtaaaccttttcctagtacaaactagaaacattacttgctttcagataataagaacattttatttatacttccatgttcttttcttcacttagttagaattcatttctaacttttaaatgttattttactaatatatattgaatatgtcaagttataaggagtgatcctatgtccacaaccatcaaaacagctgctgcctacatccgcgtatcgacagatcgccaggaa

SEQ ID NO: 19460 - DNA, 260 bp, Unknown
  Description of Unknown: LeftRegion for integrase B6461 sequence
tggctctcttgttaagtgtattatagcaaatctactgtaaaagtcaactgcccctggtcaacgaccagaggcagtcaacacgtgtctggtgatacaaacacgccctaagcaagcttattgtatcacacacaggcacattttgcaaagatgtgttatttttatacacatttttataaattataccaaaggagtgtgtgaatatgataaaaacagcctgcgcctatgtgcgtgtatccactgacaaacaagaagaactgtcc

SEQ ID NO: 19461 - DNA, 260 bp, Unknown
  Description of Unknown: LeftRegion for integrase B6462 sequence
agtttttaaaaactatctaatatagcaaataaaaaaagatccttcaccgcgccaacagtgaaggatagatcgatacagtctgcgccaacagaactgcatcagcattgtaaaattatgacctgctaaaatcaccttttacagtgctcattttaacatattttagaaaggatggaaacagatttattatgagcgaatatatcatgtatcttagaaaaagcagacaggataatccagaagaaacagtggaggaggttcttttc

SEQ ID NO: 19462 - DNA, 260 bp, Unknown
  Description of Unknown: LeftRegion for integrase B6463 sequence
acagggaagaattagagggggataaagaatcttctacacacagcgaaggtaatccccatagaactgctcaggcgtaaaaagcgattggaggtgatactacgaaagcggtaatatatgctcgatactcaagccacaatcaaagagaggaatctatcgagggacaacttcgtgagtgtcacgacttcgccttaaaaaatggaatgacgatcatcggcgagtattgcgacagagcaatctctggaaaaaccgataaccgtccg

SEQ ID NO: 19463 - DNA, 260 bp, Unknown
  Description of Unknown: LeftRegion for integrase B6464 sequence
tttataatattcgaattttcatttttgaaaatcaataacttttatatattcttctactactataacataattatatttttattattaaatagaaataaatatatagtatataaaagtaaaaaaacaaagaaaaataatatttataaggaattaaagattttttggttattctgttatgacagtacaaaggaggttttattatgagatttttaaatgtagcattgtatgtaagagtatctacagatattcaggtcgatggt

SEQ ID NO: 19464 - DNA, 260 bp, Unknown
  Description of Unknown: LeftRegion for integrase B6465 sequence
tagcgtcacacgttttataaaataaaaaccgccccagtgctaccaacaccgggacggcaatacatatccgaagatatgcgattgaaatccaagaatattgtatcatcttcggagcagtcacgcaagcggaacatcagttcgcacgttggctgttatttttatactcatttttgcataaaattaaataaggagatgatagcatggaaacaaaatatgcctttggatatgtacgtgtatccacaggaaaacaggatgaatta

SEQ ID NO: 19465 - DNA, 260 bp, Unknown
  Description of Unknown: LeftRegion for integrase B6466 sequence
gctgcttctgttggatattaaaacaaaataaaaaaccgcccctgcgccaacaggaacggtctacatacccgaagatatgcgattaaaatccaagaatattgtatcatcttcggagcagtcacgcaagcggaacatatgttttgtgctggctgttatttttgtactcgtttttgcataaaattaaataaggagatgataacatggaagcgaaatacgcttttggatacgtccgtgtatccactggaaagcaagatgaatta

SEQ ID NO: 19466 - DNA, 260 bp, Unknown
  Description of Unknown: LeftRegion for integrase B6467 sequence
gaataataaaaaaagcgccgaccctctggaaagggtcagcgctttggccgcgtgttacaagggggcgacatcctggaagaggtcgcttggctgcatcctgctggaacaggggcgggccgtacacgggcagttgacatggaaagcaactgcctttattgtaacacgcaggccccagtttgaaaagggggtttttatcctttatgcgtgtgatctgctatgttcgggtgtctacccgcgaacaggcggaaaagggctattct

SEQ ID NO: 19467 - DNA, 260 bp, Unknown
  Description of Unknown: LeftRegion for integrase B6468 sequence
aaattctttaggagaataaaataaaaaccgccccggtgctaccaacaccgagacggtaatacatatccgaagatatgcgattgaaatccaagaatattgtatcatcttcggaaacagcttgcaatccagaacatttgttcatgtgctggctgttatttttgtactcgtttttgcataaaattaaataaggagatgataacatggaaacgcaatatgcttttggatacgtccgtgtatccactggaaagcaagacgaatta

SEQ ID NO: 19468 - DNA, 260 bp, Unknown; identical to SEQ ID NO: 19455
  Description of Unknown: LeftRegion for integrase B6469 sequence

SEQ ID NO: 19469 - DNA, 260 bp, Unknown
  Description of Unknown: LeftRegion for integrase B6470 sequence
gtaccagtatctaatgcctatgtggaagattttataaaaaaaagccccctgctaccaacaggaggcaaaaactaacctatcaaggtagatgccttgatatagtatagcctagacaactgtattatatcacacaaaacacctgccttgcaaggtgttatttttatacccaaaaacatattttttataaggagtgatataatatgatagctatatatacaaggcaatctatagataaaaaagattccatttccatcgaaaca

SEQ ID NO: 19470 - DNA, 260 bp, Unknown
  Description of Unknown: LeftRegion for integrase B6471 sequence
cggcgctgatctggacgatgacgaataaataaaaaagcgccgtccctctggaaagggccagcgcttcgaggccgcgtgttacatttgcttcgtgctcctgctggaacaggggcgggctgtacacgggcagttgacatagacgacaactgcctttattgtaacacgcaggccccaatttgaaaagggggtttttatcctttatgcgtgtgatctgctatgttcgggtatctacccgcgaacaggcggaaaagggctattct

SEQ ID NO: 19471 - DNA, 260 bp, Unknown; identical to SEQ ID NO: 19443
  Description of Unknown: LeftRegion for integrase B6472 sequence

SEQ ID NO: 19472 - DNA, 260 bp, Unknown; identical to SEQ ID NO: 19443
  Description of Unknown: LeftRegion for integrase B6473 sequence

SEQ ID NO: 19473 - DNA, 260 bp, Unknown
  Description of Unknown: LeftRegion for integrase B6474 sequence
cggctcgacgctcgattcggtggtcgaccccttccgtgggcggctggacccgagggcgctcaacgcgatgtacacgaatccgaaagatataccgatggaataccgagactagctcccggccacaagaaagcgcctcggtgcggactgcattccgcaccgaggcaggcgtccacaccttggaagagagggacggtcacattatggcatctcgcaggggatcgcgtaaggcgcccgagaaggaccacaagcgctgcgtcatc

SEQ ID NO: 19474 - DNA, 260 bp, Unknown
  Description of Unknown: LeftRegion for integrase B6475 sequence
tccggagatagtgattttgttcctgctgcgaaacaggcacgtcgtgaaggtattgattttattttagatccaatgagatcccccatcaaacctgatttatatgagcacattgatgggatacgtacaaaaattccacttccaaaatttgatgaaaaagatttaaacgataaccagtaaccattttccaaaggagtgatcctatgtccacaaccatcaaaacagctgctgcctacatccgcgtatcgacagatcgccaggaa

SEQ ID NO: 19475 - DNA, 260 bp, Unknown
  Description of Unknown: LeftRegion for integrase B6476 sequence
aataaataaaaaagcgccgaccctctggaaagggtcagcgctttggccgcgtgttacaaggggggcgacatcctggaagaggtcgcttggctgcatcctgctggaacaggggcgggccgtacacgggcagttgacatggaaagcaactgcctttattgtaacacgcaggccccagtttgaaaagggggtttttatcctttatgcgtgtgatctgctatgttcgggtgtctacccgcgaacaggcggaaaagggctattct

SEQ ID NO: 19476 - DNA, 260 bp, Unknown; identical to SEQ ID NO: 19460
  Description of Unknown: LeftRegion for integrase B6477 sequence

SEQ ID NO: 19477 - DNA, 260 bp, Unknown
  Description of Unknown: LeftRegion for integrase B6478 sequence
cgtgaaataaaaaaccgccgcccttggcgggcgacggctctcagcgcgcaagctgcctttttatatgcccccggtcagcaaggggcagtcgtaagcaagtcgcacatttataggccgctggcgacaggcggcatttggctgatgcctgattttagcacaacgagtcacgacaatgcaagggggtgattcctacgaatttcatgtatctccgcaagagccgcgcggaggaggggcagagcacggaggaggtgctggcgaag

SEQ ID NO: 19478 - DNA, 260 bp, Unknown; identical to SEQ ID NO: 19452
  Description of Unknown: LeftRegion for integrase B6479 sequence

SEQ ID NO: 19479 - DNA, 260 bp, Unknown
  Description of Unknown: LeftRegion for integrase B6480 sequence
acagggctaaaagtcaatttaagacaacaaaaaaaaagatccttcaccgcgccaacagtgaaggatagatcgatacagtctgcgccaacagaactgcatcagcattgtaaaattatgacctgctaaaatcaccttttacagtgctcattttaacatattttagaaaggatggaaacagatttattatgagcgaatatatcatgtatcttagaaaaagcagacaggataatccagaagaaacagtggaggaggttcttttt

SEQ ID NO: 19480 - DNA, 260 bp, Unknown
  Description of Unknown: LeftRegion for integrase B6481 sequence
cgtgaaataaaaaaccgccgtccttggcgggcgacggctctcagcacgcaagctgcctttttatatgcccccggtcagcaaggggcagtcgtaagcaagtcgcacatttataggccgctggcgacaggcggcatttggctgatgcctgattttagcacaacgagtcacgacaacgcaagggggtgattcctacgaattacatgtatctccgcaagagccgcgcggaggaggggcagagcacggaggaggtgctggcgaag

SEQ ID NO: 19481 - DNA, 260 bp, Unknown
  Description of Unknown: LeftRegion for integrase B6482 sequence
ttcattaaattctttaggagaataaaataaaaaccgcccctgcgccaacagagacggtctacatatccgaagatatgcgattgaaatccaagaatattgtatcatcttcggaaacagcttgcaatccagaacattcgttcatgtgctggctgttatttttgtactcgtttttgcataaaattaaataaggagatgataacatggaaacgaaatatgcttttggatacgtccgtgtatccactggaaagcaagacgaatta

SEQ ID NO: 19482 - DNA, 260 bp, Unknown
  Description of Unknown: LeftRegion for integrase B6483 sequence
tcagaaaatcgccgtgcaataaaataaaaaccgccccggtgctaccaacactgagacggtctacatacccgaagatatgcgattaaaatccatgaatattgtatcatcttcggagcagtcacgcaagcggaacatatgttttgcgatgactgttatttttgtactcgtttttgcataaaattaaataaggagatgataacatggaaacgaaatatgcttttggatacgtccgtgtatccactggaaagcaagacgaatta

SEQ ID NO: 19483 - DNA, 260 bp, Unknown
  Description of Unknown: LeftRegion for integrase B6484 sequence
aacgaatacaataatttttcgtaataaaaaccgccccagtgctaccaacactgagacggtctacatacccgaagatatgcgattaaaatccatgaatattgtatcatcttcggaaacagcttgcaagcggaacatatgttttgcgctggctgttatttttgtactcgtttttgcataaaattaaataaggagatgataacatggaaacgaaatacgcttttggatacgtccgtgtatccactggaaagcaagatgaatta

SEQ ID NO: 19484 - DNA, 260 bp, Unknown
  Description of Unknown: LeftRegion for integrase B6485 sequence
agtttttaaaaactatctaatatagcaaataaaaaaagatccttcaccgcgccaacagtgaaggatagatcgatacagtctgcgccaacagaactgtatccgcattgtaaaattatgacctgctaaaatcaccttttacagtgctcattttaacatattttagaaaggatggaaacagatttattatgagcgaatatatcatgtatcttagaaaaagcagacaggataatccagaagaaacagtggaggaggttcttttc

SEQ ID NO: 19485 - DNA, 260 bp, Unknown
  Description of Unknown: LeftRegion for integrase B6486 sequence
atttatagactacatagataaaactaaattataagacaaaaaagtcccctgctaccaacagaggaccaaaaactaacctaccaaggcagatgccaagatatagtatagcctagacaactatattatatcacaaataacacctgccttgcaaggtgttatttttataccaaaaacatattttttataaggagtgatataatatgatagctatatatacaaggcagtctatcgataagaaagattccatttccattgaaaca

SEQ ID NO: 19486 - DNA, 260 bp, Unknown
  Description of Unknown: LeftRegion for integrase B6487 sequence
gcgttttttactttataggaaacgggcagtttcctataaagtaaaaaaccgccccagccaaacggcagaggcagtcaaatcgtgtctggtgatacaaacacgccctaagcaagcttattgtatcacacacaggcacattttgcaaagatgtgttatttttatacacatttttataaattataccaaaggagtgtgtgaatatgataaaaacagcctgcgcctatgtgcgtgtatccactatccaacaagaagaactgtcc

SEQ ID NO: 19487 - DNA, 260 bp, Unknown
  Description of Unknown: LeftRegion for integrase B6488 sequence
ctagttgttgaaggaacaattaatgttcaattcaagagtaaataaaaaaaccgccccacacaaaatgagacggttctgacaatagaataacaaggagttatactatcgccctcgacaagcatattatagcaccttttatataaattaacaataattatattgggtgtattttttatacccttttttaaggagtgcatgtaatgaataataatttagtacctctctctaattcagcaataaatgaattagttgatctttac

SEQ ID NO: 19488 - DNA, 260 bp, Unknown
  Description of Unknown: LeftRegion for integrase B6489 sequence
cagcaagatttaactattcaataaaaataaaaaccgtccctgcgccaacaggaacggtctacatatccgaagatatgctattgaaatccacgaatattgtatcatcttcggaaacagcttgcaatccagaacattcgttcatgtgctggctgttatttttgtactcgtttttgcataaaattaaataaggagatgataacatggaaacgaaatacgcttttggatacgtccgtgtatccactggaaagcaagatgaatta

SEQ ID NO: 19489 - DNA, 260 bp, Unknown; identical to SEQ ID NO: 19443
  Description of Unknown: LeftRegion for integrase B6490 sequence

SEQ ID NO: 19490 - DNA, 260 bp, Unknown
  Description of Unknown: LeftRegion for integrase B6491 sequence
gttcgtctcggtagctttttctgtttaaacaaaaaaagatccttcaccgcgccaacagtgaaggatagatcgatacagtctgcgccaacagaactgcatccgcattgtaaaattatgacctgctaaaatcaccttttacagtgctcattttaacatattttagaaaggatggaaacagatttattatgagcgaatatatcatgtatcttagaaaaagcagacaggataatccagaagaaacagtggaggaggttcttttc

SEQ ID NO: 19491 - DNA, 260 bp, Unknown
  Description of Unknown: LeftRegion for integrase B6492 sequence
atttttaaaaactatctaatatagcaaacaaaaaaaagatccttcaccgcgccaacagtgaaggatagatcgatacagtctgcgccaacagaactgtatcagcattgtaaaattatgacctgctaaaatcaccttttacagtgctcattttaacatattttagaaaggatggaaacagatttattatgagcgaatatatcatgtatcttagaaaaagcagacaggataatccagaagaaacagtggaggaggttcttttc

SEQ ID NO: 19492 - DNA, 260 bp, Unknown
  Description of Unknown: LeftRegion for integrase B6493 sequence
tgctataacttataactgtcaagaataatacaattaaaaaaagtcccctgctaccaacagaggaccaaaaaactaacctatcaaggcaagtgccaagatataatcagcctgaacaactgtattatatcacaaatagcacctgccttgcaaggtgttatttttatacccaaaaacatattttttataaggagtgatataatatgatagctgtatatacaaggcagtctatagataagaaagattctatatctattgaaaca

SEQ ID NO: 19493 - DNA, 260 bp, Unknown
  Description of Unknown: LeftRegion for integrase B6494 sequence
tacaaacggcggcacaaaataccacaataaatcttcttgcagtaatatggacaatccccagcaagtaacaaaagacgaggctgtcgcaatgggttttaccccatgcaaaagatgttattaatcattttaataaaatacaagcttaattaaaattaagctgcaacacaataatatttgacgggagatctataaaaagaattatgatagccatatattcaagacaatccatagataaaaaagacagtataagcattgaaacg

SEQ ID NO: 19494 - DNA, 260 bp, Unknown
  Description of Unknown: LeftRegion for integrase B6495 sequence
gatattacaaaacaaaccattgtttttctttcccctaagaaaaatatataccatagcaatgaacactgcagtggaatgcagaatgctctttctattcgtttggaaaaggcaatgaaaatgggctttattccctgcaaaaaatgctgtagttttaattttaatgaattataatcactaactaacaccaaaggagtgatcctatgtccacaaccatcaaaacagctgctgcctacatccgcgtatcgacagatcgccaggaa

SEQ ID NO: 19495 - DNA, 260 bp, Unknown
  Description of Unknown: LeftRegion for integrase B6496 sequence
caattaaaaaagtcccctgctaccaacagaggacctacactgacaatccaatgctaccaataaaggattgtcaaagtaccatacaaggcagatgccctgatataatacaccaacaaagatattatatcacaaataacacctgccttgcaaggtgttatttttatacctaaaaacatattttttataaggagtgatataatatgatagctatatatacaaggcagtctatcgataagaaagattccatttccattgaaaca

SEQ ID NO: 19496 - DNA, 260 bp, Unknown
  Description of Unknown: LeftRegion for integrase B6497 sequence
tttataatattcgaattttcatttttaaaaatcaataaattttatatattcttctactactataacataattatatttttattattaaatagaaataaatatatagtatataaaagtaaaaaaataaagaaaaataatatttataaggaattaaagattttttggttattctgttatgacagtacaaaggaggttttattatgagatttttaaatgtagcattgtatgtaagagtatctacagatattcaggtcgatggt

SEQ ID NO: 19497 - DNA, 260 bp, Unknown
  Description of Unknown: LeftRegion for integrase B6498 sequence
agaaaaagaatgggcaaaagaaaaatacttacgttttgatgtaaaattagatcgtgaggtatttggggaaactatagccagtatcaaggaagagttaggaactgctgcgttcttaaagaaagctttagagctttacaaaacaaatcctgagttatttaagtagtaaaatcaattcaaagaaataagataggtgtttaaaaatgaaggcagctttatacactcgtgtttctacagatgaacaggctgaacatggcttttcg

SEQ ID NO: 19498 - DNA, 260 bp, Unknown
  Description of Unknown: LeftRegion for integrase B6499 sequence
caactagaaagcaaaaattaactatgaaaacaaaagcgatccctgcgccaacaggaaccgctttaacatagatcactcttatcaggtatactgaaagatataatccactccattccagattataccatttcagtggcacctgcacaagaggtgtattttttatacccttttttaataaattttaatcaggaggcaatattatgactgcaaaaaacgctgaatctttcttagaaatcggagctgcttacatccgtgtaagt

SEQ ID NO: 19499 - DNA, 260 bp, Unknown
  Description of Unknown: LeftRegion for integrase B6500 sequence
aataaaagacccttgtgctggtaacacaagagcctttatataacgacatttacataagctgtgcttatgatataatatcgccctagacaagccatattatatcattcatagcaccgcttttgcaagtggtgttatttttgtacccatttttgagttgcaccggtgcaacttgcatatattctacagaaaggatgattaatatggctaaggatatacttaatatgaaatctgcgtgtgcttatatccgtgtatctactgac

SEQ ID NO: 19500 - DNA, 260 bp, Unknown; identical to SEQ ID NO: 19499
  Description of Unknown: LeftRegion for integrase B6501 sequence

SEQ ID NO: 19501 - DNA, 260 bp, Unknown
  Description of Unknown: LeftRegion for integrase B6502 sequence
aaaagatttccgcagacgaattttaaaaataaaagcgatccctgcgccaacaggaaccgctttaacatagatcactcttatcaggtatactgaaagatataatccactaccactccaaattataccatttccgtagcacctgcacaagaggtgtattttttgtacccatttttaatacattttaagcaggaggcaatattatgactaccaaaaacactgaatctttcttagaaatcggagcagcttacatccgtgtaagt

SEQ ID NO: 19502 - DNA, 260 bp, Unknown
  Description of Unknown: LeftRegion for integrase B6503 sequence
taaaagcccctgtgctaccaacacaagagcttttaccacgatacttacataagcactgcttatgatataataccgccttagacaagccatattatatcatttctaacaccgcttatgcaagtaggtgttattttttatacccatttttactgagttgcaccggtgcaacttgcatatattttacagaaaggatgattaatatggctaaggatatacttaatatgaaatctgcttgtgcctacatacgtgtgtccaccgat

SEQ ID NO: 19503 - DNA, 260 bp, Unknown
  Description of Unknown: LeftRegion for integrase B6504 sequence
tttccttaaattaactgtatttaccaattttccacattcttttaaaatatcatctatattttcattatggcaatagctgtcatctataattatttttatatttccaatttgttctgtctttttcatattaaaccacctctttttattcatattctcaattataaaaaatataattttctcaaagtatttcaggtgatattatggcatattgtatgtatttaagaaaatccagagctgacaaagattatgaaaatttatca

SEQ ID NO: 19504 - DNA, 260 bp, Unknown
  Description of Unknown: LeftRegion for integrase B6505 sequence
ataaaagcccctgtgctaccaacacaagagcttttaccacgatacttacataagctgtgcttatgatatataccgccttagacaagccatattatatcatttctaacaccgcttatgcaagtaggtgttattttttatacccatttttactgagttgcaccggtgcaacttgcatatattttacagaaaggatgattaatatggctaaggatatacttaatatgaaatctgcttgtgcctacatacgtgtgtccaccgat

SEQ ID NO: 19505 - DNA, 260 bp, Unknown
  Description of Unknown: LeftRegion for integrase B6506 sequence
caactagaaagcaaaaattaactatgaaaacaaaagcgatccctgcgctaacaggaaccgctttaacatagatcactcttatcaggtatactgaaagatataatccactccattccagattataccatttcagtggcacctgcacaagaggtgtattttttatacccttttttaataaattttaatcaggaggcaatattatgactgcaaaaaacgctgaatctttcttagaaatcggagctgcttacatccgtgtaagt

SEQ ID NO: 19506 - DNA, 260 bp, Unknown
  Description of Unknown: LeftRegion for integrase B6507 sequence
aaaagatttccgcagacgaattttaaaaataaaagcgatccctgcgccaacaggaaccgctttaacatagatcactcttatcaggtatactgaaagatataatccactaccactccaaattataccatttccgtagcacctgcacaagaggtgtattttttatacccttttttaataaattttaatcaggaggcaatattatgactgcaaaaaacgctgaatctttcttagaaatcggagctgcttacatccgtgtaagt

SEQ ID NO: 19507 - DNA, 260 bp, Unknown
  Description of Unknown: LeftRegion for integrase B6508 sequence
taaaataaaagctcctgtgctaccaacacaagagcttttaccacgatacttacataagctgtgcttatgatataataccgccctagacaagccatattatatcattcatagcaccgcttttgcaagtggtgttatttttgtacccatttttgagttgcaccggtgcaacttgcatatattttacagaaaggatgattaatatggctaaggatatacttaatatgaaatctgcatgtgcttatatccgtgtatctactgac

SEQ ID NO: 19508 - DNA, 260 bp, Unknown
  Description of Unknown: LeftRegion for integrase B6509 sequence
gccacgaaaccgggtacgaagaaggcgaaagcgaaggatacgaaagtggataccaagaaggctatgaagaaggcgaatcgcatatgcgcttcctacaaaagaagaaagatagcgcagccagtaatgttatactgatcggcgctgtgattttcttcattatatatcacttcgaaaagaaaaagtctgaataaggaggaattatggaacgcaaagtcgcttgctacatccgtgtgagcactcaggagcaggccacgcacgga

SEQ ID NO: 19509 - DNA, 260 bp, Unknown; identical to SEQ ID NO: 19499
  Description of Unknown: LeftRegion for integrase B6510 sequence

SEQ ID NO: 19510 - DNA, 260 bp, Unknown; identical to SEQ ID NO: 19503
  Description of Unknown: LeftRegion for integrase B6511 sequence

SEQ ID NO: 19511 - DNA, 260 bp, Unknown
  Description of Unknown: LeftRegion for integrase B6512 sequence
ataaataaaagcccttgtgttggtagcacaagagcctttaccacgatacttacataagctgtgcttatgatataataccgccttcgacaagccatattatatcattcatagcaccgcttttgcaagtggtgttatttttttacccatttttgagttgcaccggtgcaacttgcatatattttacagaaaggatgattaatatggctaaggatatacttaatatgaaatcagcatgtgcttatatccgtgtatctactgac

SEQ ID NO: 19512 - DNA, 260 bp, Unknown
  Description of Unknown: LeftRegion for integrase B6513 sequence
ttcccctctattcacattgataggtgcaacaatcatcttttcaacgccatcaacgaaagcccgaacgcaaccctcaacatcaacggtacagagggatttacggctcaggagcttgaattgattgagctgtatcggaacttcccgctgagaaagcaaatggaactgctgaactacgctttcagcctgaaagaaggtaagcaatgagagtagttctttacatgaggtatagcagcgaccgtcagactgagcaatccatagag

SEQ ID NO: 19513 - DNA, 260 bp, Unknown; identical to SEQ ID NO: 19507
  Description of Unknown: LeftRegion for integrase B6514 sequence

SEQ ID NO: 19514 - DNA, 260 bp, Unknown
  Description of Unknown: LeftRegion for integrase B6515 sequence
aaataaaagcccctgtgctaccaacacaagagcttttacccgcgacttacaattaagctgtactcaaatgatataatcgccttcagcaagccatattatatcatttgaaacaccgcttttgcaagtggtgttatttttatacccatttttagagttgcaccggtgcaattcgcatatattttacagaaaggatggttaatatggctacagatattgcaaacatgaaagtagcatgtgcttatattcgtgtatctacagac

SEQ ID NO: 19515 - DNA, 260 bp, Unknown; identical to SEQ ID NO: 18960
  Description of Unknown: LeftRegion for integrase B6516 sequence

SEQ ID NO: 19516 - DNA, 260 bp, Unknown; identical to SEQ ID NO: 19501
  Description of Unknown: LeftRegion for integrase B6517 sequence

SEQ ID NO: 19517 - DNA, 260 bp, Unknown
  Description of Unknown: LeftRegion for integrase B6518 sequence
atggataataaaaaagaagtcctaaagcttcaaattgtccttgaactaatcaaattgcaaagagatttaatcaagacgattaatgaagcaaacaagagaggcaagtaagcctctccccttaaatgggggacttcttctactattattttaacatcttttacaataaaatcaattcaaagaaataagataggtgtttaaaaatgaaggcagctttatacactcgtgtttctacagatgaacaggctgaacatggcttttcg

SEQ ID NO: 19518 - DNA, 260 bp, Unknown
  Description of Unknown: LeftRegion for integrase B6519 sequence
caactagaaagcaaaaattaactatgaaaacaaaagcgatccctgcgccaacaggaaccgctttaacatagatcactcttatcaggtatactgaaagatataatccactccattccagattataccatttcagtggcacctgcacaagaggtgtattttttatacccttttttaatacattttaagcaggaggcaatattatgactacaaaaaatactgaatctttcttagaaatcggagctgcttacatccgggtaagt

SEQ ID NO: 19519 - DNA, 260 bp, Unknown
  Description of Unknown: LeftRegion for integrase B6520 sequence
atgtaaattgttaaatagatagaaaagccgcccagtgctaccaacaccaaacggctttcacatagattttctcttaccagattactccggtttgattaatccagacttagaacatctgaattatatcattttcggaacatcctggcaagggtgttatttttatactcatttttcatacgtatagagaaggagatgatcatatgtcagataaacctacacccaaaaatcttgaaatcggtgctgcctatatcagagtcagt

SEQ ID NO: 19520 - DNA, 260 bp, Unknown
  Description of Unknown: LeftRegion for integrase B6521 sequence
tttccttaaattaactgtatttaccaattttccacattctttcaaaatgtcatctgtattttcattattacaatagctgtcatctataattaactttatatttttaacttgttctacttttttcatattaaatcacctctttttattcatattcccaattataaaaaatataattttctcaaagtattttaggtgatattatggcatattgtatgtatttaagaaaatcccgagctgataaagattacgaaaattcatca

SEQ ID NO: 19521 - DNA, 260 bp, Unknown
  Description of Unknown: LeftRegion for integrase B6522 sequence
taagattagcaaaacattttactcaagaaagattagccgaaagattaaatattagtcaaggatatttatctaggctagaacgtaatgaaaaggtagctgtcttaggggttagacttaaaactataagagatttagcaagggagcttggagttaaggagaaggatattttaaaattcaaataaactctaggagggacttgtatgaaaaaaatagcaatttatattagaaaatctgtaaagggagatgagaattcaatttcc

SEQ ID NO: 19522 - DNA, 260 bp, Unknown
  Description of Unknown: LeftRegion for integrase B6523 sequence
tatattttcctgatttagtcaaatatcctacgtatttcttcatatatttattctccaaataagctttcaaatttcttctttaaactccggtttgattaatccagacttagaacatctgaattatatcattttcggaacatcctggcaagggtgttatttttatactcatttttcatacgtatagagaaggagatgatcatatgtcagataaacctacaccaaaaagtcttgaaatcggtgctgcctatatcagagtcagt

SEQ ID NO: 19523 - DNA, 260 bp, Unknown; identical to SEQ ID NO: 19501
  Description of Unknown: LeftRegion for integrase B6524 sequence

SEQ ID NO: 19524 - DNA, 260 bp, Unknown
  Description of Unknown: LeftRegion for integrase B6525 sequence
agacttgctctttcttttgctttgattgatagactatgggaaaaaggacttataacagatgatgaaaagaaaaaaataaaagaaagagaaaaagttaaaattttatcaacaaaagactagatattaattcatatttgcggtattgttttggtacaatcaactccgtaaatgagttaggtgtataaaacaaggaggtacatatggaaaaagccgtagcctatataagggtttctacaaaaagtgattttcagcttcatagt

SEQ ID NO: 19525 - DNA, 260 bp, Unknown
  Description of Unknown: LeftRegion for integrase B6526 sequence
aggactcacataccttacaggagcaagagataccagttgcataattaaaaaccgcccctgcgccaacaggaacggttttagatgcactccgaagagatacacccctattcaaatatattgtatcatcttcgagcagccaatgcaagagaacgaaagttcgctggctgttatttttatactattttcaaggaggacaaataatgaataaacgcgtagccggttatgcccggtactctacagacaatcagacagaaaacagt

SEQ ID NO: 19526 - DNA, 260 bp, Unknown
  Description of Unknown: LeftRegion for integrase B6527 sequence
tactcttttgcatagattcggcagaaaaggttgtgcagattggtgatagctttcagtggtttcctgtggtactgtgttgagctgaaaagctgccctatctgccgcgactgattttgcaagcatagcgtttggatatccaccaaacgcaaatcttggggcggcgccccaaaccccgcaagtgaccataaggaggaatgccaatgaaagcagtcatctacgcccgatacagcagcgacaaccagcgagaggaaagcatcgag

SEQ ID NO: 19527 - DNA, 260 bp, Unknown
  Description of Unknown: LeftRegion for integrase B6528 sequence
aactagaaagcaaaaattaactatgaaaacaaaagcgatccctgcgccaacaggaaccgctttaatatagattactcttatcaggtatactgaaagatataatccactaccactcccgattataccatttccgtagcacctgcacaagaggtgtattttttatacccatttttaatacattttaatcaggaggcaatattatgactatcaaaagcactgaatctttcttagaaatcggagctgcttacatccgtgtaagt

SEQ ID NO: 19528 - DNA, 260 bp, Unknown; identical to SEQ ID NO: 19503
  Description of Unknown: LeftRegion for integrase B6529 sequence

SEQ ID NO: 19529 - DNA, 260 bp, Unknown
  Description of Unknown: LeftRegion for integrase B6530 sequence
aataaataaaagcccctgtgctaccaacacaagagcttttaccacgatacttacataagctgtgcttatatataataccgccctagacaagctatattatatcattcatagcaccgcttttgcaagtggtgttatttttgtacccatttttgagttgcaccggtgcaacttgcatatattttacagaaaggatgattaatatggctaaggatatacttaatatgaaatctgcttgtgcctacatacgtgtgtccacagat

SEQ ID NO: 19530 - DNA, 260 bp, Unknown; identical to SEQ ID NO: 19527
  Description of Unknown: LeftRegion for integrase B6531 sequence

SEQ ID NO: 19531 - DNA, 260 bp, Unknown
  Description of Unknown: LeftRegion for integrase B6532 sequence
gcgcgcttagggttagctggctagtaaaagagcgccgctcgcgcgacgctccactcgcactcgcttgcaggagcaagcagagagcagccttgtctattataatagcacactctgctgctcttgtcttgtgggtacatgccgaaaaaggaaaataatgtatctttaccatgcttttactgtacatttggaggtaaataaaaatgataagagcagctatctatatccgagtcagcactgaggaacaggcccggcacggcttc

SEQ ID NO: 19532 - DNA, 260 bp, Unknown
  Description of Unknown: LeftRegion for integrase B6533 sequence
agaaaaagaatgggcaaaagaaaaatacttacgttttgatgtaaaattggatcgtgaagtatttggagagactatagccagtatcaaggaagagttaggaactgctgcgttcttaaagaaagctttagagctttacaaaacaaatcccgagttatttaagtagtaaaatcaattcaaagaaataagataggtgtttaaaaatgaaggcagctttatacactcgtgtttctacagatgaacaggctgaacatggcttttcg

SEQ ID NO: 19533 - DNA, 260 bp, Unknown
  Description of Unknown: LeftRegion for integrase B6534 sequence
ctcaaagcttactctatcacataccacagacgtcataacaaacaccgggtagaataaaagaacataaaaaatggctcacctcgctattggcgtagcgaagtgagccggtattctactcatgtatgtgtacatgaatcaactaaagcatattcattatacatcacatgagctatacgcacaagtaggaaaggaaaagtataatgaatgtattagataacgtagtagacctgtatgtgcgggttagtactaccgagcaggcc

SEQ ID NO: 19534 - DNA, 260 bp, Unknown
  Description of Unknown: LeftRegion for integrase B6535 sequence
tgatgctttgcttcaactggcctgccgcaaaacaggcaatattcgttatattcagtaattattccttttttcatatttcacttgcgcatactgaaagatataatccactccattccagattataccatttcagtggcacctgcacaagaggtgtattttttatacccttttttaatacattttaagcaggaggcaatattatgactacaaaaaatactgaatctttcttagaaatcggagctgcttacatccgggtaagt

SEQ ID NO: 19535 - DNA, 260 bp, Unknown; identical to SEQ ID NO: 19518
  Description of Unknown: LeftRegion for integrase B6536 sequence

SEQ ID NO: 19536 - DNA, 260 bp, Unknown
  Description of Unknown: LeftRegion for integrase B6537 sequence
tgatgaaaataaaacagaatactctattactgatattagagaagcttttaacttaatacttagttctgatgaattgacattaaataataaagaacttagttataatgaaaaatcattaattgaagatacaataaatgatgtactagactttatagtaaaaaaaagaaacaaactaaataactaatttaaaaggtgataatatgaaaagcatagctatatatataagaaaatctgtaaaaggtgatgataactcaatttct

SEQ ID NO: 19537 - DNA, 260 bp, Unknown
  Description of Unknown: LeftRegion for integrase B6538 sequence
atggataataaaaaagaagtcctaaagcttcaaattgtccttgaactaatcaaactgcaacgagatttaatcaagacgattaatgaagcaaacaagagaggcaagtaagcctctccccttaaatgggggacttcttctactattattttaacatcttttacaataaaatcaattcaaagaaataagataggtgtttaaaaatgaaggcagctttatacactcgtgtttctacagatgagcaagctgaacatggcttttca

SEQ ID NO: 19538 - DNA, 260 bp, Unknown
  Description of Unknown: LeftRegion for integrase B6539 sequence
caactagaaagcaaaaattaactatgaaaacaaaagcgatccctgcgccaacaggaaccgctttaacatagatcactcttatcaggtatactgaaagatataatccactccattccagattataccatttcagtggcacctgcacaagaggtgtattttttatacccttttttaatacattttaagcaggaggcaatattatgaccataaaaaacactgaatctttcttagaaattggagcagcttacattcgggtaagt

SEQ ID NO: 19539 - DNA, 260 bp, Unknown
  Description of Unknown: LeftRegion for integrase B6540 sequence
gccacgaaaccgggtacgaagaaggcgaaagcgaaggatacgaaagtggataccaagaaggctatgaagaaggcgaatcgcatatgcgcttcctacaaaagcagaaagatagcgcagccagtaatgttatactgatcggcgctgtgattttcttcattatatatcacttcgaaaagaaaaagtctgaataaggaggaattatggaacgcagagtcgcttgctacatccgtgtgagcactcaggagcaggccacgcacgga

SEQ ID NO: 19540 - DNA, 260 bp, Unknown
  Description of Unknown: LeftRegion for integrase B6541 sequence
ataaataaaagcccctgtgctaccaacacaagagcttttaccacgatacttacataagctgtgcttatgatataataccgccttcgacaagccatattatatcattcatagcaccgcttttgcaagtggtgttatttttgtacccatttttgagttgcaccggtgcaacttgcatatattttacagaaaggatgattaatatggctaaggatatacttaatatgaaatctgcatgtgcttatatccgtgtatctactgac

SEQ ID NO: 19541 - DNA, 260 bp, Unknown
  Description of Unknown: LeftRegion for integrase B6542 sequence
agaaaaagaatgggcaaaagaaaaatacttacgttttgatgtaaaattagatcgtgaggtatttggggaaactatagccagtatcaaggaagagttaggaactgctgcgttcttaaagaaagctttagagctttacaaaacaaatcctgagttatttaagtagtaaaatcaattcaaagaaataagataggtgtttaaaaatgaaggcagctttatacactcgtgtttctacagatgagcaagctgagcatggcttttcg

SEQ ID NO: 19542 - DNA, 260 bp, Unknown
  Description of Unknown: LeftRegion for integrase B6543 sequence
tttactatttatttactatattctatatacttttaaatatatatattttattaatttgaaattacaaaatacactaaattgtttttttatcaatttattttacatttttattcaaaacttatatttttttcatatcaatttaattttacagttataaaaaaatttagtattattcccttgaaagaaggaggttttttagtatgaaaaacatagctatatatataagaaaatctgtaaaaggtgatgataactcaatttct

SEQ ID NO: 19543 - DNA, 260 bp, Unknown; identical to SEQ ID NO: 19507
  Description of Unknown: LeftRegion for integrase B6544 sequence

SEQ ID NO: 19544 - DNA, 260 bp, Unknown; identical to SEQ ID NO: 19539
  Description of Unknown: LeftRegion for integrase B6545 sequence

SEQ ID NO: 19545 - DNA, 260 bp, Unknown
  Description of Unknown: LeftRegion for integrase B6546 sequence
taagattagcaaaacattttactcaagaaagattagctgaaagattaaatattagtcaaggatatttgtctaggctagaacgtaatgaaaaggtagctatcttaggtgttagacttaaaactataagagatttagcaagggagcttggagttaaggagaaggatattttaaaattcaaataaactctaggagggacttgtatgaaaaaaatagcaatttatattagaaaatctgtaaagggagatgagaattcaatttcc

SEQ ID NO: 19546 - DNA, 260 bp, Unknown
  Description of Unknown: LeftRegion for integrase B6547 sequence
aataaaagcccctgtgctaccaacacaagagcttttaccacgatacttacataagctgtgcctatgatataatatcgccctagacaagccatattatatcattctagacaccacttttgcaagtaggtgttatttttatacccattttttgagttgcaccggtgcaacttgcatatatttacagagaggatgattaatatatggttaaggatatacttaatatgaaatctgcatgtgcatatattcgtgtgtctactgac

SEQ ID NO: 19547 - DNA, 260 bp, Unknown
  Description of Unknown: LeftRegion for integrase B6548 sequence
ttaggttttgtcccatgcaaacgttgtaactaaaataaaagcccctgtgctaccaacacaagagcttttacggatacttactcaagcagtgcctgatataatatacccctaaccaagttatattatatcattccagacaccgcttttgcaagtaggtgttatttttatacccaattttgaatagaatggagtgatatactatgaaaaagaccttaaatgaaatgaaaaatgcctgcgcttatatccgggtatctaccgat

SEQ ID NO: 19548 - DNA, 260 bp, Unknown
  Description of Unknown: LeftRegion for integrase B6549 sequence
gcaatacgttactaatgagcttggattaaactaaataaaagcccctgtgctaccaacacaagagcttttacggatacttactcagacggtgtctgatataatatacccctaaccaagttatattatatcattccagacaccgcttttgcaagtaggtgttatttttatacccaaatatgaatagaatggagtgatatactatgaaaaagaccttaaatgaaatgaaaaatgcctgcgcttatatccgtgtatcgaccgat

SEQ ID NO: 19549 - DNA, 260 bp, Unknown
  Description of Unknown: LeftRegion for integrase B6550 sequence
ataaaataaaagcccctgtgctaccaacacaagagcttttaccacgatacttacataagctgtgcttatgatatataccgccctgaacaagccatattatatcattcatagcaccgcttttgcaagtggtgttatttttgtacccatttttgagttgcaccggtgcaacttgcatatattttacagaaaggatgattaatatggctaaggatatacttaatatgaaatctgcgtgtgcttatatccgtgtatctactgac

SEQ ID NO: 19550 - DNA, 260 bp, Unknown
  Description of Unknown: LeftRegion for integrase B6551 sequence
taggttttatcccatgcaaacgttgtaactaaaataaaagcccctgtgctaccaacacaagagcttttacggatacttactcaagcagtgcctgatataatatacccctaaccaagttatattatatcattcccggcaccgcttttgcaagtaggtgttatttttatacccaattttgaataagaatggagtgatatactatgaaaaagaccttaaatgaaatgaaaaatgcctgcgcctatatccgtgtatctaccgat

SEQ ID NO: 19551 - DNA, 260 bp, Unknown
  Description of Unknown: LeftRegion for integrase B6552 sequence
tgttgacatcagcaaaatcatcttaaatagaaaaaccgtccggtgctggtaacaccgaacggctttgcattatttttcttgccggttgtccggaaagatataatttgatacgcatccagattataccatttcagtggcacctgtgcaagaggtgtattttttgtacccttttttaatacatttaagcaggaggcattagcatggctactaaaatatctgaaaacttggagatcggagctgcttatatccgtgtaagcaca

SEQ ID NO: 19552 - DNA, 260 bp, Unknown
  Description of Unknown: LeftRegion for integrase B6553 sequence
taaataaaagcccctgtgctaacaacacaagagcttttaccacgatacttacataaggctgtgcttatgatataataccgccctagacaagccatattatatcattcatagcaccgcttttgcaagtggtgttatttttgtacccatttttgagttgcaccggtgcaacttgcatatattttacagaaaggatgattaatatggctaaggatatacttaatatgaaatcggcatgcgcttatatccgtgtatctactgac

SEQ ID NO: 19553 - DNA, 260 bp, Unknown; identical to SEQ ID NO: 19549
  Description of Unknown: LeftRegion for integrase B6554 sequence

SEQ ID NO: 19554 - DNA, 260 bp, Unknown
  Description of Unknown: LeftRegion for integrase B6555 sequence
ttcaaaaaataaaaaatcccccggtgttgcaacaccgagggaccacgctctagatgttggcaacatcatggagctgtaatcacattctttttatacacttaccacagcaacaaaacagaactgattactataatagtataacaaatttttatcagttctgctactgtatgccaatttttttagcaaaggagctggtttttatgttaaaaaatatacccgctgttgtttacgcccgctattcatcctccaatcaaagagaa

SEQ ID NO: 19555 - DNA, 260 bp, Unknown
  Description of Unknown: LeftRegion for integrase B6556 sequence
caagttacccttgatgaaatcaaaaaggtggtacgaagcaactttgacaaaacggtagaatgggtagatgtgccagaagcagaacagtatcggcaatcattgatcatgaagtaaagcattcgcagattgattgctttcgaaattacagaaactgtgccctgccccaccccagcagggcaatattatagaaaggggccatcatggaaacatattgtatctatctccgaaagtcccgcgcggatgccgaggcggaagcgcgc

SEQ ID NO: 19556 - DNA, 260 bp, Unknown
  Description of Unknown: LeftRegion for integrase B6557 sequence
agcataatacaaaaaagccctgctgaatcaaactcggcagggcaatcttatatgaaggatggcggaaggtgtgcgtatgaaaaagtcgcgccccacgcgggcgcgtgagttgaaattgtgacagagcaagtgacagacattgccggggccacgtcgcgccccacgcgggcgcgtgagttgaaatatagaaaggagccatcatggaaacatattgtatctatctccgaaagtcccgcgcggatgccgaggcggaagcgcgc

SEQ ID NO: 19557 - DNA, 260 bp, Unknown
  Description of Unknown: LeftRegion for integrase B6558 sequence
taaaagcccctgtgctaccaacacaagagcttttaccacgatacttacataagcactgcttatgatataataccgccttagacaagccatattatatcatttctaacaccgcttatgcaagtaggtgttattttttatacccatttttactgagttgcaccggtgcaacttgcatatattttacagaaaggatgattaatatggctaaggatatacttaatatgaaatctgcgtgtgcttatatccgtgtatctactgac

SEQ ID NO: 19558 - DNA, 260 bp, Unknown
  Description of Unknown: LeftRegion for integrase B6559 sequence
ataaataaaagcccctgtgctaccaacacaagagcttttaccacgatacttacataagctgtgcttatgatataataccgccctagacaagctatattatatcattcatagcaccgcttttgcaagtggtgttatttttgtacccatttttgagttgcaccggtgcaacttgcatatattttacagaaaggatgattaatatggctaaggatatacttaatatgaaatctgcatgtgcttatatccgtgtatctactgac

SEQ ID NO: 19559 - DNA, 260 bp, Unknown
  Description of Unknown: LeftRegion for integrase B6560 sequence
tatatctcaaaatactggattaagtgagcaagaaatactacatttacagcaatcattagataaatgatataatccatgaacaactaaaaaaacgcccagtatttgcactactgaacgtttttatgctgtgatatataaccacattcacctatagcgttattatatcacagctatttttataaagaaaggctgtgttttttatgcttaagacagttatatatgctcgctattctagtgacaaacaaaatgaacaatctatt

SEQ ID NO: 19560 - DNA, 260 bp, Unknown
  Description of Unknown: LeftRegion for integrase B6561 sequence
catggatcttttatttttcgtgctagctttattgataaaaatggtatcaaaagatatgccaaaagttatggtaaacgtgctttcaaaatctatgttactggtcctttaaaaggtaagctcgccaatgctttaaattaatcatctatagtcgatatccatatttgggatatcgactatttttataaaaggatgtgcctccattgttaaaaacaattatctatgctcgctattctagtgacaaacaaaatgaacaatctatt

SEQ ID NO: 19561 - DNA, 260 bp, Unknown
  Description of Unknown: LeftRegion for integrase B6562 sequence
actaaataaaagcccctgtgctaccaacacaagagcttttaccacgatacttacataagctgtgcttatatataataccgccctagacaagctatattatatcattcataacaccgcttttgcaagtggtgttatttttgtacccatttttgagttgcaccggtgcaacttgcatatattttacagaaaggatgattaatatggctaaggatatacttaatatgaaatctgcatgtgcttatatccgtgtatctactgac

SEQ ID NO: 19562 - DNA, 260 bp, Unknown
  Description of Unknown: LeftRegion for integrase B6563 sequence
tattgaaaaagtcggaaacaagtaattgaaataaataaaagctcctgtgctaccaacacaagagcttttacggatacttactcaagcagtgcctgatataatatacccctaaccaagttatattatatcattccagacaccgcttttgcaagtaggtgctatttttatacccaaatatgaatagaatggagtgatatactatgaaaaaggccttaaatgaaatgaaaaatgcctgcgcttatatccgtgtatctaccgat

SEQ ID NO: 19563 - DNA, 260 bp, Unknown
  Description of Unknown: LeftRegion for integrase B6564 sequence
ataaaagcccctgtgctaccaacacaagagcttttacctgcgacttacaattaagctgtgctcaaatgatataatcgccctagacaagccatattatatcattcataacaccgcttttgcaagtaggtgttatttttgtacccattttttgagttgcaccggtgcaacttgcatatatttacagagaggatgattaatatatggttaaggatatacttaatatgaaatctgcatgtgcatatatccgtgtgtctactgac

SEQ ID NO: 19564 - DNA, 260 bp, Unknown
  Description of Unknown: LeftRegion for integrase B6565 sequence
gtgattgagtttcagaagaattaaactaaataaataaaagcccctgtgctacaaacacaagagcttttacggatacttactcaagcagtgcctgatataatatacccctaaccaagttatattatatcattcccggcaccgcttttgcaagtaggtgttatttttatacccaattttgaataagaatggagtgatatactatgaaaaagaccttaaatgaaatgaaaaatgcctgcgcctatatccgtgtatctaccgat

SEQ ID NO: 19565 - DNA, 260 bp, Unknown
  Description of Unknown: LeftRegion for integrase B6566 sequence
atatctcaaaatactggattaagtgagcaagaaatactacatttacagcaatcattagataaatgatattaatccatgaacaactaaaaaaacgcccagtatttgcactactgaacgtttttatgctgtgatatataaccacattcacctatagcgttattatatcacagctatttttataaagaaaggctgtgttttttatgcttaagacagttatatatgctcgttattctagtgacaaacaaaacgaacaatctatt

SEQ ID NO: 19566 - DNA, 260 bp, Unknown
  Description of Unknown: LeftRegion for integrase B6567 sequence
tcgggagagctgtcgccttccagagcgacgttaaataattctgccgccgcacggtgcaaacgattattcgcacgcatagaaaaccaacagcgtaaatattgtgtaacagcggctcggcagaacagcaaagcaaccctctccggtgagccgaaattactcccggaagaataatcaaacaatatcagacaaggaggtgccgcatggatgatttattaaaaatcggagcttcttacatcagagtctcagacgaaagacaggac

SEQ ID NO: 19567 - DNA, 260 bp, Unknown; identical to SEQ ID NO: 19549
  Description of Unknown: LeftRegion for integrase B6568 sequence

SEQ ID NO: 19568 - DNA, 260 bp, Unknown
  Description of Unknown: LeftRegion for integrase B6569 sequence
ttatatctcaaaatactggattaaatgaacaagaaatactacatttacagcaatcattaaataaatgatataatcatgaacaactaaaaaaacgcccagtatttgcattactgaacgtttttatgctgtgatatataaccacattcacctatagtgttattatatcacagctatttttataaagaaaggctgtgttttttatgcttaagacagttatatatgctcgctattctagtgacaaacaaaatgaacaatctatc

SEQ ID NO: 19569 - DNA, 260 bp, Unknown
  Description of Unknown: LeftRegion for integrase B6570 sequence
ataaaaataaacttcatatattgattaatatgaagtttattagattggggggtatattatgaaatcaaaacttgatacgttaccagttataataacttattcagataaaaaaatagataaagatagattatttaaaattttttatgatatcatagaagaacaagaggcaaaggaagagagggaaagagaggatgatttagatgaggaaaaagaatgtttgtctaatgcgagttagtacagatgtacaagaaacaacatca

SEQ ID NO: 19570 - DNA, 260 bp, Unknown
  Description of Unknown: LeftRegion for integrase B6571 sequence
ataaaataaaagctcctgtgctaccaacacaagagcttttaccacgatacttacataagctgtgcttatgatatataccgccctgaacaagccatattatatcattcatagcaccgcttttgcaagtggtgttatttttgtacccatttttgagttgcaccggtgcaacttgcatatattttacagaaaggatgattaatatggctaaggatatacttaatatgaaatctgcgtgtgcttatatccgtgtatctactgac

SEQ ID NO: 19571 - DNA, 260 bp, Unknown
  Description of Unknown: LeftRegion for integrase B6572 sequence
gccaagttaatcttaatagacaatttcatttacataaaaaatttgcgaagaaatacttttttatgtaaaattcctattatttaacaaaaaaacgcccagtactagcactactgaacgtttttatgctgtgatatataaccacattcacctatagcgttattatatcacagctatttttataaagaaaggctgtgttttttatgcttaagacagttatatatgctcgctattctagtgacaaacaaaatgaacaatctatc

SEQ ID NO: 19572 - DNA, 260 bp, Unknown
  Description of Unknown: LeftRegion for integrase B6573 sequence
atatctcaaaatactggattaagtgagcaagaaatactacatttacagcaatcattagataaatgatattaatccatgaacaactaaaaaaacgcccagtatttgcactactgaacgtttttatgctgtgatatataaccacattcacctatagcgttattatatcacagctatttttataaagaaaggctgtgttttttatgcttaagacagttatatatgctcgctattctagtgacaaacaaaatgaacaatctatt

SEQ ID NO: 19573 - DNA, 260 bp, Unknown
  Description of Unknown: LeftRegion for integrase B6574 sequence
ttaggttttgtcccatgcaaacgttgtaactaaaataaaagctcctgtgctaccaacacaagagcttttacggatacttactcaagcagtgcctgatataatatacccctaaccaacttatattatatcattcccggcaccgcttttgcaagtaggtgttatttttatacccaaatatgaatagaatggagtgatatactatgaaaaagaccttaaatgaaatgaaaaatgcctgcgcttatatccgtgtatcgaccgat

SEQ ID NO: 19574 - DNA, 260 bp, Unknown
  Description of Unknown: LeftRegion for integrase B6575 sequence
ctaaataaaagcccctgtgctaccaacacaagagcttttaccacgatacttacataagctgtgcttatgatataataccgccctagacaagccatattatatcattcatagcaccgcttttgcaagtggtgttatttttgtacccatttttgagttgcaccggtgcaacttgcatatattttacagaaaggatgattaatatggctaaggatatacttaatatgaaatcagcatgtgcttatatccgtgtatctactgac

SEQ ID NO: 19575 - DNA, 260 bp, Unknown
  Description of Unknown: LeftRegion for integrase B6576 sequence
tccattgcacagatggagcattccggcgaatctccaacaccagaaacagcaaaagcgatgctagaggctgaccgtatcgcaagggatccgaatgtcaaaggttacgccagtattgcagaactgatggacgcattggattcataacagcaaaaaccagccctgcccccccccggcagggcaatcttatagaaggagccatcatggaaacatattgtatctatctccgaaaatcccgtgcagatgcggaggcagaaacacgg

SEQ ID NO: 19576 - DNA, 260 bp, Unknown
  Description of Unknown: LeftRegion for integrase B6577 sequence
cgttatgatggcgaaggaccgaatggcgaaacaataaagggaaatattaatagtaaaggtgagaaaatttatcacgttccgggcggagctttttacaatagaacagatgctgaagaatggttctttacagaagaagatgcaaaagctgctggttatcgagcttccaaacgttaatataaaaatagaaaggctgtgcttttatgttaaaagctgttatatatgcccgctactccagcgagaagcaaaatgaacaatccatt

SEQ ID NO: 19577 - DNA, 260 bp, Unknown
  Description of Unknown: LeftRegion for integrase B6578 sequence
ttatcaaacacgtcccctgcctgaaatgcgcccagtgcggcgaagtggtctacaccggtacaacgctgcaaaaggtcgaacagattctggagaaatgcaaggcagccatgaccgaagtcgccattgtggaatatcaacccgcagcataaccgaaccgccctgcccaccccggcagggcggtgctatcaaggagggaaaccatgaacgcatattgtatctatctccgaaaatcccgtgcggatgcggaggcagaagcacgg

SEQ ID NO: 19578 - DNA, 260 bp, Unknown
  Description of Unknown: LeftRegion for integrase B6579 sequence
gaaaaagtcggaaacaagtaattgaaataaataaaagcccctgtgctaccaacacaagagcttttacggatacttactcaagcagtgcctgcctgatataatatacccctaaccaagttatattatatcattccagacaccgcttttgcaagtaggtgttatttttatacccaaatatgaatagaatggagtgatatactatgaaaaagaccttaaatgaaatgaaaaatgcctgcgcttatatccgtgtatcgaccgat

SEQ ID NO: 19579 - DNA, 260 bp, Unknown
  Description of Unknown: LeftRegion for integrase B6580 sequence
taaataaaagcccctgtgctaccaacacaagagcttttaccacgatacttacataagctgtgcttatatataatatcgccctagacaagccatattatatcattagcagcaccgctttttcaagtaggtgttatttttgtacccatttttaagttgcaccggtgcaacttcgcatatattttataaaagggagtgattttatggctaaaaatattcttaacatgaaaactgccgccggctatattcgcgtatctaccgat

SEQ ID NO: 19580 - DNA, 260 bp, Unknown
  Description of Unknown: LeftRegion for integrase B6581 sequence
atatctcaaaatactggattaagtgagcaagaaatactacatttacagcaatcattagataaatgatattaatccatgaacaactaaaaaaacgcccagtatttgcactactgaacgtttttatgctgtgatatataaccacattcacctatagcgttattatatcacagctatttttataaagaaaggctgtgttttttatgcttaagactgtaatatatgctcgttattctagtgacaaacaaaatgaacaatctatt

SEQ ID NO: 19581 - DNA, 260 bp, Unknown
  Description of Unknown: LeftRegion for integrase B6582 sequence
tgattttgtataccacccacaaataattgctctgaaaagatcgaatattgtcgaaatacttgtgatgatatacaaagagtgatatagatcgcgccccacgcgggcgcgtgagttgaaattgacaaaacggtagaatgggtagatgtgccagagtcacgccccacgcgggcgtgtgagttgaaatatagaaaggagccatcatggaaacatattgtatctatctccggaaatcccgcgcggatgccgaggcagaagcgcgc

SEQ ID NO: 19582 - DNA, 260 bp, Unknown
  Description of Unknown: LeftRegion for integrase B6583 sequence
ttcatttgataaatttatatagttatttttttgttctgaagtatctactcttacatcagaaaaatctccaaatacaattaatttatgagatggactaacaaacatattattccctacctttatatatttttattttaattataacatatatacataatatagataagaaaatatttaattatagaaaggctgtattttttatgcttaaaactgtaatatatgctcgttattctagtgacaaacaaaatgaacaatctatt

SEQ ID NO: 19583 - DNA, 260 bp, Unknown
  Description of Unknown: LeftRegion for integrase B6584 sequence
atatctcaaaatactggattaagtgagcaagaaatacttcttttaaagaaatcattagataaatgatattaatccatgaacaactaaaaaaacgcccagtatttgcactactgaacgtttttatgctgtgatatataaccacattcacctatagcgttattatatcacagctatttttataaagaaaggctgtgttttttatgcttaagacagttatatatgctcgctattctagtgataaacaaaatgaacaatctatc

SEQ ID NO: 19584 - DNA, 260 bp, Unknown; identical to SEQ ID NO: 19580
  Description of Unknown: LeftRegion for integrase B6585 sequence

SEQ ID NO: 19585 - DNA, 260 bp, Unknown
  Description of Unknown: LeftRegion for integrase B6586 sequence
aataaacctgttattatagttggtgttgttaaagaattaagaagaaaaagataaaaaaaaaagacctactgcttgaacagtaagtcaaatgaaaaatcacaatttagtcgaccaaaactaaaaaacaaaatataagatataatgttatggatttttctatttcattatatcaaaaattcaagaaaaaaggaatgattataatgaaagaatataaaaaaggtgctatttctgttcgtgtttctactgatatgcaaacaaaa

SEQ ID NO: 19586 - DNA, 260 bp, Unknown
  Description of Unknown: LeftRegion for integrase B6587 sequence
gcaatacgttactaatgagcttggattaaactaaataaaagcccctgtgctaccaacacaagagcttttacggatacttactcagacggtgtctgatataatatacccctaaccaagttatattatatcattccagacaccgcttttgcaagtaggtgttatttttatacccaaatatgaatagaatggagtgatatactatgaaaaaaaccttaaatgaaatgaaaaatgcctgcgcttatatccgtgtatctaccgat

SEQ ID NO: 19587 - DNA, 260 bp, Unknown
  Description of Unknown: LeftRegion for integrase B6588 sequence
cgttatgatggcgaaggaccgaacggcgaaacaataaagggaaatattaatagtaaaggtgagaaaatttatcacgttccgggcggagctttttacaatagaacagatgctgaagaatggttctttacagaagaagatgcaaaagctgctggttatcgagcttccaaacgttaatataaaaatagaaaggctgtgcttttatgttaaaagctgttatatatgcccgctattccagcgagaagcaaaatgaacaatccatt

SEQ ID NO: 19588 - DNA, 260 bp, Unknown
  Description of Unknown: LeftRegion for integrase B6589 sequence
aaataaaagcccctgtgctaccaacacaagagcttttaccacgatacttacataagcaatgcctatgatataataccgccctgaacaagctatattatatcatcttaaacaccgcttttgcaagtaggtgtattttttatacccttttttagagttgcaccagtacaacttgcatatattttacagaaaggatgattaatatggctatagatattgcaaacatgaaagtagcatgtgcttatattcgtgtatccacagac

SEQ ID NO: 19589 - DNA, 260 bp, Unknown
  Description of Unknown: LeftRegion for integrase B6590 sequence
tgattttgtataccacccacaaataattgctctgaaaagatcgaatattgtcgaaatacttgtgatgatatacaaagagtgatatagatcgcgccccacgcgggcgcgtgagttgaaattgacaaaacggtagaatgggtagatgtgccagagtcacgccccacgcgggcgtgtgagttgaaatatagaaaggagccatcatggaaacatattgtatctatctccggaaatcccgcgcggatgccgaggcggaagcgcgc

SEQ ID NO: 19590 - DNA, 260 bp, Unknown
  Description of Unknown: LeftRegion for integrase B6591 sequence
tttccttttagcttaataatattatatttaaaagttgcaccggtgcaacttttaaaaaggaaaaccgctctcgcaaagagagcggagcaaccatcgacaagcgatgtgtactatcaaacgcaaacatagtatagcacacatctgttttattttcaataggtggggtgtattttttatgccctaatacaaggagattttgtatgatttcaaataaaaaagaatgttttgcttacataagggtatcaacggacgaccagttg

SEQ ID NO: 19591 - DNA, 260 bp, Unknown; identical to SEQ ID NO: 19448
  Description of Unknown: LeftRegion for integrase B6592 sequence

SEQ ID NO: 19592 - DNA, 260 bp, Unknown; identical to SEQ ID NO: 19571
  Description of Unknown: LeftRegion for integrase B6593 sequence

SEQ ID NO: 19593 - DNA, 260 bp, Unknown
  Description of Unknown: LeftRegion for integrase B6594 sequence
tattgaaaaagtcggaaacaagtaattaaactaaataaaagctcctgtgctaccaacacaagagcttttacggatacttactcaagcagtgcctgatataatatacccctaaccaagttatattatatcattccagacaccgcttttgcaagtaggtgttatttttatacccaattttgaatagaatggagtgatatactatgaaaaagaccttaaatgaaatgaaaaatgcctgcgcttatatccgggtatctaccgat

SEQ ID NO: 19594 - DNA, 260 bp, Unknown
  Description of Unknown: LeftRegion for integrase B6595 sequence
gcagttagtttctgaatacggtgaaggattcacaccagaagaagcacaatatgctgtcgataatttagggtaaaaatctactttgaaataagtgtgtgagttgaaatagaattaatataatattttatagtttcatcattgtcacgcctcgcatgaggcgtgtaagttaaaatgaaataaaaggagagtgaatcaaaataatgagacaatactgtatgtatctcagaaagtcccgagctgacgcagaagcagaggctcga

SEQ ID NO: 19595 - DNA, 260 bp, Unknown
  Description of Unknown: LeftRegion for integrase B6596 sequence
aaaataaaagcccctgtgctaccaacacaagagcttttaccacgatacttacataagcactgcttatgatataataccgccttagacaagccatattatatcatttctaacaccgcttatgcaagtaggtgttatttttataccattttttgagttgcaccggtgcaacttgcatatattttacagaaaggatgattaatatggctaaggatatacttaatatgaaatctgcgtgtgcttatatccgtgtatctactgac

SEQ ID NO: 19596 - DNA, 260 bp, Unknown
  Description of Unknown: LeftRegion for integrase B6597 sequence
ctgtcgatattatctttgaactttctaaagaagataaggtaaattatttttctatcgggtttggtacgccacactggatgaaccgacttgattttaacgggtatgaagaagtcaaatggcagtataatttcttagaaagtactgcttcatagaaaaaaaccaccgaaacctgcagggcggtgctatcaaggagggagaccatgaacgcatattgtatctatctccgaaaatcccgtgcagatgcggaggcagaagcacgg

SEQ ID NO: 19597 - DNA, 260 bp, Unknown; identical to SEQ ID NO: 19580
  Description of Unknown: LeftRegion for integrase B6598 sequence

SEQ ID NO: 19598 - DNA, 260 bp, Unknown
  Description of Unknown: LeftRegion for integrase B6599 sequence
gcaatacgttactaatgagcttggattaaactaaataaaagcccctgtgctaccaacacaagagcttttacggatacttactcagacggtgtctgatataatatacccctaaccaagttatattatatcattccagacaccgcttttgcaagtaggtgttatttttatacccaaatatgaatagaatggagtgatatactatgaaaaagaccttaaatgaaatgaaaaatgcctgcgcttatatccgtgtatctaccgat

SEQ ID NO: 19599 - DNA, 260 bp, Unknown
  Description of Unknown: LeftRegion for integrase B6600 sequence
tattgaaaaagtcggaaacaagtaattgaactaaataaaagctcctgtgctaccaacacaagagcttttacggatacttactcagacggtgtctgatataatatacccctaaccaagttatattatatcattccagacaccgcttttgcaagtaggtgttatttttatacccaaatatgaatagaatggagtgatatactatgaaaaagaccttaaatgaaatgaaaaatgcctgcgcttatatccgtgtatctaccgat

SEQ ID NO: 19600 - DNA, 260 bp, Unknown
  Description of Unknown: LeftRegion for integrase B6601 sequence
accgagaagaattagagggggataaagaatcttctgcgcacagcgaagataatccccatagaattgctcaggcgtaagaaacacttggaggtgatactacgaaagcggtaatctatgccagatattcgagccatagccagagagaggaatccatagagggacagcttcgtgagtgtcacgaatttgcactgaaaaatggaatgacgatcatcggtgaatactgcgacagagcaatctcaggcaaaaccgataatcgtcca

SEQ ID NO: 19601 - DNA, 260 bp, Unknown
  Description of Unknown: LeftRegion for integrase B6602 sequence
aaaataaaagcccctgtgctaccaacacaagagcttttaccacgatacttacataagctgtgcttatgatataataccgccttagacaagccatattatatcatttctaacaccgcttatgcaagtaggtgttatttttataccattttttgagttgcaccggtgcaacttgcatatattttacagaaaggatgattaatatggctaaggatatacttaatatgaaatctgcgtgtgcttatatccgtgtatctactgac

SEQ ID NO: 19602 - DNA, 260 bp, Unknown
  Description of Unknown: LeftRegion for integrase B6603 sequence
ataaataaaagctcctgtgctggaacacaagagcttttaccgcgatacttacatagcagtgcctatgatataataccgccctagacaagccatattatatcattcaatgcaccgcttttgcaagtaggtgtattttttatacccttttttagagttgtactggtgcaactcgcatatattttacagaaaggatgattaatatggctacagacattgcaaacatgaaggtagcatgcgcttatattcgcgtatctacagat

SEQ ID NO: 19603 - DNA, 260 bp, Unknown
  Description of Unknown: LeftRegion for integrase B6604 sequence
cccctgtgctaccaacacaagagcttttaccacgatacttacataagcttaagctgtgcttatgatataataccgccctgaacaagccatattatatcattcatagcaccgcttatgcaagtaggtgttattttttatacccatttttactgagttgcaccggtgcaacttgcatatattttacagaaaggatgattaatatggctagggatatacttaatatgaaatctgcttgtgcctacatacgtgtgtccacagat

SEQ ID NO: 19604 - DNA, 260 bp, Unknown
  Description of Unknown: LeftRegion for integrase B6605 sequence
ataataaaagctcctgtgctggaacacaagagcctttacctgcgacttacaattaagctgtgctcaatgatataatcgccctagacaagccatattatatcattaacagcaccgctttttcaagtaggtgttatttttatacccatttttagagttgcaccggtgcaattcgcatatattttacagaaaggatggttaatatggctacagatattgcaaacatgaaagtagcatgtgcttatattcgtgtatctacagac

SEQ ID NO: 19605 - DNA, 260 bp, Unknown
  Description of Unknown: LeftRegion for integrase B6606 sequence
taaataaaagcccctgtgctggaacacaagagcttttactacgatacttacataagcagtgcctatgatataataccgccctagacaagctatattatatcattccgaacaccgcttttgcaagtaggtgtattttttatacccatttttactgttgcactggtgcaactcgcatatattttacagaaaggatggttaatatggctgcaaatattgcaaacatgaaagtagcatgtgcttatattcgtgtatctacagac

SEQ ID NO: 19606 - DNA, 260 bp, Unknown
  Description of Unknown: LeftRegion for integrase B6607 sequence
acaagagcttttacccgcgacttacaattaagctgtgctcaatgatataatcgccctagacaagccatattatatcattctaaacaccgcttttgcaagtaggtgttatttttgtacccattttttaagttgcactggtgcaacttgcatatattttataaaccggtgacattttgtaaccagttgaaagggatgattgtatggctaaaaatatacttaacatgaaaattgcagccggatacattcgtgtatctactgat

SEQ ID NO: 19607 - DNA, 260 bp, Unknown
  Description of Unknown: LeftRegion for integrase B6608 sequence
taaaagcccctgtgctaccaacacaagagcttttaccacgatacttacataagcactgcttatgatataataccgccttagacaagccatattatatcatttctaacaccgcttatgcaagtaggtgttattttttatacccatttttactgagttgcaccggtgcaacttgcatatattttacagagaggatgattattatggctaaggatatacttaatatgaaatctgcttgtgcctacatacgtgtgtccacggat

SEQ ID NO: 19608 - DNA, 260 bp, Unknown
  Description of Unknown: LeftRegion for integrase B6609 sequence
gcccctgtgctaccaacacaagagcttttaccacgatacttacataagcttaagctgtgcttatgatataataccgccctgaacaagccatattatatcattcatagcaccgcttatgcaagtaggtgttatttttatacccatttttactgagttgcaccggtgcaacttgcatatattttacagaaaggatgattaatatggctagggatatacttaatatgaaatctgcttgtgcctacatacgtgtgtccacagat

SEQ ID NO: 19609 - DNA, 260 bp, Unknown
  Description of Unknown: LeftRegion for integrase B6610 sequence
ccaacacaagagcttttaccacgatactacaaagctgtgcttatatataatatcgccctgaacaagccatattatatcattagcagcaccgctttttcaagtaggtgttatttttgtacccatttttaagttgcactggtgcaacttgcatatattttataatccggtgacattctgtctccagttgaaagggtgattgtatggctaaaaatatccttaacatgaaaattgcagccggatacattcgtgtatctactgat

SEQ ID NO: 19610 - DNA, 260 bp, Unknown
  Description of Unknown: LeftRegion for integrase B6611 sequence
aaataaaagcccctgtgctaccaacacaagagcttttaccacgatacttacataagcagtgcctatgatataataccgccctgaacaagccatattatatcatttgaaacaccgcttttgcaagtaggtgtattttttatacccattttaagagttgcaccggtgcaatttgcatatattttacagaaaggatggttaatatggctacagacattgcaaacatgaaggtagcatgcgcttatattcgtgtatctacagac

SEQ ID NO: 19611 - DNA, 260 bp, Unknown
  Description of Unknown: LeftRegion for integrase B6612 sequence
caagagcctttacttgcgacttacaattaagctgtgctcaaatgatataatcgccctaagcaagccatattatatcattctaaacaccacttttgcaagtaggtgttatttttgtacccattttttaagttgcactggtgcaacttgcatatattttataaaccggtgacattttgtaaccagttgaaagggatgattgtatggctaaaaatatacttaacatgaaaattgcagccggatacattcgtgtatctactgat

SEQ ID NO: 19612 - DNA, 260 bp, Unknown
  Description of Unknown: LeftRegion for integrase B6613 sequence
gttgcgacatcgcaacaattaaataccgcccagctgcaactggacggcattttgagaaaaccatttgcatctgccgagaaaaaacagacgaaatgctttacatagacaactaaagtatatcattttttcttggcatcctgcaagggtgtattttttgtacccaattttaatattttataaaaaggaaaaggtgatttactatgaaaaagatcgcagctgcttatataagagtcagtacgcacatgcaagaagaattatct

SEQ ID NO: 19613 - DNA, 260 bp, Unknown
  Description of Unknown: LeftRegion for integrase B6614 sequence
aaataaaagcccctgtgctaccaacacaagagcttttaccacgatacttacataagcagtgcctatgatataataccgccctgaacaagccatattatatcattctgaacaccgcttttgcaagtaggtgtattttttatacccatttttagagttgcaccggtgcaattcgcatatattttacagaaaggatggttaatatggctacagatattgcaaacatgaaagtagcatgtgcttatattcgtgtatctacagac

SEQ ID NO: 19614 - DNA, 260 bp, Unknown
  Description of Unknown: LeftRegion for integrase B6615 sequence
aaataaaagctcctgtgctggaacacaagagcttttacccgcgacttacaattaagctatgctcaaatgatataatcgccctaagcaagccatattatatcattctgaacaccgcttttgcaagtaggtgttatttttatacccatttttagagttgtactggtgcaattcgcatatattttacagaaaggatgattaatatggctacagacattgcaaacatgagggtagcatgcgcttatattcgtgtatctacagac

SEQ ID NO: 19615 - DNA, 260 bp, Unknown
  Description of Unknown: LeftRegion for integrase B6616 sequence
ataaaagcccctgtgctaccaacacaagagcttttaccacgatacttacataagcagtgcttatgatataataccgccttagacaagccatattatatcatttctaacaccgcttatgcaagtaggtgttatttttatacccaatttttaagagttgcaccggtgcaacttgcatatattttatagagaggatgattattatggctaaggatatacttaatatgagatctgcttgtgcctacatacgtgtgtccacggat

SEQ ID NO: 19616 - DNA, 260 bp, Unknown
  Description of Unknown: LeftRegion for integrase B6617 sequence
taataaaagcccctgtgctaccaacacaagagcttttgccacgatacttacataagcagtgcctatgatataataccgccctgaacaagccatattatatcattctgaacaccgcttttgcaagtaggtgtattttttatacccatttttagagttgcaccggtgcaattcgcatatattttacggaaaggatggttaatatggctacagatattgtaaacatgaaagtagcatgtgcttatattcgtgtatctacagac

SEQ ID NO: 19617 - DNA, 260 bp, Unknown
  Description of Unknown: LeftRegion for integrase B6618 sequence
gattattgtaatataacatcaataccattggattttgacgaaagagccaaaaactttttaagtgatttatatagacattaacaaaaaaagcccctcattagcgacaactaataaaggacttaaagtgtagtatatgctatatacctagcactaatattatagcatatgctcctaaaaaaacataaaaaaggagtaaaagtatgaaaaaagcagtaggttattgtagattttctacagacatgcaaagagaagaatctatc

SEQ ID NO: 19618 - DNA, 260 bp, Unknown
  Description of Unknown: LeftRegion for integrase B6619 sequence
caagagcctttacttgcgacttacaattaagctgtgctcaaatgatataatcgccctaagcaagccatattatatcattctaaacaccgcttttgcaagtaggtgttatttttgtacccattttttaagttgcactggtgcaacttgcatatattttataaaccggtgacattttgtaaccagttgaaagggatgattgtatggctaaaaatatacttaacatgaaaattgcagccggatacattcgtgtatctactgat

SEQ ID NO: 19619 - DNA, 260 bp, Unknown; identical to SEQ ID NO: 19607
  Description of Unknown: LeftRegion for integrase B6620 sequence

SEQ ID NO: 19620 - DNA, 260 bp, Unknown
  Description of Unknown: LeftRegion for integrase B6621 sequence
cccctgtgctaccaacacaagagcttttaccacgatacttacataagcttaagctgtgcttatgatataataccgccctgaacaagccatattatatcattcatagcaccgcttatgcaagtaggtgttattttttatacccatttttactgagttgcaccggtgcaacttgcatatattttacagaaaggatgattaatatggctagggatatacttaatatgaaatctgcttgtgcctacatacgtgtgtccaccgat

SEQ ID NO: 19621 - DNA, 260 bp, Unknown
  Description of Unknown: LeftRegion for integrase B6622 sequence
ataaataaaagctcctgtgctggaacacaagagcttttaccgcgatacttacatagcagtgcctatgatataataccgccctagacaagccatattatatcattcaatgcaccgcttttgcaagtaggtgtattttttatacccttttttagagttgcaccagtacaacttgcatatattttacagaaaggatgattaatatggctacagacattgcaaacatgaaggtagcatgcgcttatattcgcgtatctacagat

SEQ ID NO: 19622 - DNA, 260 bp, Unknown
  Description of Unknown: LeftRegion for integrase B6623 sequence
aataaatatgttattgcgtaaaaataaaaaaaccgcccagctgcaactggacggcatttaagaaaatctcttgcatctgtcgggaatgacagatactttacatggacatttaaagtatatcattttttcttggcatcctgcaagggtgtattttttgtacccaattttaatattttgtaaaaaggaaaaggtgatttactatgaaaaagatcgcagctgcttatataagagtcagcacgcacatgcaggaagaattatct

SEQ ID NO: 19623 - DNA, 260 bp, Unknown
  Description of Unknown: LeftRegion for integrase B6624 sequence
aaataaaagctcctgtgctggaacacaagagcctttacttgcgacttacaattaagctgtgctcaaatgatataatcgccctaagcaagccatattatatcattctaaacaccgcttttgcaagtaggtgtattttttatacccatttttagagttgcaccggtgcaattcgcatatattttacagaaaggatggttaatatggctacagatattgcaaacatgaaagtagcatgtgcttatattcgtgtatctacagac

SEQ ID NO: 19624 - DNA, 260 bp, Unknown
  Description of Unknown: LeftRegion for integrase B6625 sequence
caagagcctttacttgcgacttacaattaagctgtgctcaaatgatataatcgccctaagcaagccatattatatcattctaaacaccgcttttgcaagtaggtgttatttttgtacccattttttaagttgcactggtgcaacttgcatatattttataaaccggtgacattttgtaaccagttgaaagggatgattgtatggctaaaaatatacttaacatgaaaattgcatccggatacattcgtgtatctactgat

SEQ ID NO: 19625 - DNA, 260 bp, Unknown
  Description of Unknown: LeftRegion for integrase B6626 sequence
gcttcgcaatttggaaaacatctgcaagctaaaatccaagagcaagtgaacagcgaaagcaattcttctcttttacttgaacagatgaacgaattgtttaacaatgtttccaaattgtccgaaactgaacaaaaggctttttataccggacttgtaaaagggatagagcgttgggaaaatgaacaaaagggggaataataatgccggaagcattaaacgcggtcatatacgcccgctattcctccgatcgtcagacagaa

SEQ ID NO: 19626 - DNA, 260 bp, Unknown
  Description of Unknown: LeftRegion for integrase B6627 sequence
taaaagcccctgtgctaccaacacaagagcttttaccacgatacttacataagcactgcttatgatataataccgccttagacaagccatattatatcatttctaacaccgcttatgcaagtaggtgttattttttatacccatttttactgagttgcaccggtgcaacttgcatatattttacagaaaggatgattaatatggctaaggatatacttaatatgaaatctgcatgtgcttatatccgtgtatctactgac

SEQ ID NO: 19627 - DNA, 260 bp, Unknown
  Description of Unknown: LeftRegion for integrase B6628 sequence
gtaaatatggggaatatactgcagttgataattacataatttattttgaaccctatctcggagttatgaaactaatataatagatgtgagttttggtgaaaatagtttacgctatacgatactaaaatatatgctctggttctcaaaccagggcatttttatgtccttttctcaatataatgaaaaaaggagttgataatatgcaaacagcatctgccaggatagccgccttatatatccgggtaagtaccgataagcag

SEQ ID NO: 19628 - DNA, 260 bp, Unknown; identical to SEQ ID NO: 19602
  Description of Unknown: LeftRegion for integrase B6629 sequence

SEQ ID NO: 19629 - DNA, 260 bp, Unknown
  Description of Unknown: LeftRegion for integrase B6630 sequence
aaaaataaaagcccctgtgctaccaacacaagagcttttacctcgatacttaataagctgtgcttatatataatatcgccctagacaagccatattatatcattaacagcaccgctttttcaagtaggtgttatttttatacccatttttagagttgcaccggtgcaattcgcatatattttacagaaaggatggttaatatggctacagatattgcaaacatgaaagtagcatgtgcttatattcgtgtatctacagac

SEQ ID NO: 19630 - DNA, 260 bp, Unknown; identical to SEQ ID NO: 19629
  Description of Unknown: LeftRegion for integrase B6631 sequence

SEQ ID NO: 19631 - DNA, 260 bp, Unknown
  Description of Unknown: LeftRegion for integrase B6632 sequence
ttgctgatatcgggaaaatggtaaaaaaataccgcccagctggtaactaggcggtattcagaaaaacacttgcacctgtcaagaacagatgaaatacttttccctcaacaagtaaagtatatcattttttcttggcacccggcaagggtgtattttttgtacaaatttttaatattttataaaaaggaaaaggtgataacatgaaaaaaattgcagctgcttatataagagtcagcacgcacatgcaggaagaattatct

SEQ ID NO: 19632 - DNA, 260 bp, Unknown; identical to SEQ ID NO: 19606
  Description of Unknown: LeftRegion for integrase B6633 sequence

SEQ ID NO: 19633 - DNA, 260 bp, Unknown; identical to SEQ ID NO: 19613
  Description of Unknown: LeftRegion for integrase B6634 sequence

SEQ ID NO: 19634 - DNA, 260 bp, Unknown; identical to SEQ ID NO: 19607
  Description of Unknown: LeftRegion for integrase B6635 sequence

SEQ ID NO: 19635 - DNA, 260 bp, Unknown; identical to SEQ ID NO: 19570
  Description of Unknown: LeftRegion for integrase B6636 sequence

SEQ ID NO: 19636 - DNA, 260 bp, Unknown; identical to SEQ ID NO: 18174
  Description of Unknown: LeftRegion for integrase B6637 sequence

SEQ ID NO: 19637 - DNA, 260 bp, Unknown
  Description of Unknown: LeftRegion for integrase B6638 sequence
ataaaagctcctgtgctaccaacacaagagcttttaccacgatacttacataagcagtgcttatgatataataccgccctagacaagccatattatatcattcataacaccgcttttgcaagtaggtgttatttttatacccatttttactgagttgcaccggtgcaacttgcatatattttacagagaggatgattattatggctaaggatatacttaatatgaaatctgcttgtgcctacatacgtgtgtccacggat

SEQ ID NO: 19638 - DNA, 260 bp, Unknown; identical to SEQ ID NO: 19604
  Description of Unknown: LeftRegion for integrase B6639 sequence

SEQ ID NO: 19639 - DNA, 260 bp, Unknown
  Description of Unknown: LeftRegion for integrase B6640 sequence
aaataaaagctcctgtgctggaacacaagagcctttacctgcgacttacaattaagctgtgctcaaatgatatactcgccctaagcaagctatattatatcattctgaacaccgcttttgcaagtaggtgtattttttatacccatttttagagttgcaccggtgcaattcgcatatattttacagaaaggatggttaatatggctacagatattgcaaacatgaaagtagcatgtgcttatattcgtgtatctacagac

SEQ ID NO: 19640 - DNA, 260 bp, Unknown
  Description of Unknown: LeftRegion for integrase B6641 sequence
taaataaaagctcctgtgctaccaacacaagagcttttgccacgatacttacataagctgtgcctatgatataatatcgccctagacaagccatattatatcattctgaacaccgcttttgcaagtggtgttatttttatacccatttttagagttgcaccggtgcaattcgcatatattttacagaaaggatggttaatatggccacagatattgcaaacatgaaagtagcatgtgcttatattcgtgtatctactgac

SEQ ID NO: 19641 - DNA, 260 bp, Unknown
  Description of Unknown: LeftRegion for integrase B6642 sequence
tgctgatatcgggaaaatggtaaaaaaataccgcccagctggtaactaggcggtattcagaaaaaacacttgcacctgtcaagaacagatgaaatacttttccctcaacaagtaaagtatatcattttttcttggcacccggcaagggtgtattttttgtacaaatttttaatattttataaaaagggaaaggtgataacatgaaaaaaattgcagctgcttatataagagtcagcacgcatatgcaagaagagctgtct

SEQ ID NO: 19642 - DNA, 260 bp, Unknown; identical to SEQ ID NO: 19613
  Description of Unknown: LeftRegion for integrase B6643 sequence

SEQ ID NO: 19643 - DNA, 260 bp, Unknown; identical to SEQ ID NO: 15597
  Description of Unknown: LeftRegion for integrase B6644 sequence

SEQ ID NO: 19644 - DNA, 260 bp, Unknown; identical to SEQ ID NO: 19605
  Description of Unknown: LeftRegion for integrase B6645 sequence

SEQ ID NO: 19645 - DNA, 260 bp, Unknown; identical to SEQ ID NO: 18252
  Description of Unknown: LeftRegion for integrase B6646 sequence

SEQ ID NO: 19646 - DNA, 260 bp, Unknown
  Description of Unknown: LeftRegion for integrase B6647 sequence
ttgctgatatcgggaaaatggtaaaaaaataccgcccagctggtaactaggcggtattcagaaaaacacttgcacctgtcaagaacagatgaaatacttttccctcaacaagtaaagtatatcattttttcttggcacccggcaagggtgtattttttgtacaaatttttaatattttataaaaaggaaaaggtgataacatgaaaaaaattgcagctgcttatataagagtcagcacgcatatgcaagaagagctgtct

SEQ ID NO: 19647 - DNA, 260 bp, Unknown
  Description of Unknown: LeftRegion for integrase B6648 sequence
cgtgcagacggagaccaagacgcttgagttcccgaaggacttcgacgtccagggtctctactcgctgctctcggagctcgcatacgagaacgtgcgccgcatcaacgcatagaaaagaagaagccccacggggtcatagcgctgcaacgctgcccgcggggctttcctaaagaacctctgaaaggaggccgtttccaattatgccaaaaactgcggtgatatacgcccgcttttcatgcaacaagcagcgcgaggcctcc

SEQ ID NO: 19648 - DNA, 260 bp, Unknown; identical to SEQ ID NO: 19646
  Description of Unknown: LeftRegion for integrase B6649 sequence

SEQ ID NO: 19649 - DNA, 260 bp, Unknown
  Description of Unknown: LeftRegion for integrase B6650 sequence
taaatatgattatgaaggtgaagatgctttcaaagttcttaataaaaataatgaacaaataggaagtattagaaaaagcgatattccaaaaatgaatgaaatttataataatattaaaaaagttaatgttttaggaacatcacatttcaccaatgaagaaggaaatactgttctttcttgtcaagtaggtgttacttattatgaatgatattaaacgtggtgctttatatattcgtgtgtcgaccgatgaccaaacagaa

SEQ ID NO: 19650 - DNA, 260 bp, Unknown
  Description of Unknown: LeftRegion for integrase B6651 sequence
tatactatcatttattttttttaaagtcaatagtttaattttaacaataaaaaactccccggctgcaaccggggagcacaagcaaagtaccacaagtgatacaacgccctgaacaagcatattgtatcatctagcccggtattttgcaagtcgggctatttttatgcccattttcatataatttgaaagggtgatacataatgacactgaaaaacgcatgtgcatatatcagagtctcaactgacaagcaggaagagctt

SEQ ID NO: 19651 - DNA, 260 bp, Unknown; identical to SEQ ID NO: 19646
  Description of Unknown: LeftRegion for integrase B6652 sequence

SEQ ID NO: 19652 - DNA, 260 bp, Unknown
  Description of Unknown: LeftRegion for integrase B6653 sequence
ctgcaggaaaagcaaatatccgagctgagaaaggatacgcgcgcgggccgctttgcgatttatctttctgtcgtgctcggcatcattgtcgccatttatttcttccattatgatgtgcctaatcccgattggggatttacgcggtctgtccatgaatttatttcctggtttcgatgaatgcaacaaagaggttttctgctatgacgccaatttctgatttccgtattgccgcctgctatatccgcgtttccacggacgat

SEQ ID NO: 19653 - DNA, 260 bp, Unknown; identical to SEQ ID NO: 19646
  Description of Unknown: LeftRegion for integrase B6654 sequence

SEQ ID NO: 19654 - DNA, 260 bp, Unknown; identical to SEQ ID NO: 19646
  Description of Unknown: LeftRegion for integrase B6655 sequence

SEQ ID NO: 19655 - DNA, 260 bp, Unknown; identical to SEQ ID NO: 19646
  Description of Unknown: LeftRegion for integrase B6656 sequence

SEQ ID NO: 19656 - DNA, 260 bp, Unknown; identical to SEQ ID NO: 19646
  Description of Unknown: LeftRegion for integrase B6657 sequence

SEQ ID NO: 19657 - DNA, 260 bp, Unknown; identical to SEQ ID NO: 19646
  Description of Unknown: LeftRegion for integrase B6658 sequence

SEQ ID NO: 19658 - DNA, 260 bp, Unknown; identical to SEQ ID NO: 18267
  Description of Unknown: LeftRegion for integrase B6659 sequence

SEQ ID NO: 19659 - DNA, 260 bp, Unknown
  Description of Unknown: LeftRegion for integrase B6660 sequence
tcgatagggctttttgttttatctaaatgaattttattacctaaaataaaaaactcccggggctaaccgggagcaactgcgaaataccgaattaacgataccacgccctgaacaagcatattgtatcatctagcccggtattttgcaagtccgggctatttttatgcccattttcatataatttgaaagggtgatacataatgacactgaaaaacgcatgtgcatatatcagagtctcaactgataagcaggaagagctt

SEQ ID NO: 19660 - DNA, 260 bp, Unknown
  Description of Unknown: LeftRegion for integrase B6661 sequence
tgctgatatcgggaaaatggtaaaaaaataccgcccagctggtaactaggcggtattcagaaaaacacttgcacctgtcaagaacagatgaaatacttttccctcaacaagtaaagtatatcattttttcttggcacttcgcaagaggtgtattttttgtacaaatttttaatattttataaaaaggaaaaggtgataacatgaaaaaaattgcagctgcttatataagagtcagcacgcatatgcaagaagagctgtct

SEQ ID NO: 19661 - DNA, 260 bp, Unknown; identical to SEQ ID NO: 19646
  Description of Unknown: LeftRegion for integrase B6662 sequence

SEQ ID NO: 19662 - DNA, 260 bp, Unknown
  Description of Unknown: LeftRegion for integrase B6663 sequence
ttcacagcttgttaaaccgcatacgcaaaaagccacccctgttggcgcaggaatgacttttaacataactctcttgccggactgctccagcagatatatttagcttgaacacctaaattatatcattcctgaagcgtcctggcaaggggcgtattttttatatccatttttcatatggttataacaaaggagatgatataatgaccacaccaaccaccctggaaatcggcgccgcctacgtccgcgtcagcacagatgac

SEQ ID NO: 19663 - DNA, 260 bp, Unknown
  Description of Unknown: LeftRegion for integrase B6664 sequence
tgctgatatcgggaaaatggtaaaaaaaataccgcccagctggtaactaggcggtattcagaaaaacacttgcacctgtcaagaacagatgaaatacttttccctcaacaagtaaagtatatcattttttcttggcaccctgcaagggtgtattttttgtacaaatttttaatattttataaaaaggaaaaggtgataacatgaaaaaaattgcagctgcttatataagagtcagcacgcatatgcaagaagagctgtct

SEQ ID NO: 19664 - DNA, 260 bp, Unknown; identical to SEQ ID NO: 19618
  Description of Unknown: LeftRegion for integrase B6665 sequence

SEQ ID NO: 19665 - DNA, 260 bp, Unknown; identical to SEQ ID NO: 19646
  Description of Unknown: LeftRegion for integrase B6666 sequence

SEQ ID NO: 19666 - DNA, 260 bp, Unknown; identical to SEQ ID NO: 19646
  Description of Unknown: LeftRegion for integrase B6667 sequence

SEQ ID NO: 19667 - DNA, 260 bp, Unknown
  Description of Unknown: LeftRegion for integrase B6668 sequence
ttgctgatatcgggaaaatggtaaaaaaataccgccaagctggtaactaggcggtattcagaaaaacacttgcacctgtcaagaacagatgaaatacttttccctcaacaagtaaagtatatcattttttcttggcacccggcaagggtgtattttttgtacaaatttttaatattttataaaaaggaaaaggtgataacatgaaaaaaattgcagctgcttatataagagtcagcacgcatatgcaagaagagctgtct

SEQ ID NO: 19668 - DNA, 260 bp, Unknown
  Description of Unknown: LeftRegion for integrase B6669 sequence
cagttattaaattcataatacgaaaaagccccaggagctgcgaactcccagagcttttcacataggttttctcttgccaggtacgcctggaagatatatttagcttgaacacctaaattatatcattcctgaagcgtcctgacaaggggcgtattttttatatctatttttcatatggttataataaaggagatgatataatgaccacaccaaccaccctggaaatcggcgccgcctacgtccgcgtcagcacagatgac

SEQ ID NO: 19669 - DNA, 260 bp, Unknown; identical to SEQ ID NO: 19663
  Description of Unknown: LeftRegion for integrase B6670 sequence

SEQ ID NO: 19670 - DNA, 260 bp, Unknown
  Description of Unknown: LeftRegion for integrase B6671 sequence
aaaagcgcaggtttaacacaaaaacaactttcagaaaaaaccggcattacccaagcagatataagtaagctggaaagtggcaacgccaatccctctttgcgcactttacaaagactagcttccggtatgggcatgaaagttaaaattgagtttcgacctatcggacaaaattaaacatttatcccctatccgctcccaaaatgagcagaaaaggggatttttatttcaaaaaaacaggtgattatatgaaaattgctgcc

SEQ ID NO: 19671 - DNA, 260 bp, Unknown; identical to SEQ ID NO: 19646
  Description of Unknown: LeftRegion for integrase B6672 sequence

SEQ ID NO: 19672 - DNA, 260 bp, Unknown; identical to SEQ ID NO: 19646
  Description of Unknown: LeftRegion for integrase B6673 sequence

SEQ ID NO: 19673 - DNA, 260 bp, Unknown
  Description of Unknown: LeftRegion for integrase B6674 sequence
cctaataaaactatttagtttatctaagtgtgctgcaaaaactagattagatttttatgattatgatttaaaaaactctttattcccccgttctgtagagttaaaaaaacaatgcgctatgtttataaatatgtcaaaattaggaattacattagggcatagatcgtgcctagatttaaatattaatagaaggtgattacatgaatgcagcattatatattcgtgttagtacagacgatcaattagaattttcaccagat

SEQ ID NO: 19674 - DNA, 260 bp, Unknown
  Description of Unknown: LeftRegion for integrase B6675 sequence
agcaaatgttattaattaaaaaaataccgcctagctggcactagacggcatttaaaaaagaaaaaactttgcatatgccaagaatggcaaatgatatattttctccgacaagttaagtatatcattttttcttggcacccggcaagggtgtattttttgtacaaatttttaatattttataaaaagagaaaggtgataacatgaaaaaaattgcagctgcttatataagagtcagtacgcatatgcaagaagagctgtct

SEQ ID NO: 19675 - DNA, 260 bp, Unknown; identical to SEQ ID NO: 19663
  Description of Unknown: LeftRegion for integrase B6676 sequence

SEQ ID NO: 19676 - DNA, 260 bp, Unknown
  Description of Unknown: LeftRegion for integrase B6677 sequence
gtcgatagggctttttgttttatctaaatgaattttattacctaaaataaaaaactccccggctgcaaccggggagcacaagcaaagtaccacaagtgatacaacgccctgaacaagcatattgtatcatctagcccggtattttgcaagtcgggctatttttatgcccattttcatataatttgaaagggtgatacataatgacactgaaaaacgcatgtgcatatatcagagtctcaactgacaagcaggaagagctt

SEQ ID NO: 19677 - DNA, 260 bp, Unknown; identical to SEQ ID NO: 19646
  Description of Unknown: LeftRegion for integrase B6678 sequence

SEQ ID NO: 19678 - DNA, 260 bp, Unknown
  Description of Unknown: LeftRegion for integrase B6679 sequence
aaatgttattaaataaataaaataccgcctagctggtaactagacggcatttaaaagaaaaccacttgcacctgttaagttaacagatgagtacttttccctcgcaagtttaagtatatcattttttcttgacacttcgcaagaggtgtattttttgtaccaatttttaatattttgtaaaaaaggaaaaggtgattactatgaaaaagatcgcagctgcttatataagggtcagtacgcatatgcaagaagaattatct

SEQ ID NO: 19679 - DNA, 260 bp, Unknown; identical to SEQ ID NO: 19646
  Description of Unknown: LeftRegion for integrase B6680 sequence

SEQ ID NO: 19680 - DNA, 260 bp, Unknown; identical to SEQ ID NO: 19660
  Description of Unknown: LeftRegion for integrase B6681 sequence

SEQ ID NO: 19681 - DNA, 260 bp, Unknown
  Description of Unknown: LeftRegion for integrase B6682 sequence
aatcttaaattgaaataaaaaataccgcctagctggtaactagacggcatttaaaagaaaaccacttgcacctgttaagttaacagatgagtacttttccctcgcaagtttaagtatatcattttttcttgacacttcgcaagaggtgtattttttgtaccaatttttaatattttgtaaaaaaggaaaaggtgattactatgaaaaagattgcagccgcttatataagggttagtacgcatatgcaagaagaattatct

SEQ ID NO: 19682 - DNA, 260 bp, Unknown; identical to SEQ ID NO: 19663
  Description of Unknown: LeftRegion for integrase B6683 sequence

SEQ ID NO: 19683 - DNA, 260 bp, Unknown; identical to SEQ ID NO: 19646
  Description of Unknown: LeftRegion for integrase B6684 sequence

SEQ ID NO: 19684 - DNA, 260 bp, Unknown
  Description of Unknown: LeftRegion for integrase B6685 sequence
tatactatcatttattttttttaaagtcaatagtttaattttaacaataaaaaactccccggctgcaaccggggagcacaagcaaagtaccacaagtgataccacgccctgaacaagcatattgtatcatctagcccggtattttgcaagtcgggctatttttatgcccattttcatataatttgaaagggtgatacataatgacactgaaaaacgcatgtgcatatatcagagtctcaactgacaagcaggaagagctt

SEQ ID NO: 19685 - DNA, 260 bp, Unknown; identical to SEQ ID NO: 19663
  Description of Unknown: LeftRegion for integrase B6686 sequence

SEQ ID NO: 19686 - DNA, 260 bp, Unknown
  Description of Unknown: LeftRegion for integrase B6687 sequence
gctgccaaatcactcatgcaggaagtttctgtcattgactataatagagtagcataaaacgcaaaaccgcccgcttgccagaatactccagtagatataatcaatccgacacttgaattatatcatttccaaagtgccctggcaaggggcgtattttttgcactcttttcacgtacatttaatcaaggaagtgatatatcatgaaaaaagaaacagagtacttacaaataggtgccgcatacatccgtgtcagtaccgat

SEQ ID NO: 19687 - DNA, 260 bp, Unknown; identical to SEQ ID NO: 19674
  Description of Unknown: LeftRegion for integrase B6688 sequence

SEQ ID NO: 19688 - DNA, 260 bp, Unknown; identical to SEQ ID NO: 19663
  Description of Unknown: LeftRegion for integrase B6689 sequence

SEQ ID NO: 19689 - DNA, 260 bp, Unknown
  Description of Unknown: LeftRegion for integrase B6690 sequence
ggaaaagcacaggtttaacgcaaaaacaactttcagaaaaaaccggtatcacccaagcagatataagcaagttggaaagcggaaacgctaacccctctttgcgcactttacagagattagcttccggtatgggtatgaaggttaaaatcgaatttcaaccaatcggacaaaattaaatttatcccctatccgctcccaaaatgagcagaaaaggggatttttatttcaaaaaaacaggtgattatatgaaaattgctgcc

SEQ ID NO: 19690 - DNA, 260 bp, Unknown; identical to SEQ ID NO: 19660
  Description of Unknown: LeftRegion for integrase B6691 sequence

SEQ ID NO: 19691 - DNA, 260 bp, Unknown
  Description of Unknown: LeftRegion for integrase B6692 sequence
gaaaagcgggtctttgatgcctctatcctatccggctctgcctttgagcctttaaaggatgaatccatcttccagaattttaaaatagtccatggagctgttacctggatggatgaggatattgattgtgctccagaatatatgtatgagcatagttatgcttacgatgaaatgctggtgtagtgaataaggaggttcctatgaacgctgctcttagaactgctgccgcgtatatccgtgtttccactgatgaccagatt

SEQ ID NO: 19692 - DNA, 260 bp, Unknown
  Description of Unknown: LeftRegion for integrase B6693 sequence
ttaaagtgcggaatatataaagaattacgtagacgctcccttttgtcagatgagcaactaaattctctgataaatgaaaaataacgcaaatcaaattgcacatcacaagagattttgatacaatatagttgtcttgtggtgtgctattttcatttatggaggtagcacaatgaaagaaaatattttaagggttgcggcatatgccagagtatctacagataaagaagcgttccggctttaagaaaatgatacaggatgct

SEQ ID NO: 19693 - DNA, 260 bp, Unknown
  Description of Unknown: LeftRegion for integrase B6694 sequence
cgtattccgtttcccgcatccccggcatgttctacgtccccggctcataggctgtggcgagggggaatgaacgtggaagtcaagcacacccatccgcagtatgaggatccgcaggcgcggcagcagcagatgaaggacgcctacgccgcctgcatggcgaagctgcgggcgctgcgggcggcccagcgggaaaagaccgcatgaaaacagacgcggtatacgcccgccagtccgtggagaaaaaggacagcctgtccatc

SEQ ID NO: 19694 - DNA, 260 bp, Unknown
  Description of Unknown: LeftRegion for integrase B6695 sequence
ctgtctgcttatcggctatctggcttttgacgccagcattcccaacggcggtctggttcgggatggtcatgcaactgttttcgcctgggtcgttattatcctgttgtccttcagcgtgggcgtcctggtctccaccctcctgcgcgcccttaaacattctcgagaccgcatgtcgttccaaagagaggagaatcccacagatgacacctaaagattaccgcatagccgccgcctacatccgcgtctccaccgatgaccag

SEQ ID NO: 19695 - DNA, 260 bp, Unknown
  Description of Unknown: LeftRegion for integrase B6696 sequence
ttgatatatcgcaaattcattttgatatatcaaaagtttcttttgaataatcgaaagaaattatatagttgtaacacaatcacacaattattactaaagttaatagaaaatatatagataagtatatataaagtaataaatataaaatatataagaactttaaaaagtttttgtgtttgtgtgacggaaggagtaaaaatatgaaaaatgtaaaagttggtatctacataagagtatctacacaagaacaagctgatgaa

SEQ ID NO: 19696 - DNA, 260 bp, Unknown
  Description of Unknown: LeftRegion for integrase B6697 sequence
gaaaattattgaattagaattgcaacaagttaaaggactagtttttaaaattgataaagagaaatttattgtaataaataaaaatttattaaatatagaaaaaaaggaaataataaaatgtcttcattcccatatcaaattgaataaatttgattatatactcattgacaacaaaattttgattaatgaggataaaaaaaatgaaaacagcaatttatattagagtatctacccaagaacaagcaaaagaaggatattca

SEQ ID NO: 19697 - DNA, 260 bp, Unknown
  Description of Unknown: LeftRegion for integrase B6698 sequence
aaatgttattagacaaataaaaataccgcctagctggtaactagacggcatttaaagaaaaccacttgcacctgttaagttaacagatgagtacttttccctcgcaagtttaagtatatcattttttcttgacacttcgcaagaggtgtattttttgtacccaattttaatattttataaaaaggaaaaggtgatttactatgaaaaagatcgcagctgcttatataagagtcagtacacatatgcaagaagaattgtct

SEQ ID NO: 19698 - DNA, 260 bp, Unknown
  Description of Unknown: LeftRegion for integrase B6699 sequence
acgcagaatgccccggcttattcggatgccggcgatatgaccgtaacggatgaatgtgttggcgcgtttgtcctgcctgcccctgtcgcaaaggcgctcgccgaaaagctgggcgcgatttttgatggttccgccaattgataaaaaatgcagcctccgcatgtgcggcaggctgcattttcatatgaaaggttattgtaatgacaactattgatcttcgtattgccgcggcctatatccgcgtctccaccgacgaccag

SEQ ID NO: 19699 - DNA, 260 bp, Unknown; identical to SEQ ID NO: 19369
  Description of Unknown: LeftRegion for integrase B6700 sequence

SEQ ID NO: 19700 - DNA, 260 bp, Unknown
  Description of Unknown: LeftRegion for integrase B6701 sequence
gaccatcatggagacgggcgaggtgtacgccctctttcccggggaggttccagaggaacgcgacgaggcggttgaggttctggaaaaggaggtctcgtcggcgtttagacggtgagacgaaaaagccccgcgcatatgggcggcaaccctgcgcgaggctctgcaaaacaccgaccccgaagggagggtgagcccattatatggcaagcgcggttatctacgcacggtactcctcgtcaggacagcgcgaggagtcgata

SEQ ID NO: 19701 - DNA, 260 bp, Unknown
  Description of Unknown: LeftRegion for integrase B6702 sequence
ccagcaagatataattaattaccttaagcaagtaaattatatcattcctggagcgtcctggcaaggggcgtattttttatacccttttttcaaagctcaccaaaatcttacaggctgtaatatgggttataatacgggccaaaatgtggattgaaacatcccccaaactcatatacatgataggaacaggagatgatataatgccagcaacaccactagaaatcggcgccgcctacgttcgtgtcagcacagacgatcag

SEQ ID NO: 19702 - DNA, 260 bp, Unknown
  Description of Unknown: LeftRegion for integrase B6703 sequence
aaaacatttttattataaccgaatattcatttttaaaaatcaacaaaaatataggtatctatctactactataacataattacatttttattattaagttaatataaatatatagatatataagtaaaaatgttagagaaaataatattataaggagttagtaatttttttgttattttgttatgttaggaggttttagaatgaaaaaaataaaagttggtatttacattagagtatcaacgcaagaacaagctgaggct

SEQ ID NO: 19703 - DNA, 260 bp, Unknown
  Description of Unknown: LeftRegion for integrase B6704 sequence
gaaaattattgaattagaattgcaacaagttaaaggactagtttttaaaattgataaagagaaatatattgtaataaataaaaatttattaaatatagaaaaaaaggaaataataaaatgtcttcattcccatatcaaattgaataaatttgattatatactcattgacaacaaaattttgattaatgaggataaaaaaaatgaaaacagcaatctatattagagtatctacccaagaacaagcaaaagaaggatattca

SEQ ID NO: 19704 - DNA, 260 bp, Unknown
  Description of Unknown: LeftRegion for integrase B6705 sequence
tgcagtaaatgttattaatataaaataccgcctagctggtaactagacggcatttaaagaaaaccacttgcacctgttaagttaacagatgagtacttttccctcgcaagtttaagtatatcattttttcttgacacttcgcaagaggtgtattttttgtaccaaattttaatattttgtaaaaaggaaaggtgattactatgaaaaagatcgcagccgcttatataagagtcagtacacatatgcaagaagaattgtct

SEQ ID NO: 19705 - DNA, 260 bp, Unknown
  Description of Unknown: LeftRegion for integrase B6706 sequence
atgttattaaataaataaaaataccgcctagctggtaactagacggcattttgaggaaatcatttgcatctgtcgagaaaaaacagacgaaaatgctttacaaccaattaaagtatatcattttttcttggcatcctgcaagggtgtattttttgtaccaatttttaatatttttataaaagaaagaaaaggtgattactatgaaaaagatcgcagctgcttatgtaagagtcagcacacatatgcaagaagaattgtct

SEQ ID NO: 19706 - DNA, 260 bp, Unknown
  Description of Unknown: LeftRegion for integrase B6707 sequence
ccagcaagatataattaattaccttaagcaagtaaattatatcattcctggagcgtcctggcaaggggcgtattttttatacccttttttcaaagctcaccaaaatcttacaggctgtaatatgggttataatacaggccaaaatgtggattgaaacatcccccaaactcatatacatgataggaacaggagatgatataatgccagcaacaccactagaaatcggcgccgcctacgtccgtgtcagcacagacgatcag

SEQ ID NO: 19707 - DNA, 260 bp, Unknown
  Description of Unknown: LeftRegion for integrase B6708 sequence
tccggaagatataattaattaccttaagcaagtaaattatatcattcctggagcgtcctggcaaggggcgtattttttatacccttttttcaaagctcaccaaaatcttacaggctgtaatatgggttataatacaggccaaaatgtggattgaaacatcccccaaactcatatacatgataggaacaggagatgatataatgccagcaacaccactagaaatcggcgccgcctacgtccgtgtcagcacagacgatcag

SEQ ID NO: 19708 - DNA, 260 bp, Unknown; identical to SEQ ID NO: 19703
  Description of Unknown: LeftRegion for integrase B6709 sequence

SEQ ID NO: 19709 - DNA, 260 bp, Unknown
  Description of Unknown: LeftRegion for integrase B6710 sequence
gaatcgtggctgtgaaaatgtaagcctgcaaactttattgaagttgtcggcttcttttaattgctcgcttgaagaactcgtacacggaacgcctgaatatgttgtcacttactctacgaatgaatatacggagaaagaacttgaattgatatatctttatgccctatttttgaaaagtttgcgcacaaggggtggtgttgatgataattaaaaaggtcgctttgtatcttcgtaaaagcagaaaagacgaagggaacgaa

SEQ ID NO: 19710 - DNA, 260 bp, Unknown
  Description of Unknown: LeftRegion for integrase B6711 sequence
ttttgtggcatccagcgttttccagcactaccatccggaatctaaaaaataactacaaataaaaaaccccttccctgttggcgcagagaaagaggattcatgaagcagtcgcatgatgcaaccaccactcacaaaagtattgtatcataagaccgctttatttgctatacatttttataagcaaaaggaggtctttttttatgattatcgcagctgcttatgtccgcgtttctacggatgagcaaaccgattattctccg

SEQ ID NO: 19711 - DNA, 260 bp, Unknown; identical to SEQ ID NO: 19622
  Description of Unknown: LeftRegion for integrase B6712 sequence

SEQ ID NO: 19712 - DNA, 260 bp, Unknown
  Description of Unknown: LeftRegion for integrase B6713 sequence
gacttttatcacagcaaagcagtaatcgtaacagaatcaggctcccgctatcatacatatagctgctatcattgggactatcctatctggatttataataaagaggctgctatctccgaaggctataccccttgcaaagattgcaaccctccccaataaaccccttctcatacattttataaataaaggaggtcttttttatgattatcgcagcagcctatgtccgtgtctccacagatgagcaaaccgattattctccg

SEQ ID NO: 19713 - DNA, 260 bp, Unknown
  Description of Unknown: LeftRegion for integrase B6714 sequence
cagcaagatataattaattaccttaagcaagtaaattatatcattcctggagcgtcctggcaaggggcgtattttttataccctttttttcaaggctcaccaaaatcttacaggctgtaatatgggttataatatgggccgaaatgtggattgaaacgtcctccaaactcatatacatgataggaacaggagatgatataatgccagcaacaccactagaaatcggcgccgcctacgtccgtgtcagcacagacgatcag

SEQ ID NO: 19714 - DNA, 260 bp, Unknown
  Description of Unknown: LeftRegion for integrase B6715 sequence
ctacatccttcctgccggtgctgaaaaaattatctgattactataaagaaatttaaataaaaaatcccctctccctgttggcgcagggaaagaggattcataaagtggtcgcatgatacaaccactcctcgcaacagtattgtatcataagaccgctttatttgctatacatttttataagcaaaaggaggtccttttttatgattgtcgcagctgcttatgtccgtgtttccacggacgagcaaaccgattattccccc

SEQ ID NO: 19715 - DNA, 260 bp, Unknown
  Description of Unknown: LeftRegion for integrase B6716 sequence
attcttcgaccattcaccatgtcactaaactgctgctttgaatatcccgctctgcttgcaatcacacattgcttaacaccctttttctgaataatttccagaatattttctggcactgttccattgcgattcacatgtattgtatcataagaccgctttatttgctatacatttttataagcaaaaggaggtctttttttatgattatcgcagctgcttacgtccgcgtttctacggacgagcaaaccgattattccccc

SEQ ID NO: 19716 - DNA, 260 bp, Unknown
  Description of Unknown: LeftRegion for integrase B6717 sequence
tacgcctggaagatataattaccctaagcaagtaaattatatcattcctggagcgtcctggcaaggggcgtattttttatacccttttttcaaagctcaccaaaatcttacaggctgtaatatgggttataatatggaccgaaatgagaattgaaacatcccctaaactcatatacatgataggaacaggagatgatataatgccagcaacaccactagaaatcggcgccgcctacgttcgtgtcagcacagacgatcag

SEQ ID NO: 19717 - DNA, 260 bp, Unknown
  Description of Unknown: LeftRegion for integrase B6718 sequence
attattgaattagaaatgcaaaactttcaaggactaatcatcaaaaactgtaacgaaatatttatagttatcaacacaaatttaactgatgtcgaaaagaaaaaaattataaattgtcttcatacccgcatcgaattacaacaattcgatttcctactcattgacaatacaatcgtaccaaataatgaggagaaaaaagaatgaaaacagcactttacatcagagtatctacacaagagcaagcaaaagagggatactca

SEQ ID NO: 19718 - DNA, 260 bp, Unknown
  Description of Unknown: LeftRegion for integrase B6719 sequence
gaaagaaaagtaagagagcaattcgatgatttcatcagaaattaccgaagataaataaaataaaaaatcccctctcctgcgccaacaggaaagaggattcatatagcggtcgcatgatacaaccaccactcacaaaagtattgtatcataagaccgctttctttgctatacatttttatagacaaaaggaggtcttttttatgattatcgcagctgcttatgtccgtgtttccacggacgagcaaaccgattattccccc

SEQ ID NO: 19719 - DNA, 260 bp, Unknown
  Description of Unknown: LeftRegion for integrase B6720 sequence
ccagcaagatataattaattaccttaagcaagtaaattatatcattcctggagcgtcctggcaaggggagtattttttatacccttttttcaaagctcaccaaaatcttacaggctgtaatatgggttataatacaggccaaaatgtggattgaaacatcccccaaactcatatacatgataggaacaggagatgatataatgccagcaacaccactagaaatcggcgccgcctacgtccgtgtcagcacagacgatcag

SEQ ID NO: 19720 - DNA, 260 bp, Unknown; identical to SEQ ID NO: 18816
  Description of Unknown: LeftRegion for integrase B6721 sequence

SEQ ID NO: 19721 - DNA, 260 bp, Unknown; identical to SEQ ID NO: 19718
  Description of Unknown: LeftRegion for integrase B6722 sequence

SEQ ID NO: 19722 - DNA, 260 bp, Unknown
  Description of Unknown: LeftRegion for integrase B6723 sequence
ttctcggaagctggacttaatatatcaaaaacaatttcataaaaggaaagcccgcaacggctattggcgtagcggctgcgggctgattccatgtgatgtgtaataaaacaccttcaaacgaatttattatacatcgcatggctccaaaacacaagtaaatattggggctatttttatgcccttttttaggaggaaatgcgatgagacgtgttgtaatttatgtaagagtttctacacaggagcaagccacagagggttac

SEQ ID NO: 19723 - DNA, 260 bp, Unknown
  Description of Unknown: LeftRegion for integrase B6724 sequence
cgacatcgcaacaattaaaaaataccgcccagctgcaaccggacggcattttgaggaaatcatttgcatctgtcgagaaaaaaacagacgaaaatgctttacaaaaccaattaaagtatatcattttttcttggcatcctgcaagggtgtattttttgtaccaatttttaatattttataaaaaggaaaaggtgattactatgaaaaagatcgcagctgcttatgtaagagtcagcacacatatgcaagaagaattgtct

SEQ ID NO: 19724 - DNA, 260 bp, Unknown
  Description of Unknown: LeftRegion for integrase B6725 sequence
atgactttgagaaccgagaggagttagagggggataaagacaatactgcggcagtctaagatcattcccatagaattactgagacgtaagaagctattggaggtgagattacgaaagcggtaatttacgctcgatattcgagccacagtcagagagaagaatccatcgaaggtcagctccgtgagtgtcacgacttcgccttgaagaatgggttcacgatcataaatgaatattgcgacagagcgatttcgggtaagacc

SEQ ID NO: 19725 - DNA, 260 bp, Unknown
  Description of Unknown: LeftRegion for integrase B6726 sequence
aataagttgcgacatcgcaacaataaaaaaccgcccagctgcaactggacggaattaaaagaaaaacacttgcacctgtcaagaacagatgaaatacttttccctgaacaagtaaagtatatcattttttcttggcaccctgcaagggtgtattttttgtacaaatttttaatattttataaaaagaaaaggtgataactatgaaaaaaattgcagctgcttatataagagttagtacccacatgcaagaagaattgtct

SEQ ID NO: 19726 - DNA, 260 bp, Unknown
  Description of Unknown: LeftRegion for integrase B6727 sequence
agttgcgacatcgcaacaattaaaaaccgcccagctgcaactggacggcattttgagaaaaccatttgcatctgccgagaaaaaacagacgaaatgctttacatagacaactaaagtatatcattttttcttggcatcctgcaagggtgtattttttgtaccaaattttaatattttataaaaaagaaaaggtgataactatgaaaaaaattgcagctgcttatataagagtcagtacgcacatgcaagaagaattatct

SEQ ID NO: 19727 - DNA, 260 bp, Unknown
  Description of Unknown: LeftRegion for integrase B6728 sequence
gacatcgcaacaattaaaaaataccgcccagctgcaaccagacggcattttgaggaaatcatttgcatctgtcgagaaaaaacagacgaaaatgctttacaaaaccaattaaagtatatcattttttcttggcatcctgcaagggtgtattttttgtaccaatttttaatattttatagaagaaagaaaaggtgattattatgaaaaaaattgcagctgcttatgtaagagtcagcacacatatgcaagaagaattgtct

SEQ ID NO: 19728 - DNA, 260 bp, Unknown; identical to SEQ ID NO: 19701
  Description of Unknown: LeftRegion for integrase B6729 sequence

SEQ ID NO: 19729 - DNA, 260 bp, Unknown; identical to SEQ ID NO: 19703
  Description of Unknown: LeftRegion for integrase B6730 sequence

SEQ ID NO: 19730 - DNA, 260 bp, Unknown
  Description of Unknown: LeftRegion for integrase B6731 sequence
taaatgttattaaataaataaaaataccgcctagctggtaactagacggcattttgaggaaatcatttgcatctgtcgagaaaaaacagacgaaaatgctttacaaccaattaaagtatatcattttttcttggcatcctgcaagggtgtattttttgtaccaatttttaatattttataaaaaggaaaaggtgattactatgaaaaagattgcagctgcttatgtaagagtcagcacacatatgcaagaagaattgtct

SEQ ID NO: 19731 - DNA, 260 bp, Unknown
  Description of Unknown: LeftRegion for integrase B6732 sequence
gttcagcgagacagggcttaatatatcaaaatcaattaaataaaaagaagcccatagtcactattggcgtaatggctacgggcaggttccatgtgatgtataataacacctttcaaacaaatgttattatacatcgtatggctccaaaacacaagtaaatattggggctatttttatgcccttttttaggaggaaatgcgatgagacgtgttgtaatttatgtaagagtttctacacaggaacaagccacagagggttac

SEQ ID NO: 19732 - DNA, 260 bp, Unknown
  Description of Unknown: LeftRegion for integrase B6733 sequence
acgcagaatgccccggcttattcggatgccggcgatatgaccgtaacggatgaatgtgttggcgcgtttgtcctgcctgcccctgtcgcaaaggcgctcgccgaaaagctgggcgcgatttttgatggttccgccaattgataaaaaatgcagcctccgcatgtgcggcaggctgcattttcatatgaaaggttattgtaatgacaactattgatcttcgtattgccgcggcctatatccgcgtctccaccgatgaccag

SEQ ID NO: 19733 - DNA, 260 bp, Unknown
  Description of Unknown: LeftRegion for integrase B6734 sequence
atgactttgagaaccgagaggagttagagggggataaagacaatactgcggcagtctaagatcattcccatagaactgctgagacgtaagaagctattggaggtgagattacgaaagcggtaatttacgctcgatattcgagccacagtcagagagaagaatccatcgaaggtcagctccgtgagtgtcacgacttcgccttgaagaatgggttcacgatcataaatgaatattgcgacagagcgatttcgggtaagacc

SEQ ID NO: 19734 - DNA, 260 bp, Unknown
  Description of Unknown: LeftRegion for integrase B6735 sequence
attggtaaatcagacattaaagaacgaaatgaagggaagacgactaatttgttgttttcattggatcatttcattaattatgtaaagaactctaaatatctgacaatcggctcgaggcaagtcactgagcgagaaaaatatatgcttattaaaattctacaattggctaaagacatcttagataaaggggaatgatttaaatgggcgaaacatacggagtggtcaatagaaacgccatgcgtgtagcattatatccacgc

SEQ ID NO: 19735 - DNA, 260 bp, Unknown
  Description of Unknown: LeftRegion for integrase B6736 sequence
gtctacaagttataacacttcttgatgatgattatatttatacattaggatatataccaaaaattttagaacacgaattatatcaagcacttgataaatctgacacttataatacagaattatatgttactaaaaaagataatatttttaatttacaactagaaataatatttaaaaaagcaaaaaaggagttttaaataatgatacaaagaggagcttgttatttaagagtaagtacaaatgatcaattagaatttagc

SEQ ID NO: 19736 - DNA, 260 bp, Unknown
  Description of Unknown: LeftRegion for integrase B6737 sequence
ccctgcaagtattgtaaatactgacatgggagaaaaaaatctcgcccccaagtgctaccaacactcagaggcgagcagagcggatactaccaatatcagctcgattcaaattcacactaacccattaagaaagggcgaattctgcccttttattatactgcatattattaaatatgtcaaggaaataggaggaaaaatcaatgaagatcgcagcggcttacgttcgtgtttccaccgaagagcaaacagagctgtcccct

SEQ ID NO: 19737 - DNA, 260 bp, Unknown
  Description of Unknown: LeftRegion for integrase B6738 sequence
tgcaagtattgtaaatactgacatgacaaaaaaaaatctcgcccccaagtgctaccaacactcagaggcgagcagagcggatactaccaatatcagctcgattcaaattcacacccacttcaaccacgaaagggcgaattctgcccttttattatactgcatattattaaatatgtcaagaaaataggaggaaaaaatcaatgaagatcgcagcggcttacgttcgtgtttccaccgaagagcaaacagagctgtcccct

SEQ ID NO: 19738 - DNA, 260 bp, Unknown
  Description of Unknown: LeftRegion for integrase B6739 sequence
ccctgcaagtattgtaaatactgacatgacaaaaaaatctcgcccccaagtgctaccaacactcagaggcgagcagagcggatactaccaatatcagctcgattaaaattcacacccacttcaaccacgaaagggcgaattctgcccttttattatactgcatattattaaatatgtcaagaaaataggaggaaaaatcaatgaagattgcagcggcttacgttcgtgtttccaccgaagaacaaacagagctgtcccct

SEQ ID NO: 19739 - DNA, 260 bp, Unknown; identical to SEQ ID NO: 19736
  Description of Unknown: LeftRegion for integrase B6740 sequence

SEQ ID NO: 19740 - DNA, 260 bp, Unknown
  Description of Unknown: LeftRegion for integrase B6741 sequence
tcccctgctagtattgtaaatactgacatgacaaaaaaatctcgcccccaagtgctaccaacactcagaggcgagcagagcggatactaccaatatcagctcagaacgaacaaaacccaatcaccacaaaagggcttattctgcccttttattatactgcatattattaaatatgtcaagaaaataggaggaaaaaatcaatgaagatcgcagcggcttacgttcgtgtttccaccgaagagcaaacagagctgtcccct

SEQ ID NO: 19741 - DNA, 260 bp, Unknown
  Description of Unknown: LeftRegion for integrase B6742 sequence
aaaaaacccgtcagtaccgcaaatactgacaaaaaaaatctcgcccccaagtgctaccaacactcagaggcgagcagagcggatactaccaatatcagctcgattaaaattcacaccaatagaccaataaagggcgaattctgcccttttattatactgcatattattaaatatgtcaagaaaataggaggaaaaaatcaatgaagatcgcagcggcttacgttcgtgtttccaccgaagagcaaacagagctgtcccct

SEQ ID NO: 19742 - DNA, 260 bp, Unknown
  Description of Unknown: LeftRegion for integrase B6743 sequence
ctgctagtattgtaaatactgacatgggagaaaaaaatctcgcccccaagtgctaccaacactcagaggcgagcagagcggatactaccaatatcagctcgatccaaattcacacccacttcaaccacgaaagggcgaattctgcccttttattatactgcatattattaaatatgtcaagaaaataggaggaaaaatcaatgaagatcgcagcggcttacgttcgtgtttccaccgaagagcaaacagagctgtcccct

SEQ ID NO: 19743 - DNA, 260 bp, Unknown
  Description of Unknown: LeftRegion for integrase B6744 sequence
aagcccgccagtaccgcaaatactgatagggagaaaaaaatctcgcccccaagtgctaccaacactcagaggcgagcagagcggatactaccaatatcagctcaaaatgaacaaaacccaatcaccacaaaagggcttattctgcccttttattatactgcatattattaaatatgtcaagaaaataggaggaaaaatcaatgaagatcgcagcggcttacgttcgtgtttccaccgaagagcaaacagagctgtcccct

SEQ ID NO: 19744 - DNA, 260 bp, Unknown
  Description of Unknown: LeftRegion for integrase B6745 sequence
tctcagcggaagccgcacagtaccgctcaaaccgcatgaaagagctgcgagggcgcgggaagttcctcacatcgccgctagaacggcaggtgttcgagaatttcaagccgtggatagaccagcaaaagaaccaataaaaaaatccccctgcccgcaaggacaggggaactattacataaactatacaaggagatgatatcatgaaactagcagcctgttacataagagtgtccaccgatgaccagctggaatactccccc

SEQ ID NO: 19745 - DNA, 260 bp, Unknown
  Description of Unknown: LeftRegion for integrase B6746 sequence
aataagttgcgacatcgcaacaattaaaaaccgcccagctgcaactggacggaattaaaagaaaaacacttgcacctgtcaagaacagatgaaatacttttccctgaacaagtaaagtatatcattttttcttggcaccctgcaagggtgtattttttgtacaaatttttaatattttataaaaagaaaaggtgataactatgaaaaaaattgcagctgcttatataagagttagtacccacatgcaagaagaattgtct

SEQ ID NO: 19746 - DNA, 260 bp, Unknown; identical to SEQ ID NO: 19743
  Description of Unknown: LeftRegion for integrase B6747 sequence

SEQ ID NO: 19747 - DNA, 260 bp, Unknown
  Description of Unknown: LeftRegion for integrase B6748 sequence
tcccctgcaagtattgtaaatactgacatgacaaaaaaaatctcgcccccaagtgctaccaacactcagaggcgagcagagcggatactaccaatatcagctcaaaatgaacaaaacccaatcaccacaaaagggcttattctgcccttttattatactgcatattattaaatatgtcaagaaaataggaggaaaaatcaatgaagatcgcagcggcttacgttcgtgtttccaccgaagagcaaacagagctgtcccct

SEQ ID NO: 19748 - DNA, 260 bp, Unknown; identical to SEQ ID NO: 19745
  Description of Unknown: LeftRegion for integrase B6749 sequence

SEQ ID NO: 19749 - DNA, 260 bp, Unknown; identical to SEQ ID NO: 19725
  Description of Unknown: LeftRegion for integrase B6750 sequence

SEQ ID NO: 19750 - DNA, 260 bp, Unknown
  Description of Unknown: LeftRegion for integrase B6751 sequence
ctggtatctaatttgggactttcgtctcccaaatgcgggacttatcatcggcggcaacatctcgcttgccgcgtggtttattctgcttctggtcatcgcggccgcctgcgtcatgggccactgtctgcttcgtatgtcttcccggtatacgaagcgatcccacaccgtttttatcggtcacgagccgggaggtgacgagcatgactgatttgaaaatcgccgcggcctatattcgcgtttccaccgatgatcaggtggag

SEQ ID NO: 19751 - DNA, 260 bp, Unknown
  Description of Unknown: LeftRegion for integrase B6752 sequence
aactcaactgatgatatagacgaataaataaataaaaaaatctcgcccccaagtgctaccaacactcagaggcgagcagagcggatactaccaatatcagctcaaaatgaacaaaacccaatcaccacaaaagggcttattctgcccttttattatactgcatattattaaatatgtcaagaaaataggaggaaaaatcaatgaagatcgcagcggcttacgttcgtgtttccaccgaagagcaaacagagctgtcccct

SEQ ID NO: 19752 - DNA, 260 bp, Unknown
  Description of Unknown: LeftRegion for integrase B6753 sequence
ttccctgctagtattgtaaatactgacatgggagaaaaaatctcgcccccaagtgctaccaacactcagaggcgagcagagcggatactaccaatatcagctcaaaacgaacaaaacccaatcaccacaaaagggcttattctgcccttttattatactgcatattattaaatatgtcaagaaaataggaggaaaaatcaatgaagatcgcagcggcttacgttcgtgtttccaccgaagagcaaacagagctgtcccct

SEQ ID NO: 19753 - DNA, 260 bp, Unknown
  Description of Unknown: LeftRegion for integrase B6754 sequence
cctaaaaaacttgatgtctcagatttttatagatttttagttcaattgtctatcgaaaatagacaaaaaattaattcataaaacaaaaaaagccctccaagttttggtcgaggaggagggcttaatctaatttacagtaaaactctcggaaacgagcgcttttactgtacccattttaacaaaaaagaggtacaaacacaatgagtaaaaaagtggctatttacaccagagtatcaacaacgaaccaagcagaagaggga

SEQ ID NO: 19754 - DNA, 260 bp, Unknown
  Description of Unknown: LeftRegion for integrase B6755 sequence
atcggatatgcagcgctccaaagacgcagcatacgcggagggttttctcgatggcaagaagcgcgagtccgcggtttcatatgccgcgggtgagaaggcggggtatgaccgcggctaccaggtcggcttgctggacggtcgcgccgaaggttgggatcacggatacacctgcgcaaggcgcgacatgaacggaggtgcccatgactgatttcaaaaccgccgcggcctatatccgcgtctccactgacgatcaggtggag

SEQ ID NO: 19755 - DNA, 260 bp, Unknown
  Description of Unknown: LeftRegion for integrase B6756 sequence
atgctgcaaaagctggatccataccttgcagactatggcagcatccgtgatgccgttgttcattcgctggatgtgtacccccctccccgacattttgcataatttctttcattcctttttgtgcataacaaaaaagcagccccgcactacgcacggagctgctttttcttcagctatcattatcttctggaggtttcgcaatgggctatgtgacgaagaaggcggcacaacgctttgaggaaaagaaagccgccatatac

SEQ ID NO: 19756 - DNA, 260 bp, Unknown
  Description of Unknown: LeftRegion for integrase B6757 sequence
tagccgacataatcagctactaccgtccgcacatttacgaaccccgttgagataaactattactagtgtctctacttttattattatacactttttctaaaaaaaatgcaagtttttataaaaaatgtaaataaaacgttactttctcgtaatatttttgtaatgtttttataatattaatttaaaaggagctataaataatgattaaacgaggtgcttgttacattagggtaagtactaacgaccaactagaatttagc

SEQ ID NO: 19757 - DNA, 260 bp, Unknown
  Description of Unknown: LeftRegion for integrase B6758 sequence
ctggtatctaatttgggactatcgcctcccaaatgcgggtctcattatcggtggcaacatatcgctcgccgcgtggcttattctgctgctggtcatcgcggccgcctgcgtcatgggccactgtctgcttcgtatgtcctcccggtataccaggcagtcccacaccggtttcatcggtcacgagccgggaggtgacgagcatgactgatttgaaaatcgccgcggcctatatccgcgtttccaccgatgatcaggtggag

SEQ ID NO: 19758 - DNA, 260 bp, Unknown
  Description of Unknown: LeftRegion for integrase B6759 sequence
ctggtatctaatttgggactttcgcctcccaaatgcgggacttatcatcggcggcaacatctcgcttgccgcgtggtttattctgcttctggtcatcgcggccgcctgcgtcatgggccactgtctgcttcgtatgtcttcccggtatacgaagcgatcccacaccgtttttatcggccacgagccgggaggtgacgagtatgactgatttgaaaatcgccgcggcctatatccgcgtttccaccgatgatcaggtggag

SEQ ID NO: 19759 - DNA, 260 bp, Unknown
  Description of Unknown: LeftRegion for integrase B6760 sequence
cccatgctagtattgtaaatactgacatgacagaaaaaaatctcgcccccaagtgctaccaacactcagaggcgagcagagcggatactaccaatatcagctcaaaacgaacaaaacccaatcaccacaaaagggcttattctgcccttttattatactgcatattattaaatatgtcaagaaaataggaggaaaaatcaatgaagatcgcagcggcttacgttcgtgtttccaccgaagagcaaacagagctgtcccct

SEQ ID NO: 19760 - DNA, 260 bp, Unknown
  Description of Unknown: LeftRegion for integrase B6761 sequence
ccctgctagtattgtaaatactgacatgacagaaaaaaatctcgcccccaagtgctaccaacactcagaggcgagcagagcggatactaccaatatcagctcaaaacgaacaaaacccaatcaccacaaaagggcttattctgcccttttattatactgcatattattaaatatgtcaagaaaataggaggaaaaaatcaatgaagatcgcagcggcttacgttcgtgtttctaccgaagaacagaccgagctgtcccct

SEQ ID NO: 19761 - DNA, 260 bp, Unknown
  Description of Unknown: LeftRegion for integrase B6762 sequence
atcggtggctctttattcaatggagaatccacaggtttatatatttcaaaagaccaaagccaagctagtttaggtgtaggcattttaattgattctaaaaattcaactttcatctactctcccgaatctttcgactattctgattactctttaacctttaacgctaataccactccatacgagcttaaggaggtatccaaatgattcctgctgtcggttactgtcgtttctcttctgagaaccaagcggatggattctcc

SEQ ID NO: 19762 - DNA, 260 bp, Unknown
  Description of Unknown: LeftRegion for integrase B6763 sequence
caattatgaaattagagagctgcctcctaatgagttttcaatatgtggaatctacatgggtcactttaagccagtagaagaataggaggatgggatggcatcaaaaaaataaagaatagttttgctgtaaacgtaggaggggcaactgagccgatttctagggaggatctcgatgagagtataaaaaaggagagtttagaatggttgtgcttgcatatataagagttagtactgatgaacaagcggaaaaagggaactcc

SEQ ID NO: 19763 - DNA, 260 bp, Unknown; identical to SEQ ID NO: 19725
  Description of Unknown: LeftRegion for integrase B6764 sequence

SEQ ID NO: 19764 - DNA, 260 bp, Unknown
  Description of Unknown: LeftRegion for integrase B6765 sequence
ctggtatctaatttgggactatcgcctcccaaatgcgggtctcattatcggcggcaacatatcgctcgccgcgtggcttattctgctgctggtcatcgcggcctcctgcatcatgggccgctgtctgcttcgtatgtcctcccggtataccaggcagtcccacaccggtttcatcggccacgagccgggaggtgacgagcatgactgatttgaaaatcgccgcggcctatatccgcgtttccaccgatgatcaggtggag

SEQ ID NO: 19765 - DNA, 260 bp, Unknown
  Description of Unknown: LeftRegion for integrase B6766 sequence
taatgaacctgtcatttttattataaaacaaaaaccgttcctggctgcaaccaagaacggctttacatagtttctcttaccggatgtactccagaagatacactacatatcagaattctagtatatcatttctggagtgtcctgacaaggggcgtattttttgcacccaaaaaccgtacaatgcactaggagatgatattatgacactattatctacattggaaattggagccgcatatattcgggtaagttctgatgaa

SEQ ID NO: 19766 - DNA, 260 bp, Unknown
  Description of Unknown: LeftRegion for integrase B6767 sequence
acaaaaacggctcgccagataaaagatataataataacagacagcttcctgtatgcctttatggatacgttaccataagaagcggcgcgggacttgaaatccagttgtgctgttccaacaattctaaaatcgacggtctgggatgatcctccgcaaggacaaacaccccaacgcatacactataataaggagatggtaacatgaagctagcagcctgctacataagagtatcgaccgacgatcagcttgagtactccccg

SEQ ID NO: 19767 - DNA, 260 bp, Unknown
  Description of Unknown: LeftRegion for integrase B6768 sequence
tagttctcctatatttaatgaatttattatatcatataattaaaataaaaaaaactccccggctgcaaccggggagcacaagcaaagtaccacaagtgatacaacgccctgaacaagcatattgtatcatctagcccggtattttgcaagtcgggctatttttatgcccattttcatataatttgaaagggtgatacataatgacactgaaaaacgcatgtgcatatatcagagtctcaactgacaagcaggaagagctt

SEQ ID NO: 19768 - DNA, 260 bp, Unknown
  Description of Unknown: LeftRegion for integrase B6769 sequence
agtcttttaaaataaaaaaagaatggaacctacaacccatagggtcgtttacaggttccatgtctgttaataattctagtgttatctattataacatatagaattgtagttgtcaaattcgacactaatattttattcaattttattaaaattattcttgcaatatttttataatattaatttaaaaggagctataaacaatgattaaacgaggtgcttgttacattagggtaagtacgaacgaccaactagagtttagc

SEQ ID NO: 19769 - DNA, 260 bp, Unknown
  Description of Unknown: LeftRegion for integrase B6770 sequence
agcttgagggggataagggagcaactgcggcggtgtgataagctcattccattcgctttgatacatagaaagaagatattggaggtgagactatcaaagcagtaatttatgctcgttactcgagccataatcaacgagaagaatccatcgagggtcagcttcgagagtgccatgagttcgctctcaagaatgacttcatcgtggttgacgaatatatcgaccgggcaatctccggcaagactgacaaccgaccgagcttc

SEQ ID NO: 19770 - DNA, 260 bp, Unknown; identical to SEQ ID NO: 19747
  Description of Unknown: LeftRegion for integrase B6771 sequence

SEQ ID NO: 19771 - DNA, 260 bp, Unknown
  Description of Unknown: LeftRegion for integrase B6772 sequence
cctgcaagtattgtaaatactgacatgacaaaaaaatctcgcccccaagtgctaccaacactcagaggcgagcagagcggatactaccaatatcagctcgattcaaattcacacccacttcaaccacgaaagggcgaattctgcccttttattatactgcatattattaaatatgtcaagaaaataggaggaaaaaatcaatgaagatcgcagcggcttacgttcgtgtttccaccgaagagcaaacagaactgtcccct

SEQ ID NO: 19772 - DNA, 260 bp, Unknown
  Description of Unknown: LeftRegion for integrase B6773 sequence
agccagtcagtaccgcaaatactgataggaagaaaaaaatctcgcccccaagtgctaccaacactcagaggcgagcagagcggatactaccaatatcagctcaaaacgaacaaaacccaatcaccacaaaagggcttattctgcccttttattatactgcatattattaaatatgtcaagaaaataggaggaaaaaatcaatgaagatcgcagcggcttacgttcgtgtttccaccgaagaacaaacagagctgtcccct

SEQ ID NO: 19773 - DNA, 260 bp, Unknown
  Description of Unknown: LeftRegion for integrase B6774 sequence
attggtaaatcagacattaaagaacgaaatgaagggaagacgaccaatttgttgttttcattggatcatttcattaattatgtaaagaactctaaatatctgacaatcggctcgaggcaagtcactgagcgagaaaaatatatgcttattaaaattctacaattggctaaagacatcttagataaaggggaatgatttaaatgggcgaaacatacggagtggtcaatagaaacgccatgcgtgtagcattatatccacgc

SEQ ID NO: 19774 - DNA, 260 bp, Unknown
  Description of Unknown: LeftRegion for integrase B6775 sequence
gtcggatgtgcagtgctccaaggatgcagcatatgcggagggttttctcgatggcaagaagcgcgagtccgcggtttcatatgccgcaggtgaaaaggcagggtatgaccgcggctaccagaccggcctgctggacggccgtgccgaaggctgggatcacggatacgcctgcgcaaggtgcgacatgaacggaggtgcccatgactgatttcaaaaccgccgcggcctatatccgcgtctccaccgacgatcaggtggag

SEQ ID NO: 19775 - DNA, 260 bp, Unknown
  Description of Unknown: LeftRegion for integrase B6776 sequence
atcaaatcgaagtctttagtcaatatataaaaaaagagccagccgcaaaggaccagctccaaactgtgatattaaataccaccctagacaagttgtattttatcattctttggagcacccggtcaatcagaactgttgttcttaggcatggtgttatttttatacccatttttcataaaataaacaaaggagtgatagaaatgaaaacaggtgcattatatgtcagagtatcaacagatgatcaggtagagtattctcct

SEQ ID NO: 19776 - DNA, 260 bp, Unknown
  Description of Unknown: LeftRegion for integrase B6777 sequence
acctcaattagcaatttttgtcaatatactaaaaaagagccagccactaggaccagctccaaactgtgatattaaataccaccctagacaagttgtattttatcattttttggagcacccggtcaatcagaactgttgttctttggttgggtgttatttttatactcatttttcataaaataaacaaaggagtgatagaaatgaaaacaggtgcattatacgtcagagtatcaacagatgatcaggtagagtattctcct

SEQ ID NO: 19777 - DNA, 260 bp, Unknown
  Description of Unknown: LeftRegion for integrase B6778 sequence
aaataaaaaaccgaacaaacagagaaatgcatataagattgcaaatgaatttttaataaaataaaaaatcgcccgatgctgcaacatcaggcgacaaaatcgtccccttggaaacgattactaaacttgcacatttagtatatcgtatttttccaaagtccacaagggcttattttttatacccttttttagagggaattatgaaaaaagaaaaagtaataccgatagactccctcgatctggtcgatctatacatccgt

SEQ ID NO: 19778 - DNA, 260 bp, Unknown
  Description of Unknown: LeftRegion for integrase B6779 sequence
aaataaaaaaccgaacaaacagagaaatgcatataagattgcaaatgaatttttaataaaataaaaaatcgcccgatgctgcaacatcaggcgacaaaatcgtccccttggaaacgattactaaacttgcacatttagtatatcgtacttttccaaagtccacaagggcttattttttatacccttttttagagggaattatgaaaaaagaaaaagtaataccgatagactccctcgatctggtcgatctatacatccgt

SEQ ID NO: 19779 - DNA, 260 bp, Unknown
  Description of Unknown: LeftRegion for integrase B6780 sequence
aaataaaaaaccaaacaagcagagaaatgcatataagattgcaaatgaatttttaataaaataaaaaatcgcccgatgctgcaacatcaggcgacaaaatcgtccccttggaaacgattactaaacttgcacatttagtatatcgtatttttccaaagtccacaagggcttattttttatacccttttttagagggaattatgcaaaaagaaaaagtaataccgatagactccctcgatctggtcgatctatacatccgt

SEQ ID NO: 19780 - DNA, 260 bp, Unknown
  Description of Unknown: LeftRegion for integrase B6781 sequence
caggagtgataaactatgaatgaagtaataaaagtagtcggatatgcacgattttcttcttcaatgcaaagagaggagtccataacagctcaaaaaagatatatgatgatgtatgctaaaagaaacaatatggaagttattgattggtattgtgatgaacaaaatcggcaaaaacagtcaacagacctgaatttcagagaatgataaatgacgcaaagaacaatcctgaatttaaggcggtattggtacataaaacagac

SEQ ID NO: 19781 - DNA, 260 bp, Unknown; identical to SEQ ID NO: 19778
  Description of Unknown: LeftRegion for integrase B6782 sequence

SEQ ID NO: 19782 - DNA, 260 bp, Unknown; identical to SEQ ID NO: 19778
  Description of Unknown: LeftRegion for integrase B6783 sequence

SEQ ID NO: 19783 - DNA, 260 bp, Unknown
  Description of Unknown: LeftRegion for integrase B6784 sequence
tggacagcgtacccaacaaagccggatacatcaaggcattgatccgcaaggatattgaagaaaacggataaaaaaaccgccccacggcggcaaccgtgaagcggcaagaggaaaaactattgctataatagacttcccaaagcaaggtctattatagcatatttcctctgaaaaatcaagtcttaggaggaaatttacacatgaatgcagtgatctacgcccgttacagctgcgaccggcagaccgagcagtccattgag

SEQ ID NO: 19784 - DNA, 260 bp, Unknown; identical to SEQ ID NO: 19777
  Description of Unknown: LeftRegion for integrase B6785 sequence

SEQ ID NO: 19785 - DNA, 260 bp, Unknown
  Description of Unknown: LeftRegion for integrase B6786 sequence
atatcaaatcgaagtctttagtcaatatataaaaaaagagccagccactaaggaccagctccacagaatgattaaatcatccctaggcaagttgtattttatcattctttggagcacccggtcaatcagaactgttgttcttaggctaggtgttatttttatacccatttttcataaaatacataaaggagtgatgaaatatgaagacaggagcattatatgtcagagtttcaacagacgaccaggtagaatattctcct

SEQ ID NO: 19786 - DNA, 260 bp, Unknown
  Description of Unknown: LeftRegion for integrase B6787 sequence
atattatatcaaatcagaggttttagtcaataaaaaagagccagccactaaggaccagctccaaagcgatattaaataccaccctagacaagttgtattttatcattctttggagcacccggtcaatcagaactgttgttcttcggttgggtgttatttttatactcatttttcataaaataaacaaaggagtgatagaaatgaaaacaggtgcattatacgtcagagtatcaacagatgaccaagtagagtattctcct

SEQ ID NO: 19787 - DNA, 260 bp, Unknown
  Description of Unknown: LeftRegion for integrase B6788 sequence
gtggaatcgttcttgtgaaaatatcagtttgcagacgcttttgaagttggcaaagttctttaattgcacgattgaggaacttgtaaacggcgcacccgaaaagtcgtatacttttgatttgaacgaatacacttttgcggaacttgaactaatccgtttttatgcagggttcttgaaagcaaacagagggaggacaacgaatgaaatcatcaagcgtggctttatacctccgaaagagtagggaagaagaaacagaaacg

SEQ ID NO: 19788 - DNA, 260 bp, Unknown
  Description of Unknown: LeftRegion for integrase B6789 sequence
aggagagaaaaactacaactacatagcaaaaaccgcccggtgctggtaacgccgaacggttatgcatagattccgtacagatcaaagatctgtgtgaaaatcttccctaagcaagaagattataccacacacctcttcgctttgtacagggtgtattttttatactcttttttcatattttcaaagagggggtggtcttaatggataatacaatgcgttatggcgcgttatatatccgtgtgagcactgacaagcaggaa

SEQ ID NO: 19789 - DNA, 260 bp, Unknown
  Description of Unknown: LeftRegion for integrase B6790 sequence
aaatggtaacaaccctaaaatgcaaaaaccgcccggtacgccaataccgaacggctttgcatagatcttctcttgccggatgctccggaaagatataaatcagacttaagacacctgaattatatcattttccagagcaccctgcaaggggtgtattttttataccctaaatccatatggtttacaggagatgatatagtatggcacaaaatttgaggatcggcgctgcttatatccgcgtcagcaccgatgatcaggca

SEQ ID NO: 19790 - DNA, 260 bp, Unknown
  Description of Unknown: LeftRegion for integrase B6791 sequence
aggaaggtggacgacttaaatagcaaaaccgtccggtgctggaacaccgaacggcttcacacagattttctcttgccggatgctccggaaagatataaatcagacttagaacacctgaattatatcattttccagaacaccctgcaaggggtgtattttttatacccaaaatccatatggtttacaggagatgatatagtatggcacaaaatttaaggatcggcgctgcctatatccgcgtcagcaccgatgatcaggca

SEQ ID NO: 19791 - DNA, 260 bp, Unknown
  Description of Unknown: LeftRegion for integrase B6792 sequence
cacctcaattagcaatttttgtcaatatactaaaaaagagccagccacaaaggaccagctccaaagcgatattaaataccaccctagacaagttgtattttatcattctttggagcacccggtcaatcagaactgttgttcttcggttgggtgttatttttatactcatttttcataaaataaacaaaggagtgatagaaatgaaaacaggtgcattatacgtcagagtatcaacagatgatcaggtagagtattctcct

SEQ ID NO: 19792 - DNA, 260 bp, Unknown
  Description of Unknown: LeftRegion for integrase B6793 sequence
ttgtaaaaccaaaagaaaaaccggtcccctgcgccaacaggaaaccggcttgcatatctccgaagagatacaatgtgacataccaatcacagaatctattgtatcatcttcgagcagccaagacaacgggaacatttgttttccggtggctgttatttttgtaccctaaagtccatatggtttacaggagatgatatagtatggcacaaaatttgaggatcggcgctgcttatatccgcgtcagcaccgatgatcaggcg

SEQ ID NO: 19793 - DNA, 260 bp, Unknown
  Description of Unknown: LeftRegion for integrase B6794 sequence
cgaaactttaaatatagttttagatgcttaatataataaaaaccggctcctgcgccaacaggaaccggcaagtaacatcccgaagaatggtaccaatttcgcaaaaatattgtatcatcttcggaggcagtctgcaagcagaactcgcgttctttgctggctgttatttttgtacccatttttaagaaggtgaagatgatatgaaaaacaaaagaaaagaaatccttcccgggctttcggatatggtagatctctacatt

SEQ ID NO: 19794 - DNA, 260 bp, Unknown
  Description of Unknown: LeftRegion for integrase B6795 sequence
atattatatcaaatcagaggttttagtcaataaaaaagagccagccactaatgaccagctccaaagcgatattaaataccaccctagacaagttgtattttatcattctttggagcacccggtcaatcagaactgttgttcttaggctaggtgttatttttatactcatttttcataaaataaacaaaggagtgatagaaatgaaaacaggtgcattatatgtcagagtttcaacagacgaccaggtagaatattctcct

SEQ ID NO: 19795 - DNA, 260 bp, Unknown
  Description of Unknown: LeftRegion for integrase B6796 sequence
gaaaaaaacaattatataagcgatagaattgaatataaatgtattcaaagagcatttgaacaaatattggagcttaatctagttgatgatgtaaaaaaattaagaatagaagctccagaaggtagtatagaagaattacttgttcttgctataaaagcagatttagaacatttaataaacaagaaaaaaggagcagaataatgcgagttgcaatttattcaagaaaatctaagttgacagataagggtgaaagtattgaa

SEQ ID NO: 19796 - DNA, 260 bp, Unknown
  Description of Unknown: LeftRegion for integrase B6797 sequence
tcaaaatcaaattgagcaaaaataataaaaccgcccctgcgccaacaggaacggtatgaaattgcatatccgaagatatacactatactttggtcagtaatattgtatcatcttcgggaacagcttgcaagagaacaaaagttcgctggctgttatttttgtacctttttttacataaaacttacaaaggagctgatacaatgtcaaataacacaccttcttcgcttcctgatttgcgtactggtgccctttacatccgg

SEQ ID NO: 19797 - DNA, 260 bp, Unknown
  Description of Unknown: LeftRegion for integrase B6798 sequence
tgcactggtgcaactcccataaatagcaaaaccgcccggtgctggaacatcggacggcttcacatagactttctcttgccggatgctccgggaagatataatcagcctgaacacctgaattatatcattcctggaacatcctggcaaggggtgtattttttataccctaaatccatatggtttacaggagatgatatagtatggcacaaaatttaaggatcggcgccgcttatatccgcgtcagcaccgatgatcaggca

SEQ ID NO: 19798 - DNA, 260 bp, Unknown
  Description of Unknown: LeftRegion for integrase B6799 sequence
tatatcaaatcgaagtctttagtcaatatataaaaaaagagccagccactaatgaccagctccacagaatgattaaatcatccctagacaagttgtattttatcattctttggagcacccggtcaatcagaactgttgttcttcggttgggtgttatttttatactcatttttcataaaataaacaaaggagtgatagaaatgaaaacaggtgcattatacgtcagagtatcaacagatgatcaggtagagtattctcct

SEQ ID NO: 19799 - DNA, 260 bp, Unknown
  Description of Unknown: LeftRegion for integrase B6800 sequence
cacctcaattagcaatttttgtcaatatactaaaaaagagccagccactaggaccagctccaaagcgatattaaataccaccctagacaagttgtattttatcattctttggagcacccggtcaatcagaactgttgttctttggttgggtgttatttttatactcatttttcataaaataaacaaaggagtgatgagatatgaagacaggagcattatacgtcagagtatcaacagatgatcaggtagagtattctcct

SEQ ID NO: 19800 - DNA, 260 bp, Unknown
  Description of Unknown: LeftRegion for integrase B6801 sequence
tcaaatcgaagtctttagtcaatatataaaaaaagagccagccgcaaaggaccagctccaaactgtgatattaaataccaccctagacaagttgtattttatcattctttggagcacccggtcaatcagaactgttgttcttaggctaggtgttatttttatacccatttttcataaaatacataaaggagtgatgaaatatgaagacaggtgcattatatgtcagagtatcaacagatgatcaggtagagtattctcct

SEQ ID NO: 19801 - DNA, 260 bp, Unknown
  Description of Unknown: LeftRegion for integrase B6802 sequence
tattatatcaaatcagaggttttagtcaataaaaaagagccagccactaatgaccagctccaaagcgatattaaataccaccctagacaagttgtattttatcattctttggagcacccggtcaatcagaactgttgttcttaggctaggtgttatttttatacccttttttcataaaatacataaaggagtgatgaaatatgaagacaggagcattatatgtcagagtttcaacagacgaccaggtagaatattctcct

SEQ ID NO: 19802 - DNA, 260 bp, Unknown
  Description of Unknown: LeftRegion for integrase B6803 sequence
ttgcaaggccaaaagaaaaaccggtcccctgctccaacaggaaaccggcttgcatatctccgaagagatacgatgtgacataccaatcacagaatctattgtatcatcttcgagcagccaagacaacgggaacatttgttttccggtggctgttatttttgtatcctaaagtccatatggtttacaggagatgatatagtatggcacaaaatttgaggatcggcgctgcttatatccgcgtcagcaccgatgatcaggca

SEQ ID NO: 19803 - DNA, 260 bp, Unknown; identical to SEQ ID NO: 19790
  Description of Unknown: LeftRegion for integrase B6804 sequence

SEQ ID NO: 19804 - DNA, 260 bp, Unknown; identical to SEQ ID NO: 19775
  Description of Unknown: LeftRegion for integrase B6805 sequence

SEQ ID NO: 19805 - DNA, 260 bp, Unknown; identical to SEQ ID NO: 19777
  Description of Unknown: LeftRegion for integrase B6806 sequence

SEQ ID NO: 19806 - DNA, 260 bp, Unknown
  Description of Unknown: LeftRegion for integrase B6807 sequence
aggaaggtggacgacttaaatagcaaaaccgtccggtgctggaacaccgaacggcttcacacagattttctcttgccggttgctccggaaagatataaatcagacttaagacacctgaattatatcattttccagagcaccctgcaaggggtgtattttttatacccaaaatccatatggtttacaggagatgatatagtatggcacaaaatttaaggatcggagccgcttatatccgcgtcagcaccgatgatcaggca

SEQ ID NO: 19807 - DNA, 260 bp, Unknown
  Description of Unknown: LeftRegion for integrase B6808 sequence
cctcaattagcaatttttgtcaatatgcaaaaaaagagccagccgcaaaggaccagctccaaactgtgatattaaataccaccctagacaagttgtattttatcattctttggagcacccggtcaatcagaactgttgttcttaggcatggtgttatttttatacccatttttcataaaataaacaaaggagtgatagaaatgaaaacaggtgcattatacgtcagagtatcaacagatgaccaggtagagtattctcct

SEQ ID NO: 19808 - DNA, 260 bp, Unknown
  Description of Unknown: LeftRegion for integrase B6809 sequence
atcaaatcgaagtctttagtcaatatataaaaaaagagccagccgcataggaccagctccaaactgtgatattaaataccaccctagacaagttgtattttatcattctttggagcacccggtcaatcagaactgttgttcttaggctaggtgttatttttatacccatttttcataaaataaacaaaggagtgatagaaatgaaaacaggtgcattatacgtcagagtatcaacagatgatcaggtagagtattctcct

SEQ ID NO: 19809 - DNA, 260 bp, Unknown
  Description of Unknown: LeftRegion for integrase B6810 sequence
gattctggagaagtgcaaggcagccatgaccgaagtcgccattgtggaatatcaaccggcggcataacacaaaaaaaaccgccccacggcggcaaccgtgagacggcaagaggaaaaactattgcgataatagtcccccaaacaaggtctattatagcatatttcctcgtaaaaatcaagtcttaggaggaaatttacacatgaatgcagtgatctacgcccgttacagctgcgaccggcagaccgagcagtccattgag

SEQ ID NO: 19810 - DNA, 260 bp, Unknown
  Description of Unknown: LeftRegion for integrase B6811 sequence
cttttacgttatataaaccataaaaccgcctcagcgctaccaacactaagacggtccatataaactacatatccgaagatatacagtctcattgcaaaaatattgtatcatcttcgggaacagcttgcaagagaacaaaagttctcaggctgttatttttgtacctttttttacataaaacttacaaaggagctgatacaatgtcaaataacaccccttcttcgcttcccgatttgcgtaccggtgctctttacatccgt

SEQ ID NO: 19811 - DNA, 260 bp, Unknown
  Description of Unknown: LeftRegion for integrase B6812 sequence
ttacagtgcattatttgatgcacaataaataaaaaaagagccagccactaaggaccagctccacagaatgattaaatcatccctaggcaagttgtattttatcattctttggagcacccggtcaatcagaactgttgttcttaggctaggtgttatttttatacccatttttcataaaatacataaaggagtgatgaaatatgaagacaggagcattatatgtcagagtttcaacagacgaccaggtagaatattctcct

SEQ ID NO: 19812 - DNA, 260 bp, Unknown
  Description of Unknown: LeftRegion for integrase B6813 sequence
catattttttttggaggtcttttctttgagcaattacagcgaacgtgataaagccgttctggacagtctggacgagaacattcgtcttgcacctcgtctcggagtctgcgccgatactttctatgccctgaagcaggagttcctgcgtgtcatgcgtgaacgcgacgaagccatccagaagctttcggaggtgcaagcgcatggcaaacactgatttgaccgtcgcggctgcctatatccgcgtctccacagaggatcag

SEQ ID NO: 19813 - DNA, 260 bp, Unknown
  Description of Unknown: LeftRegion for integrase B6814 sequence
gacttgtaaaaccaaaagaaaaaccggtcccctgctccaacaggaaaccggcttgcatatccccgaagagatacaatgtgacgtcgcaatcacatagatattgtatcatcttcgggcagccatagcaacgggaacgtttgttttccggtggttgttatttttgtaccctaaagtccatatggtttacaggagatgatatcatgtcacagactttaaggatcggcgccgcttatatccgcgtcagcaccgatgatcaggca

SEQ ID NO: 19814 - DNA, 260 bp, Unknown
  Description of Unknown: LeftRegion for integrase B6815 sequence
ataatatatacatttttttaagtcaatatactaaaaaagagccagccactaaggaccagctccacagaatgattaaatcatccctagacaagttgtattttatcattctttggagcacctggtcaatcagaactgttgttcttcggttgggtgttatttttatactcatttttcataaaataaacaaaggagtgatagaaatgaaaacaggtgcattatacgtcagagtatcaacagatgatcaggtagagtattctcct

SEQ ID NO: 19815 - DNA, 260 bp, Unknown
  Description of Unknown: LeftRegion for integrase B6816 sequence
cctcaattagcaatttttgtcaatatactaaaaaagagccagccactaatgaccagctccaaactgtgatattaaataccaccctagacaagttgtattttatcattctttggagcacctggtcaatcagaactgttgttcttcggttgggtgttatttttatactcatttttcataaaataaacaaaggagtgatagaaatgaaaacaggtgcattatacgtcagagtatcaacagatgaccaggtagagtattctcct

SEQ ID NO: 19816 - DNA, 260 bp, Unknown
  Description of Unknown: LeftRegion for integrase B6817 sequence
tcaaatcgaagtctttagtcaatatataaaaaaagagccagccacaaaggaccagctccaaactgtgatattaaataccaccctagacaagttgtattttatcattttttggagcacccggtcaatcagaactgttgttctttggttgggtgttatttttatactcatttttcataaaataaacaaaggagtgatgagatatgaagacaggagcattatacgtcagagtatcaacagatgatcaggtagagtattctcct

SEQ ID NO: 19817 - DNA, 260 bp, Unknown
  Description of Unknown: LeftRegion for integrase B6818 sequence
cacctcaattagcaatttttgtcaatatactaaaaaagagccagccactaggaccagctccaaagcgatattaaataccaccctagacaagttgtattttatcattctttggagcacccggtcaatcagaactgttgttcttaggctaggtgttatttttatacccttttttcataaaatacataaaggagtgatgaaatatgaagacaggagcattatatgtcagagtttcaacagacgaccaggtagaatattctcct

SEQ ID NO: 19818 - DNA, 260 bp, Unknown
  Description of Unknown: LeftRegion for integrase B6819 sequence
tcaaatcgaagtctttagtcaatatataaaaaaagagccagccgcaaaggaccagctccaaactgtgatattaaataccaccctagacaagttgtattttatcattctttggagcacccggtcaatcagaactgttgttcttaggctaggtgttatttttatacccttttttcataaaatacataaaggagtgatgaaatatgaagacaggagcattatatgtcagagtttcaacagacgaccaggtagaatattctcct

SEQ ID NO: 19819 - DNA, 260 bp, Unknown
  Description of Unknown: LeftRegion for integrase B6820 sequence
cacctcaattagcaatttttgtcaatatactaaaaaagagccagccgcaaaggaccagctccaaagcgatattaaataccaccctagacaagttgtattttatcattctttggagcacctggtcaatcagaactgttgttcttcggttgggtgttatttttatactcatttttcataaaataaacaaaggagtgatagaaatgaaaacaggtgcattatatgtcagagtatcaacagatgatcaggtagagtattctcct

SEQ ID NO: 19820 - DNA, 260 bp, Unknown
  Description of Unknown: LeftRegion for integrase B6821 sequence
tttgcaaaaattttatcattccttttaaagctatgataaacaaatcgccttataattaaatataaaaaagccccttacctgttggcgcaggtaaagggccagtagttaattacataccttggagggatatataatcgaaccacgcaactcgattatatcacctccagggcgtatttgtcataccccaggaggttttatttatgtgtacaaaaaatgtaggtatctatatccgtgtttctacacaagaacaagctaatgaa

SEQ ID NO: 19821 - DNA, 260 bp, Unknown
  Description of Unknown: LeftRegion for integrase B6822 sequence
tgcaccggtgcaactcccataaatagcaaaaccgcccggtgctggaacaccggacggcttcacatagactttctcttgccggatgctccgggaagatataatcagcctgaacacctgaattatatcattcctggaacatcttggcaaggggtgtattttttataccctaaatccatatggtttacaggagatgatatattatggcacaaaatttaaggatcggcgctgcctatatccgcgtcagcaccgatgatcaggca

SEQ ID NO: 19822 - DNA, 260 bp, Unknown
  Description of Unknown: LeftRegion for integrase B6823 sequence
tttaacgtctatacatgcattatatctataacctctatttaagtcaatctatataaaatcccccaccctgcgccaacaggatgagggaaagaattgaatacaatacctagagcggtaccgcatcaactcgacaaattgattatatcacggttcacactctaggtcagctttgctatacctaaaaggagtgtgatttttttatgctttccacaaatgtaggtatctatatccgtgtttcaacacaagaacaagctaatgaa

SEQ ID NO: 19823 - DNA, 260 bp, Unknown
  Description of Unknown: LeftRegion for integrase B6824 sequence
gcacctgtacagcttccataaattgcaaaaccgcccggcgctaccaacaccgaacggcttcgcatagattttctcttgccggatgcccggaaagatataaatcagacttaagacacctgaattatatcatctccagagcatctcggcaaggggtgtattttttataccctaaaaccatattgtttacaggagatgatcttatggcacaaaatttaagaattggagcggcctatatccgtgtcagcacggatgatcaggcg

SEQ ID NO: 19824 - DNA, 260 bp, Unknown; identical to SEQ ID NO: 19817
  Description of Unknown: LeftRegion for integrase B6825 sequence

SEQ ID NO: 19825 - DNA, 260 bp, Unknown
  Description of Unknown: LeftRegion for integrase B6826 sequence
caatattggatttatctcgacaatggtgatattgaaaagattgagtaatcaaaaaattttaataaaaaatcccctctcctgcgccaacaggaaagaggattcatatagcggtcatacatggtataatccgccctgaacaagctaattataccacatgaccgccttgtttgctatacccaaaacaaaggaggtctttttttatgataaatgcagtaggttacacccgtttctccaccgacagacagacggagaactccacc

SEQ ID NO: 19826 - DNA, 260 bp, Unknown
  Description of Unknown: LeftRegion for integrase B6827 sequence
acacctcaattagcaatttttgtcaatatgcaaaaaaagagccagccactaatgaccagctccaaagtgatataaataccaccctagacaagttgtattttatcattctttggagcacccggtcaatcagaactgttgttcttcggttgggtgttatttttatactcatttttcataaaataaacaaaggagtgatagaaatgaaaacaggtgcattatacgtcagagtatcaacagatgatcaggtagagtattctcct

SEQ ID NO: 19827 - DNA, 260 bp, Unknown
  Description of Unknown: LeftRegion for integrase B6828 sequence
aaataaaaaaccaaacaagcagagaaatgcatataagattgcaaatgcatttttaataaaataaaaaatcgcccgatgctgcaacaccaggcgacaaaatcgttcccttggaaacgattactaaacttgcacatttagtatatcgtatttttccaaagtccacaagggcttattttttatacccttttttagagggaattatgcaaaaagaaaaagtaataccgatagactccctcgatctggtcgatctatacatccgt

SEQ ID NO: 19828 - DNA, 260 bp, Unknown
  Description of Unknown: LeftRegion for integrase B6829 sequence
gtggaatcgttcatgcgaaaatatcagtttgcagactcttttgaagttggcaaagttttttaattgcacgattgaggaattggtgaacggtgcggctaaagaatcatatactttcgatctgaacgaatttacctttgcggaattggaattgatacgattttacgcggggtacctgaaagcaaacagagggaggacaacggatgaaatcatcaagcgtggcattatacctccgaaagagtagggaagaagagacagagacg

SEQ ID NO: 19829 - DNA, 260 bp, Unknown
  Description of Unknown: LeftRegion for integrase B6830 sequence
aggaacgaaaacgacttaaatagcaaaaccgcccggtgctggaacaccggacggcttcacatagattttctcttaccggttgctccggaaagatataaatcagacttagaacacctgaattatatcattttccagagcaccctgcaaggggtgtattttttataccctaaatccatatggtttacaggagatgatatattatggcacaaaatttgaggatcggtgccgcctatatccgcgtcagcaccgatgatcaggca

SEQ ID NO: 19830 - DNA, 260 bp, Unknown
  Description of Unknown: LeftRegion for integrase B6831 sequence
tgcaccggtgcaactcccataaatagcaaaaccgcccggtgctggaacaccggacggcttcacatagactttctcttgccggatgctccgggaagatataatcagcctgaacacctgaattatatcattcctggaacatcctggcaaggggtgtattttttataccctaaatccatatggtttacaggagatgatatattatggcacaaaatttaaggatcggcgctgcctatatccgcgtcagcaccgatgatcaggca

SEQ ID NO: 19831 - DNA, 260 bp, Unknown; identical to SEQ ID NO: 19817
  Description of Unknown: LeftRegion for integrase B6832 sequence

SEQ ID NO: 19832 - DNA, 260 bp, Unknown; identical to SEQ ID NO: 19800
  Description of Unknown: LeftRegion for integrase B6833 sequence

SEQ ID NO: 19833 - DNA, 260 bp, Unknown
  Description of Unknown: LeftRegion for integrase B6834 sequence
cctcaattagcaatttttgtcaatatactaaaaaagagccagccactaggaccagctccaaactgtgatattaaataccaccctagacaagttgtattttatcattctttggagcacccggtcaatcagaactgttgttcttaggctaggtgttatttttatacccttttttcataaaatacataaaggagtgatgaaatatgaagacaggagcattatatgtcagagtttcaacagacgaccaggtagaatattctcct

SEQ ID NO: 19834 - DNA, 260 bp, Unknown; identical to SEQ ID NO: 19775
  Description of Unknown: LeftRegion for integrase B6835 sequence

SEQ ID NO: 19835 - DNA, 260 bp, Unknown
  Description of Unknown: LeftRegion for integrase B6836 sequence
gctgcacctgtgcagcttccataaatagcaaaaccgcccggtgctaccaacaccgaacggttttacatggattttctcttgccggatgcccgggaagatataatcagcttgaacacctgaattatatcatctccagagcatctcggcaaggggtgtattttttataccctaaaaccatattgtttacaggagatgatcttatggcacaaaatttaagaattggagcggcctatatccgtgtcagcacggatgatcaggca

SEQ ID NO: 19836 - DNA, 260 bp, Unknown
  Description of Unknown: LeftRegion for integrase B6837 sequence
ttcaaacaaatttttaatatccaatctaacacctctttacattttcgatataaagaattgtatatcttatttgctattttgtcaatatgtttttatttttcctcattttttgtctagttttaataataaatctattcttaaatatattgacgtatattaacatatatgttatgttgaatttgcaaggagatgatctaataatgaataaaacattaaaatccgtctgcgcctacatccgtgtgagcaccgatgatcaggta

SEQ ID NO: 19837 - DNA, 260 bp, Unknown
  Description of Unknown: LeftRegion for integrase B6838 sequence
caacatcatccggcagtaagggttttatggctggcgatcgcatccaggcgacaatggtgtttgaatctatcgactaaaattaaaaatcccgctccggtgttagtagcaccgaaacgggacatgggctgaaaaactttgacaggttgtattcagcccttttattatatcatattttaagagtaaataaaaggagtgattttatgcgcattgacgcgatctacgctagacagtcaatcgaaaagcgagattctatttccatc

SEQ ID NO: 19838 - DNA, 260 bp, Unknown
  Description of Unknown: LeftRegion for integrase B6839 sequence
caactcatacagctccgcaaatcccaagggctaactcagaaagacctggccgctgctgccaatcttgcgcagccagccattgcacggcttgagagcaaatcagcggtacctcagcttgataccttcgtgaaggtagccggagcacttggatacacaatagagcttgtacagcaatcataattttttaggaaggtgatacaatgagccatacttttaaatccgtctgcgcctacatccgtgtgagcaccgatgatcaggta

SEQ ID NO: 19839 - DNA, 260 bp, Unknown
  Description of Unknown: LeftRegion for integrase B6840 sequence
ttctggacaaatgcaaggcagccatgaccgaagtcgccattgtggaatatcaaccggcggcataacacaaaaaaaaccgccccacggcggcaaccgtgaagcggcaagaggaaaaactattgcgataatagacttcccaaagcaaggtctattatagcatatttcctctgaaaaatcaagtcttaggaggaaatttacacatgaatgcagtgatctacgcccgttacagctgcgaccggcagaccgagcagtccattgag

SEQ ID NO: 19840 - DNA, 260 bp, Unknown
  Description of Unknown: LeftRegion for integrase B6841 sequence
tcgctgaaggaattttcataactgagtaagtgattaacacgaattaaaaaaccgcccggtgctggtaacaccgaacggtctcttgcatcccttgtggtggatgcggttgcttattaaattcgcacttataagtatatcgcatttcccataagtccacaagggcttattttttacaccctttttcaggaggaagatgcgttttgaaacaaaaaatagcagcgccgccggctgatccggtggtcgatctagtcgatctgtat

SEQ ID NO: 19841 - DNA, 260 bp, Unknown
  Description of Unknown: LeftRegion for integrase B6842 sequence
attaaaaattttaaccattatggtgacttcaccgcaatggtaaataaaaagagccagtccatacaagaccagcccaaagatgatacaatcatccaaatcgcaactagattgtaccattaaaaatagcatctggtcaagtatggctaggtgttatttttatacactaaaatacataagattttaagggagtggtacaatctatgaaaacaggagcactatatatacgagtatcaacagatgatcagacagaatactctcct

SEQ ID NO: 19842 - DNA, 260 bp, Unknown
  Description of Unknown: LeftRegion for integrase B6843 sequence
aggcggaaaaaccgcgctatttccatcctggccgtgattgtgggcttgcttctggtggtcattattgccgcgttgattggcgatttgctcaatgataaggttggcttcttctggctccggtcgcttctatcgccaagcgggcaattggagccgataaaaaatatcgcgttgaaaaaatagcaaacaaaggggaaaacagaatggaaacattatcaggatatatagacgggaaagaaacaataaacatgcgtatagaacgg

SEQ ID NO: 19843 - DNA, 260 bp, Unknown
  Description of Unknown: LeftRegion for integrase B6844 sequence
gctgcaagagagaaaaacaactacatagcaaaaaccgcccggtgctggtaacaccgaacggttttgcatagattctgtacaggcgaggcctgtgtaaaatcttccctgaacaagaagattataccacacacctcttcgctttgtacagggtgtattttttatactcttttttcatatttttaagagaggaaggtgtttttatggacgaaatgcgttatggcgcgttatatatccgtgtgagcactgacaagcaggaagag

SEQ ID NO: 19844 - DNA, 260 bp, Unknown
  Description of Unknown: LeftRegion for integrase B6845 sequence
ttatgacctgtcttttttatgccaaataaatattaatgtttatttggcatattattttataggggtgatattatgcgtgttaaaatcaaaccgccaaagagtaagcaaatatttgagtcggaattgttgaagatactttcaaggaaaccgatcaaacgcagatgatatacataatgaaagtggaagggaggtgcggtagaatgagaatggcggcatattgtcgtgtcagtacagagaaagaggaacaactatcttctctt

SEQ ID NO: 19845 - DNA, 260 bp, Unknown
  Description of Unknown: LeftRegion for integrase B6846 sequence
aaattctagcccctctccattaagattacttatttattgtataatcttaattaataataggctagtggtaaattcaggaaatacatttacataacccactttacaaatcaaatttcattcgtaattaataatattattacccttttacaattgacaaccttggtaaaaaaatgtatcgtatataaaaagggggatttaaaatgacatttggggcagcttatatacgtgtatcgacagatcaccaggatgaatatagtccg

SEQ ID NO: 19846 - DNA, 260 bp, Unknown
  Description of Unknown: LeftRegion for integrase B6847 sequence
taccatggcggggtcgccttattttttggcaggaagctctatttttacccgcttcagacggcgccggagcgggaccacaaaccagccggatgcggcgcgcataaatccgcgtaaccgctcatttatttcgaatatacgggataagtgggcggttttgtcatgcaaatttgacatttacgcccggaaagggtttgtgtgctatggaacagaagaaaatcggcgcggcgtacatccgcgtctcgaccgacgaccagctcgat

SEQ ID NO: 19847 - DNA, 260 bp, Unknown
  Description of Unknown: LeftRegion for integrase B6848 sequence
tacctaaaaagtaaaaaaccggcccctgcgccaacaggaaccggccttcacacagattatctcttaccggaaactccaggaaagatataatcagctcgaacacctgaattatatcacccctggagcaccccggtcaagagggtgtattttttatacccatttttcgtaccatataccaatacataccaggagatgataaaatgaccaacctagacatcggagccgcctacattcgcgtcagcactgatgagcagacggaa

SEQ ID NO: 19848 - DNA, 260 bp, Unknown
  Description of Unknown: LeftRegion for integrase B6849 sequence
atgacctgtcttttttatgccaaataaatattaatgtttatttggcatattattttatagggggtgatactatgcacattaaaatcagaccgccaaagagtaagcaaatacttgaatcggaattattgaagatactttcgaggaaacctattaaacgcagataattatacatataccgagtggaagggaggtgcggtagaatgagaatggcggcatattgtcgtgtcagcacagagaaagaggaacaactatcttctctt

SEQ ID NO: 19849 - DNA, 260 bp, Unknown
  Description of Unknown: LeftRegion for integrase B6850 sequence
atgacctgtcttttttatgccaaataaatattaatgtttatttggcatattattttatagggggtgatattatgcgtgttaaaataagaccaccaaagagtaagcaaatacttgagtcggaattattgaagatactttcgaggaagccaatcaaccgcagataattatacatacaccaagtggaagggaggtgcggtagaatgagaatggcggcatattgtcgtgtcagcacagagaaagaggaacaactatcttctctt

SEQ ID NO: 19850 - DNA, 260 bp, Unknown
  Description of Unknown: LeftRegion for integrase B6851 sequence
agtttcttggctcgcacggaggctctccggctcgaaaatgcaagtctacgcacgcagcgtgagcatgtgaaaaaatcattgcggatgcatcgcattacaaccttcatcttgcttggcattgtggccgtctgcgtgctggcgctgctggtggacgtcctgaaccccgccatcggctgggtgcgcgcatgatggaggctgatatgcaagcacagacacagcgcgtcgcggcggcttacatccgcgtgtcgacggacgaccag

SEQ ID NO: 19851 - DNA, 260 bp, Unknown
  Description of Unknown: LeftRegion for integrase B6852 sequence
cattattcaaatctgtaattggaaaaatatattccataaaaccaaaaactcctattacgttttatacctattatactgtcagtattacaaatctgtcaataataatattataatctttcacaattaatgatactattatctttttacaattgacaaccttggcaaaaaaatgtatcgtatataaaaagggggatttaaaaatgacatttggggcagcttatatacgtgtatcgacagatcaccaggatgaatatagtccg

SEQ ID NO: 19852 - DNA, 260 bp, Unknown
  Description of Unknown: LeftRegion for integrase B6853 sequence
tcattattcaaatcagtaattggaaaaatatattccataaaaccaaaaactcctattacattttatacctattatactgtcaatattacaaatctgtcaataataatattataatctttcacaattaatgatgctattatctttttacaattgacaaccttggtaaaaaaatgtatcgtatataaaaagggggatttaaaatgacatttggggcagcttatatacgtgtatcgacagaacaccaagacgaatacagtcca

SEQ ID NO: 19853 - DNA, 260 bp, Unknown
  Description of Unknown: LeftRegion for integrase B6854 sequence
ctgatatgcagttttaaaaatctgtcaaaaaaccgtccggtgctaccaacaccgaacggctttacatagattttctcttgccggacgaaccggaagataaatcaccttcaacaagtgaattatatcatttctggtacgtcctgacaaggggcgtattttttatacccaaaattaatacactagaccaaggagatgatatcatgaccacccaatccaccgtggaaataggtgctgcctatatccgcgtcagtacaaatgat

SEQ ID NO: 19854 - DNA, 260 bp, Unknown
  Description of Unknown: LeftRegion for integrase B6855 sequence
tgaagaggccattgctatgggttatggtccctgcggacactgtaaaccataaaaacataacaaaagaccggtctctgcgttcccttaacaaagaccggtcttttgcgtctacccaatcaaacgagtgacattaactgtgttgctattttattatacactcttttggttggatttgcaacttaaacaaaggagtggtaattatgaggatcgcggctgcttatattcgtgtatctaccgatgatcagcttgagtattccccc

SEQ ID NO: 19855 - DNA, 260 bp, Unknown
  Description of Unknown: LeftRegion for integrase B6856 sequence
tatgtattgactgtaagataaaatgtaaaaaccgcccggtgctaccaacaccgaacggctttcacatagattttctcttgccggacgcaccggaagataaatcaccttcaacaagtgaattatatcatttctggtacgtcctggcaaggggcgtattttttatacccaaaattaatacacttaaccaaggagatgatatcatgaccacccagtccaccgtggaaataggcgccgcctatatccgcgttagtacaaatgat

SEQ ID NO: 19856 - DNA, 260 bp, Unknown; identical to SEQ ID NO: 19843
  Description of Unknown: LeftRegion for integrase B6857 sequence

SEQ ID NO: 19857 - DNA, 260 bp, Unknown
  Description of Unknown: LeftRegion for integrase B6858 sequence
aaaattctagcccctctccattcagattacttatttattgtataatcttaattaataataggctagtggtaaattcaggaaatacatttacataacccactttacaaatcaaatttcattcgtaattaataatattattactcttttacattgacaaccttagtaaaaaaatgtatcgtataagaaaagggggattttaaatgatatttggggcagcttatatacgtgtatcgacagaacaccaggacgaatacagtccg

SEQ ID NO: 19858 - DNA, 260 bp, Unknown
  Description of Unknown: LeftRegion for integrase B6859 sequence
atcagttacgaagcgtccgcactgggcacaaccacaaccatccatctggaaaaacaggattaagaacccgcgaatacaataaaaaatcccgctccggtgttagtagcaccgaaacgggacatgggctgaaaaactttgacaggttgtattcagcccttttattatatcatattttaagagtaaataaaaggagtgattttatgcgcattgacgcgatctacgctagacagtcaatcgaaaagcgagattctatttccatc

SEQ ID NO: 19859 - DNA, 260 bp, Unknown
  Description of Unknown: LeftRegion for integrase B6860 sequence
gatatgcagttctaaaaaatttgtcaaaaaaccgcccggtgctaccaacaccgaacggttttcacatagattttctcttgccggacacaccggaagataaatcaccttcaacaagtgaattatatcatttctggtacgtcctggcaaggggcgtattttttatacccaaaattaatacactagaccaaggagatgatatcatgaccacccaatccaccgtggaaataggtgctgcctatatccgcgtcagtacaaatgat

SEQ ID NO: 19860 - DNA, 260 bp, Unknown
  Description of Unknown: LeftRegion for integrase B6861 sequence
ttcagatttatttgaataaatagatgaaaaaagccccaggagctaccaactcccagagcctttcacatagattctcttgccggatcattccggaaagatatatcattctcgcaaattgattatatcatttctggtacgtcctggcaaggggcgtattttttatacccaaaattaatacacttaaccaaggagatgatatcatgaccacccagtccaccgtggaaataggcgctgcctatatccgcgtcagtacaaatgat

SEQ ID NO: 19861 - DNA, 260 bp, Unknown
  Description of Unknown: LeftRegion for integrase B6862 sequence
agctccttggcgcgcacggaggctctgcggctcgaaaatgcaagcctgcgcacgcagcgtgagcagctgaaaaaatcattgaagatgcaccgcatcacaacattcatcctgcttggcattgtggccgtctgcgtgctggcgctgctggtggacattctgaaccccgccatcgactaggtgcgcgcatgatggaggctgatatgcaggcacaggcacagcgcgtcgcggcggcttacatccgcgtgtcgacggacgatcag

SEQ ID NO: 19862 - DNA, 260 bp, Unknown
  Description of Unknown: LeftRegion for integrase B6863 sequence
tataacctgtcttttttatgccaaataaatattaatgtttatttggcatattattttataggaggtgatactatgcacattaaaatcagaccaccaaagagtaagcaaatatttgagtcggaattattgaagatactttcgaggaagccgataaaacgcagataatatacataaaccaagtggaagggaggtgcggtagaatgaaaatggcggcatattgtcgtgtcagtacagagaaagaagaacaattatcttctctt

SEQ ID NO: 19863 - DNA, 260 bp, Unknown
  Description of Unknown: LeftRegion for integrase B6864 sequence
cattattcaaatctgtaattggaaaaatatattccataaaaccaaaaactcctattacgttttatacctattatactgtcagtattacaaatctgtcaataataatattataatctttcacaattaatgatactattatctttttacaattgacaaccttggtaaaaaaatgtatcgtatataaaaagggggatttaaaaatgacatttggggcagcttatatacgtgtatcgacagatcaccaggatgaatatagtccg

SEQ ID NO: 19864 - DNA, 260 bp, Unknown
  Description of Unknown: LeftRegion for integrase B6865 sequence
agttggacagtgtccccaacaaagccggatacatcaaggcattgatccgcaaggatattgaagaaaacggataaaaaaaccgccccacggcggcaaccgtgaagcggcaagaggaaaaactattgcgataatagtcccccgaacaaggtctattatagcatatttcctctgaaattgcaagtacaaggaggaaatttatcatgcaggcagcagcatatgcacgatacagcacagagcatcagaccgacagcagcattgcc

SEQ ID NO: 19865 - DNA, 260 bp, Unknown
  Description of Unknown: LeftRegion for integrase B6866 sequence
aaattctggagaagtgcaaggcagccatgaccgaagtcgccattgtggagtatcaaccggcggcatagcacaaaaaaaccgccccacggcggcaaccgtgaagcggcaagaggaaaaactattgcgataatagtcccccaaacaaggtctattatagcatatttcctctgaaattgcaagtacaaggaggaaaaaatatcatgcaggcagcagcatatgcacgatacagcacagagcatcagaccgacagcagcatcgcc

SEQ ID NO: 19866 - DNA, 260 bp, Unknown
  Description of Unknown: LeftRegion for integrase B6867 sequence
ttcgcttggatttggacaaacttcgcgagatagcgttgtaggatttaagacatctaattttaccccttccccggtcggcgccggagcgggaccacaaaccagccggatgcggcgcgcataaatccgcgtaaccgctcatttatttcgaacatacgggataggtgggcggttttgtactgcccggaaagggtttgtgtgctatggaacagaagaaaatcggcgcggcgtacatccgcgtctcgacggacgatcagctcgat

SEQ ID NO: 19867 - DNA, 260 bp, Unknown; identical to SEQ ID NO: 19863
  Description of Unknown: LeftRegion for integrase B6868 sequence

SEQ ID NO: 19868 - DNA, 260 bp, Unknown
  Description of Unknown: LeftRegion for integrase B6869 sequence
tcgctgaaggaattttcataactgagtaagtgattaacacgaattaaaaaaccgcccggtgctggtaacaccgaacggtctcttgcatcccttgtggtggatgcgattgcttattaaattcgcacttataagtatatcgcattttccataagtccacaagggcttattttttacaccctttttcaggaggaagatgcgttttgaaacaaaaaatagcagcgccgccggctgatccggtggccgatctggtcgatctgtac

SEQ ID NO: 19869 - DNA, 260 bp, Unknown
  Description of Unknown: LeftRegion for integrase B6870 sequence
aataatttacttgttacatcgcaagaataaaaataatgtaaattaaaaaagagccagcccatacaagaccagcccaaagatgatacaatcatccaaatcgcaactagattgtaccattaaaaatagcatctggtcaagtatggctaggtgttatttttatacactaaaatacataagattttaagggagtggtacaatctatgaaaacaggagcactatatatacgagtatccacagatgatcagacagaatactctcct

SEQ ID NO: 19870 - DNA, 260 bp, Unknown; identical to SEQ ID NO: 19853
  Description of Unknown: LeftRegion for integrase B6871 sequence

SEQ ID NO: 19871 - DNA, 260 bp, Unknown
  Description of Unknown: LeftRegion for integrase B6872 sequence
gaacggttctctatcagacgataaacaattatttaaaataccaataaaaaaccgcccggtgctagtaacaccgaacggtctcttgcatcccttgtggtggatgcgattgcttattaaattcgcacttataagtatatcgcattttccataagtccacaagggcttattttttacaccctttttcaggaggaagatgtgttttgaaacaaaaaataacagcgccgccggctgatccggtggtcgatctggtcgatttgtat

SEQ ID NO: 19872 - DNA, 260 bp, Unknown; identical to SEQ ID NO: 19852
  Description of Unknown: LeftRegion for integrase B6873 sequence

SEQ ID NO: 19873 - DNA, 260 bp, Unknown
  Description of Unknown: LeftRegion for integrase B6874 sequence
aaaagaggatgcgaaacgtagttaaaatataaaagtttaattcagcataccattttatagggggtgatactatgcacattaaaatcagaccaccaaagagtaagcaaatacttgagtctgaattattgaagatactttcgaggaaaccaattaagcgcagataattatacataaaccaagtggaaaggaggtgcggtataatgagaatggcggcatattgtcgtgtcagcacagagaaagaggaacagctatcttctctt

SEQ ID NO: 19874 - DNA, 260 bp, Unknown
  Description of Unknown: LeftRegion for integrase B6875 sequence
tcattattcaaatctgtaattggaaaaatatattccataaaaccaaaaactcctattacgttttatacctattatactgtcagtattacaaatctgtcaataataatattataatctttcacaattaatgatactattatctttttacaattgacaaccttggtaaaaaaatgtatcgtatataaaaagggggatttaaaatgacatttggggcagcttatatacgtgtatcgacagatcaccaggatgaatatagtccg

SEQ ID NO: 19875 - DNA, 260 bp, Unknown
  Description of Unknown: LeftRegion for integrase B6876 sequence
atttgctcttgctttttcatccattgaaatcataaaactaataatcaagtaaaaaagagcccagccactaacgaccagcctccaagtgaatataatcactccttgaacaagatgattatatcattcttgaagcactcggtcaaatgctgggtgttatttttatacctaaaaacataaattttacaaaggagtgattcaatatgaagaccggagccttgtatgtgcgtgtctcaacagatgatcaggtagagtattctcct

SEQ ID NO: 19876 - DNA, 260 bp, Unknown; identical to SEQ ID NO: 19874
  Description of Unknown: LeftRegion for integrase B6877 sequence

SEQ ID NO: 19877 - DNA, 260 bp, Unknown
  Description of Unknown: LeftRegion for integrase B6878 sequence
cagattctggagaagtgcaaggcagccatgaccgaagtcgccattgtggaataccaaccggcggcataacacaaaaaaaccgccccacggcggcaaccgtgagacggcaagaggaaaaactattgcgataatagccctccagacaaggtctattatagcatatttcctctgaaattgcaagtacaaggaggaaatttatcatgcaggcagcagcatatgcacgatacagcacagagcatcaaaccgacagcagcatcgcc

SEQ ID NO: 19878 - DNA, 260 bp, Unknown
  Description of Unknown: LeftRegion for integrase B6879 sequence
tctccgttttgctgaaactcaaagaatactatgaaaactaaaatataaaaaaagaaccgccctctgtgctaccaacacagaaagcggctcggttgccccgtaaaggagcgcgcatgataataaatcgcactgttattatagcacttcttttgcgggttggcaactgcatacgctattttaagcaaaaggagtgttgtatgatgaaggttgctgccgcttacatccgcgtttcgaccgacgaccagctggaatattccccc

SEQ ID NO: 19879 - DNA, 260 bp, Unknown
  Description of Unknown: LeftRegion for integrase B6880 sequence
gatcccacagctgaatttaacaaaacaatgcttgcggaagatttccggcaatctctttcgagcgatgaaaactacacaacagatattgaatttgattcggatgatgaagaggaagatgtttcttccgatgaataatcagctcataaatattgatgcggcggtcgtttggctgccgcctgtattttttaaggaggaatattatgcccggaacaaacagcataccgggaacagctgcggcatacattcgagtttcggatgac

SEQ ID NO: 19880 - DNA, 260 bp, Unknown
  Description of Unknown: LeftRegion for integrase B6881 sequence
atccgctggaacgacaggtatttgaacagtttcaacagtttatcaacaagcaatcattctcgtgaggtcacgaaaatgaaaaaagccgccccacggcggcaaccgtgaagcggcaagagggaactattgctataatagtccaaaccagaacggtactattatagcacattctctcaaaaaatgcaaggaggaagtgcaaaatgcaagcagcagcatatgcaagatacagcacagagcatcagacagagagcagtattgct

SEQ ID NO: 19881 - DNA, 260 bp, Unknown
  Description of Unknown: LeftRegion for integrase B6882 sequence
tatgtcaaaccaacaaatttgtcaaatcgcaaaaaccgcccctgctaccaacaggaacggctttcacatagatttctcttgccggataaccggaaagatatatcagcttgaacacctgaattatatcatttctggaacgtcctggcaaggggcgtattttttatacccaaaaaacgtataaatacacaggagatgattgaatgaatgaaaaaaatcttgagattggggctgcttatatccgcgtcagcaccgatgatcag

SEQ ID NO: 19882 - DNA, 260 bp, Unknown
  Description of Unknown: LeftRegion for integrase B6883 sequence
aaagctcctgccggctccttcgccacactggttgatattgatgtggaagcatacaaaaggcgacttgacagccgggcggttcggaagaactgcactattcccagttggttaaattctaaggcggaagctgccgggattaatttttcagaggttttacgagaagcattggagaatcggctgaacgtgtgataggaggtcatatgcaaactgctgcggcgtatataagagtttcgacagatgatcaggttgaattttcaccg

SEQ ID NO: 19883 - DNA, 260 bp, Unknown
  Description of Unknown: LeftRegion for integrase B6884 sequence
tcaaaatatgcgccaattattattacacctgaaacacccgcaaaaatattaggcaaagccgttaaagtaagctttgatctttaaaaaaatacagatactctccccgaccaaagtttgagtatctgcattggattatgtgaaacctagggtgcaggtttctataatgtaccctattttatcaaaaaataggaggaattactatgaaagcagcaatttatgtaagagtatcaaccatggaacaagccgaggagggatattca

SEQ ID NO: 19884 - DNA, 260 bp, Unknown; identical to SEQ ID NO: 18929
  Description of Unknown: LeftRegion for integrase B6885 sequence

SEQ ID NO: 19885 - DNA, 260 bp, Unknown
  Description of Unknown: LeftRegion for integrase B6886 sequence
gtatcggtgcgcttatttcatttataatgtttttaattctttaaacagtaaaatcaatatttaaaacacaaaaaaagcccacgctctctaagtttggcgactcagagcgtgagcgatactgtataagaaaataggcattaaaaagccctttttcttgtactcattttaacattttttaataaattttgaaagagggtacaatgatgaacacaatcaacaaagttgctatttacgtacgtgtatcaacaaacatgcaggca

SEQ ID NO: 19886 - DNA, 260 bp, Unknown
  Description of Unknown: LeftRegion for integrase B6887 sequence
tttacacagccttcaacagggtggcaaagccgtccggaataacttccggtcctggctcatacattctcgaaggaggaaacccttatgattatcaaaaacacttattcaaccgttgaccctatagagcgctctgcgcgtcaggcggcgatctgccgccgctgccttctgctgctggctgcccgcgcgcagaggtgaggccgatggatgccatttatgcgcgtcagtccatcgataaaaagggcagcctttcgattgaggga

SEQ ID NO: 19887 - DNA, 260 bp, Unknown
  Description of Unknown: LeftRegion for integrase B6888 sequence
tttacacagccttcaacagggtggtaaagccgtccggaataacttccggttctggctcatacattctcgaaggaggaaacccttatgattatcaaaaacacttattcaaccgttgaccctatagagcgctctgcgcgtcaggcggcgatctgccgccgctgccttctgctgctggctgcccgcgcacagaggtgaggccgatggatgccatttatgcgcgtcagtccatcgataaaaagggcagcctttcgatcgaggga

SEQ ID NO: 19888 - DNA, 260 bp, Unknown
  Description of Unknown: LeftRegion for integrase B6889 sequence
atttcaagatttattgaatgttttatagttgtaatatggactcatagacacaaagaaagaaataaatttatcgtaggagcatatcgtaattttaaaattgaaaaaaatcttacaaaacatattatattaaggggaactcctcttttaatgaatataagtctatattagaaccattataattaaaaaaggaggaaaacaaattggatattgcagtatatacaagagtttctacagaaaaagaaagtcaagttagtagttat

SEQ ID NO: 19889 - DNA, 260 bp, Unknown
  Description of Unknown: LeftRegion for integrase B6890 sequence
tttacacagccttcaacagggtggtaaagccgtccggaataacttccggtcctggctcatacattctcgaaggaggaaacccttatgattatcaaaaacacttattcaaccgttgaccctatagagcgctctgcgcgtcaggcggcgatctgccgccgctgccttctgctgctggctgcccgcgcgcagaggtgaggccgatggatgccatttatgcgcgtcagtccatcgataaaaagggcagtctttcgattgaaggg

SEQ ID NO: 19890 - DNA, 260 bp, Unknown
  Description of Unknown: LeftRegion for integrase B6891 sequence
gccactcgtgccttcatcctccggagttttcaaaaagctcagctgggcgcagataaggcgaaaacggtgaagggaaaacagagccagtttgatcaccttttggataaaatggcaccatattatgatcggatgactctcgcaaatgttgaactggtgaagcagctccacgccagtgcagttctcgagattggagggcaatcatgagtaaaatgaagggcgttatttatgccagatattcaccaggaccagatcagacggag

SEQ ID NO: 19891 - DNA, 260 bp, Unknown
  Description of Unknown: LeftRegion for integrase B6892 sequence
aaagctcccgccggctccttcgccacactggttgatatcgatgtggaagcatacaaaaggcggcttgacagccgggcggttcggaagaactgtaccattccaagctggctgaattccaaggcagaagccgccgggatcaatttttcagaggttttacgtgaagctttggaaaatcggctgaacgtgtgataggaggcaatatgcaaactgctgcggcgtatataagagtttcgacagatgatcaggttgaattttcaccg

SEQ ID NO: 19892 - DNA, 260 bp, Unknown
  Description of Unknown: LeftRegion for integrase B6893 sequence
tgatttaaaatgagataatttgattacaaattgtagtcaattcaaaatgaaaacagcacctactgcaataggtactgaaaattagaaaaacaactaagtcccagcaagaactttaaggagtttttctatacttaattataacaaataatgtgcaaaagcacaataaaaacataaaatatttaagaaaggaacaatttaaaatgagacaaggagcagtttatataagagtttcaactgatgaccaaacagaatatagtcca

SEQ ID NO: 19893 - DNA, 260 bp, Unknown
  Description of Unknown: LeftRegion for integrase B6894 sequence
gcttgacagcgtacccaacaaagccggatacatcaaatcactgatacgaaaagacattgaagagaatggagtataaaaaaaccgccccacggcagcaaccatggagcggtaaaaggagaactattgcaataatagcccctaagacaggtatattatagcacagtcctccgaaaattgcaagtactaggaggaatttttttatgcaggcagcagcttatgcacgatacagcacagaacaccagaccagcagcagcatcgcc

SEQ ID NO: 19894 - DNA, 260 bp, Unknown
  Description of Unknown: LeftRegion for integrase B6895 sequence
attctccatgtaataaatgcctcaaatagcaaaaaccgcccctgcgccaacaggaacggttttcacatagatttctcttgccggatgcaatccgaaaagatatactctatcccaaacaaagtatatcatttctggaacgtcctggcaaggggcgtattttttatacccaaaaaacgtataaatacacaggagatgattgaatgaatgaaaaaaatcttgagattggggctgcttatatccgcgtcagcaccgatgatcag

SEQ ID NO: 19895 - DNA, 260 bp, Unknown
  Description of Unknown: LeftRegion for integrase B6896 sequence
tttacacagccttcaacagggtggcaaagccgtccggaataacttccggccctggctcatacattctcgaaggaggaaacccttatgattatcaaaaacacttattcaaccgttgaccctatagagcgctctgcgcgtcaggcggcgatctgccgccgctgccttctgctgctggctgcccgcgcgcagaggtgaggccgatggatgccatttatgcgcgtcagtccatcgataaaaagggcagcctttcgatcgaggga

SEQ ID NO: 19896 - DNA, 260 bp, Unknown
  Description of Unknown: LeftRegion for integrase B6897 sequence
tttacacagccttcaacagggtggtaaagccgtccggaataacttccggtcctggctcatacattctcgaaggaggaaacccttatgattatcaaaaacacttattcaaccgttgaccctatagagcgctctgcgcgtcaggcggcgatctgccgccgctgccttctgctgctggctgcccgcgcgcagaggtgaggccgatggatgccatttatgcgcgtcagtccatcgataaaaagggcagcctttcgatcgaggga

SEQ ID NO: 19897 - DNA, 260 bp, Unknown
  Description of Unknown: LeftRegion for integrase B6898 sequence
cctgacgaaaggagctgtcaaagctgaatatcaagatcgattataacggcattgacaagtccggaaaaatcgccgttgtctatgccagatattcttcccacagccaaggcgaacagtccatcgaaggacagcttgccgctgcgaaagcatatgccgatgcacggggatatacaatcgttcatgagtatatcgaccgcgctatgaccggcaggaacgacaaccgcgatgaatttcagcaaatgctttctgactgtgcaaag

SEQ ID NO: 19898 - DNA, 260 bp, Unknown
  Description of Unknown: LeftRegion for integrase B6899 sequence
ctgaccgtgctggcgcagctggcgctcatgtcgctcggcgtggactacagtgccaccgatgggctaagctccaaactcatcagcgccgccagcgcttccgccgacggcgacaaggccaattccgccgtcgacgtaggcgcgtggcgcatgctggcggacgtatcggacaaggccaacacgtacctaatctacgccaagtcatgaaaattgctgcagcctatatccgcgtatccacagatgatcaggaggagtactcccct

SEQ ID NO: 19899 - DNA, 107 bp, Unknown
  Description of Unknown: LeftRegion for integrase B6900 sequence
catgcctcgcaaacccgcataaatactgaatgtgtggagttttgctcatggctatattttataaaaccgaggtgatatttatgagcagtaaagtggcatgtctttac

SEQ ID NO: 19900 - DNA, 260 bp, Unknown
  Description of Unknown: LeftRegion for integrase B6901 sequence
tatgtcaaaccaacaaatttgtcaaatcgcaaaaaccgcccctgctaccaacaggaacggttttcacatagatttctcttgcctgattgctccaggaagatatactctatcccaaacaaagtatatcatttctggaacgtcctggcaaggggcgtattttttatacccaaaaaacgtataaatacacaggagatgattgaatgaatgaaaaaaatcttgagattggggctgcttatatccgcgtcagcaccgatgatcag

SEQ ID NO: 19901 - DNA, 260 bp, Unknown
  Description of Unknown: LeftRegion for integrase B6902 sequence
tgcaactggttgtgaagtgaaaagacgaatgtctttcaaaatttcttgacgatagataacaatcagctcctttcggtgaattgattttgacaacttaattatatcatttggagctgattgttactataaatttgaagtgattaatgaagttgccatgcctcgcaaacccgcataaatactgaatgtgtggagttttgctcatggctatattttataaaaccgaggtgatatttatgagcagtaaagtggcatgtctttac

SEQ ID NO: 19902 - DNA, 260 bp, Unknown
  Description of Unknown: LeftRegion for integrase B6903 sequence
tgcaatcgtttccacgatggtctgtcggatgtattcgatgtactcaagttccatggtccgcacctccgtgtattatgtatatatgcgagtaacagcaaggatagaatgcttgttattcctttgcgacgaaaattattgtaatattataaaccgccaaaatcaaatgaaataggtggaagatttggaaggatgggagaagcatgacgaatcaaacaggaactgggcaatacgtcgggggaacaaactacatcgaggaagtg

SEQ ID NO: 19903 - DNA, 260 bp, Unknown; identical to SEQ ID NO: 19896
  Description of Unknown: LeftRegion for integrase B6904 sequence

SEQ ID NO: 19904 - DNA, 260 bp, Unknown; identical to SEQ ID NO: 19896
  Description of Unknown: LeftRegion for integrase B6905 sequence

SEQ ID NO: 19905 - DNA, 260 bp, Unknown
  Description of Unknown: LeftRegion for integrase B6906 sequence
acggcgtgaacttttctcagaccttgcaggacgcattgagagaacagctgcacgtgaattcataacaacataaaaaaaccgccccacggcggcaaccgtgaagcggcaagaggaaaaactattgcgataatagacttcccaaacaaggtctattgtagcatatttcctctgaaattgcaagtactaggaggaatttttttatgcaggcagcagcttatgcacgatacagcacagagcaccagaccagcagcagcatcgcc

SEQ ID NO: 19906 - DNA, 260 bp, Unknown
  Description of Unknown: LeftRegion for integrase B6907 sequence
gacaggtgtttgaacagtttcaacagtttatcaacaatcagtgaaaaagcaatcattctcgtgaggtcacgaaaatgaaaaaaagccgccccacggcggcaaccgtgaagcggcaagagggaactattgctataatagtccaaaccagaacggtactattatagcacattctctcaaaaaatgcaaggaggaagtgcaaaatgcaagcagcagcatatgcaagatacagcacagagcatcagacagagagcagtattgct

SEQ ID NO: 19907 - DNA, 260 bp, Unknown
  Description of Unknown: LeftRegion for integrase B6908 sequence
ttaaatcttatacagcattaattgcagaatgaaaaaccgcccctgcgccaacaggaacggttttcacatagattctcttgccggatgtaatccgaaaagatatactctactacaaacaaagtatatcatttctggaacgtcctggcaaggggcgtattttttatacccaaaaaacgtataaatacacaggagatgattaaatggatgaaaagaaaattgaaatcggcgctgcctatatccgtgtcagcactgatgatcag

SEQ ID NO: 19908 - DNA, 260 bp, Unknown
  Description of Unknown: LeftRegion for integrase B6909 sequence
ttgcagcgatttccctccccgtggattttctatctattgacattatagaacgtatgttcgtattttgcaatacctttctcctttctctgaaaaaaaatccctccctgataaatcaggaagggatagcaaatacatattctttaccgatagaaccatcatatcatattttgtaaacaataacaactataaaggtgattattatgaaaatagcagcagcatatatccgtgtatctacggatgatcagacagaatactctccc

SEQ ID NO: 19909 - DNA, 260 bp, Unknown
  Description of Unknown: LeftRegion for integrase B6910 sequence
tttacacagccttcaacagggtggtaaagccgtccggaataacttccggccctggctcatacattctcgaaggaggaaacccttatgattatcaaaaacacttattcaaccgttgaccctatagagcgctctgcgcgtcaggcggcgatctgccgtcgctgccttctgctgctggctgcccgcgcgcagaggtgaggccgatggatgccatttatgcgcgtcagtccatcgataaaaagggcagcctttcgatcgaggga

SEQ ID NO: 19910 - DNA, 260 bp, Unknown
  Description of Unknown: LeftRegion for integrase B6911 sequence
cggcgtgaacttttctcagaccttgcaggacgcattgagagaacagctgcacgtgaattcataacaacataaaaaaaaccgccccacggcggcaaccgtgaagcggcaagaggaaaaactattgcgataatagacttcccaaacaaggtctattgtagcatatttcctctgaaattgcaagtactaggaggaatttttttatgcaggcagcagcttatgcacgatacagcacagaacaccagaccagcagcagcatcgcc

SEQ ID NO: 19911 - DNA, 260 bp, Unknown; identical to SEQ ID NO: 19877
  Description of Unknown: LeftRegion for integrase B6912 sequence

SEQ ID NO: 19912 - DNA, 260 bp, Unknown; identical to SEQ ID NO: 19883
  Description of Unknown: LeftRegion for integrase B6913 sequence

SEQ ID NO: 19913 - DNA, 260 bp, Unknown
  Description of Unknown: LeftRegion for integrase B6914 sequence
ataaaagaaattgaaatggaagaattgaaaaaaattgaaataaaataaaaaaacagcacctactgcaataggtactgaaaattagaaaaacaactaagtcccagcaagaactttaaggagtttttctatactcaattataacaaataatgtgcaaaagcacaataaaaacataaaatatttaagaaaggaacaatttaaaatgagacaaggagcagtttatataagagtttcaactgacgaccaaacagaatatagtcca

SEQ ID NO: 19914 - DNA, 260 bp, Unknown
  Description of Unknown: LeftRegion for integrase B6915 sequence
gcgccgcctgaactatatcttaggcatcgtgctgttttgcgtgttggtcggcgtcatcgggctgctgtattatgatctaagcaacggcgccgtcgggtttttccggcactaattatgttaatcacgccccgggcaatgggcccccgcaccatccgcggatgcgccccgcccggggcgatagaccatatggaggtaaccccatggcacagctcgccgcggcctatatccgcgtatctacagaggatcagaccgagtattcc

SEQ ID NO: 19915 - DNA, 260 bp, Unknown
  Description of Unknown: LeftRegion for integrase B6916 sequence
tgcaatcgtttccacgatggtctgtcggatgtattcgatgtactcaagttccatggtccgcacctccgtgtattatgtatatatgcgagtaacagcaaggatagaatgcttgttctttctttgcgacgaaaattattgtaatattataaaccgccaaaatcaaatgaaataggtggaagatttggaaggatgggagaagcatgacgaatcaaacagaaactgggcaatacgtcgggggaacaaactacatcgaggaagtg

SEQ ID NO: 19916 - DNA, 260 bp, Unknown
  Description of Unknown: LeftRegion for integrase B6917 sequence
gaattcacatccaaagcagaagtaaatggagattttgtgctgttgtatgatgtgaaatcagacaaagtatcggctgcatttgctactgtagacgtagaataaacaaaaccgcccaccctttttacggggtgggcgtaaatttgcactaattgtcacgccctacacgggcgtgtgagttgaaataataaggaggaggtcatatgcaaactgctgcggcgtatataagagtttcgacagatgatcaggttgaattttcaccg

SEQ ID NO: 19917 - DNA, 260 bp, Unknown
  Description of Unknown: LeftRegion for integrase B6918 sequence
tttacacagccttcaacagggtggcaaagccgtccggaataacttccggccctggctcatacattctcgaaggaggaaacccttatgattatcaaaaacacttattcaaccgttgaccctatagagcgctctgcgcgtcaggcggcgatctgccgccgctgccttctgctgctggctgcccgcgcgcagaggtgaggccgatggatgccatttatgcgcgtcagtccatcgataaaaagggcagcctttcgattgaggga

SEQ ID NO: 19918 - DNA, 260 bp, Unknown; identical to SEQ ID NO: 19913
  Description of Unknown: LeftRegion for integrase B6919 sequence

SEQ ID NO: 19919 - DNA, 260 bp, Unknown
  Description of Unknown: LeftRegion for integrase B6920 sequence
ctgcaatcgtttccacgatggtctgtcggatgtattcgatgtactcaagttccatggtacgcacctccgtgtattatgtataaatgcgagtaacagcaaggatagaatgcttgttcttcctttgcgacgaaagttattgtaatatataaaccgccaaaatcaaatgaaataggtggaagatttggaaggatgggagaagcatgacgaatcaaacaggaacttggcaatacgtcgggggaacaaactacatcgaggaagtg

SEQ ID NO: 19920 - DNA, 260 bp, Unknown; identical to SEQ ID NO: 19905
  Description of Unknown: LeftRegion for integrase B6921 sequence

SEQ ID NO: 19921 - DNA, 260 bp, Unknown; identical to SEQ ID NO: 19910
  Description of Unknown: LeftRegion for integrase B6922 sequence

SEQ ID NO: 19922 - DNA, 260 bp, Unknown
  Description of Unknown: LeftRegion for integrase B6923 sequence
ggtggaggatttacaaaatcagaagttaagtatgctatgaaacatttagaggacgaagattaaaataaaaaagctcacgctctcaaagtttggcgactcagagcatgagcaaggaagtatacaagaaaaagcaggcattaaaaagccctttttcttgtacctattttatcattttttaataaattttgaaagagggtacaatgatgaatacaatcaacaaagttgctatttatgttcgtgtatcaacgaacgtgcaagcg

SEQ ID NO: 19923 - DNA, 260 bp, Unknown
  Description of Unknown: LeftRegion for integrase B6924 sequence
gaaagcattgcctacatgaagaaaaaagaaaaaagctatctgcggttgatctgcaccttgtccattgcgctgtcggttacgcttgtcgttatcattgcggcgctggtgatggatatgatgaacccggataaaggctttttctggctacggagtatgctatagcaacacgaaaaacggaggaacaaagggagagaaaacacatggaaacagggaaatttattggcggagaaaactatatagaagaggtggcggcctatatc

SEQ ID NO: 19924 - DNA, 260 bp, Unknown
  Description of Unknown: LeftRegion for integrase B6925 sequence
accgagaagaattagagggggataaagaatcttctgcgcacagcgaagataatccccatagaattgctcaggcgtaagaagtacttggaggtgatactacgaaagcggtaatctatgccagatattcgagccataaccagagagaggaatccatagaaggacagcttcgtgagtgtcacgactttgcactgaaaaatggaatgacgatcatcggtgaatattgcgacagagcaatctcaggtaaaaccgataatcgtcca

SEQ ID NO: 19925 - DNA, 260 bp, Unknown; identical to SEQ ID NO: 19924
  Description of Unknown: LeftRegion for integrase B6926 sequence

SEQ ID NO: 19926 - DNA, 260 bp, Unknown; identical to SEQ ID NO: 16256
  Description of Unknown: LeftRegion for integrase B6927 sequence

SEQ ID NO: 19927 - DNA, 260 bp, Unknown
  Description of Unknown: LeftRegion for integrase B6928 sequence
aatctctgcgtatgcaccggcttgtgacgctcatcctcttgggtattcttctgctgtgtgcccttgcgcttttggtcgacatactcagtccctcgatcggctggctgcgcgccgccctgcatgtgcagatcctgcacttgtaatcccgaaccgtcccagccttcgctggggcggtattataaattttttggaggtatcctatgtctgagctacgcactgccgccgcatacattcgcgtttccacggatgaccaggtggag

SEQ ID NO: 19928 - DNA, 260 bp, Unknown
  Description of Unknown: LeftRegion for integrase B6929 sequence
gaaagcattgcctacatgaagaaaaaagaaaaaagctatctgcggttgatctgcaccttgtccattgcgctgtcggttacgcttgtcgttatcattgcggcgctggtgatggatatgatgaacccggataaaggctttttctggctacggagtatgctatagcaacacgaaaaacggaggaacaaagggagagaaaacacatggaaacagggaaatttattggcggagaaaactatatcgaagaggtggcggcctatatc

SEQ ID NO: 19929 - DNA, 260 bp, Unknown
  Description of Unknown: LeftRegion for integrase B6930 sequence
gcaggccgtccgcttggagtgcgaccactacaagcgtgagatcgagctgtataaacgctccattcgcacgcaccgcatcgtcactctcatcctcgttcccatcctcgcccttgtcgtgatctcgttggtcatcgatctcctcaacccctatgtcggctggattcgcgataccatgtccattttacgggaggtttccgtctatgcctgaaccacgcattgcagccgcctatatccgcgtctcaaccgatgaccagatggag

SEQ ID NO: 19930 - DNA, 260 bp, Unknown
  Description of Unknown: LeftRegion for integrase B6931 sequence
gcaggccgtccgcttggagcgcgaccactacaagcgtgagatcgagctgtataaacgccccattcgcacgcaccgcatcgtcactctcatcctcgttcccatcctcgcccttgtcgtgatctcgttggtcatcgatctcctcaacccctatgtcggctggattcgcgataccatgtccattttacgggaggtctccgcctatgcctgaaccacgcattgcagccgcctatatccgcgtctcaaccgatgaccagatggag

SEQ ID NO: 19931 - DNA, 260 bp, Unknown
  Description of Unknown: LeftRegion for integrase B6932 sequence
gatcccacagctgaatttaacaaaacaatgcttgcggaagatttccggcaatctctttcgagcgatgaaaactacacaacagatattgaatttgattcggatgatgaagaggaagatgtttcttccgatgaataatcggttcatgaacattaaggcggcggtcgtttggctgccgcctgtattttttaaggaggaatattatgcccggaacaaacagcataccgggaacagctgcggcatacattcgagtttcggatgac

SEQ ID NO: 19932 - DNA, 260 bp, Unknown
  Description of Unknown: LeftRegion for integrase B6933 sequence
ggtaaaaaaggaaaacacaactggcactgtcgaaactgtggctgtgtctttaagtccaagaaataaaaaaagccccacgctctcaaactttggcgagtctgagcgtgaggctggtaactacaagaaaggattttcatggagataacctcgcatgatgtcttttcttgtacctattttatcaaaaaagaggtacaaattcaatgaaaacaacaaataaagtagctatatacgtcagggtgtctactacctcacaagttgag

SEQ ID NO: 19933 - DNA, 260 bp, Unknown
  Description of Unknown: LeftRegion for integrase B6934 sequence
gcaggccgtccgcttggagcgcgaccacttcaagcgtgagattgagatttataagcgctcccttcgcacgcaccgcatcgtcactctcatcctcgttcccatcctcgcccttgtcgtgatctcgctggtcatcgatcttctcgacccctatgtcggctggattcgcgataccatgtccattttacgggaggtttccgtctatgcctgaaccacgcattgcagctgcctatgtccgcgtctcaaccgatgaccagatggag

SEQ ID NO: 19934 - DNA, 260 bp, Unknown; identical to SEQ ID NO: 19462
  Description of Unknown: LeftRegion for integrase B6935 sequence

SEQ ID NO: 19935 - DNA, 260 bp, Unknown
  Description of Unknown: LeftRegion for integrase B6936 sequence
gcaggccgttcgcttggagcgcgaccactacaagcgtgagatcgagctgtataaacgctcccttcgcacgcaccgcatcgtcaccctcatcctcgttcccatcctcgcccttgtcgtgatctcgttggtcgtcgatcttctcgacccctatgtcggctggattcgcgataccatgtccactttacgggaggtttccgtctatgcctgaaccacgcattgcagctgcctatatccgcgtctcaaccgatgaccaaatggag

SEQ ID NO: 19936 - DNA, 260 bp, Unknown
  Description of Unknown: LeftRegion for integrase B6937 sequence
tatgtgcatgacaaggacgaagtccagcttgcgcacgaagaaaacggcgcgatggtctacgataaataaaaaaagccccacgctctcaaactttggcgagtctgagcgtggagcagtcaagataaagaaaggtttcaaaatgaatattttgaaaggtgtctttctatactctattttagcagaaaaggagtatagaaacaatggataagatcaataaagtcgctctatatgtgcgcgtgtctaccacttctcagatggaa

SEQ ID NO: 19937 - DNA, 260 bp, Unknown
  Description of Unknown: LeftRegion for integrase B6938 sequence
gagatcaattacatatatctcatatttcaacagatgaaaacaaataaaaaatccctcaacctcgccaaaggttaagggaaaagcagagtgtaaaaagatacacatctacctcgcaaactgattgtatcacactctgcttgaaattgcaagcagggtatttttatgcccttttttaagtaaaaattaaagggagtggtactatgggtctgaagatcggcgctgcctacattagggtatctgatgagcggcaggacgaatat

SEQ ID NO: 19938 - DNA, 260 bp, Unknown
  Description of Unknown: LeftRegion for integrase B6939 sequence
tattctttaatgttatctaatctatcaagcaaaaatgcaattcaattggtaaagtctttagaacaattaaatgataaacaagctgaacaagttatcagctatatatcttttctacaatttcaagagttgaataaaagccaagaataaacaatgaggcggcagtcatttggctgccgcctgtatttttaaggaggaatattatgcccggaacaaacagcataccgggaacagctgcggcatacattcgagtttcggatgac

SEQ ID NO: 19939 - DNA, 260 bp, Unknown
  Description of Unknown: LeftRegion for integrase B6940 sequence
acagggaagaattagagggggataaagaatcttctacacacagcgaaggtaatccccatagaactgctcaggcgtaaaaagcgattggaggtgatactacgaaagcggtaatatatgctcgatactcaagccacaatcaaagagaggaatctatcgagggacaacttcgtgagtgtcacgacttcgccttaaaaaatggaatgacgattatcggcgagtattgcgacagagcaatctctggaaaaaccgataaccgtccg

SEQ ID NO: 19940 - DNA, 260 bp, Unknown
  Description of Unknown: LeftRegion for integrase B6941 sequence
aacgatttaaaaaattaaaaaaagactagaactgctggaacagtctagtcaaaaatgaaaaactttagtctagcaaactaacaatataatataattatataggtacaatataacatcgtttataagcgtgtttatgtacaagtttttctatataattatatcaaaaattaataataaaaacaataggaagtgatatatttatgaaaaaaggtgctatatatgtaagagtaagttcagaagagcaagcaagagatggttac

SEQ ID NO: 19941 - DNA, 260 bp, Unknown
  Description of Unknown: LeftRegion for integrase B6942 sequence
gcaggccgtccgcttggagcgcgaccactacaagcgtgagatcgagctttataaacgctcccttcgcacgcaccgcatcgtcactctcatcctcgttcccatcctcgcccttgtcgtgatctcgttggtcatcgatctcctcaacccctatgtcggctggattcgcgataccatgtccattttacgggaggtctccgtctatgcctgaaccacatatcgcagccgcctatatccgcgtctcaaccgatgaccagatggag

SEQ ID NO: 19942 - DNA, 260 bp, Unknown
  Description of Unknown: LeftRegion for integrase B6943 sequence
gcaggccgtccgcttagagcgcgaccactacaagcgtgagatcgagctgtataaacgctcccttcgcacgcaccgcatcgtcactctcatcctcgttcccatcctcgcccttgtcgtgatctcgttggtcatcgatctcctcaacccctatgtcggctggattcgcgataccatgtccattttacgggaggtctccgcctatgcctgaaccacgcattgcagctgcctatgtccgcgtctcaaccgatgaccaaatggag

SEQ ID NO: 19943 - DNA, 260 bp, Unknown
  Description of Unknown: LeftRegion for integrase B6944 sequence
gatcccacagctgaatttaacaaaacaatgcttgcggaagatttccggcaatctctttcgagcgacgaaaactacacaacagatattgaatttgattcggatgatgaagaggaagatgtttcttccgacgaataatcggttcatgaacattaaggcggcggtcgtttggctgccgcctgtattttttaaggaggaatattatgcccggaacaaacagcataccgggaacagctgcggcatacattcgagtttcggatgac

SEQ ID NO: 19944 - DNA, 260 bp, Unknown
  Description of Unknown: LeftRegion for integrase B6945 sequence
gaaagcattgcctacatgaagaaaaaagaaaaaagctatctgcggttgatctgcaccttgtccattgcgctgtcggttacgcttgtcgttatcattgcggcactggtgatggatatgatgaacccggataaaggctttttctggctacggagtatgctatagcaacacgaaaaacggaggaacaaagggagagaaaacacatggaaacagggaaatttatgggcggagaaaactatatcgaagaggtggcggcctatatc

SEQ ID NO: 19945 - DNA, 260 bp, Unknown
  Description of Unknown: LeftRegion for integrase B6946 sequence
gcaggccgtccacttggagcgcgaccactacaagcgtgagatcgagctgtataaacgctcccttcgcacgcaccgcatcgtcaccatcatcctcgtctccatcctcgcccttgtcgcgatctcgctggtcatcgattttctcgttcccaatgtcggctggattcgcgataccatgtccattttacgggaggtctccgcctatgcctgaaccacatatcgcagccgcctatgtccgcgtctcaaccgatgaccagatggag

SEQ ID NO: 19946 - DNA, 260 bp, Unknown
  Description of Unknown: LeftRegion for integrase B6947 sequence
gcaggccgtccgcttggagcgcgaccactacaagcgtgagatcgagctgtataaacgctccattcgcacgcaccgcatcgtcactctcatcctcgttcccatcctcgcccttgtcgtgatctcgttggtcatcgatctcctcaacccctatgtcggctggattcgcgataccatgtccattttacgggaggtttccgtctatgcctgaaccacgcattgcagctgcctatgtccgcgtctcaaccgatgaccagatggag

SEQ ID NO: 19947 - DNA, 260 bp, Unknown
  Description of Unknown: LeftRegion for integrase B6948 sequence
gaaagcattgcctacatgaagaaaaaagaaaaaagctatctgcggttgatctgcacattgtccatcgctcttgccgtcgccctgctggttattatcgcggcgctggtgatggatatgatgaacccggataaaggctttttctggctacggagtatgctatagcaacacgaaaaacggaggaactaagggagagaaaacacatggaaacagggaaatttatgggcggagaaaactatatagaagaggtggcggcctatatc

SEQ ID NO: 19948 - DNA, 260 bp, Unknown
  Description of Unknown: LeftRegion for integrase B6949 sequence
gcaggccgtcggattggagcgcgaccactacaagcgtgagatcgatctgtataaacgctcccttcgcacgcaccgcatcgtcaccctcatcctcgtctccatcctcgcccttgtcgtgatctcgttggtcgtcgatcttctcgacccctatgtcggctggattcgcgataccatggccattttacgggaggtctccgcctatgcctgaaccacatatcgcagccgcctatgtccgcgtctcaaccgatgaccaaatggag

SEQ ID NO: 19949 - DNA, 260 bp, Unknown
  Description of Unknown: LeftRegion for integrase B6950 sequence
gcaggccgtccacttggagcgcgaccactacaagcgtgagatcgagctgtataaacgctcccttcgcacgcaccgcatcgtcacgctcatcctcgtctccatcctcgcccttgtcgtgatctcgttggtcgtcgatcttctcgacccccatgtcggctggattcgcgttaccaagtcctttttacgggaggtctccgcctatgcctgaaccacatatcgcagccgcctatgtccgcgtctcaaccgatgaccaaatggag

SEQ ID NO: 19950 - DNA, 260 bp, Unknown
  Description of Unknown: LeftRegion for integrase B6951 sequence
gatcccacagctgaatttaacaaaacaatgcttgcggaagatttccggcaatctctttcgagcgacgaaaactacacaacagatattgaatttgattcggatgatgaagaggaagatgtttcttccaacgaataatcggttcatgaacattaaggcggcggtcgtttggctgccgcctgtattttttaaggaggaatattatgcccggaacaaacagcataccgggaacagctgcggcatacattcgagtttcggatgac

SEQ ID NO: 19951 - DNA, 260 bp, Unknown; identical to SEQ ID NO: 19085
  Description of Unknown: LeftRegion for integrase B6952 sequence

SEQ ID NO: 19952 - DNA, 260 bp, Unknown
  Description of Unknown: LeftRegion for integrase B6953 sequence
gctcctgcctcggtcacagctgtacaataattgtgcagctgtttttaattatacaaaaataaaaaagcccacgctcaaagattggacccagagagcgtgaggctagcgacaagaaaaacttttcaaaagatattaccttttgagatgttttcttgtacccattttatcattttttaggaaattttgaaagaggtactactatgataacaacaaataaagtcgcaatctatgttagggtgtctaccacatctcaggcagaa

SEQ ID NO: 19953 - DNA, 260 bp, Unknown
  Description of Unknown: LeftRegion for integrase B6954 sequence
aagtggtgttctcaacaaaaaaatgaaattaaaagtagataatagctaacagtatttaaaaacgaaaaaatccccatgttcgtggtcgccaaactttgaacatgaggaaaggaagtattacaagaaaaacaggcattaaaaagccctttttcttgtacctattttatcattttttaacaaattttgaaagagggtacaatatgaatacaatcaacaaagtagctatctatgtgcgtgtatcaacaaacgtgcaagcggaa

SEQ ID NO: 19954 - DNA, 260 bp, Unknown
  Description of Unknown: LeftRegion for integrase B6955 sequence
gcaggccgtccgcttggagtgcgaccactacaagcgtgagatcgagctttataaacgctcccttcgcacgcaccgcatcgtcactctcatcctcgttcccatcctcgcccttgtcgtgatctcgttggtcatcgatctcctcaacccctatgtcggctggattcgcgataccatgtccattttacgggaggtctccgcctatgcctgaaccacatatcgcagccgcctatgtccgcgtctcaaccgatgaccaaatggag

SEQ ID NO: 19955 - DNA, 260 bp, Unknown; identical to SEQ ID NO: 19924
  Description of Unknown: LeftRegion for integrase B6956 sequence

SEQ ID NO: 19956 - DNA, 260 bp, Unknown
  Description of Unknown: LeftRegion for integrase B6957 sequence
tatatgatttttttaaaaaattattactaaaaaagactagaactgctggaacagtctagtcaagaatgaaaaactttagtctagcaaactaacaatataatataattatataggtacaatatacaatgtataaatgtacaagtctttctatataattatatcaaaaattaacaataaaaacaataggaagtgatatatttatgaaaaaaggtgcaatatatgtaagagtaagttcagcagaacaagcaagagaaggatat

SEQ ID NO: 19957 - DNA, 260 bp, Unknown
  Description of Unknown: LeftRegion for integrase B6958 sequence
accgtgaagaattggagggggataaagaagttcctgcgaacggagaagatagtccccatagaattgctcatgcgtaaaaaggcgttggaggtgatactacgaaagcggtaatctatgccagatattcgagtcatagccagcgggaagaatccatagagggacagcttcgggagtgtcacgactttgcgctgaaaaacggaatgaccatcatcggtgagtactgcgataaggcaatctcaggaaagaccgacaatcgaccg

SEQ ID NO: 19958 - DNA, 260 bp, Unknown
  Description of Unknown: LeftRegion for integrase B6959 sequence
gctgttgacgaggatacatggtatcttaaggctacttgcaccgtgacaaacgaatataatgcaacaagggaaatggagtgcgaggctaaagtaaccggcacggacagcaatcccgaagtcatcgagtttgatgttcattgattaaatgcttaaggcggcggtcgtttggctgccgcctgtatttttaaggaggaataacaatgcccggaacaaacagcataccgggaacagctgcggcatacattcgagtttcggatgac

SEQ ID NO: 19959 - DNA, 260 bp, Unknown
  Description of Unknown: LeftRegion for integrase B6960 sequence
aattttagactttgcaccttagcgtgccaggggaagtaacttaaccgttgcttccctttttaaaaactaaaaaatccccacgctctcaaactttggcgagtctgagcgtgaggcatgtgacaggaaaagattttcatggagataacctctcatgatgtcttttcttgtacccattttatcaaaaaagaggtacaaattcaatgatgactacaaataaagtcgcaatctatgtcagggtatctactacctcgcaagttgag

SEQ ID NO: 19960 - DNA, 260 bp, Unknown
  Description of Unknown: LeftRegion for integrase B6961 sequence
gcaggccgtccacttggagcgcgaccactacaagcgtgagattgagctttataatcgctcccttcgcacgcaccgcatcgtcaccatcatcctcgtctccatcctcgcccttgtcgcgatctcgctggtcatcgatcttctcgttcccaatgtcggctggatacgtgctaccacgtccattttacgggaggtctccgcctatgcctgaaccacgcattgcagctgcctatgtccgcgtctcaaccgatgaccaaatggag

SEQ ID NO: 19961 - DNA, 260 bp, Unknown
  Description of Unknown: LeftRegion for integrase B6962 sequence
acggcggaggatttacaaagtcggaagttaagtatgctatgaaacatttagaggacgaagattaaaataaaaaagctcacgctctcaaagtttggcgactcagagcgtgagcgaggaagtatgcaagaaaatagccattaaatgggcgattttcttgtacctattttatcattttttaataaattttgaaagggtacaatatgaacacaatcaacaaagttgctatttatgtgcgtgtatcaacaaacatgcaggcagaa

SEQ ID NO: 19962 - DNA, 260 bp, Unknown
  Description of Unknown: LeftRegion for integrase B6963 sequence
ttagtagcagaagcttttattcccaatccaaataattattctgaaattaatcatatagatggaaataagcaaaataattatgtaaaaaatttagaatggtgtactcatagtgaaaatattaagcatgcgtataataaaagtttaattccaaaaataaagaatagaccaaaaggcctaaaaataaaaaaggaagtgttgcaatgaaaatagctgcggtatatacaagagtatccacggacgaacaagctcgtgaaggatac

SEQ ID NO: 19963 - DNA, 260 bp, Unknown
  Description of Unknown: LeftRegion for integrase B6964 sequence
aattgtacgatacaaacgctaaagaaattgcacaccaaaaaggtgtagatatggtattagactattaaaaaaagccccacgctctcaaagtttggcgacttcaagcgtgaggcaatcaagataaagaaaggtttcaaaatgacaaattttgaaaggtgtctttctgtactctattttagcagaaatggaggcgaaagacaatgaatgaaattaacaaagtagcattatatgtgcgcgtgtctaccacttctcagatggaa

SEQ ID NO: 19964 - DNA, 260 bp, Unknown
  Description of Unknown: LeftRegion for integrase B6965 sequence
ctgctaaatattacaaaaatgcaaaaccgcccggtgctaccaacaccgaacggcttcacatagattttctcttaccagatcgctccggccagatataatcagacttcaaacacctgaattatatcatctccagagcatcctggcaaggggtgttctttttatacccatttttcagtaaaattcacaaggagatgatagaaatgacaccaaaagcccttgagatcggcgcggcctacatccgcgtcagcacggatgatcag

SEQ ID NO: 19965 - DNA, 260 bp, Unknown; identical to SEQ ID NO: 19924
  Description of Unknown: LeftRegion for integrase B6966 sequence

SEQ ID NO: 19966 - DNA, 80 bp, Unknown
  Description of Unknown: LeftRegion for integrase B6967 sequence
tttacgggaggtctccgcctatgcctgaaccacatatcgcagccgcctatgtccgcgtctcaaccgatgaccagatggag

SEQ ID NO: 19967 - DNA, 260 bp, Unknown
  Description of Unknown: LeftRegion for integrase B6968 sequence
atcgtaacgagttagagggggataaagataaaactgcggcagtctaaggtcattccgatagaattgctcagacgtaagaagctattggaggtgagattacgaaagcagtaatttatgctcgatattcgagccacagtcaaagagaggagtccatagagggtcagcttcgtgagtgtcatgagttcgctcttaaaaacggaatgacggtcataaatgaatactgtgaccgagcaatttccggcaagacagataatcgtccg

SEQ ID NO: 19968 - DNA, 260 bp, Unknown
  Description of Unknown: LeftRegion for integrase B6969 sequence
caagccatttggctcttttagcccaatgagcaaaagcattcgaaaaatgatccgtatgggataccgggtcaagattaggtgcaaaaacgttggatggtacgcgcaggggatacctgagattgttgccatgattccagatccagaagctgtgttctcttggcttgacgagtgcgagagaagtggtgaggaggttccgttcaatgccaatagctagaactgcggtgatatacgcccgcttttcgtgcaacaagcagcgcgag

SEQ ID NO: 19969 - DNA, 260 bp, Unknown
  Description of Unknown: LeftRegion for integrase B6970 sequence
accgtgaagaattggagggggataaagaagttcctgcgaacggagaagatagtccccatagaattgctcatgcgtaaaaaggcgttggaggtgatactacgaaagcggtaatctatgccagatattcgagccatagccagcgggaagaatccatagagggacagattcgggagtgtcacgactttgcgctgaaaaacggaatgaccatcatcggtgagtactgcgataaggcaatctcaggaaagaccgacaatcgaccg

SEQ ID NO: 19970 - DNA, 260 bp, Unknown; identical to SEQ ID NO: 16707
  Description of Unknown: LeftRegion for integrase B6971 sequence

SEQ ID NO: 19971 - DNA, 260 bp, Unknown
  Description of Unknown: LeftRegion for integrase B6972 sequence
aatgggtgccttttaatttataaaatgaaaaaccgcccggtattagcgtaccgaacggctttccatagatttctcttgccggtcgcccggctatgataaatccagcttgaacacctgaattatatcattttcctgggcgtcctgcaaggggcgttatttttatactcatttttaagtaaaatacatagggagatgatatcatggcacctacagttctgcagattggcgccgcttacatccgcgtcagcacggacgatcag

SEQ ID NO: 19972 - DNA, 260 bp, Unknown
  Description of Unknown: LeftRegion for integrase B6973 sequence
accgtgaagaattggagggggataaagaagttcctgcgaacggagaagatagtccccatagaattgctcatgcgtaaaaaggcgttggaggtgatactacgaaagcggtaatctatgccagatattcgagccatagccaaagggaagaatccatagagggacagcttcgggagtgtcacgactttgcgctgaaaaacggaatgaccatcatcggtgagtactgcgataaggcaatctcaggaaagaccgacaatcgaccg

SEQ ID NO: 19973 - DNA, 260 bp, Unknown
  Description of Unknown: LeftRegion for integrase B6974 sequence
gccattgatgaggatacatggtatctaaaggctacttgcaccgtgacaaacgaatataatgcaacaagggaaatggagtgcgaggctaaagtaaccggcacggacagcaatcctgaagttatcgaatttaatgtttattgattaaatgcttatggcggcggtcgtttggctgccgcctgtattttttaaggaggaatattatgcccggaacaaacagcataccgggaacagctgcggcatacattcgagtttcggatgac

SEQ ID NO: 19974 - DNA, 260 bp, Unknown; identical to SEQ ID NO: 19935
  Description of Unknown: LeftRegion for integrase B6975 sequence

SEQ ID NO: 19975 - DNA, 260 bp, Unknown
  Description of Unknown: LeftRegion for integrase B6976 sequence
ttatgggattctatgttcaataagcatcctcataaaaattactatatttattaaaaaaagaaccggccacaaaggaccggctccaagaatggtattaaccactccctagacaagaatgattatactatttttggagcacctttgcaaacggtgttatttttttaccgtttttttcataaatttacaaaaggagtttcaaaatgaaaataggagctttatatattagagtatctacagatgatcagttggaatattcacct

SEQ ID NO: 19976 - DNA, 260 bp, Unknown
  Description of Unknown: LeftRegion for integrase B6977 sequence
acttttgacgaacaatagtaaaaaaaatcaactgtttccattttggaaacaactcaaaaaagccccacactctccgacggccatctttgagtgtgaggatatgcatcacagaaaataaaaacactatcacggtaaagcaacctaacaagattgtgttcttttttctgtacccattttatcaaaaaagaggtacaaaaacaatggcaacacataaagtcgctatctatgtccgagtatcgaccacatcgcaggttgacgag

SEQ ID NO: 19977 - DNA, 260 bp, Unknown
  Description of Unknown: LeftRegion for integrase B6978 sequence
tgacggcaatgctctagctagccaaaaacttgacggaacaatgaaagtcaaggttaaataagacaataaaaaaagccctataatctccctcgccaaagtttgattatagagctagcaccacagaaagagaaatgtaaactggaaacagccttacatgttcttttctgtacccattttatcaaaaacgaggtacaaatacaatgacaatgcataaagttgctatctatgtccgagtatcaaccacatcgcaggttgacgag

SEQ ID NO: 19978 - DNA, 260 bp, Unknown
  Description of Unknown: LeftRegion for integrase B6979 sequence
cagtgctattgcaagtcaaaaacttaatggagaaatgaaagtcaaggttaaataagacaataaaaaaagccctataatctccctcgccaaagtttgattatagagcagcaccacagaaaaaatccataaccactgaaaaatgaattgaggttatgtgttcttttctgtacccattttatcaaaaaagaggtacaaacacaatggcaatgcacaaagtagctatctacgtccgagtgtcaaccacgtcgcaggttgacgaa

SEQ ID NO: 19979 - DNA, 260 bp, Unknown
  Description of Unknown: LeftRegion for integrase B6980 sequence
tattatcttgctataaaatgcaatattgaaatctaaacatagaaaaagacagtccctgacaagaactgcctctccccatcgtttcctatgtagcacataacttcatagaatacagattcgcaacctttattctaccacgaagttgtgctgctgcatagctttatttttttacgcttttttacggcagaaagaaggtttttatgaatagtacatacttcagaccgcaaccggaactcttcggcctgcgtgttgttaaatat

SEQ ID NO: 19980 - DNA, 260 bp, Unknown
  Description of Unknown: LeftRegion for integrase B6981 sequence
tgatggcaatgcactagctagccaaaaactcaacggatcaatggaaatcaaagttaaataagacaacaaaaaaagccccacactcaccgtcgccaaacttcgagtgtagagcaagcatcacagaaaaaatcatgtaaactgagagcagtcttacaagtctttttctgtacccattttatcaaaaacgaggtacaaacacaatggcaacacataaagtcgctatctatgtccgagtatcaaccacatcgcaggttgacgag

SEQ ID NO: 19981 - DNA, 260 bp, Unknown
  Description of Unknown: LeftRegion for integrase B6982 sequence
ggtaaatttcgacaaatttacacaagaagaagctgacaatgctgtccaaaatctgaaataaaacaaaaaaagccctataatctccctcgccaaagttagattatagagcttatgcatcacagaaaaaaccgtgtaaactggaaaacaaccttacatgttcttttctgtacccattttatcaaaaacgaggtacaaacacaatggcaacacataaagtcgctatctatgtccgagtatcaaccacatcgcaggttgacgag

SEQ ID NO: 19982 - DNA, 260 bp, Unknown
  Description of Unknown: LeftRegion for integrase B6983 sequence
ttatgggattctatgttcaataagcatcctcataaaaattactatatttattaaaaaaagaaccggccacaaaggaccggctccaagaatggtattaaccactccctagacaagaatgattatactatttttgaaccccctttgcaaacggtgttatttttttaccgtttttttcataaatttacaaaaggagtttcaaaatgaaaataggagctttatatattagagtatctacagatgatcagttggaatactcacct

SEQ ID NO: 19983 - DNA, 260 bp, Unknown; identical to SEQ ID NO: 19178
  Description of Unknown: LeftRegion for integrase B6984 sequence

SEQ ID NO: 19984 - DNA, 260 bp, Unknown
  Description of Unknown: LeftRegion for integrase B6985 sequence
atagcgtataacacggcacagaagatgttatccatgttggatgtcatcacgcataacagctaaaataaaaaaacgccccggtgctggaacaccgaagcgtttatatagaacagcttacccttggaggataatccgccccaacaatcggattataccacctccggggtaggcttggcaagtcataccttggaggtgcttttttgcaggatttattacctaccgcgatttacgttcgagtgtccagcgagatgcaggccggc

SEQ ID NO: 19985 - DNA, 260 bp, Unknown
  Description of Unknown: LeftRegion for integrase B6986 sequence
accgtgaagaattggagggggataaagaagttcctgcgaacggagaagatagtccccatagaattgctcatgcgtaaaaaggcgttggaggtgatactacgaaagcggtaatctatgccagatattcgagccatagccagcgggaagaatccatagagggacagcttcgggagtgtcacgactttgcgctgaaaaacggaatgaccatcatcggtgagtactgcgataaggcaatctcaggaaagaccgacaatcgaccg

SEQ ID NO: 19986 - DNA, 260 bp, Unknown
  Description of Unknown: LeftRegion for integrase B6987 sequence
agaattgctagacaccggaattttgacaaaagaagaatttgaaactcaaaagcaacgacttttacaataaaaaaagcttcatactctcaaagtttgacgactcagagcatgaagctagtgacaagaaagatttttcaaaagagtctatcttttgaagtcttttcttgtacccattttatcaaaaaagaggtacaaaaacaatgattgcaacaaataaagtagctatctatattagagtatcaacaacaaatcaagcagag

SEQ ID NO: 19987 - DNA, 260 bp, Unknown
  Description of Unknown: LeftRegion for integrase B6988 sequence
ttatgggattctatgttcaataagcatcctcataaaaattactatatttattaaaaaaagaaccggccacaaaggaccggctccaagaatggtattaaccactccctagacaagaatgattatactatttttggagcacctttgcaaacggtgttatttttttaccgtttttttcataaatttacaaaaggagtttcaaaatgaaaataggagctttatatattagagtatctacagatgatcagttggaatactcacct

SEQ ID NO: 19988 - DNA, 260 bp, Unknown
  Description of Unknown: LeftRegion for integrase B6989 sequence
ttagttgataacggcgtactcactgaggaagaatttcaagcacagaaagctaaattattatcacaataaaaaaagccctacactcaccgtcgccaaacttcgagtgtagagcaagcatcacagaaaaaatcgtgtaaactgagagcagtcttacaagtctttttctgtacccattttatcaaaaacgaggtacaaacacaatggcaacacataaagtcgctatctatgtccgagtatcgaccacatcgcaagttgatgaa

SEQ ID NO: 19989 - DNA, 260 bp, Unknown
  Description of Unknown: LeftRegion for integrase B6990 sequence
aaaatcattttaccattttgttatgccacaaaccccataaaatcaatactttaataccatctataacacaataacataattatttctaacttaatagaagaaatataatatatatagatatatagagaaaaatataaaatatataaggagttaggattttttttgttattctgttattttgttaaaaacggaggcaaaaaatgattgataaagaaatagtagctctgtacgttcgagtatctacccaggagcaagcgcga

SEQ ID NO: 19990 - DNA, 260 bp, Unknown
  Description of Unknown: LeftRegion for integrase B6991 sequence
ctaccaacctctttacgagggaaatatgtgggttgatgtttttacaaaacgcatcaaattcgctacaagtcacattaaataaaaaaagccttgcgttccaagattgccgtctggggaacacaaggctaggtagcaagaaatcaggcattaaaaagccctttttcttgtacccattttatcaaaaaagaggtacaaacacaatggcaacacataaagtcgctatctatgtccgagtgtcgaccacatcgcaagttgacgag

SEQ ID NO: 19991 - DNA, 260 bp, Unknown
  Description of Unknown: LeftRegion for integrase B6992 sequence
attggttgataacggcgtactcactgaggaagaatttcaagcacagaaaactaaattattatcacaataaaaaagccctacactcaccgtcgccaaacttagagtgtagagctagcaccacagaaaaaacgtgtaaactggaaaacagccttacatgttcttttctgtacccattttatcaaaaacgaggtacaaacacaatgacaacgcataaagttgctatctatgtccgagtatcgaccacgtcgcaagctgacgag

SEQ ID NO: 19992 - DNA, 260 bp, Unknown
  Description of Unknown: LeftRegion for integrase B6993 sequence
ttatgggattctatgttcaataagcatcctcataaaaattactatatttattaaaaaaagaaccggccacaaaggaccggctccaagaatggtattaaccactccctagacaagaatgattatactatttttggagcacctttgcaaacggtgttatttttttaccgtttttttcataaatttacaaaaggagtttcaaaatgaagataggagctttatatattagagtatctacagatgatcagttggaatattcacct

SEQ ID NO: 19993 - DNA, 260 bp, Unknown
  Description of Unknown: LeftRegion for integrase B6994 sequence
ccagcaaatcttaagcgataaactggataaaataattaaacatcttgaaaacaaaaaagccctacactcaccgtcgccaaacttagagtgtagagcaagcatcacagaaaataaaaacgctagataaccagcttaaacataatcgaggttatgcgttcttttttctgtacccattttatcaaaaacgaggtacaaacacaatgacaacacataaagttgctatctatgtccgagtgtcaaccacatcacaggttgacgag

SEQ ID NO: 19994 - DNA, 260 bp, Unknown
  Description of Unknown: LeftRegion for integrase B6995 sequence
ccacctttcatcagtattttacaacgaacaatagtaaaaaatcaactgtttccattttggaaacaactcaaaaaagccccacactcactgtcgccaaacttagagtgtagagctagcagcacagaaaaaacgtgtaaactggaaacagccttacaagtctttttctgtacccattttatcaaaaaagaggtacaaacacaatggcaacacataaagtcgctatctatgtccgagtatctaccacatcgcaggttgacgag

SEQ ID NO: 19995 - DNA, 260 bp, Unknown
  Description of Unknown: LeftRegion for integrase B6996 sequence
gacggcaatgcactagctagccaaaagcttaacggatcaatggaagttaaagttaaataagacaataaaaaagccctataacctccctcgccaaagttagattatagagcttatgaatcacagaaagagcgatgtaaactggaaacagccttacacgttcttttctgtacccattttatcaaaaacgaggtacaaatacaatgacaatgcataaagttgctatctatgtccgagtgtcaaccacgtcgcaagttgacgag

SEQ ID NO: 19996 - DNA, 260 bp, Unknown
  Description of Unknown: LeftRegion for integrase B6997 sequence
tagttgataatggcgtactcactgaggaagaatttcaagcacagaaaactaaattattgtcacaataaaaaaaagccctacactcaccgtcgccaaactttgagtgtagagcaagcatcacagagaaaaacgtgtaaactgagagcagttttacaagtctttttctgtacccattttatcaaaaaagaggtacaaacacaatggcaacacataaagtcgctatctatgtccgagtatcgaccacatcgcaggttgacgag

SEQ ID NO: 19997 - DNA, 260 bp, Unknown
  Description of Unknown: LeftRegion for integrase B6998 sequence
ctagccaaaaacttaacggctcaatggaagttaaagtaaaataagacaataaaaaagccctacactcaccatcgccaaacttagagtgtagagcttatgcatcacagaaaacagaaaagctagataaccagttaaaacataatcgaggttatgctttcttttttctgtacccattttatcaaaaacgaggtacaaacacaatggcaatgcacaaagtagctatctatgtccgagtgtcaaccacatcgcaggttgacgag

SEQ ID NO: 19998 - DNA, 260 bp, Unknown
  Description of Unknown: LeftRegion for integrase B6999 sequence
agttgataatggcgttctaactgaggaagaatttcaagcacagaaagctaaattattatcacaataaaaaaagccctacactcaccgtcgccaaacttcgagtgtagagcttatgcatcacagaaaaaatcgtgtaaactgagagcagtcttacaagtctttttctgtacccattttatcaaaaacgaggtacaaaaacaatggcaacacataaagtagctatctatgtccgagtatcgactacatcgcaggttgatgag

SEQ ID NO: 19999 - DNA, 260 bp, Unknown
  Description of Unknown: LeftRegion for integrase B7000 sequence
ttatgggattctatgttcaataagcatcctcataaaaattactatatttattaaaaaaagaaccggccacaaaggaccggctccaagaatggtattaaccactccctagacaagaatgattatactatttttggagcgcctttgcaaacgttgttatttttttaccgtttttttcataaatttacaaaaggagtttcaaaatgaaaataggagctttatatattagagtatctacagatgatcagttggaatattcacct

SEQ ID NO: 20000 - DNA, 260 bp, Unknown
  Description of Unknown: LeftRegion for integrase B7001 sequence
gcagggtgtttctccgtgtaaagtttgcaatccatacatcccagatatgaaatggttttttgaaggaagagtattaacgaaatttatagacagtttttttgttgacaaagacgatgtaatggacgaaggcagcgaagaagaccaagatttacaatgacgtgttggcgtgattgtttaaacaattgaagagggtagacaatatggacaaaaaaattggtgcagcctatatccgcgtatcgacagacgatcagcttgaatac

SEQ ID NO: 20001 - DNA, 260 bp, Unknown
  Description of Unknown: LeftRegion for integrase B7002 sequence
caaagccgatagctgcgtccgaagaagatgaaaaataaaaaacgccccggtgctggaacaccaaagcgtttaatagaacagcttacccttggaggataatccgcccgacaatcggattatatcacctccaaggtaggcttggcaagtcataccttggaggtgcggtcgctcctccgtgaaaagaaggagcgtggattgaaatgcaggatttattacctaccgcgatttacgttcgagtgtccagcgagatgcaggccggc

SEQ ID NO: 20002 - DNA, 260 bp, Unknown
  Description of Unknown: LeftRegion for integrase B7003 sequence
ataataaagagtatagtccgatggtaattactccggatacaccggcccgtattattggaaaagctatgaaagtaagttttgatctataaaaaaagcacattcccggtcgccaaactagaaaatgtgctcaaaaattttgaaacctagggtataggtctctttcttgtaccctattttaacaaaaatatggggggtttactatgaaatttgctatttatgtacgtgtatctacacttgaacaagctgaggaaggatactca

SEQ ID NO: 20003 - DNA, 260 bp, Unknown
  Description of Unknown: LeftRegion for integrase B7004 sequence
agttgataatggcgttctaactgaggaagaatttcaagcacagaaagctaaattattatcacaataaaaaaagccctacactcaccgtcgccaaacttcgagtgtagagcttatgcatcacagaaaaaatcgtgtaaactgagagcagtcttacaagtctttttctgtacccattttatcaaaaacgaggtacaaaaacaatggcaacacataaagtagctatctatgtccgagtatcaaccacatcgcaggttgacgag

SEQ ID NO: 20004 - DNA, 260 bp, Unknown
  Description of Unknown: LeftRegion for integrase B7005 sequence
tcaattggtaaattttgacaaattcacacaagaagaagctgacaatgctgtcaaaaatctgaaataaaacaaaaagccccacactcaccgtcgccaaacttagagtgtagagcagtatcacagaaaaaaccgtgtaaactggaactagtcttacatgttcttttctgtacccattttatcagaattgaggtacaaatacaatgactatgcataaagttgctatctatgtacgagtgagcaccacgaatcaagtcgaggaa

SEQ ID NO: 20005 - DNA, 260 bp, Unknown
  Description of Unknown: LeftRegion for integrase B7006 sequence
accgggaagaattagagggggataaagaatatactgaggtcagcgaagataattcctatcgagcttctcaggcgtaagagggcgttggaggtgatactacgaaagcggtaatctatgccagatattcaagccataatcaacgagaggaatctatagagggacagcttcgggagtgtcacgactttgctctcaaaaacggaatgacaatcattggtgagtattgtgatagagcgatctcagggaagacagataaccgtccg

SEQ ID NO: 20006 - DNA, 260 bp, Unknown
  Description of Unknown: LeftRegion for integrase B7007 sequence
agccgatagctgcgtccgaagaagatgaaaaataaaaaacgctccggtgctaccaacaccgaagcgtttaaaaagaacagcttaccacagaggtggcaatccgcccgacaatcggattatatcacctccaaggtaggcttggcaagtcataccttggaggtgcggtcgctcctccgtgaaaagaaggagcgtggattgaaatgcaggatttattacctaccgcgatttacgttcgagtgtccagcgagatgcaggccggc

SEQ ID NO: 20007 - DNA, 260 bp, Unknown
  Description of Unknown: LeftRegion for integrase B7008 sequence
gattactaatttatcaatcgcttaaccatatcggtgacttcaccgtaatgttaaaaaaagaaccggccacaaaggaccggctccaagaatggtattaaccactccctagacaagaatgattatactatttttggagcacctttgcaaacggtgttatttttttaccgtttttttcataaatttacaaaaggagtttcgaaatgaagataggagctttatatattagagtatctacagatgatcagttggaatattcacct

SEQ ID NO: 20008 - DNA, 260 bp, Unknown
  Description of Unknown: LeftRegion for integrase B7009 sequence
aatgcactagctagccaaaagcttaacggatcaatggaaatcaaagttaaataagacaacaaaaaagccctataatctccctcgccaaagtttgattatagagcaagcatcacagaaaaaatccataaccagcaaaaaaatgaattgaggttatgtgttcttttctgtacccattttatcaaaaacgaggtacaaacacaatggcaacacataaagtcgctatctatgtccgagtatctaccacgtcgcaggctgacgag

SEQ ID NO: 20009 - DNA, 260 bp, Unknown
  Description of Unknown: LeftRegion for integrase B7010 sequence
tgtatagcgagacatctttaaccaatcacgataaaaatgttttggaaaatctattaagagagaatctatatttgttagaacgtatagaaaaataaaaaagccgctctcctcgaccaaaatttgagcggcttagcaaaaaataacctaaggcataggctttttttctatgcctattttatcaaaaaataggagtgattaccatgagaaccgcaatttatgtgcgagtttcaacgcttgaacaagctcaagaaggatattct

SEQ ID NO: 20010 - DNA, 260 bp, Unknown
  Description of Unknown: LeftRegion for integrase B7011 sequence
acaagctggacgaatacttaggctattttagcccagaggctgttagtctagccaatcaactttacaaataaaaaagccccacgctctcaaactttggcgagtctgagcgtgaggcaacgaggcaagaaaacatttcaaaaggtcaatcctcttgaggcgttttcttgtacctattttatcaaatttgaggtacaaaaacaatgaaaacaacaaacaaggtcgctatatacatcagagtttcgaccacttcgcaggtcgaa

SEQ ID NO: 20011 - DNA, 260 bp, Unknown
  Description of Unknown: LeftRegion for integrase B7012 sequence
aatgcactagctagccaaaagcttaacggatcaatggaaatcaaagttaaataagacaacaaaaaagccctataatctccctcgccaaagtttgattatagagcaagcatcacagaaaaaatccataaccagcaaaaaaatgaattgaggttatgtgttcttttctgtacccattttatcaaaaacgaggtacaaatacaatgacaatgcataaagttgctatctatgtccgagtgtcaaccacgtcgcaagttgatgag

SEQ ID NO: 20012 - DNA, 260 bp, Unknown
  Description of Unknown: LeftRegion for integrase B7013 sequence
agttgataatggcgttctaactgaggaagaatttcaagcacagaaagctaaattattatcacaataaaaaaagccctacactcaccgtcgccaaacttcgagtgtagagcttatgcatcacagaaaaaatcgtgtaaactgagagcagtcttacaagtctttttctgtacccattttatcaaaaacgaggtacaaaaacaatggcaacacataaagtagctatctatgtccgagtatcgaccacgtcgcaagctgatgag

SEQ ID NO: 20013 - DNA, 260 bp, Unknown
  Description of Unknown: LeftRegion for integrase B7014 sequence
ttatgggattctatgttcaataagcatcctcataaaaattactatgtttattaaaaaaagaaccggccacaaaggaccggctccaagaatggtattaaccactccctagacaagaatgattatactatttttggagcacctttgcaaacggtgttatttttttaccgtttttttcataaatttacaaaaggagtttcgaaatgaagataggagctttatatattagagtatctacagatgatcagttggaatattcacct

SEQ ID NO: 20014 - DNA, 260 bp, Unknown
  Description of Unknown: LeftRegion for integrase B7015 sequence
ttagttgataatggcgtactcactgaggaagaatttcaagcacagaaaactaaattattgtcacaataaaaaaagccctacactcaccgtcgccaaactttgagtgtagagcaagcatcacagagaaaaacgtgtaaactgagagcagttttacaagtctttttctgtacccattttatcaaaaaagaggtacaaacacaatggcaacacataaagtcgctatctatgtccgagtatcgaccacatcgcaggttgacgag

SEQ ID NO: 20015 - DNA, 260 bp, Unknown
  Description of Unknown: LeftRegion for integrase B7016 sequence
cgacggttcagctattgcaagtcagaaacttaacggagaaatgaaagttaaggttaaataaaacaacaaaaaaagccctacactcaccgtcgccaaacatagagtgtagagctaacatcacagaaaaaaccgtgtaaactggaactagtcttacatgttcttttctgtacccattttatcaaaaacgaggtacaaatacaatgacaatgcataaagttgctatctatgtacgagtgagcaccactaatcaagctgaggaa

SEQ ID NO: 20016 - DNA, 260 bp, Unknown
  Description of Unknown: LeftRegion for integrase B7017 sequence
tcaattggtaaattttgacaaattcacacaagaagaagctgacaatgctgtcaaaaatctgaaataaagcaaaaaagccctacactcaccgtcgccaaacttagagtgtagagcagcaccacagaaaaaacgtgtaaactggaactagtcttacatgttcttttctgtacccattttatcagaattgaggtacaaatacaatggcaatgcataaagttgctatctatgtacgagttagcaccacgaatcaagccgaggaa

SEQ ID NO: 20017 - DNA, 260 bp, Unknown
  Description of Unknown: LeftRegion for integrase B7018 sequence
accgtgaagaattggagggggataaagaagttcctacgaacggagaagatagtccccatagaattgctcatgcgtaaaaaggcgttggaggtgatactacgaaagcggtaatctatgccagatattcgagccatagccaaagggaagaatccatagagggacagcttcgggagtgtcacgactttgcgctgaaaaacggaatgaccatcatcggtgagtactgcgataaggcaatctcaggaaagaccgacaatcgaccg

SEQ ID NO: 20018 - DNA, 260 bp, Unknown
  Description of Unknown: LeftRegion for integrase B7019 sequence
ataataaagaatatagtccaatggtaattactccggatacaccggcccgtattattggaaaagctatgaaagtaagttttgatctataaaaaaagcacattcccggtcgccaaactagaaaatgtgctcaaaaattttgaaacctagggtataggtctctttcttgtaccctattttaacaaaaatatggggggtttactatgaaatttgctatttatgtacgtgtatctacacttgaacaagctgaggaaggatactca

SEQ ID NO: 20019 - DNA, 260 bp, Unknown
  Description of Unknown: LeftRegion for integrase B7020 sequence
gacgacggcaatgcactagctagccaaaagcttaacggatcaatggaagttaaagttaaataagacaataaaaaaaccctacactcaccgtcgccaaacttagagtgtagagctagcatcacagaaaaaacgtgtaaactggaaacagccttacaagtctttttctgtacccattttatcaaaaaagaggtgcaaacacaatggcaacacataaagtcgctatctatgtccgagtatctaccacatcgcaggttgacgag

SEQ ID NO: 20020 - DNA, 260 bp, Unknown
  Description of Unknown: LeftRegion for integrase B7021 sequence
cagtgctattgcaagtcaaaaacttaatggagaaatgaaagtcaaggttaaataagacaataaaaaaagccctataatctccctcgccaaagtttgattatagagcagcaccacagaaaaaatccataaccactgaaaaatgaattgaggttatgtgttcttttctgtacccattttatcagaattgaggtacaaacacaatgacaacacataaagttgctatctatgtccgagtgtcaaccacatcacaagctgacgag

SEQ ID NO: 20021 - DNA, 260 bp, Unknown
  Description of Unknown: LeftRegion for integrase B7022 sequence
ctctagctagccaaaagctcaacggatcaatggaagttaaagtaaaataagacaacaaaaaagccctataatctccctcgccaaagtttgattatagagcaagcatcacagaaaataaaaacactatcacggtgaagcaacctaacaagattgtgttcttttttctgtacccattttaacagaattgaggtacaaacacaatggcaacacataaagtcgctatctatgtccgagtatcgaccacatcgcaagttgacgag

SEQ ID NO: 20022 - DNA, 260 bp, Unknown
  Description of Unknown: LeftRegion for integrase B7023 sequence
tacatttattttgtgaaataaaaagaacttttctttaatttaaaagaaaaattcttctctgtacctaaccatctttgccaatgggtaaattcgattactaaaagatatctcccacaactgtggaaggcattgaatataacattggctagcactagtatatcattttttagataagccttacaaaaatggaggaaattcatatgccgaaagttgcaatctatgcacgtgtctctacactcaaccaagctgaagaaggttac

SEQ ID NO: 20023 - DNA, 260 bp, Unknown
  Description of Unknown: LeftRegion for integrase B7024 sequence
taaccataaaactttgcctctttggcatttataaccaccccctaactttattctattcctacatatatattatgtgctctgcataatcaattaacagatgccaagcaacatatatagcaaaaatcaacacatttttatctctgaaacatattatgacttatagcaaattcacttagattaagcgatagaaagtgattattatggaaaaaaaacttaagaccgctgcggcatatatcagagtatctacagaccgacaaacc

SEQ ID NO: 20024 - DNA, 260 bp, Unknown
  Description of Unknown: LeftRegion for integrase B7025 sequence
cttcgtttttctacttaatgttcttaaagatattctttttttatctcgcatttcacgtattttaatttctatcatatcctttttcctttcgttcattttagtctccccaaaattggcgtttttatatgatagaaatctgcttatttatttataactaaaaagtaacttattaaaaaaaaattttaaaaaaattatattttatgagtaaatccaaaatttattgtttaaaatatttatatactataacatttagcaaaggg

SEQ ID NO: 20025 - DNA, 260 bp, Unknown
  Description of Unknown: LeftRegion for integrase B7026 sequence
aaccataaaactttgcctctttgacaatttataaccaccccttaactttattctattcctacatatatattatgtgctctgcaaaatcaattaacagatgccaagcaacatatatagcaaaaatcaacacatttttatctctgaaacatattatgacttatagcaaattcacttagattaagcgatagaaagtgattattatggaaaaagaacttaaaaccgctgcggcatatatcagagtatctacagaccgacaaacc

SEQ ID NO: 20026 - DNA, 260 bp, Unknown
  Description of Unknown: LeftRegion for integrase B7027 sequence
ttgtgagttataagaacgcacttaatttataataaaaaatcgcccttcggtgttggtagcaccaaaggacgataatcattacacagggtgcaatgatacatcaaaatgcaagtaatattgtatcatacccttgtaaatttttcaatataatttacaagggatttttgcacccttttttagataagagaggagcaaaataaatggatgatttaaaaatcgcagctgcttacatcagagttagcacggatgatcagacagag

SEQ ID NO: 20027 - DNA, 260 bp, Unknown
  Description of Unknown: LeftRegion for integrase B7028 sequence
tcgcgcatccaggacaaaggttgtcaagtcgtcgatgtcaagatggccgtcagcgccaacacgcgcgacagcgacatgatgctgtactcgtttaccgtcttatataggtaaagaaaaaaagaagccccacggggtcacagcgttgcagcgctacccgtggggctttccacagaacctctgaaaggaggccgtttcatattatgccaaaaacagcggtgatatacgcccgcttttcatgcaacaagcagcgcgaggcctcg

SEQ ID NO: 20028 - DNA, 260 bp, Unknown
  Description of Unknown: LeftRegion for integrase B7029 sequence
taaccataaaactttgcctctttggcatttataaccaccccctaactttattctattcctacatatatattatgtgctctgcataatcaattaacagatgccaagcaacatatatagcaaaaatcaacacatttttatctctgaaacatattatgacttatagcaaattcacttagattaagcgatagaaagtgattattatgggaaaaaaacttaagaccgctgcggcatatatcagagtatctacagaccgacaaacc

SEQ ID NO: 20029 - DNA, 260 bp, Unknown
  Description of Unknown: LeftRegion for integrase B7030 sequence
aaacgcccagcaggtcatggccatgctgggcgaaattgaacagtataatagacaacagaatgcaaagcctgctgatgaaaaagttatatctatccctgagcagataaaggaatacaaaagcctgctcgattgcggagctataacgcaggaagagtacgatattaagaaaaaagagttattgaagtcttaaggagaacactatgagcaatgcagttatatatgcaagatactcgtcggacaagcagtctgaggatagcatt

SEQ ID NO: 20030 - DNA, 260 bp, Unknown; identical to SEQ ID NO: 18683
  Description of Unknown: LeftRegion for integrase B7031 sequence

SEQ ID NO: 20031 - DNA, 260 bp, Unknown
  Description of Unknown: LeftRegion for integrase B7032 sequence
aaccataaaactttgcctctttgacaatttataaccaccccttaactttattctattcctacatatatattatgtgctctgcaaaatcaattaacagatgccaagcaacatatatagcaaaaatcaacacatttttatctctgaaacatattatgacttatagcaaattcacttagattaagcgatagaaagtgattattatggaaaaagaacttaaaaccgctgcggcatatatcagagtatcaacagaccgacaaacc

SEQ ID NO: 20032 - DNA, 260 bp, Unknown
  Description of Unknown: LeftRegion for integrase B7033 sequence
gaacatatgtttatttaaggagataaaaaaagaactctctctaaggaaaagttcttctttgtaccttaccatctttgccaatgggtaaatccaattactaaaagatgtctcccacaactgtggaagacattgaatataacattggctagcactagtatatcattttttagataagccttacaaaaatggaggaaattcatatgccgaaagttgcaatctatgcacgtgtctctacactcaaccaagctgaagaaggttac

SEQ ID NO: 20033 - DNA, 260 bp, Unknown
  Description of Unknown: LeftRegion for integrase B7034 sequence
attctggagaagtgcaaggcagccatgaccgaagtcgccattgtggaatatcaaccggcggcataacacaaaaaaaccgccccacggcggcaaccgtgaagcggcaagaggaaaaactattgcgataatagacttcccaaagcaaggtctattatagcatatttcctctgaaaaatcaagtcttaggaggaaatttacacatgaatgcagtgatctacgcccgttacagctgcgaccggcagaccgagcagtccattgag

SEQ ID NO: 20034 - DNA, 260 bp, Unknown
  Description of Unknown: LeftRegion for integrase B7035 sequence
tagggcgcttggaaaaaatagtaataaaaaggttctgcaaatggacctagacgggaatgtggtaaaagagtggaatagcatgacggatgctagtaaaactctgaaaattaacctttcttgtatttcaatgtgctgcaaaggtacaagaaaaaaggctggcggttttgcttggaagtattctgaatgcgggggtggctcaaatgattaggaaagtcgccatatacgtacgagtgagcaccacgaatcaagccgaggaagga

SEQ ID NO: 20035 - DNA, 260 bp, Unknown
  Description of Unknown: LeftRegion for integrase B7036 sequence
tatttttacgaattgggtatcaaactataataaaaaatcgcccttcggtgttggtagcaccaaaggacgataatcattacacagggtgcaatgatactatttcatagcaagtaatattgtatcatacccttgtaaatttttcaatataatttacaagggatttttgcaccctttttttagataagaaaggagcaaaataaatggatgatttaaaaatcgcagctgcttacatcagagttagcacagatgatcagacagag

SEQ ID NO: 20036 - DNA, 260 bp, Unknown
  Description of Unknown: LeftRegion for integrase B7037 sequence
ggagaatgaaatcgaaccgttgaaaataaaaaactcccctatcctgcgccaacaggataaaggagctaccgggcgaaccggtacaaatgtagcctctaaactacagacatattgtaccaaacccgcccgagaaatgcaagtttaattttacgggcggtatttttgcgcccatttttaagtatattttcgtgaggtgcaatatgaaaacagcagcgtgttatatcagagtatcaaccgacgaccaaaccgaatacagcccc

SEQ ID NO: 20037 - DNA, 260 bp, Unknown
  Description of Unknown: LeftRegion for integrase B7038 sequence
aatattgtatatagaatttactatattgtcaagaaaaaaatcgccctctagtattggcgtactagagagcgacaccattacacagggtgcaatgatactatttcatagcaagtaatattgtatcatacccttgtaaatttttcaatataatttacaagggatttttgcacccttttttagataagaaaggagcaaaataaatggatgatttaaaaatcgcagctgcttacatcagagttagcacagatgatcagacagag

SEQ ID NO: 20038 - DNA, 260 bp, Unknown
  Description of Unknown: LeftRegion for integrase B7039 sequence
aaggttgaccaaataatagaaagtaacaaataaaaaaatcgcccttcggtgttggtagcaccaaaggacgataatcattacatagggtgcaatgatactatttcatagcaagtaatattgtatcatacccttgtaaatttttcaatataatttacaagggatttttgcacccttttttagataagaaaggagcaaaataaatggatgatttaaaaatcgcagctgcttacatcagagttagcacagatgatcagacagag

SEQ ID NO: 20039 - DNA, 260 bp, Unknown
  Description of Unknown: LeftRegion for integrase B7040 sequence
agaaggttgaccaaataatagaaagtaacaaataaaaaaatcgccctctagtattggcgtactagagagcgacaccattacacagggtgcaatgatactaacacttagcaagtaatattgtatcatacccttgtaaatttttcaatataatttacaagggatttttgcacccttttttagataagaaaggagcaaaataaatggatgatttaaaaattgcagctgcttacatcagagttagcacagatgatcagacagag

SEQ ID NO: 20040 - DNA, 260 bp, Unknown
  Description of Unknown: LeftRegion for integrase B7041 sequence
aaacgcccagcaggtcatggccatgctgggcgaaattgaacagtataataaacagcagaatgcaaatcctgctgatgaaaaagttatatctatccctgagcagataaaggaatacaaaagcctgctcgattgcggagctataacgcaggaagagtacgatattaagaaaaaagagttattgaagtcttaaggagaacactatgagcaatgcagttatatatgcaagatactcgtcggacaagcagtctgaggatagcatt

SEQ ID NO: 20041 - DNA, 260 bp, Unknown
  Description of Unknown: LeftRegion for integrase B7042 sequence
caaatacaaagaccacaatctttctggtaactacgaaggacatcgggaatgccacatcactcccgactggttactaatatataagattgagcacgacatattgaccttgtcattaaccagaaccggaacccatagcgatttattctaaactacccccggacctttaaagttcggggaattttctatcataggtggtaaatatggatcagtcaaataaagaaaatatcaatcagcttcgtgtaggatgtctctacatacgt

SEQ ID NO: 20042 - DNA, 260 bp, Unknown
  Description of Unknown: LeftRegion for integrase B7043 sequence
gaaggttgaccaaataatagaaagtaacaaataaaaaaaatcgccctctagtattggcgtactagagagcgacaccattacacagggtgcaatgatactaacacttagcaagtaatattgtatcatacccttgtaaatttttcaatataatttacaagggatttttgcacccttttttagataagaaaggagcaaaataaatggatgatttaaaaattgcagctgcttacatcagagttagcacagatgatcagacagag

SEQ ID NO: 20043 - DNA, 260 bp, Unknown
  Description of Unknown: LeftRegion for integrase B7044 sequence
tgccctttgcttttaataataaaattaggtaaataaaaaatcgccctctggtgctggaacactagagagcgacaccattacacagggtgcaatgatactatttcatagcaattaatattgtatcatacccttgtaaatttttcaatataatttacaagggatttttgcacccttttttagataagagaggagcaaaataaatggatgatttaaaaatggcagctgcttacatcagagttagcacagatgatcagacagag

SEQ ID NO: 20044 - DNA, 260 bp, Unknown
  Description of Unknown: LeftRegion for integrase B7045 sequence
cctatttttacgaattgggtatcaaaatataataaaaaaatcgccctctggtgctggaacactagagagcgacaccattacacagggtgcaatgatactaacacttagcaagtaatattgtatcatacccttgtaaatttttcaatataatttacaagggatttttgcacccttttttagataagaaaggagcaaaataaatggatgatttaaaaatcgcagctgcttacatcagagttagcacagatgatcagacagag

SEQ ID NO: 20045 - DNA, 260 bp, Unknown
  Description of Unknown: LeftRegion for integrase B7046 sequence
gctcggtattcaagaaaatgctgataggtttggaaatgtcatggggctttattcagtgcaagcaagatcagaacaagaaaaactcctagaatatttccacaagctcaacgacgtaggtcaaagcgaagccgtcaagcgcgttggcgagcttacgcagatacccgaatacaaattaccagacgatgaaagcgagggaagcgatgaataacgccgtaatttacgcccgttacagctccgataaacagacagaggacagcata

SEQ ID NO: 20046 - DNA, 260 bp, Unknown; identical to SEQ ID NO: 20032
  Description of Unknown: LeftRegion for integrase B7047 sequence

SEQ ID NO: 20047 - DNA, 260 bp, Unknown
  Description of Unknown: LeftRegion for integrase B7048 sequence
tagggtgcttggaaaaaatagtaataaaaaggttctgcaaatggacctagatgggaatgtggtaaaagagtggaatagcatgacggatgccagtaaaactctgaaaatcaacctttcttgtatttcaatgtgctgcaaaggtacaagaaaaaaagctggcggttttgcttggaagtattataaatgcgggggtgactcgaatgattaggaaagtcgccatatatgcacgagtgagcaccacgaatcaagctgaggaaggt

SEQ ID NO: 20048 - DNA, 260 bp, Unknown
  Description of Unknown: LeftRegion for integrase B7049 sequence
tacaacacttgctgaagaaagtggtattgtaaacaaatctatgaaagtaaacaactaaaataaaaagcccctgctctcctcgaccaaaatttgagcatgggacttaaaccaatttgaaaagcaacctaaaacactaagggtataggtcttttttctataccctattttaccataaaacttacaaaatagggaggctaacgatgaataaagttgctatttatgtgcgcgtgagtacaaaaggacaagcagaagagggttat

SEQ ID NO: 20049 - DNA, 260 bp, Unknown
  Description of Unknown: LeftRegion for integrase B7050 sequence
atcatcaaggcaaagaacgagcttgcgaagtggcaggagctgaagaagggtctgctccagcagatgttcgtatagtcacaacagcccgtcgtcctctcgggcggcgggctttataattaaatgcgtatttgcgcaattaaccaaccaaaggagaaagcaatgaatgcatataagcagaaattacgggagggggtaagagcttggcacgcaagaagaagttcgagctgaacgacaacaatctcgccatcgcctactaccga

SEQ ID NO: 20050 - DNA, 260 bp, Unknown
  Description of Unknown: LeftRegion for integrase B7051 sequence
gcgcgagtccaagaggccggatgccaggtagtcgacgtgaagatggcgacttgcgccaacactgggaacgacgacacgatgatgtactgcttcaccgtgctctaccgttagggaaagaagaagccccacggggtcatagcgctgcaacgctgcccgcggggctttcctaaagaacctctgaaaggaggccgtttccaattatgccaaaaactgcggtgatatacgcccgcttttcatgcaacaagcagcgcgaggcctca

SEQ ID NO: 20051 - DNA, 260 bp, Unknown
  Description of Unknown: LeftRegion for integrase B7052 sequence
aaccataaaactttgcctctttgacaatttataaccaccccttaactttattctattcctacatatatattatgtgctctgcaaaatcaattaacagatgccaggcaacatatatagcaaaaatcaacatatttttatctctgaaacatattatgacttatagcaaattcacttagattaagcgatagaaagtgattattatggaaaaaaaacttaaaaccgctgcggcatatatcagagtatctacagaccgacaaacc

SEQ ID NO: 20052 - DNA, 260 bp, Unknown
  Description of Unknown: LeftRegion for integrase B7053 sequence
aaccataaaactttgcctctttgacaatttataaccaccccttaactttattctattcctacatatatattatgtgttctgcaaaatcaattaacagatgccaagcaacatatatagcaaaaatcaacacatttttatctctgaaacatattataacttatagcaaattcacttagattaagcgatagaaagtgattattatggaaaaagaacttaaaaccgctgcggcatatatcagagtatctacagaccgacaaacc

SEQ ID NO: 20053 - DNA, 260 bp, Unknown
  Description of Unknown: LeftRegion for integrase B7054 sequence
taaccataaaactttgcctctttggcatttataaccaccccttaattttattctattcctacatatatattatgtgctctgcaaaatcaattaacagatgccaagcaacatatatagcaaaaatcaacacatttttatctctgaaacatattatgacttatagcaaattcacttagattaagcgatagaaagtgattattatggaaaaagaacttaaaaccgttgcggcatatatcagagtatctacagaccgacaaacc

SEQ ID NO: 20054 - DNA, 260 bp, Unknown
  Description of Unknown: LeftRegion for integrase B7055 sequence
attctggagaagtgcaaggcagccatgaccgaagtcgccattgtggaatatcaaccggcggcataacacaaaaaaaccgccccacggcggcaaccgtgaagcggcaagaggaaaaactattgcgataatagccattccacaacaaggtctattatagcatatttcctcgtaaaaatcaagtcttaggaggaaatttacacatgaatgcagtgatctacgcccgttacagctgcgaccggcagaccgagcagtccattgag

SEQ ID NO: 20055 - DNA, 260 bp, Unknown
  Description of Unknown: LeftRegion for integrase B7056 sequence
catcatgatgatcattgaagccagaagcggtgaggtcattgaaaaatgggtttccttcttcggctccgcgacgttctattgctgaaaaaaccgccccggtgctaccaacaccgaagcggttcaggcgcccggcagtgctaccaacaccgctgagcaatgcagttcgcaacccaccacaataggggcattctgcgcctttcatgatagcagatttgccccggaaaggcaaggacaaaatggctcaatccagatctgtcacc

SEQ ID NO: 20056 - DNA, 260 bp, Unknown
  Description of Unknown: LeftRegion for integrase B7057 sequence
aaccataaaactttgcccctttgacaatttataaccaccccttaactttattctattcctacatatatattatgtgctatgcaaaatcaattagcagatgccaagcaacatatatagcaaaaatcaacacatttttatctctgaaacatattatgacttatagcaaattcacttagattaagcgatagaaagtgattattatggaaaaagaacttaaaaccgctgcggcatatatcagagtatctacagaccgacaaacc

SEQ ID NO: 20057 - DNA, 260 bp, Unknown
  Description of Unknown: LeftRegion for integrase B7058 sequence
taaccataaaactttgcctcttaggcatttataaccaccccttaactttattctattcctacatatatattatgtgctctgcaaaatcaattaacagatgccaagcaacatatatagcaaaaatcaacacatttttatctctgaaacatattatgacttatagcaaatacacttagattaagcgatagaaagtgattattatggaaaaagaacttaaaaccgctgcggcatatatcagagtatctacagaccgacaaacc

SEQ ID NO: 20058 - DNA, 260 bp, Unknown
  Description of Unknown: LeftRegion for integrase B7059 sequence
aaccataaaactttgcctctttgacaatttataaccaccccttaactttattctattcctacatatatattatgtgttctgcaaaatcaattaacagatgccaagcaacatatatagcaaaaatcaacacatttttatctctgaaacatattatgacttatagcaaattcacttagattaagcgatagaaagtgattattatggaaaaagaacttaaaaccgctgcggcatatatcagagtatctacagaccgacaaacc

SEQ ID NO: 20059 - DNA, 260 bp, Unknown
  Description of Unknown: LeftRegion for integrase B7060 sequence
acggtgaagtatattcatttgttagtggactttctgactgtgaagtatacctttcaacttctttcaatacggcggctgtggctgatataaatggttacttctatgttcttacacttggttctgattatgaggataataccaaagacttcttgtcaatcgccgacacagttcgtccgaaataacacttaggagatgtcactatgagcaatgcagttatatatgctagatactcttcggataagcaatccgaagaaagtatc

SEQ ID NO: 20060 - DNA, 260 bp, Unknown; identical to SEQ ID NO: 20025
  Description of Unknown: LeftRegion for integrase B7061 sequence

SEQ ID NO: 20061 - DNA, 260 bp, Unknown
  Description of Unknown: LeftRegion for integrase B7062 sequence
cctatttttacgaattgggtatcaaaatataataaaaaaatcgccctctagtattggcgtactagagagcgacaccattacacagggtgcaatgatactatttcatagcaagtaatattgtatcatacccttgtaaatttttcaatataatttacaagggatttttgcacccttttttagataagaaaggagcaaaataaatggatgacttaaaaattgcagctgcctacatcagagttagcacagatgatcagacagag

SEQ ID NO: 20062 - DNA, 260 bp, Unknown
  Description of Unknown: LeftRegion for integrase B7063 sequence
aaccataaaactttgcctctttgacaatttataaccaccccttaactttattctattcctacatacatattatgtgctctgcaaaatcaattaacagatgccaagcaacatatatagcaaaaatcaacacatttttatctctgaaacatattatgacttatagcaaattcacttagattaagcgatagaaagtgattattatggaaaaagaacttaaaaccgctgcggcatacatcagagtatctacagaccgacaaacc

SEQ ID NO: 20063 - DNA, 260 bp, Unknown
  Description of Unknown: LeftRegion for integrase B7064 sequence
catcatgatgatcattgaagccagaagcggcgaggtcattgaaaaatgggtttccttcttcggctccgcgacgttctattgctgaaaaaaccgccccggtgctaccaacaccgaagcggttcaggcgcccggcagtgctaccaacaccgctgagcaatgcagttcgcaacccaccacaataggggcattctgcgcctttcatgatagcagatttgccccggaaaggcaaggacaaaatggctcaatccagatctgtcacc

SEQ ID NO: 20064 - DNA, 260 bp, Unknown; identical to SEQ ID NO: 20031
  Description of Unknown: LeftRegion for integrase B7065 sequence

SEQ ID NO: 20065 - DNA, 260 bp, Unknown
  Description of Unknown: LeftRegion for integrase B7066 sequence
ttgtgagttataagaacgcacttaatttataataaaaaatcgccctctggtacggcaataccaaaggacgataatcattacacagggtgcaatgatactatttcatagcaagtaatattgtatcatacccttgtaaatttttcaatataatttacaagggatttttgcacccttttttagataagaaaggagcaaaataaatggatgatttaaaaatcgcagctgcttacatcagagttagcacagatgatcagacagag

SEQ ID NO: 20066 - DNA, 260 bp, Unknown
  Description of Unknown: LeftRegion for integrase B7067 sequence
taggacgcttgggaaaaatagtaataaaaaggtgcttcaaatggacctggatgggaatgtggtaaaagagtggaacagtatgacggatgctagtaaaactctgaaaattaacctttcttgtatttcaatgtgctgcaaaggtacaagaaaaaaggccggtgggtttgcttggaagtattctgaatgtagaggtgactcgaatgattaggaaagtcgccatatatgcacgagttagcaccatgaatcaagctgaggaagga

SEQ ID NO: 20067 - DNA, 260 bp, Unknown
  Description of Unknown: LeftRegion for integrase B7068 sequence
aaggttgaccaaataatagaaagtaacaaataaaaaaaatcgccctctagtattggcgtactagagagcgacaccattacacatggtgcaatgatactatttcatagcaagtaatattgtatcatacccttgtaaatttttcaatataatttacaagggatttttgcaccctttttttagataagaaaggagcaaaataaatggatgatttaaaaatcgcagctgcttacatcagagttagcacagatgatcagacagag

SEQ ID NO: 20068 - DNA, 260 bp, Unknown
  Description of Unknown: LeftRegion for integrase B7069 sequence
agaaggttgaccaaataatagaaagtaacaaataaaaaaaatcgccctctagtgctggaacactagagagcgacaccattacacagggtgcaatgatacatcaaaatgcaagtaatattgtatcatacccttgtaaatttttcaatataatttacaagggatttttgcacccttttttagataaggaaggagcaaaataaatggatgatttaaaaatcgcagctgcttacatcagagttagcacagatgatcagacagag

SEQ ID NO: 20069 - DNA, 260 bp, Unknown
  Description of Unknown: LeftRegion for integrase B7070 sequence
cgcatgtttattttataaaataaaaagaactttccttaatttaaagaaaagttcttctctgtacctaaccatctttgccaatgggtaaatccaattactaaaagatgtctcccacaactgtggaagacattgaatataacattggctagcactagtatatcattttttagataagccttacaaaaatggaggaaattcatatgcctaaagttgcaatctatgctcgcgtctctactcttaatcaagctgaagaaggttac

SEQ ID NO: 20070 - DNA, 260 bp, Unknown
  Description of Unknown: LeftRegion for integrase B7071 sequence
aacaggcagcttgcatatccgctcccgtatgagaacttcccacacaaggtcccgtgtgcttttgtaatctttataattcatatataatcaccctatttaattgtagggtgcagagcgttaaaattcagcaggtaagttttggaaattaaaaagtcccgctcggccaaaacgagcgggaataattaaaggtggtgaactatatgaaaacagcggcgtgttatatcagggtatcgactgacgaccaaaccgaatacagcccg

SEQ ID NO: 20071 - DNA, 260 bp, Unknown; identical to SEQ ID NO: 20069
  Description of Unknown: LeftRegion for integrase B7072 sequence

SEQ ID NO: 20072 - DNA, 260 bp, Unknown; identical to SEQ ID NO: 20025
  Description of Unknown: LeftRegion for integrase B7073 sequence

SEQ ID NO: 20073 - DNA, 260 bp, Unknown; identical to SEQ ID NO: 20036
  Description of Unknown: LeftRegion for integrase B7074 sequence

SEQ ID NO: 20074 - DNA, 260 bp, Unknown
  Description of Unknown: LeftRegion for integrase B7075 sequence
acggtgaagtatattcatttgttagtggactttctgactgtgaagtatacctttcaacttctttcaatacggcggctgtggctgatataaatggttacttctatgttcttacacttggttctgattatgaggataataccaaagacttcttgtcaatcgccgacacagttcgtccgaaataacacttaggagatgtcactatgagcaatgcagttatatatgctagatactcttcggataagcaatccgaagaaagtatt

SEQ ID NO: 20075 - DNA, 260 bp, Unknown
  Description of Unknown: LeftRegion for integrase B7076 sequence
ctatttgctggggtattctgataaaatcacgcggctgtccggggatcacaccgaccccacatccggtccctgtgttgaagttactgctgcggagctggagctgctgaaggctttccggcacgccggagctgagacccaggcagcgatcagagcgatcctgcacatttaacgggaggaccccgggaagggaggacggtgccatgcgcggcgtcatttacgcgagatattcaccaggcccgcaccagacggagcagtccatt

SEQ ID NO: 20076 - DNA, 260 bp, Unknown
  Description of Unknown: LeftRegion for integrase B7077 sequence
gcgcgagtccaagaggccggatgccaggtagtcgacgtgaagatggcgacttgcgccaacactgggaacgacgacacgatgatgtactgcttcaccgtgctctaccgttagggaaagaagaagccccacggggtcatagcgctgcaacgctgcccgcggggctttcctaaagaacctctgaaaggaggccgtttccaattatgccaaaaactgcggtgatatacgcccgcttttcatgcaacaagcagcgcgaggcctct

SEQ ID NO: 20077 - DNA, 260 bp, Unknown
  Description of Unknown: LeftRegion for integrase B7078 sequence
cctatttttacgaattgggtatcaaaatataataaaaaaatcgccctctggtgctggaacactagagagcgacaccattacacagggtgcaatgatactatttcatagcaagtaatattgtatcatacccttgtaaatttttcaatataatttacaagggatttttgcacccttttttagataagagaggagcaaaataaatggataatttaaaaatcgcagctgcttacatcagagttagcacggatgatcagacagag

SEQ ID NO: 20078 - DNA, 260 bp, Unknown
  Description of Unknown: LeftRegion for integrase B7079 sequence
caccctatttttacgaattggtattaatataataaaaaaatcgccctctggtgctggaacactagagagcgacatcattacacagggtgcaatgatactatttcatagcaagtaatattgtatcatacccttgtaaatttttcaatataatttacaagggatttttgcacccttttttagataagaaaggagcaaaataaatggatgacttaaaaattgcagctgcttacatcagagttagcacagatgatcagacagag

SEQ ID NO: 20079 - DNA, 260 bp, Unknown
  Description of Unknown: LeftRegion for integrase B7080 sequence
agaaggttgaccaaataatagaaagtaacaaataaaaaaatcgccctctagtattggcgtactagagagcgacaccattacacagggtgcaatgatactatttcatagcaagtaatattgtatcatacccttgtaaatttttcaatataatttacaagggatttttgcacccttttttagataagaaaggagcaaaataaatggatgatttaaaaatcgcagctgcttacatcagagttagcacggatgatcagacagag

SEQ ID NO: 20080 - DNA, 260 bp, Unknown
  Description of Unknown: LeftRegion for integrase B7081 sequence
aaccataaaactttgcctctttgacaatttataaccaccccttaactttattctattcctacatacatattatgtgctctgcaaaatcaattaacagatgccaagcaacatatatagcaaaaatcaacacatttttatctctgaaacatattatgacttatagcaaattcacttagattaagcgatagaaagtgattattatggaaaaagaacttaaaaccgctgcggcatatatcagagtatctacagaccgacaaacc

SEQ ID NO: 20081 - DNA, 260 bp, Unknown; identical to SEQ ID NO: 20032
  Description of Unknown: LeftRegion for integrase B7082 sequence

SEQ ID NO: 20082 - DNA, 260 bp, Unknown
  Description of Unknown: LeftRegion for integrase B7083 sequence
agaaggttgaccaaataatagaaagtaacaaataaaaaaaatcgccctctagtgctggaacactagagagcgacaccattacacagggtgcaatgatacatcaaaatgcaagtaatattgtatcatacccttgtaaatttttcaatataatttacaagggatttttgcacccttttttagataagagaggagcaaaataaatggatgatttaaaaatcgcagctgcttacatcagagttagcacagatgatcagacagag

SEQ ID NO: 20083 - DNA, 260 bp, Unknown
  Description of Unknown: LeftRegion for integrase B7084 sequence
gcctgagcatcctcattcaattaataactttgtatatgaacacagatatgtcatggaacaatatttaggaagatatttatccaaaaatgaggtagttcatcatataaatggcgataaagcagataatcgtttagaaaatttgctattattatctcccgctgaacatgctaaactacacagtcaactaaggaaagaaggtgatgctaaatgaatacaggtgcaacttcaaaagtagctgctctctatattcgtgtcaggtc

SEQ ID NO: 20084 - DNA, 260 bp, Unknown
  Description of Unknown: LeftRegion for integrase B7085 sequence
ccttaattcttcaacaacacttatcgaaagaataaaaccaactgtttctaaaatggaaatagttgcaaacaaaaaagccccacgctcagaagtttggcgaccgagagcgtgaggctagtggcaagaaaaacttttcaaaagagatttccttttgagatgttttcttgtacccattttatcaagaaatgaggtaaaaatcaatgcaaaataaagtagcaatctacgtcagggtgtctactacctcacaagttgaggagggg

SEQ ID NO: 20085 - DNA, 260 bp, Unknown; identical to SEQ ID NO: 20059
  Description of Unknown: LeftRegion for integrase B7086 sequence

SEQ ID NO: 20086 - DNA, 260 bp, Unknown; identical to SEQ ID NO: 20034
  Description of Unknown: LeftRegion for integrase B7087 sequence

SEQ ID NO: 20087 - DNA, 260 bp, Unknown
  Description of Unknown: LeftRegion for integrase B7088 sequence
cgcgcatccaggacaaaggttgtcaagtcgtcgatgtcaagatggccgtcagcgccaacacgcgcgacagcgacatgatgctgtactcgtttaccgtcttatataggtaaagaaaagaagaagccccacggggtcatagcgctgcaacgctgcccgcggggcttttccaaagaacctctgaaaggaggccgtttccaattatgccaaaaactgcggtgatatacgcccgcttttcgtgcaataagcagcgcgaggcctct

SEQ ID NO: 20088 - DNA, 260 bp, Unknown
  Description of Unknown: LeftRegion for integrase B7089 sequence
cacccgtgacctcgtcctccgctgcttcgcccgggctcatctgaacgctgagaaggtaaagacagaaaagggaaagcggagccagttcgagaagttccagagctccctggagccgtacttcttccggatgtcaaaagagaacgcggagctggtgcaggtgctccacgatcaggaggttgcaaagttaggaggctgataccatgcgtggcgttatttatgcgagatattcaccaggcccgcaccagacggagcagtccatc

SEQ ID NO: 20089 - DNA, 260 bp, Unknown
  Description of Unknown: LeftRegion for integrase B7090 sequence
aaaactttgcctctttgacaatttataaccaccccttaactttattgtattcctacatatatattatgtgctctacaaaatcaattaacagatgccaagcaacatatatagctatagcaaaaatcaacacatttttatctctgaaacatattatgacttataacaaatttacttagattaagcgatagaaagtgattattatggaaaaagaacttaaaaccgctgcggcatatatcagagtatctacagaccgacaaacc

SEQ ID NO: 20090 - DNA, 260 bp, Unknown; identical to SEQ ID NO: 20032
  Description of Unknown: LeftRegion for integrase B7091 sequence

SEQ ID NO: 20091 - DNA, 260 bp, Unknown
  Description of Unknown: LeftRegion for integrase B7092 sequence
ttgtggactataaaaaagcacttaatttataataaaaaaatcgccctctagtattggcgtactagagagcgacaccattacacagggtgcaatgatactatttcatagcaagtaatattgtatcatacccttgtaaatttttcaatataatttacaagggatttttgcacccttttttagataagaaaggagcaaaataaatggatgatttaaaaatcgcagctgcttacatcagagttagcacagatgatcagacagag

SEQ ID NO: 20092 - DNA, 260 bp, Unknown
  Description of Unknown: LeftRegion for integrase B7093 sequence
cgtgtgcaggagagcggctgccaggtcgtcgacgtgaagatgtcggcatgctccaacacgcgcgacacggacatgatcctctacagcttcaccgtgctctaccgctaggaaaagaaaaagcccacgcgggtcaaagcgttcgcaccgctcgccgcgtgggtcatgcaaaacctgcccatgaaaggaggtcgctccatattatgccaaaaactgcggtgatatacgcccgcttttcgtgcaacaagcagcgcgaggcctcc

SEQ ID NO: 20093 - DNA, 260 bp, Unknown
  Description of Unknown: LeftRegion for integrase B7094 sequence
aaaactttgcctctttggcaatttataaccaccccttaactttattctattcctacatatatattatgtgctctgcaaaatcaattaacagatgccaagcaacatatatagctatagcaaaaatcaacacatttttatctctgaaacatattatgacttatagcaaattcacttagattaagcgatagaaagtgattattatggaaaaagaacttaaaaccgctgcggcatatatcagagtatctacagaccgacaaacc

SEQ ID NO: 20094 - DNA, 260 bp, Unknown
  Description of Unknown: LeftRegion for integrase B7095 sequence
aagaggacaggcaacagctagattaatttataataaaaaatcgccctctggtgctggaacactagagagcgacaccattacacagggtgcaatgatactatttcatagcaattaatattgtatcatacccttgtaaatttttcaatataatttacaagggatttttgcacccttttttagataagagaggagcaaaataaatggatgatttaaaaatggcagctgcttacatcagagttagcacagatgatcagacagag

SEQ ID NO: 20095 - DNA, 260 bp, Unknown
  Description of Unknown: LeftRegion for integrase B7096 sequence
cttcgtttttctacttaatgttcttaaagatattctttttttatctcgcatttcacgtattttaatttctatcatatcctttttcctttcgttcattttagtctccccaaaattggcgtttttatatgatagaaatctgcttatttatttataactaaaaagtaacttattaaaaaaaaatttttaaaaaattatattttatgagtaaatccaaaatttattgtttaaaatatttatatactataacatttagcaaaggg

SEQ ID NO: 20096 - DNA, 260 bp, Unknown
  Description of Unknown: LeftRegion for integrase B7097 sequence
taggaagcttgggaaaaatagtaataaaaaggttcttcaaatggatctagatgggaatgtggtaaaagagtggaacagtatgacggatgctagtaaaactctgaaaatcaatctttcttgtatttcaatgtgctgcaaaggtacaagaaaaaaggccggcgggtttgcttggaagcattctgaatgcggaggtgactcgaatgattaggaaagtcgccatatatgcacgagtgagcaccatgaatcaagctgaggaagga

SEQ ID NO: 20097 - DNA, 260 bp, Unknown; identical to SEQ ID NO: 20034
  Description of Unknown: LeftRegion for integrase B7098 sequence

SEQ ID NO: 20098 - DNA, 260 bp, Unknown
  Description of Unknown: LeftRegion for integrase B7099 sequence
aaatatgctgaaatgtcaaatagaaaaaacgccccagtgctaccaacaccagggcaaccgatacatccggagatgcatacatattacataagcaataatattgtatcatctccggagcagccatgcaagcggaacaaaagttcgctggctgttatttttgtaccccaaaatcaatatgatatataagaggtgataaaataatgtccgaaaatgatacaaaacaactgcagaccggcgccctctacatccgcgtcagtacc

SEQ ID NO: 20099 - DNA, 260 bp, Unknown
  Description of Unknown: LeftRegion for integrase B7100 sequence
taggacgcttggaaaaaatagtaataaaaaggttctgcaaatggacctagacgggaatgtggtaaaagagtggaatagtatgacggatgctagtaaaactctgaaaattaacctttcttgtatttcaatgtgctgcaaaggtgcaagaaaaaaagctggcggttttgcttggaagtattctgaatgcgggggtgactcgaatgattaggaaagtcgccatatatgcacgagtgagcaccacgaatcaagctgaggaagga

SEQ ID NO: 20100 - DNA, 260 bp, Unknown
  Description of Unknown: LeftRegion for integrase B7101 sequence
aaacgcccagcaggtcatggtcatgctgggcgaaattgaacagtataatagacaacagaatgcaaagcctgctgatgaaaaagttatatctatccctgagcagataaaggaatacaaaagcctgctcgattgcggagctataacgcaggaagaatacgatattaagaaaaaagagttattgaagtcttaaggagaacactatgagcaatgcagttatatatgctagatactcttcggataagcaatccgaagaaagtatt

SEQ ID NO: 20101 - DNA, 260 bp, Unknown
  Description of Unknown: LeftRegion for integrase B7102 sequence
cgaacatatgtttatttaaggagataaaaaagaactctctctaaggaaaagttcttctttgtaccttaccatctttgccaatgggtaaatccaattactaaaagatgtctcccacaactgtggaagacattgaatataacattggctagcactagtatatcattttttagataagccttacaaaaatggaggaaattcatatgcctaaagttgcaatctatgctcgtgtctctactcttaatcaagctgaagaaggttac

SEQ ID NO: 20102 - DNA, 260 bp, Unknown; identical to SEQ ID NO: 20031
  Description of Unknown: LeftRegion for integrase B7103 sequence

SEQ ID NO: 20103 - DNA, 260 bp, Unknown
  Description of Unknown: LeftRegion for integrase B7104 sequence
cacccgtgacctcgtcctccgctgcttcgcccgggctcatctgaacgctgagaaggtaaagacagaaaagggaaagcggagtcagttcgagaagttccagagctccctggagccgtacttcttccggatgtcaaaagagaacgcggagctggtgcaggtgctccacgatcaggaggttgcaaagttaggaggctgataccatgcgcggcgtcatttatgcgagatattcaccaggcccgcaccagacggagcagtccatc

SEQ ID NO: 20104 - DNA, 260 bp, Unknown
  Description of Unknown: LeftRegion for integrase B7105 sequence
ttccctgttaaagacttgaagaacccttcaagcatttcgtcaatgcgtctaaaattcagcggtaacaatcaaaatcacattcttgatgaccatgattacgacattactttgcactttaattaaataagtttaaacccgtcgaaatcgacgggtttaaaaagtatctgcaaagaacacacattcgataaaggaggcaaacaatgaaagtagctgtctacattcgagtatcaacactagaacaggccgaagaaggatactcc

SEQ ID NO: 20105 - DNA, 260 bp, Unknown
  Description of Unknown: LeftRegion for integrase B7106 sequence
gaaggttgaccaaataatagaaagtaacaaataaaaaaaatcgccctctagtattggcgtactagagagcgacaccattacacagggtgcaatgatactaattcatagcaagtaatattgtatcatacccttgtaaatttttcaatataatttacaagggatttttgcacccttttttagataagaaaggagcaaaataaatggatgatttaaaaatcgcagctgcttacatcagagttagcacggatgatcagacagag

SEQ ID NO: 20106 - DNA, 260 bp, Unknown
  Description of Unknown: LeftRegion for integrase B7107 sequence
cctatttttacgaattggtattaattaaataaaaaaaaatcgtcctctggtacggcaataccaaaggacgatcatcattacacagggtgcaatgatactaacacttagcaagtaatattgtatcatacccttgtaaatttttcaatataatttacaagggatttttgcacccttttttagataagaaaggagcaaaataaatggatgatttaaaaatcgcagctgcttacatcagagttagcacagatgatcagacagag

SEQ ID NO: 20107 - DNA, 260 bp, Unknown
  Description of Unknown: LeftRegion for integrase B7108 sequence
attataactttttgcaggcgcaaaatatctcagaacagatgctgaagcttggacttatttccttgtcggagttcaacaaattaactgaaataaaccgtaaaacattctccccgttctgggttgaaattatgcccaaaattccttgatatataagggattcagagctaatatgtgacactaacgaagggaggtgaactaccgtgaagaaggtaaccaaaatcgacggtgtacaaaagaataccgccataaatagcaagctc

SEQ ID NO: 20108 - DNA, 260 bp, Unknown
  Description of Unknown: LeftRegion for integrase B7109 sequence
ctatttttacgaattacctaaaaaaatataataaaaaatcgcccttcggtgttggtagcaccaaaggacgataatcattacacagggtgcaatgatactaacacttagcaagtaatattgtatcatacccttgtaaatttttcaatataatttacaagggatttttgcacccttttttagataaggaaggagcaaaataaatggatgatttaaaaatcgcagctgcttacatcagagttagcacagatgatcagacagag

SEQ ID NO: 20109 - DNA, 260 bp, Unknown
  Description of Unknown: LeftRegion for integrase B7110 sequence
ttccaaaacactcataataaaaaccgcccctggcgccaaccaggaacggcttttccatagattttctcttaccggacgctccggaaagatacaatcagcttgaacacctgaattatatcatttccagagcgtcctgacaaggggcgttatttttgcacccaaaatcacatagattgtcactacatgaaggagatgatataatgctgataggagctgcttatatccgtgtcagcacggatgaccagctggatctgagtcct

SEQ ID NO: 20110 - DNA, 260 bp, Unknown
  Description of Unknown: LeftRegion for integrase B7111 sequence
gatatttgcatatcctgcacaatttcaataaaaaatagataaataaaaattccccaggtgctggaaacacctgagggaatgcaatacatcaagagccttaaacaaaagcctaagtctttgatataatgccctaagcaagcatattatatcataaaggctctcgatgtacaatttcaaattgtataaaggagtgatgttttatgaagactgtatgcgcttatatcagagtttctacagattcacaggaagaatactcacca

SEQ ID NO: 20111 - DNA, 260 bp, Unknown
  Description of Unknown: LeftRegion for integrase B7112 sequence
tactgaatttgtcaaacatgaaaaaccgcccctggctgcaaccaggaacggcttttgatagattttctctcgccggatgctccggaagatacaatcagcttagacacctgaattatatcatttccagagcgtcctgacaaggggcgttatttttgcacccaaaatcacatagattgtcactacatgaaggagatgatataatgctgataggagctgcttatatccgtgtcagcacggatgaccagctggatctgagtcct

SEQ ID NO: 20112 - DNA, 260 bp, Unknown
  Description of Unknown: LeftRegion for integrase B7113 sequence
tcagaattgcggcaactcttggaaagcatcataattacataaataaaaatcccccaggtgctggaaacacctgagggaacgcaatacatcaagagccttaaacaaaagcctaagtctttgatataatgccctaagcaagcatattatatcataaaggctctcgatgtacaatttcaaattgtataaaggagtgatgttttatgaagactgtatgcgcttatatcagagtttctacagattcacaggaagaatactcacca

SEQ ID NO: 20113 - DNA, 260 bp, Unknown
  Description of Unknown: LeftRegion for integrase B7114 sequence
ctgaatttgtcaaacatgaaaaaccgcccctggcggcaaccaggaacggcttttccatagattttctcttaccggacgctccggaaagatacaatcagcttgaacacctgaattatatcatttccagagcgtcctgacaaggggcgttatttttgtacccaaaatcacatagattgtcactacatgaaggagatgatataatgctgataggagctgcttatatccgtgtcagcacggatgaccagctggatctgagccct

SEQ ID NO: 20114 - DNA, 260 bp, Unknown
  Description of Unknown: LeftRegion for integrase B7115 sequence
agatccgtgccaacagacaggagttgcagggggataaaggccaaactgcgggttgagaaggtcatacccattgatctgctcagacgcaagagagccttggaggtgatattacgaaagcggtaatctatgccagatacagctcccacagccagcgggaggagtccatagaaggtcagctccgggagtgtcacgagtttgccttgaagaatggatttacgatcataaacgaatactgtgaccgggcgctctccggcaagacc

SEQ ID NO: 20115 - DNA, 260 bp, Unknown
  Description of Unknown: LeftRegion for integrase B7116 sequence
gctagccaaaagctcaacggaacaatggaagttaaggttaaataagacaacaaaaaagccctacactcaccgtcgccaaacttagagtgtagagcaagcatcacagaaaataaaaacgctagacaaccagcttaaaacataatcgaggttatgcgttcttttttctgtacccattttatcaaaaacgaggtacaaacacaatgcataaagtagctatctatgtccgagtatcaaccacatcgcaggttgatgagggctat

SEQ ID NO: 20116 - DNA, 260 bp, Unknown
  Description of Unknown: LeftRegion for integrase B7117 sequence
acaaatacaaagatcaaattcaaagtattataaaattgtatctataataaaataaaaatcccccaggtgctggaaacacctgagggaacgcaatacatcaagagccttagtcaaagactttgatataatgccctaagcaagcatattatatcataaaggctctcgatgtacaatttcaaattgtataggagtgatgttttatgaagactgtatgcgcttatatcagagtttctacagattcacaggaggaatactcacca

SEQ ID NO: 20117 - DNA, 260 bp, Unknown
  Description of Unknown: LeftRegion for integrase B7118 sequence
aatcgtcacgccctcctgatcttccagcaggcggacgagcgtcgcaagcatctgctccgccgtcggcgcgttctccttcgcaaaaagacggtcagcatccatccgcttcacctccccggtggcatataggtatgggtgcgcccgtagctttatgaatgcgcgcagcggcagccatcgccataggaaggtggaaggaagaaatgacgaatcaggcagaaaaaacaagctacatcgagaacgtggcggcgtacattcgcgtc

SEQ ID NO: 20118 - DNA, 260 bp, Unknown
  Description of Unknown: LeftRegion for integrase B7119 sequence
cttccaaaacactcataataaaaaccgcccctggcagcaaccaggaacggcttttccatagattttctcttaccgggcgctccggaagatacaatcagcttgaacacctgaattatatcatttccagagcgtcctgacaaggggtgttatttttgcacccaaaatcacatagattgtcactacatgaaggagatgatatcatgctgataggagctgcttatatccgtgtcagcacggatgaccagctggatctgagccct

SEQ ID NO: 20119 - DNA, 260 bp, Unknown
  Description of Unknown: LeftRegion for integrase B7120 sequence
cggaaaaaaagtattccttgcaattttaacacgcactgacgaagatttaggcgaaatcaatattaaaaagagcgaactactttataataactcagaccataacataacagctaaaattatagaaatcaccggtggcaaaccacctaaaaagtattatggctgtaatataaaagttacaatagaataaagaaggtgattaaatgaaatatgccgcagcatacatcagagtatctgatgaccggcaggatgaatactccccg

SEQ ID NO: 20120 - DNA, 260 bp, Unknown
  Description of Unknown: LeftRegion for integrase B7121 sequence
catctatctcataccataaacactgcttgccgttaatcggtatgtgaaccctgactgcaagtttctgacgatttgccatatttctcagctcctttttatattctatgtcacacatcagtacttgtgttctaaaaaaaacagctttcaaaatgatatgttaaagcaacagcatacagcatattaatatatgggtggataaaatgagcaaagaacttaaaaacgctgcggcatatataagagtatcaaccgaccgacaaacc

SEQ ID NO: 20121 - DNA, 260 bp, Unknown
  Description of Unknown: LeftRegion for integrase B7122 sequence
aatcgtcacgccctcctggtcttccagcaggcggacgagcgccgcaagcatttgctccgccgtcggcgcgttctccttcgcaaaaagacggtcagcatccatccgcttcacctccccggtggcatataggtatgggtgcgcccgtagctttatgaatgcgcgcagcggcagccatcgccataggaaggtggaaggaagaaatgacgaatcaggcagaaaaaacaagctacattgagaacgtggcggcgtacatccgcgtc

SEQ ID NO: 20122 - DNA, 260 bp, Unknown
  Description of Unknown: LeftRegion for integrase B7123 sequence
aaatacaaagatcaaattcaaagtattataaaattgtatctataataaaataaaaaacccccaggtgctggaaacacctgagggaacgcaatacatcaagagccttagtcaaagactttgatataatgccctaagcaagcatattatatcataaaggctctcgatgtacaatttcaaattgtataaaggagtgatgttttatgaagactgtatgcgcttatatcagagtttctacagattcacaggaagaatactcacca

SEQ ID NO: 20123 - DNA, 260 bp, Unknown
  Description of Unknown: LeftRegion for integrase B7124 sequence
atcgttttagatgctaatgcgaaagtcattgcacaggagcaaaacggtaaaatggttttagacaaataaaaaaagccccacgctctcaaactttggcgagtctgagcgtgaggcagtcaagataaggaaaggcttcaaaatgaatattttgaaaggtgtctttctatactctattttagcagaaagtgagtataaagacaatgaataaagtagcattatatgtgcgcgtgtcaactacttctcagttagaagaggggtac

SEQ ID NO: 20124 - DNA, 260 bp, Unknown
  Description of Unknown: LeftRegion for integrase B7125 sequence
cggaaaaaaagtattccttgcaattttaacacgcactgacgaagatttaggcgaaatcaatattaaaaagagcgaactactttataataactcagaccataacataacagctaaaattatagaaatcaccggtggcgaaccacctaaaaagtattatggctgtaatataaaagttacaatagaataaagaaggtgattaaatgaaatatgccgcagcatacatcagagtatctgatgaccggcaggatgaatactccccg

SEQ ID NO: 20125 - DNA, 260 bp, Unknown
  Description of Unknown: LeftRegion for integrase B7126 sequence
cggaaaaaaaatattccttgcaattttaacacgcactgacgaagatttaggcgaaatcaatattaaaaagagcgaactactttataataactcagaccataacataacagctaaaattatagaaatcaccggtggcgaaccacctaaaaagtattatggctgtaatataaaagttacaatagaataaagaaggtgattaaatgaaatatgccgcagcatacatcagagtatctgatgaccgtcaggatgaatactccccg

SEQ ID NO: 20126 - DNA, 260 bp, Unknown
  Description of Unknown: LeftRegion for integrase B7127 sequence
atttatttgtcaaatgtgaaaaaccgcccctggctgcaaccaggaacggcttttccatagattttctcttaccggacgctccggaaagatacaatcagcttgaacacctgaattatatcatttccagagcgtcctgacaaggggcgttatttttgcactcaaaatcacatagattgtcactacatgaaggagatgatataatgctgataggagctgcttatatccgtgtcagcacggatgaccagctggatctgagtcct

SEQ ID NO: 20127 - DNA, 260 bp, Unknown; identical to SEQ ID NO: 20124
  Description of Unknown: LeftRegion for integrase B7128 sequence

SEQ ID NO: 20128 - DNA, 260 bp, Unknown
  Description of Unknown: LeftRegion for integrase B7129 sequence
tctttgaatactatattcaaaacaacttcaatgaagacgaattagaatttttaaaaaatgatataaataaatgccgaaataattttaatgaattatacaattttttagaaattgaatatgcttgtaataaatgcgtttggagagaaaatgcagaagtgtttttaaaatatgacataatcaaattcaaagaaggtgattaaatgaaatatgccgcagcatacattagagtatctgatgaccggcaggatgaatactccccg

SEQ ID NO: 20129 - DNA, 260 bp, Unknown
  Description of Unknown: LeftRegion for integrase B7130 sequence
ggacgtttgtatgcccgcccgattataagaacattcctttcaaggataagcgcatagaagccttttacaaggacggatttgccgttatttccgattttctgcactcgataggatatattgtaggcatcaatatcccgaagcgctacagacggcatttcgatgtgttgagcagcgataattattaaaaagggggtataaccatgcaaaccgcagcggcatatataagagtatcaaccgatgatcagatcgagtactccccc

SEQ ID NO: 20130 - DNA, 260 bp, Unknown
  Description of Unknown: LeftRegion for integrase B7131 sequence
gcttctgctttctttaatacaatagtttttctaatatacgcttttattacatttggatatttttcatttttatttaacgatgataaaaatatttatgtactgttctttgtttatctcccagcacctataatttcaacatatatgttatatgtttttatagatgatattgttactgaaaaaaatcaaaagaaggtgattaaatgaaatatgccgcagcatacataagagtatctgatgacaggcaagacgaatactccccg

SEQ ID NO: 20131 - DNA, 260 bp, Unknown
  Description of Unknown: LeftRegion for integrase B7132 sequence
aaatatactcgtatcgattttaatttttctaacttacatttacataagctacgtttatttttcatttttatttaaaagtgaaacgaacatttactttttatttttcttttatttgccagcgccgataatttcgacatatatattatatatttttataagagatactattgcagaaaagaaaaataaaagaaggtgattaaatgaaatatgccgcagcatacatcagagtatctgatgaccgtcaggatgaatactccccg

SEQ ID NO: 20132 - DNA, 260 bp, Unknown
  Description of Unknown: LeftRegion for integrase B7133 sequence
ggacgtttgtatgcccgcccgattataagaacattcctttcaaggataagcgcatagaagccttttacaaggacggatttgccgttatttccgactttctgcactcaataggatatcttgtaggtatcaatattccgaagcgatacaggcggcatctggacgtattgagcagtgataattattaaagtggggtgatgaccatgcagaccgcagcggcatatataagagtatcaaccgatgatcagatcgagtactccccc

SEQ ID NO: 20133 - DNA, 260 bp, Unknown
  Description of Unknown: LeftRegion for integrase B7134 sequence
tctttgaatactatattcaaaacaacttcaatgaagacgaattagaatttttaaaaaatgatataaataaatgccgaaataattttaatgaattatacaattttttagaaattgaatatgcttgtaataaatgcgtttggagagaaaatgcagaagtgtttttaaaatatgacataatcaaattcaaagaaggtgattaaatgaaatatgccgcagcatacatcagagtatctgatgaccgtcaggatgaatactccccg

SEQ ID NO: 20134 - DNA, 260 bp, Unknown
  Description of Unknown: LeftRegion for integrase B7135 sequence
aaaaatactggaagcacttttgatttttctaacatatatttacataacatatgtatatttttctcttttatttgaaaaagatttgaacatttattttctctttttcttttacttgccggcgccaataatctcaacatatatattatatatttttacaaaagatactatcgcggaaaagaaaaatagaagaaggtgattaaatgaaatatgccgcagcatacatcagagtatctgatgaccggcaggatgaatactccccg

SEQ ID NO: 20135 - DNA, 260 bp, Unknown
  Description of Unknown: LeftRegion for integrase B7136 sequence
aatcgtcacgccctcctggtcttccagcaggcggacaagcgtcgcaagcatctgctctgccgtcggcgcgttctccttcgcaaaaagacggtcagcatccatccgcttcacctccccggtggcatataggtatgggtgcgcccgtagctttatgaatgcgcgcagcggcagccatcgccataggaaggtggaaggaagaaatgacgaatcaggcagaaaaaacaagctacatcgagaacgtggcggcgtacattcgcgtc

SEQ ID NO: 20136 - DNA, 260 bp, Unknown
  Description of Unknown: LeftRegion for integrase B7137 sequence
acaaataaatgcctactcaattgagtaggcatttttagttttacaacttaaaaattattaaataaaaaatcccccggctgttggagcagccgagggaaaattgaatacagttacacctgaagcataaccgcatcaacccgcaaattgattataccacgcttcaggttagtttgtcatacctaaaaggagcgtgtttttttatgcctaaaattaaagtaggtatatatatccgtgtatcgacccaagaacaagccaatgaa

SEQ ID NO: 20137 - DNA, 260 bp, Unknown; identical to SEQ ID NO: 20119
  Description of Unknown: LeftRegion for integrase B7138 sequence

SEQ ID NO: 20138 - DNA, 260 bp, Unknown; identical to SEQ ID NO: 20115
  Description of Unknown: LeftRegion for integrase B7139 sequence

SEQ ID NO: 20139 - DNA, 260 bp, Unknown
  Description of Unknown: LeftRegion for integrase B7140 sequence
ctgctttctttaatacaatagtttttctaatatacgcttttattacatttggatatttttcatttttatttaacgatgataaaaatatttatgtactgttctttgtttatctcccagcgccgataatttcgacatatatattatatatttttataagagatactattgcagaaaagaaaaaatcaaaagaaggtgattaaatgaaatatgccgcagcatacatcagagtatctgatgaccggcaggatgaatactccccg

SEQ ID NO: 20140 - DNA, 260 bp, Unknown
  Description of Unknown: LeftRegion for integrase B7141 sequence
aatcgtcacgccctcctggtcttccagcaggcggacgagcgtcgcaagcatctgctctgccgtcggcgcgttctccttcgcaaaaagacggtcagcatccatccgcttcacctccccggtggcatataggtatgggtgcgcccgtagctttatgaatgcgcgcagcggcagccatcgccataggaaggtggaaggaagaaatgacgaatcaggcagaaaaaacaagctacatcgagaacgtggcggcgtacatccgcgtg

SEQ ID NO: 20141 - DNA, 260 bp, Unknown
  Description of Unknown: LeftRegion for integrase B7142 sequence
gtatagctatcctcatgttcaaaaagcatatatttttgcgaatgaaacatctttttgcactctatcattgttatttaagcgtctttttataaaaatccccctcatcgactggacctcgatgaaggggcagggcagataattcttgtggtgcaaggtattattctgccctttcataatatcgtaatgaaagggtgatgtcaatgaaaattgctgcagcctatgtgcgcgtcagcaccgatgaccagttagaatactctccg

SEQ ID NO: 20142 - DNA, 260 bp, Unknown
  Description of Unknown: LeftRegion for integrase B7143 sequence
acggaaaaaaagtattccttgcaattttaacacgcactgacgaagatttaggcgaaatcaatattaaaaagagtgaactactttataataactcagaccataacataacagctaaaatcataaaaattacaggtggagagcctcctaaaacatattatggctgcaatattaaggtaacaatagattaggtaggtgattaaatgaaatatgccgcagcatacatcagagtatctgatgaccggcaggatgaatactccccg

SEQ ID NO: 20143 - DNA, 260 bp, Unknown
  Description of Unknown: LeftRegion for integrase B7144 sequence
aaaaatactggaagcacttttgatttttctaacatatatttacataacatatgtatatttttctcttttatttgaaaaagatttgaacatttattttctctttttcttttacttgccagcgccaataatctcaacatatatattatatatttttacaaaagatactatcgcggaaaagaaaaatagaagaaggtgattaaatgaaatatgccgcagcatacatcagagtatctgatgaccggcaggatgaatactccccg

SEQ ID NO: 20144 - DNA, 260 bp, Unknown
  Description of Unknown: LeftRegion for integrase B7145 sequence
gcaaattcaatcttgaaacaggcatctaattagttttaatatctgactgtttataataaaaaaaatcccccgtgcgccaacacgagggatcagcagtacatcaagagtctaaaccctatgatataatgccctaagcaagcatattatatcataaaggctctcgatgtacaatttcaaattgtataaaggagtgatgttttatgaagactgtatgcgcttatatcagagtttctacagattcacaggaagaatactcacca

SEQ ID NO: 20145 - DNA, 260 bp, Unknown
  Description of Unknown: LeftRegion for integrase B7146 sequence
cttccaaaacactcataataaaaaccgcccctggcggcaaccaggaacggcttttccatagattttctcttaccgggcgctccggaagatacaatcagcttgaacacctgaattatatcatttccagagcatcctgacaaggggcgttatttttgcacccaaaatcacatagattgtcactacatgaaggagatgatatcatgctgataggagctgcttatatccgtgtcagcacggatgaccagctggatctgagccct

SEQ ID NO: 20146 - DNA, 260 bp, Unknown
  Description of Unknown: LeftRegion for integrase B7147 sequence
gtgttctttggccaattgttattatcttaatcatattagctttatatttatggttattttaaaataaaaaatcccccgactgctccaacagccgagggaaaattgaatagaatacctgaagtaggtatacactcaatccgcaaattgattataccacgcttcaggttagctttgctatacccaaaggagcgtgtttttttatgcctaaagtaaaagtaggtatttatatccgggtatctacacaagagcaagccaccgaa

SEQ ID NO: 20147 - DNA, 260 bp, Unknown
  Description of Unknown: LeftRegion for integrase B7148 sequence
acggaaaagatgtattccttgcaattttaacacgcactgacgaagatttaggcgagattaacgctcaaaaaagcgaactcatttataataactccgaccataaaatcacagctaaaattgtagaaatcaccggtggcgaaccacctaaaaagtattatggctgtaatattaaggtaacaatagattaggtaggtgattaaatgaaatatgccgcagcatacatcagagtatctgatgaccggcaggatgaatactctccg

SEQ ID NO: 20148 - DNA, 260 bp, Unknown
  Description of Unknown: LeftRegion for integrase B7149 sequence
gatatttgcatatcctgcacaatttcaataaaaaatagataaataaaaatcccccaggtgctggaaacacctgagggaacgcaatacatcaagagccttaaacaaaagcctaagtctttgatataatgccctaagcaagcatattatatcataaaggctctcgatgtacaatttcaaattgtataaaggagtgatgttttatgaagactgtatgcgcttatatcagagtttctacagattcacaggaagaatactcacca

SEQ ID NO: 20149 - DNA, 260 bp, Unknown
  Description of Unknown: LeftRegion for integrase B7150 sequence
aatttatttgtcaaacataaaaaccgcccctggctgcaaccaggaacggcttttccatagattttctcttaccggacgctccggaaagatacaatcagcttgaacacctgaattatatcatttccagagcgtcctgacaaggggcgttatttttgcacccaaaatcacatagattgtcactacatgaaggagatgatataatgctgataggagctgcttatatccgtgtcagcacggatgaccagctggatctgagtcct

SEQ ID NO: 20150 - DNA, 260 bp, Unknown
  Description of Unknown: LeftRegion for integrase B7151 sequence
ctttaaaaaatatactcgtatcgattttaatttttctaacttacatttacataacttgcgtttatttttcatttttatttaaaagtgaaacgaacatttactttttatttttcttttatttgccggcgccgataatttcgacatatatattattataagagatactattgcagaaaagaaaaataaaagaaggtgattaaatgaaatatgccgcagcatacatcagagtatctgatgaccggcaggatgaatactccccg

SEQ ID NO: 20151 - DNA, 260 bp, Unknown
  Description of Unknown: LeftRegion for integrase B7152 sequence
acttccaaaacactcataataaaaaccgcccctgactgcaaccaggaacggcttttgatagattttctcttaccggacgctccggaagatacaatcagcttgaacacctgaattatatcatttccagagcgtcctgacaaggggcgttatttttgcacccaaaatcacatagattgtcactacatgaaggagatgatataatgctgataggagctgcttatatccgtgtcagcacggatgaccagctggatctgagtcct

SEQ ID NO: 20152 - DNA, 260 bp, Unknown; identical to SEQ ID NO: 20136
  Description of Unknown: LeftRegion for integrase B7153 sequence

SEQ ID NO: 20153 - DNA, 260 bp, Unknown
  Description of Unknown: LeftRegion for integrase B7154 sequence
gcagcaaggagaaaaagcaaaaagtatatagtatggatctcaatgctttcgatagccttatcgaaagggtagaagcagcaaaagaataaaaaaatcccccctcatcgactggacctcgatgaaggggcagggcagataattcttgtggtgcaaggtattattctgccctttcataatatcgtaatgaaagggtgatgtcaatgaaaattgctgcagcctatgtgcgcgtcagcaccgatgaccagttagaatactctcca

SEQ ID NO: 20154 - DNA, 260 bp, Unknown; identical to SEQ ID NO: 20119
  Description of Unknown: LeftRegion for integrase B7155 sequence

SEQ ID NO: 20155 - DNA, 260 bp, Unknown
  Description of Unknown: LeftRegion for integrase B7156 sequence
tatgtgcatgacaaagacgaggttcaacttgcgcatgaagaaaatggcgcgatggtttacgacaaataaaaaaagccccacgctctcaaactttggcgagtctgagcgtgaggcagtcaagataaggaaaggcttcaaaatgaatattttgaaaggtgtctttctatactctattttagcagaaagtgagtataaagacaatgaataaagtagcattatatgtgcgcgtgtcaactacttctcagttggaagagggctac

SEQ ID NO: 20156 - DNA, 260 bp, Unknown
  Description of Unknown: LeftRegion for integrase B7157 sequence
atttttgtagacctcatgatttatcatggggtctattttttaataaaaatcccccaggtgctggaaacacctgagggaacgcaatacatcaagagccttaaacaaaagcctaagtctttgatataatgccctaagcaagcatattatatcataaaggctctcgatgtacaatttcaaattgtataaaggagtgatgttttatgaagactgtatgcgcttatatcagagtttctacagattcacaggaagaatactcacca

SEQ ID NO: 20157 - DNA, 260 bp, Unknown
  Description of Unknown: LeftRegion for integrase B7158 sequence
aaatttacacaagaagaagctgactacgctgtccaaaatctgaaataagacaataaaaaagccctataatctccctcgccaaagttagattatagagcttatgcatcacagaaaaaaacaaggtctaaccagtaaaaacgaattgaggttatactttcttttttctgtacccattttatcaaaaacgaggtacaaacacaatgcataaagtagctatctatgtccgagtatcaaccacatcgcaggttgatgagggctat

SEQ ID NO: 20158 - DNA, 260 bp, Unknown
  Description of Unknown: LeftRegion for integrase B7159 sequence
aatcattttgttgtggtttttgttgtggctcaaacccttgtaaaatggggatttcttatataaatataacacttaacatatatattctctatattatagaaaaaaataatatatatagtatataagtatataaaaatatatgtatataagagttggcataaaaaagtgttttttgttagggtgaaaggaagtgaagaagaatgaaaagaaaaatggtggttgcaatatatattagagtgtcgacacaagagcaggcatta

SEQ ID NO: 20159 - DNA, 260 bp, Unknown; identical to SEQ ID NO: 20131
  Description of Unknown: LeftRegion for integrase B7160 sequence

SEQ ID NO: 20160 - DNA, 260 bp, Unknown
  Description of Unknown: LeftRegion for integrase B7161 sequence
actgaatttgtcaaacatgaaaaaccgcccctggcggcaaccaggaacggcttttccgtagattttctcttaccgggcgctccggaagatacaatcagcttagacacctgaattatatcatttccagagcgtcctgacaaggggcgttatttttgcacccaaaatcacatagattgtcactacatgaaggagatgatataatgctgataggagctgcttatgtacgagtcagcacggatgaccagctggatctgagtcct

SEQ ID NO: 20161 - DNA, 260 bp, Unknown
  Description of Unknown: LeftRegion for integrase B7162 sequence
aatcgtcacgccctcctggtcttccagcaggcggacgagcgtcgcaagcatctgctctgccgtcggcgcgttctccttcgcaaaaagacggtcagcatccatccgcttcacctccccggtggcatataggtatgggtgcgcccgtagctttatgaatgcgcgcagcggcagccatcgccataggaaggtggaaggaagaaatgacgaatcaggcagaaagaacaagctacatcgagaacgtggcggcgtacatccgcgtc

SEQ ID NO: 20162 - DNA, 260 bp, Unknown
  Description of Unknown: LeftRegion for integrase B7163 sequence
aatcgtcacgccctcctggtcttccagcaggcggacgagcgtcgcaagcatctgctccgccgtcggcgcgttctccttcgcaaaaagacggtcagcatccatccgcttcacctccccggtggcatataggtatgggtgcgcccgtagctttatgaatgcgcgcagcggcagccatcgccataggaaggtggaaggaagaaatgacgaatcaggcagaaaaaacaagctacattgagaacgtggcggcgtacatccgcgtc

SEQ ID NO: 20163 - DNA, 260 bp, Unknown
  Description of Unknown: LeftRegion for integrase B7164 sequence
gcagctcgaacgaaagcaacagaaacgtcttaaataaaacaaaaccgcccggtgctggtaacaccgaacggtatgttgaatagatttctcttgccggataaccggcgatgatataatccacccaagccaagtgaattatatcatctccagtgcgtcctgacaaggggcgtattttttgtactcttttttggaggtgctatatgaataaagttgcaatctatgtgcgcgtatccactcaggagcaggccaatgagggctac

SEQ ID NO: 20164 - DNA, 260 bp, Unknown
  Description of Unknown: LeftRegion for integrase B7165 sequence
aatcgtcacgccctcctggtcttccagcaggcggacgagcgtcgcaagcatttgctccgccgtcggcgcgttctccttcgtaaaaagacggtcagcatccatccgcttcacctccccggtggcatataggtatgggtgcgcccgtagctttatgaatgcgtgcagcggcagccatcgccataggaaggtggaaggaagaaatgacgaatcaggcagaaaaaacaagctacatcgagaacgtggcggcgtacatccgcgtg

SEQ ID NO: 20165 - DNA, 260 bp, Unknown
  Description of Unknown: LeftRegion for integrase B7166 sequence
acggaaaagatgtattccttgcaattttaacacgcactgacgaagatttaggcgagattaacgctcaaaaaagcgaactcatttataataactccgaccataaaatcacagctaaaattgtagaaatcaccggtggcgaaccacctaaaaagtattatggctgtaatattaaggtaacaatagattaggtaggtgattaaatgaaatatgccgcagcatacatcagagtatctgatgaccggcaggatgaatactccccg

SEQ ID NO: 20166 - DNA, 260 bp, Unknown; identical to SEQ ID NO: 20119
  Description of Unknown: LeftRegion for integrase B7167 sequence

SEQ ID NO: 20167 - DNA, 260 bp, Unknown
  Description of Unknown: LeftRegion for integrase B7168 sequence
aaaaatactggaagcacttttgatttttctaacatatatttacataacatatgtatatttttctcttttatttgaaaaagatttgaacatttattttttctttttcttttacttgccggcaccaataatctcaacatatatattatatatttttacgaaaaatactatcgcagaaaagaaaaataaaagaaggtgattaaatgaaatatgccgcagcatacatcagagtatctgatgaccggcaggatgaatactccccg

SEQ ID NO: 20168 - DNA, 260 bp, Unknown; identical to SEQ ID NO: 20155
  Description of Unknown: LeftRegion for integrase B7169 sequence

SEQ ID NO: 20169 - DNA, 260 bp, Unknown
  Description of Unknown: LeftRegion for integrase B7170 sequence
acggaaaaaaagtattccttgcaattttaacacgcactgacgaagatttaggcgaaatcaatattaaaaagagcgaactactttataataactcagaccataacataacagctaaaatcataaaaattacaggtggagagcctcctaaaacatattatggctgcaatattaaggtaacaatagattaggtaggtgattaaatgaaatatgccgcagcatacatcagagtatctgacgaccggcaggatgaatactccccg

SEQ ID NO: 20170 - DNA, 260 bp, Unknown
  Description of Unknown: LeftRegion for integrase B7171 sequence
aaatttatttgtcaaacataaaaaccgcccctggctgcaaccaggaacggcttttccatagattttctcttaccggacgctccggaagatacaatcagcttgaacacctgaattatatcatttccagagcgtcctgacaaggggcgttatttttgcacccaaaatcacatagattgtcactacatgaaggagatgatataatgctgataggagctgcttatatccgtgtcagcacggatgaccagctggatctgagtcct

SEQ ID NO: 20171 - DNA, 260 bp, Unknown; identical to SEQ ID NO: 19939
  Description of Unknown: LeftRegion for integrase B7172 sequence

SEQ ID NO: 20172 - DNA, 260 bp, Unknown
  Description of Unknown: LeftRegion for integrase B7173 sequence
tgtcctttgtttttttatgaacttttatacgaaatgcattgcggtttatttataatcagtctatacttaaataaaaatccccggcgggcaccggggacgaagcagtctctgaagtgactacctacatacatactataccacttcggagacagccttgcaatagcagggctgtatttttgtaccaaaaaggaggaatcaccatgcaaaaaagatgttttatttacatccgggtatccacccagcggcaggccgaagagggg

SEQ ID NO: 20173 - DNA, 260 bp, Unknown
  Description of Unknown: LeftRegion for integrase B7174 sequence
acggaaaaaaagtattccttgcaattttaacacgcactgacgaagatttaggcgaaatcaatattaaaaagagcgaactactttataataactcagaccataacataacagctaaaatcataaaaattacaggtggagagcctcctaaaacatattatggctgcaatattaaggtgacaatagattaggtaggtgattaaatgaaatatgccgcagcatacataagagtatctgacgacaggcaagacgaatactccccg

SEQ ID NO: 20174 - DNA, 260 bp, Unknown
  Description of Unknown: LeftRegion for integrase B7175 sequence
atggcggaggttttacaaaatcagaagtcaactacgctattaaacatttagaagacgaagattaaaataaaaaaagcccacgctcaaattttggacgaggagagcgtgagctaggaagtatacaagaaaaagccattaaatgggcgtttttcttgtacccattttatcatttttcaacgataattgaaagaggtacaaatatgaacaaagtagctatctatgtacgtgtatcaaccactaaccaagccgaagaaggctat

SEQ ID NO: 20175 - DNA, 260 bp, Unknown
  Description of Unknown: LeftRegion for integrase B7176 sequence
gatatttgcatatcctgcacaatttcaataaaaaatagataaataaaaatcccccaggtgctgaaaacacctgagggaacgcaatacatcaagagccttaaacaaaagcctaagtctttgatataatgccctaagcaagcatattatatcataaaggctctcgatgtacaatttcaaattgtataaaggagtgatgttttatgaagactgtatgcgcttatatcagagtttctacagattcacaggaagaatactcacca

SEQ ID NO: 20176 - DNA, 260 bp, Unknown
  Description of Unknown: LeftRegion for integrase B7177 sequence
acacaccatttttctgatttcaccaaaatggccataaaaacaaaaccgcccggtgctggtaacaccgaacggtatgttgaatagatttctcttgccggaataccggcgatgatataatccacccgaaccaagtgaattatatcatctccagtgcgtcctggcaaggggcgtattttttatactctttttggaggtgctatatgaaaaaagctgcaatctacgtcagagtatccacgcaggagcaggccacggagggctac

SEQ ID NO: 20177 - DNA, 260 bp, Unknown
  Description of Unknown: LeftRegion for integrase B7178 sequence
taatatcttttcaaatatgaaaaaccgcccctggcggcaaccaggaacggcttttccatagattttctcttaccgggcgctccggaagatacaatcagcttgaacacctgaattatatcatttccagagcatcctgacaaggggcgttatttttgcacccaaaatcacatagattgtcactacatgaaggagatgatatcatgctgataggagctgcttatatccgtgtcagcacggatgaccagctggatctgagccct

SEQ ID NO: 20178 - DNA, 260 bp, Unknown
  Description of Unknown: LeftRegion for integrase B7179 sequence
aaagattcatgtgtctttgagcctgtaatatttgcaaaagcaaaagaccgcccctgcgccaacaggaacggcctcttacatagattttctcttgtcaggataccctgaaaagtatgatctacatccaatccagattataccatttcagcggcatctcggcaagaggtgtattttttataccctttttcaggaggtgcaatatgaaaaaagttgcaatttatgtccgcgtgtccagccaagaacaggcgaacgaaggttat

SEQ ID NO: 20179 - DNA, 260 bp, Unknown
  Description of Unknown: LeftRegion for integrase B7180 sequence
atgtgcatgatacgaacgaggtacagcttgcacacgaagaaaatggcgtgatgatttacgacaaataaaaaagccccacgctctcaaagtttggcgacttcaagcgtgaggtttgaaaagataaagaaaggatttcaaaatgttttattttgaaagggtctttctgtactctattttaccagaaagagggtacaaagacaatgaataaagtagctgtttatgttcgagtctctactacttcccagttagaagagggatac

SEQ ID NO: 20180 - DNA, 260 bp, Unknown
  Description of Unknown: LeftRegion for integrase B7181 sequence
acttttgcttaccaagatgagaataatgattctatattgattgcatattcaacgaaaactaaagacgtaattcaaccaacattttaaataaaaaaacaccactcgccccgaccaaagtttgagtagtgtattatggctgacaacgaccacgaaggtctatttgtcatgccctattttaacataataggagctgaaataatatgaaaaccgctatttacgtaagagtttcaacaaatgaacaagctgaagaaggctattca

SEQ ID NO: 20181 - DNA, 260 bp, Unknown
  Description of Unknown: LeftRegion for integrase B7182 sequence
gttacttcatgctccaatatctaaaatcaaaacagaattaaaatgtaccgaaggatgtcaatcagaaggcggagcagaagcgacaagagtatttatccaacatccggagcaaatacaatacttcaaagattttattctacattgaagcagaaccgctctcgataaaattcgagggcggttattataaggagtgaatttatatgaaaatagcagctgcttatattcgtgtatcgacagaagaccaggtggaatattcacca

SEQ ID NO: 20182 - DNA, 260 bp, Unknown
  Description of Unknown: LeftRegion for integrase B7183 sequence
tcatggaaaagattcagggaaaataaattttaaataataaaaccgcccggtgctggaacaccgaacggtctttcgaatagatttttctctcgccggattgctccggattgatataatcacccgatacacgtgaattatatcatctccagtacgtcctggcaaggggcgtattttttatacccattttttggaggtgctatatgaaaaaagttgcaatttatgtcagagtatccacgcaggagcaggccgcggaaggttac

SEQ ID NO: 20183 - DNA, 260 bp, Unknown; identical to SEQ ID NO: 20178
  Description of Unknown: LeftRegion for integrase B7184 sequence

SEQ ID NO: 20184 - DNA, 260 bp, Unknown
  Description of Unknown: LeftRegion for integrase B7185 sequence
cggaaaagatgtattccttgcaattttaacacgcactgatgaagatttaggcgagattaacgctcaaaaaagtgaacttatttataataactccgaccataaaatcacagctaaaattgtagaaatcaccggtggcgaactacctaaaaagtattatggctgtaatataaaagttacaatagaataaagaaggtgattaaatgaaatatgccgcagcatacatcagagtatctgatgaccggcaggatgaatactccccg

SEQ ID NO: 20185 - DNA, 260 bp, Unknown; identical to SEQ ID NO: 20130
  Description of Unknown: LeftRegion for integrase B7186 sequence

SEQ ID NO: 20186 - DNA, 260 bp, Unknown; identical to SEQ ID NO: 20148
  Description of Unknown: LeftRegion for integrase B7187 sequence

SEQ ID NO: 20187 - DNA, 260 bp, Unknown
  Description of Unknown: LeftRegion for integrase B7188 sequence
aatttatttgtcaaacataaaaaccgcccctggctgcaaccaggaacggcttttccatagattttctcttaccggacgctccggaaagatacaatcagcttgaacacctgaattatatcatttccagagcgtcctgacaaggggcgttatttttgcacccaaaatcacatacactgtcactgcataaaggagatgatatcatgctgataggagctgcttacatccgtgtcagcacggatgaccagctggatctgagtcct

SEQ ID NO: 20188 - DNA, 260 bp, Unknown
  Description of Unknown: LeftRegion for integrase B7189 sequence
atcgttttagatgttaatgcgaaagttattgcacaggagcaagacggtaaaatgattttagacaaataaaaaaagccccacgctctcaaactttggcgagtctgagcgtgagggaatcgagataaggaaaggtttcaaaatgaatattttgaaaggtgtctttctatactctattttatcagaaatggaggggaaagacaatgaataaagtagcattatatgtgcgcgtgtctaccacttctcagttagaagaggggtac

SEQ ID NO: 20189 - DNA, 260 bp, Unknown
  Description of Unknown: LeftRegion for integrase B7190 sequence
ttgcggcgctgttgttttacatcgccatggatgtcagcaacgaaaacattggcctcatcagaggcggcagcgtttcgcccttggcgatgttgctttgcgttttcgcgctggcctccaccgccgccctgattatcttgcagggcagattgatagatagcaagaaggagaaaccgataaacgacaaaagggatgaatcgtaaatgtcaatcatagaagagcaagtcaaaagaaatcagtatatcgaggaagtcgccgcctat

SEQ ID NO: 20190 - DNA, 260 bp, Unknown
  Description of Unknown: LeftRegion for integrase B7191 sequence
gaaattgacggcttccgtccatgccctgagtgcatcgaataataaaaaaagccctaccctgcgccaacaggatagagccgataagcaggatatgcagtacataacccacccaacattggatattgtaccacatccctgccgataaatcaagcagggcatttttgcgcccttttttaagtacaatctatgggagtggtacaatgaaatatgcagcggcatatatccgcgtaagtgacgaccggcaggacgagtacagcccg

SEQ ID NO: 20191 - DNA, 260 bp, Unknown
  Description of Unknown: LeftRegion for integrase B7192 sequence
acgggtctactacgaccgtgaaaacaaccgcttgcagctgatcgcagagaacccaaggtatgcaccgctggtgtatacgggcgaggaactcaactatatccgcattctgggaaaagcggtaacgctgatgcgggagttgtgatatacataaaattgccctgccaaaaccggcagggcatcactatagaaaggagtgccccatgaaaatcgcagcggcgtacattcgtgtgtccacggacgaccagatcgaatactccccc

SEQ ID NO: 20192 - DNA, 260 bp, Unknown
  Description of Unknown: LeftRegion for integrase B7193 sequence
ggtctacaccggtacaacgctgcaaaaaatcgaacagattctggagaagtgcaaggcagccatgaccgaagtcgccattgtggaatatcaaccggcggcataacttgattgacttgtctactcaggtaggactgaaataagatcgcttgccccgccctgccgcccaccacggcagggcatcactatagaaaggagcacccatgaaaatcgcagctgcgtacattcgtgtgtccaccgacgaccagatcgaatactccccc

SEQ ID NO: 20193 - DNA, 260 bp, Unknown
  Description of Unknown: LeftRegion for integrase B7194 sequence
aaaataaaagccatattcttaatcatataaaaatataaaaagtcttaaaatgaagaattaatcatttaaaaaaataatttttaatattataattattaaggaggaaactatgaaaataaaagtcatttttaatgaagataattatgaagctgattattatagaaaaaaattaatatctaatataaaagaggtagaggataatgaaagattcaaagagtaagactgttattatatacaatagagtatctaccataatgcaa

SEQ ID NO: 20194 - DNA, 260 bp, Unknown
  Description of Unknown: LeftRegion for integrase B7195 sequence
aaaataaaagccatattcttaatcatataaaaatataaaaagtcttaaaataaagaattaatcatttaaaaaaataatttttaatattataattattaaggaggaaactatgaaaataaaagtcatttttaatgaagataattatgaagctgattattatagaaaaaaattaatatctaatataaaagaggtagaggataatgaaagattcaaagagtaagactgttattatatacaatagagtatctactataatgcaa

SEQ ID NO: 20195 - DNA, 260 bp, Unknown
  Description of Unknown: LeftRegion for integrase B7196 sequence
ttccaggcgttggccgggaagttagagtaagtcacaacaaaataaaaaaagccctaccctgcgccaacaggatagagccgataagcaggatatgcagtacataacccacccaacactggatattgtaccacatccctgccgataaatcaagcagggcatttttgcgcccttttttaagtacaatctatgggagtggtacaatgaaatatgcagcggcatatatccgcgtaagtgacgaccggcaagacgagtacagcccg

SEQ ID NO: 20196 - DNA, 260 bp, Unknown
  Description of Unknown: LeftRegion for integrase B7197 sequence
ttgtggcgctgatgttttacatcgccatggatgccagcaacgaagacattggcctcatcagaggcagcagcgtttcgcccttggcgatgttgctttgcgttttcgcgctggcctccaccgccgccctgattatcttgcagggcagattgatagatagtaagaaggagaaaccgataaacgacaaaagggatgaatcgtaaatgtcaatcatagaagagcaagtcaaaagaaatcagtatatcgaggaagtcgccgcctat

SEQ ID NO: 20197 - DNA, 260 bp, Unknown
  Description of Unknown: LeftRegion for integrase B7198 sequence
gatcgtacaccagaagaattagcggctttagataattaattattatggaggtcgcattgccaacaagagtgcaaattttgcctaagttcaattatctgttttaaagaaatcgaaatcgatcgggttaaaagaataatcccccaccggctgcaatcggtgggggaaacttaagttttatttttacctggaggtgctcagaaatggaaaacttaaaaatagcggcggcttacattcgagtgagtacccacgatcaggaggaa

SEQ ID NO: 20198 - DNA, 260 bp, Unknown
  Description of Unknown: LeftRegion for integrase B7199 sequence
gaaaataaaagctatattcttatcatataaaaatataaaaagtcttaaaacaaagaattaattatttaaaaaaataatttttaatattataattattaaggaggaaactatgaaaataaaagtcatttttaatgaagataattatgaagctgattattatagaaaaaaattaatatctaatataaaagaggtagaggataatgagagattcaaagagtaagactgttattatatacaatagagtatctaccataatgcaa

SEQ ID NO: 20199 - DNA, 260 bp, Unknown
  Description of Unknown: LeftRegion for integrase B7200 sequence
cgagcaggtataaaattgtttttttgacgccgacataacaaataaaaaaagccctaccctgcgccaacaggatagagccgataagcaggatatgcagtacataacccacccaacattggatattgtaccacatccctgccgataaatcaagcagggcatttttgcgcccttttttaagtacaatctatgggagtggtacaatgaaatatgcagcggcatatatccgcgtaagtgacgaccggcaggacgagtacagcccg

SEQ ID NO: 20200 - DNA, 260 bp, Unknown
  Description of Unknown: LeftRegion for integrase B7201 sequence
caggcgttgtccgggaagctggagtaaatcacaacaaaataaaaaaagccctaccctgcgccaacaggatagagccgataagcaggcgctgtgcgtacacataacccacccaacactggttattgtaccacagccctgccgaaaaatcaagcagggtatttttgcgcccttttttaagtacaatctatgggagtggtacaatgaaatatgcagcggcatatatccgcgtaagtgacgaccggcaggacgaatacagcccg

SEQ ID NO: 20201 - DNA, 260 bp, Unknown
  Description of Unknown: LeftRegion for integrase B7202 sequence
cttcgtttttctacttaatgttcttaaagatattctttttttatctcgcatttcacgtattttaatttctatcatatcctttttcctttcgttcattttagtctccccaaaattggcgtttttatatgatagaaatctgcttatttatttataactaaaaagtaacttattaaaaaaaatttttaaaaaaattatattttatgagtaaatccaaaatttattgtttaaaatatttatatactataacatttagcaaaggg

SEQ ID NO: 20202 - DNA, 260 bp, Unknown
  Description of Unknown: LeftRegion for integrase B7203 sequence
gtagttcccccaccatacggggagtaacgacgctacgggtatttttttatttagggggaaaatgaaatgccagaaaagcactatgatttacttcaaattgtttgaacatatcgacggtgtaagatcgcagaaattaaaaaaagcagaataaaagcccgtccagcaaaagccgggcgggttttgttaaaacgggtgataaaatgaatcgtgttgcgatatatgtcagagtgtctacaaacgaacaggcggcagagggatac

SEQ ID NO: 20203 - DNA, 260 bp, Unknown
  Description of Unknown: LeftRegion for integrase B7204 sequence
tcctccttatgtaaatcgcataaattcgtgggtcgattagatatctatattcttttatcatgtgtagtcctttctgggggtgcacatatatttatagctctgttactgaaaaatttcgacttaattgtctttttttataaaatgggttgttgcccccccaagggtttcagcataaatttaaaattttgcgaggagatattatgcaacaagcagccgcatacgtccgcgtgtctactgacgatcagacggagtatagtcct

SEQ ID NO: 20204 - DNA, 260 bp, Unknown
  Description of Unknown: LeftRegion for integrase B7205 sequence
ctttgtttttctacttaatgttcttaaagatattctttttttatctcgcatttcacgtattttaatttctatcatatcctttttcctttcgttcattttagtctccccaaaattggcgtttttatatgatagaaatctgcttatttatttataactaaaaagtaacttattaaaaaatttttttaaaaaaattatattttatgagtaaatccaaaatttattgtttaaaatatttatatactataacatttagcaaaggg

SEQ ID NO: 20205 - DNA, 260 bp, Unknown
  Description of Unknown: LeftRegion for integrase B7206 sequence
aagactatggcctgcgtccatgccctgagtgtatcggataataaaaaaaagccctaccctgcgccaacaggatagagccgataagcaggatatgtagtacataacccacccaacattggatattgtaccacatccctgccgataaatcaagcagggcatttttgcgcccttttttaagtacaatctatgggagtggtacaatgaaatatgcagcggcatatatccgcgtaagtgacgaccggcaagacgagtacagcccg

SEQ ID NO: 20206 - DNA, 260 bp, Unknown
  Description of Unknown: LeftRegion for integrase B7207 sequence
tacaacaaaatttggggatggggattaaaattcttaccatgaaaaaaggcttgcaaaacgcaagcccgatggacaaaccatctgcctccaagctattggattacttgtattatatgcgataatttaccgtttgtcaaccccttgttgacttttttccaaaatcttattaaataatactctctaaaagaaggtgataatgtatgtcgattattaaagcagctctttacgtcagagttagcacgatggaacaggtgaccgac

SEQ ID NO: 20207 - DNA, 260 bp, Unknown; identical to SEQ ID NO: 20197
  Description of Unknown: LeftRegion for integrase B7208 sequence

SEQ ID NO: 20208 - DNA, 260 bp, Unknown; identical to SEQ ID NO: 20196
  Description of Unknown: LeftRegion for integrase B7209 sequence

SEQ ID NO: 20209 - DNA, 260 bp, Unknown
  Description of Unknown: LeftRegion for integrase B7210 sequence
atacgaggaaatctttcaagcggttatattacatcgaatcaagtaatatcaactgttgacttagaaaaaaatattaccgatttatttattccggaacctctgaaatagaataataaataattcctatataaaaaatcccccaccggttgcaatcggtggggggaaacttaacttttatttttacctggaggtgctcagaaatggaaaacttaaaaatagcggcggcttacattcgagtgagtacccacgatcaggaggaa

SEQ ID NO: 20210 - DNA, 260 bp, Unknown
  Description of Unknown: LeftRegion for integrase B7211 sequence
aaatccacgagatactgactaaattagggataaaagcaaatatggataaataattttatttttgagtaatcctcagacaatgtctggggatttttaataggaggtaaatatggatactattattagaaatgaaaatataacacctgaagagaaaaatactatcttaagactattattacaagcagctaaagaagaattaaatgtcgaatagttcttcttttcctgctaaaatttcagctatttattgcagggaaagcaca

SEQ ID NO: 20211 - DNA, 260 bp, Unknown
  Description of Unknown: LeftRegion for integrase B7212 sequence
ctcggaatattgaactaccgcaacaaacatataactcgtgctctaatttacaaaaaaccgccccagtgttaccagcaccagagcggcccgcactccgaagagtatcgtgtgattcctgcaagaatcttttacatggtaccatcttcggagcgctgacgcaaattcagcgctatttttgtgctcatttttcggaggtggacatgaaatccgtcgcaatttactgccgtgtctccacgcaggagcaggccgcagaaggctac

SEQ ID NO: 20212 - DNA, 260 bp, Unknown; identical to SEQ ID NO: 20205
  Description of Unknown: LeftRegion for integrase B7213 sequence

SEQ ID NO: 20213 - DNA, 260 bp, Unknown
  Description of Unknown: LeftRegion for integrase B7214 sequence
gaaagtgacggcttccgtccatgccctgaatgcatcggataataaaaaaagccctaccctgcgccaacaggatagagccgataagcaggatatgtagtacataacccacccaacactggatattgtaccacatccctgccgataaatcaagcagggtatttttgcgcccttttttaagtacaatctatgggagtggtacaatgaaatatgcagcggcatatatccgcgtaagtgacgaccggcaagacgagtacagcccg

SEQ ID NO: 20214 - DNA, 260 bp, Unknown
  Description of Unknown: LeftRegion for integrase B7215 sequence
tccaggcgttggccgggaagttagagtaaatcacaacaaaataaaaaaaagccctaccctgcgccaacaggatagagccgataagcaggatatgcagtacataacccacccaacattggatattgtaccacatccctgccgataaatcaagcagggcatttttgcgcccttttttaagtacaatctatgggagtggtacaatgaaatatgcagcggcatatatccgcgtaagtgacgaccggcaggacgaatacagcccg

SEQ ID NO: 20215 - DNA, 260 bp, Unknown
  Description of Unknown: LeftRegion for integrase B7216 sequence
cgcaagactcgctaccaacgaatcttgcacccataatcagtatgggtctctcaataagactactgctccgaagaatacaatagtacgttcataaaatattgtatcatcttcggaaacagctcgcaagcggaactaatgttctatgctggctgttatttttgtacctttttatacataaaatcaacaaaggagatgatattatgccagaaaattatcgagacggcgccctttatattcgtgtaagcacagataaacaagaa

SEQ ID NO: 20216 - DNA, 260 bp, Unknown
  Description of Unknown: LeftRegion for integrase B7217 sequence
ctgtggcgctgatgttttacatcgccatggatgccagcaacgaagacattggcctcatcagaggcagcagcgtttcgcccttggcgatgttgctttgcgttttcgcgctggcttccaccgccgccctgattatcttgcagggcagattgatagatagcaagaaggagaaaccgataaacgacaaaagggatgaatcgtaaatgtcaatcatagaagagcaagtcaaaagaaatcagtatatcgaggaagtcgccgcctat

SEQ ID NO: 20217 - DNA, 260 bp, Unknown
  Description of Unknown: LeftRegion for integrase B7218 sequence
ttttctcctgtaaatagattaagtttataataaaaaagactccctgctaccaacagagagcctaaaagaatgttacctactaacctaaaaggtgtacggtaaacactaagtcgcattagtattttaccatacatcctggcatttttgtagggtgtattttttgcacccttttttaggataagaaaggatgataattaaatatgataagagcaggaatatatgctagagtaagtacaagagaacaggcagaagaaggatat

SEQ ID NO: 20218 - DNA, 260 bp, Unknown
  Description of Unknown: LeftRegion for integrase B7219 sequence
ttccaggcgttggccgggaagttagagtaaatcacaacaaaataaaaaaagccctaccctgcgccaacaggatagagccgataagcaggatatgcagtacataacccacccaacactggatattgtaccacagccctgccaaaaaatcaagcagggcatttttgcgcccttttttaagtacaatctatgggagtggtacaatgaaatatgcagcggcatatatccgcgtaagtgacgaccggcaggacgagtacagccca

SEQ ID NO: 20219 - DNA, 260 bp, Unknown
  Description of Unknown: LeftRegion for integrase B7220 sequence
aaatccacgagatactgactaaattagggataaaagcaaatatggataaataattttatttttgagtaatcctcagacaatgtctggggatttttaataggaggtaaatatggatactattattagaaatgaaaatataacacctgaagagaaaaatactatcttaagactattattacaagcagctaaagaagaattaaatgtcgaatagttcttcttttcctgctaaaatttcagctatttattgcagggaaagtaca

SEQ ID NO: 20220 - DNA, 260 bp, Unknown
  Description of Unknown: LeftRegion for integrase B7221 sequence
ttgtggcgctgatgttttacatcgccatggatgccagcaacgaagacattggcctcatcagaggcagcagcgtttcgcccttggcgatgttgctttgcgttttcgcgctggcctccaccgccgccctgattatcttgcagggcagattgatagatagcaagaaggagaaaccgataaacgacaaaagggatgaatcgtaaatgtcaatcatagaagagcaagtcaaaagaaatcagtatatcgaggaagtcgccgcctat

SEQ ID NO: 20221 - DNA, 260 bp, Unknown
  Description of Unknown: LeftRegion for integrase B7222 sequence
ccgtacattataagtataacgatcgaggcttccttttgcaagcgaatccggaatttgcccgaaaaaaatcttgcttgaggaggtgttgcgcctatgagtagttctcgtaacgaatctgtagagtacatctacactgcgttcattacgctcaagaatggcaagcagggcattcttgagctacaatctatgggagtggtacaatgaaatatgcagcggcatatatccgcgtaagtgacgaccggcaagacgagtacagcccg

SEQ ID NO: 20222 - DNA, 260 bp, Unknown
  Description of Unknown: LeftRegion for integrase B7223 sequence
caagctggattatttgtcaaatgtgaaaaaccgcccggtattggcgtaccgaacggtccaacatatatccgaagatatactcttattcgcaaaatatattgtatcatcttcgggaacagcccgcaagcggaacattcgttcaccgctggctgttatttttgtaccctaaaatacataaaatcaacaaaggagatgatattatgccaaaagattatcgtgacggcgccctttacatccgtgtcagtactgataaacaggaa

SEQ ID NO: 20223 - DNA, 260 bp, Unknown
  Description of Unknown: LeftRegion for integrase B7224 sequence
aaaataaaagccatattcttaatcatataaaaatataaaaagtcttaaaataaagaattaattatttaaaaaaataatttttaatattataattattaaggaggaaactatgaaaataaaagtcatttttaatgaagacaattatgaagctaattattatagaaaaaaattaatatctaatataaaagaggtagaggataatgagagattcaaagagtaagactgttattatatacaatagagtatctaccataatgcaa

SEQ ID NO: 20224 - DNA, 260 bp, Unknown
  Description of Unknown: LeftRegion for integrase B7225 sequence
acattattttaacagtgaataccactaagttggtacaatactactatgatggtattaaccgatgctatgggaaaagatataaagcatatcgcacaattttaccgcatcactatcatacaaaaagtcaaaatttttcattgctgtggaactttcctgataatggtggtagaatccaagcagcaatgcaaggagggtaattgatgaagatagcagcagcatatctccgtgtatcgacggaggagcaggatgagtattctctc

SEQ ID NO: 20225 - DNA, 260 bp, Unknown
  Description of Unknown: LeftRegion for integrase B7226 sequence
gattttttctaaccctttagatagcaaaaccgcccggtgctggtaacaccgaacggcttcacatagatttctcttaccggatgcccggaaagatatattcaaacctgaacactttgaattatatcattctttcgggcacctcgcaagaggtgtattttttatacccttttttaatatttttatacgaaaggatgatcgatatgagaataggtgccgcgtatatccgcgtcagcacggacgaccagctggatatcagcccg

SEQ ID NO: 20226 - DNA, 260 bp, Unknown
  Description of Unknown: LeftRegion for integrase B7227 sequence
ccgtacattataagtataacgatcgcggcttccttttgcaagcggatctggaatttgcccggaaaaaatcttgcttgaggaggtgttgcgcctatgagtagttctcgtaactcatctgtagagtacatctacactgcgttcattacgctcaagaatggcaagcagggcattcttgagctacaatctatgggagtggtacaatgaaatatgcagcggcatatatccgcgtaagtgacgaccggcaagacgaatacagcccg

SEQ ID NO: 20227 - DNA, 260 bp, Unknown
  Description of Unknown: LeftRegion for integrase B7228 sequence
catgacgtgcgatatcatcaaccgccagtacggcacgaactacaccgtcaaagaattcaaggaactgttccggcggtatttcttttctaagcaaaaatgaaaccgccccggtgctggaacaccgggacggcgaatgtagacctggatgaagtataacagagctaccctttcatggtagcacatggaggagaaaaaggcaagtgaaaacagcattgtactgccgtgtttcgacggaggaacaagcgcgaacaggggagagc

SEQ ID NO: 20228 - DNA, 260 bp, Unknown
  Description of Unknown: LeftRegion for integrase B7229 sequence
atgtgaaatgagaatgacatataacactgttcgttcaaggctgaaacgtattcccgaagaactgctgattaccaataaacagggcaatcgttcattttacctgttgaatctcaaagcagtcgatgaatcgctgaaataagatcgcttacgccgccctgccgcccaccacggcagggcatcatgatagaaaggagcgcccaatgaaaatcgcagcggcgtacatccgcgtatccaccgatgaccagatcgaatactccccc

SEQ ID NO: 20229 - DNA, 260 bp, Unknown
  Description of Unknown: LeftRegion for integrase B7230 sequence
ccatacaagttttgattgtgagactttaagatgggaacgtaaaaaatacaaagaatcattaaaagcactcactattaaagaggcgaagtctaaaggtttaacttattgttatgactgctcaagagacaattactattataagcacgtcggcatagaagattagacactatgaataacataaatttaggagaagagaataaatgagaatagcattataccctcgtgtttcaacacaagaacaagcattgaatggacactct

SEQ ID NO: 20230 - DNA, 260 bp, Unknown
  Description of Unknown: LeftRegion for integrase B7231 sequence
tacatgataatgaacaaattataaatgtaaccttttgcttttaaatatttcagaaaatgctgcatacttgacaaggctttccgctacttctatacttacatatagctagcgaatgactgctgtgcggtcggggaagagccttgggattgtgttccagggctctttttccatttcaaagaaatgtgggaggatttttaaatatggaaatgaaagtcggcgcggcctatatccgcgtatccaccgacggccagctggatctg

SEQ ID NO: 20231 - DNA, 260 bp, Unknown
  Description of Unknown: LeftRegion for integrase B7232 sequence
ttccaggcgttggccgggaagttagagtaaatcacaacaaaataaaaaaagccctaccctgcgccaacaggatagagccgataagcaggatatgcagtacataacccacccaacattggatattgtaccacatccctgccgataaatcaagcagggcatttttgcgcccttttttaagtacaatctatgggagtggtacaatgaaatatgcagcggcatatatccgcgtaagtgacgaccggcaagacgagtacagcccg

SEQ ID NO: 20232 - DNA, 260 bp, Unknown
  Description of Unknown: LeftRegion for integrase B7233 sequence
ttccaggcgttggccgggaagttagagtaaatcacaacaaaataaaaaaagccctaccctgcgccaacaggatagagccgataagcaggatatgcagtacataacccacccaacactggatattgtaccacatccctgccgataaatcaagcagggtatttttgcgcccttttttaagtacaatctatgggagtggtacaatgaaatatgcagcggcatatatccgcgtaagtgacgaccggcaggacgagtacagcccg

SEQ ID NO: 20233 - DNA, 260 bp, Unknown
  Description of Unknown: LeftRegion for integrase B7234 sequence
caggcgttggccgggaagttagagtaagtcacaacaaaataaaaaaagccctaccctgcgccaacaggatagagccgataagcaggcgctgtgcgtacacataacccacccaacactggttattgtaccacagccctgctgaaaaatcaagcagggcatttttgcgcccttttttaagtacaatctatgggagtggtacaatgaaatatgcagcggcatatatccgcgtaagtgacgaccggcaagacgagtacagcccg

SEQ ID NO: 20234 - DNA, 260 bp, Unknown
  Description of Unknown: LeftRegion for integrase B7235 sequence
ggatgaagaagagtttgaagatgactgggaagatgaagaagaatactaaaaataaaaataagttatttgaagagggattttccctcttcttttaatactggaggtaaatatggatactattattagaaatgaaaatataacacctgaagagaaaaatactatcttaagactattattacaagcagctaaagaagaattaaatgtcgaatagttcttcttttcctgctaaaatttcagctatttattgcagggaaagcaca

SEQ ID NO: 20235 - DNA, 260 bp, Unknown
  Description of Unknown: LeftRegion for integrase B7236 sequence
tatacgaggaaatctttcaagtggttatattacatcgaatcaagtaatatcaactgttgacttagaaaaaaatattaccgatttatttattccggaacctctgaaatagaataataaataattcctatataaaaaatcccccaccggttgcaatcggtgggggaaacttaagttttatttttacctggaggtgctcagaaatggaaaacttaaaaatagcggcggcttacattcgagtgagtacccacgatcaggaggaa

SEQ ID NO: 20236 - DNA, 260 bp, Unknown
  Description of Unknown: LeftRegion for integrase B7237 sequence
ccgtacattataagtataacgatcgcggcttccttttgcaagcggatctggaatttgcccggaaaaaatcttgcttgaggaggtgttgcgcctatgagtagttctcgtaactcatctgtagagtacatctacactgcgttcattacgctcaagaatggcaagcatggcattcttgagctacaatctatgggagtggtacaatgaaatatgcagcggcatatatccgcgtaagtgacgaccggcaggacgagtacagcccg

SEQ ID NO: 20237 - DNA, 260 bp, Unknown
  Description of Unknown: LeftRegion for integrase B7238 sequence
atacaccatttttacgaaaaaacacattattatctgttgatagattagaaattgaagccaatacatttgctgcgcttttgttaatagatgagaatagcattactccaggtgatacaaaagcacgtatagcatataaaaataatattcctgtcgagcttctagaattttatacggtcgccaattgaaaggtgggataaacaatgaggtgcgcaatttatgcacgtgtatcaacagaagagcaggctgtagagggatattcc

SEQ ID NO: 20238 - DNA, 260 bp, Unknown; identical to SEQ ID NO: 20235
  Description of Unknown: LeftRegion for integrase B7239 sequence

SEQ ID NO: 20239 - DNA, 260 bp, Unknown
  Description of Unknown: LeftRegion for integrase B7240 sequence
tccaggcgttggccgggaagttagagtaagtcacaacaaaataaaaaaaagccctaccctgcgccaacaggatagagccgataagcaggatatgcagtacataacccacccaacactggatattgtaccacatccctgccgataaatcaagcagggtatttttgcgcccttttttaagtaaaatctatgggagtggtacaatgaaatatgcagcggcatatatccgcgtaagtgacgaccggcaagacgagtacagcccg

SEQ ID NO: 20240 - DNA, 260 bp, Unknown
  Description of Unknown: LeftRegion for integrase B7241 sequence
caagctggattatttgtcaaatgtgaaaaaccgcccggtattggcgtaccgaacggtccaacatatatccgaagatatactcttattcgcagaatatattgtatcatcttcgggaacagcccgcaagcggaacattcgttcaccgctggctgttatttttgtaccctaaaatacataaaatcaacaaaggagatgatattatgccaaaagattatcgtgacggcgccctttacatccgtgtcagtactgataaacaggaa

SEQ ID NO: 20241 - DNA, 260 bp, Unknown
  Description of Unknown: LeftRegion for integrase B7242 sequence
aaaataaaagccatattcttaatcatataaaaatataaaaagtcttaaaataaagaattaatcatttaaaaaaataatttttaatactataattattaaggaggaaactatgaaaataaaagtcatttttaatgaagacaattatgaagctgattattatagaaaaaaattaatatcaaatataaaagaggtagaggataatgagagattcaaagagtaagactgttattatatacaatagagtatctaccataatgcaa

SEQ ID NO: 20242 - DNA, 260 bp, Unknown
  Description of Unknown: LeftRegion for integrase B7243 sequence
aaaataaaagccatattcttaatcatataaaaatataaaaagtcttaaaataaagaattaatcatttgaaaaaataatttttaatattataattattaaggaggagactatgaaaataaaagtcatttttaatgaagataattatgaagctgattattatagaaaaaaattaatatctaatataaaagaggtagaggataatgagagattcaaagagtaagactgttattatatacaatagagtatctaccataatgcaa

SEQ ID NO: 20243 - DNA, 260 bp, Unknown
  Description of Unknown: LeftRegion for integrase B7244 sequence
tcaatagctatcttcgcccggtgatttttcaccgggtctttccttgggaaagcggaagagtaaaaattttcattgacgaaacgccaatggcggcctataatggaattgcagataaagcgatgccctatccttgtgaaaccgaatgagcgtttcagcgaaatggggatcgccggacacaagagccgcctttttaggggtttttgataagctattttagacgaggggaggcgggccgtctggaaaatatggccgttgcctgt

SEQ ID NO: 20244 - DNA, 260 bp, Unknown; identical to SEQ ID NO: 20241
  Description of Unknown: LeftRegion for integrase B7245 sequence

SEQ ID NO: 20245 - DNA, 260 bp, Unknown
  Description of Unknown: LeftRegion for integrase B7246 sequence
gatgacgacgaagaagatttaaacgaataaaagaaaaccgccccagtgcgccaacaccaggacggctcagtaacattccgaagaatgatacctgttcagcaaaacatattgtatcatcttcggaaacgtcagacaagcagaacgtttgttttggcgttttttcttatattcaaaattgaaaacttaaagaaggtgatattatgtcagcacttaaaaatggtgctctctacatccgcgtcagcaccgcggatcagaccgaa

SEQ ID NO: 20246 - DNA, 260 bp, Unknown
  Description of Unknown: LeftRegion for integrase B7247 sequence
caggcgttgtccgggaagctggagtaaatcacaacaaaataaaaaaagccctaccctgcgccaacaggatagagccgataagcaggcgctgtgcgtacacataacccacccaacattggatattgtaccacatccctgccgataaatcaagcagggcatttttgcgcccttttttaagtacaatctatgggagtggtacaatgaaatatgcagcggcatatatccgcgtaagtgacgaccggcaggacgaatacagcccg

SEQ ID NO: 20247 - DNA, 260 bp, Unknown; identical to SEQ ID NO: 20210
  Description of Unknown: LeftRegion for integrase B7248 sequence

SEQ ID NO: 20248 - DNA, 260 bp, Unknown
  Description of Unknown: LeftRegion for integrase B7249 sequence
ctctcttgctaaatctattatatgtcactcaatccggaatgtcaacaagcgaaagctgctttacgaatacttgacaaggcttttaagtatgctaaaatgtaacacatagcgaatgactgctgtgcggtcagaaaagagccttgggattgtgttccagggctctttttccatttcaaagaaatgtgggaggatttttaaatatggaaatgaaaatcggcgcggcctatgtccgcgtatccaccgacggccagctggatctg

SEQ ID NO: 20249 - DNA, 260 bp, Unknown
  Description of Unknown: LeftRegion for integrase B7250 sequence
ttgacgaagaaacccagataagatttctggaagaactgacacgaagggcaggaaaccttggaaggctcaacagaaaatgcaaggaacacactaagaaaattcctactgcatttcatttcaagccagctgatttaacatttcctgatccatttgagcaggcagaatacatttatagtttgatagaaagcgaggaataacgcatggcaggggtaaagaacataacagttattccggcaaaaaaacgtgtaggtaatacagta

SEQ ID NO: 20250 - DNA, 260 bp, Unknown
  Description of Unknown: LeftRegion for integrase B7251 sequence
ttccaggcgttggccgggaagttagagtaagtcacaacaaaataaaaaaagccctaccctgcgccaacaggatagagccgataagcaggatatgcagtacataacccacccaacattggatattgtaccacatccctgccgataaatcaagcagggcatttttgcgcccttttttaagtacaatctatgggagtggtacaatgaaatatgcagcggcatatatccgcgtaagtgacgaccggcaagacgagtacagcccg

SEQ ID NO: 20251 - DNA, 260 bp, Unknown
  Description of Unknown: LeftRegion for integrase B7252 sequence
ctgtggcgctgatgttttacatcgccatggatgccagcaacgaagacattggcctcatcagaggcagcagcgtttcgcccttggcgatgttgctttgcgttttcgcgctggcctccaccgccgccctgattatcttgcagggcagattgatagatagcaagaaggagaaaccgataaacgacaaaagggatgaatcgtaaatgtcaatcatagaagaacaggtcaaaagaaatcaatacattgaggaagtcgccgcctat

SEQ ID NO: 20252 - DNA, 260 bp, Unknown
  Description of Unknown: LeftRegion for integrase B7253 sequence
cgctgaacggtgacggctacgtcaaggaactgggtgaaggcgaactgctctcccgcaatccagagtatgatcccataccgatccacgaaagcgacagcctgcagtgctggggacgtgtcatcggaaagacggagctggtgtgatatagaaacaacgccctaccggaaccggcagggcatcactatagaaaggagtgtcccatgaaaatcgcagcggcgtacattcgtgtgtccaccgacgaccagatcgaatactccccc

SEQ ID NO: 20253 - DNA, 260 bp, Unknown
  Description of Unknown: LeftRegion for integrase B7254 sequence
cgctttgcaggaccagggccgtggaacctgggggaaagacatggaaggttattccacattgattatgtataagtaaagaaaataaaacacccctgcggtgctgggaacaccacaagggcttgtgcaaagatatatcataccagatacaacataccatctgcattgctattatagcacatgcaggcgggaaataacaggaaatgaaaaggcaggtgctatatgaaatgattaaaaaaattgctgttctttatatgagaatg

SEQ ID NO: 20254 - DNA, 260 bp, Unknown
  Description of Unknown: LeftRegion for integrase B7255 sequence
acaatgaaaatccccctgtctaccaaagatatactctctttatatattttacaacacaaacacatgtttcgcaacaatcttttccaacaaaattccccctcatcgactggacctcgatgagggggcagggcagataattcttgtggtgcaagaggtattattctgccctttcataatatcgtaatgaaagggtgatgtcaatgaaaatcgctgcagcctatgtgcgcgtcagcaccgatgaccagctggaatactctccg

SEQ ID NO: 20255 - DNA, 260 bp, Unknown
  Description of Unknown: LeftRegion for integrase B7256 sequence
cgcggcctcatcaatcgccggttcggcacgaactacaccgccgatgagctgaaagagctgtacaggcggcattttctgactgtaaaataacgaaaaaaccgccccggtgctggaacaccgaggcggagattgtagacctgagcaagtgaaatgtaacagagctaccctttcatggtagcacatggaggcgaaaaaggcaagtgaagatagcattgtattgccgcgtttcgacggaagaacaggcgcggacaggggagagc

SEQ ID NO: 20256 - DNA, 260 bp, Unknown
  Description of Unknown: LeftRegion for integrase B7257 sequence
cgggaaaaacctgattataacgtccattgtgtcgtttgtgctgtacgtgattgtcgtgtctgtaatctccaaccataaagcaaaaaaggcagaagaggaactgtcaagcttgtatgatagttatagctacagctataacattgatgattaaaaaagccgccctgcaaggaattgtggggcggtacaattaaggagcgattatgaaaagagcagtgttttatggtcgttattccagcgaccggcagaccgaacaaagcatt

SEQ ID NO: 20257 - DNA, 260 bp, Unknown
  Description of Unknown: LeftRegion for integrase B7258 sequence
agaggattttgacccctttaaatagcaaaaccgcccggtattggcgtaccgaacggcttcacatagatttctcttaccggatgcccggaaagatatattcaaacctgaacactttgaattatatcattcttttgggcacctcgcaagaggtgtattttttatacccttttttaatatttttatacgaaaggatgatcgaaatgagaataggtgcagcttatatccgtgtcagcacggacgaccagctggatatcagcccg

SEQ ID NO: 20258 - DNA, 260 bp, Unknown
  Description of Unknown: LeftRegion for integrase B7259 sequence
tttcaattggtaaagctataggtggtaccgttctaacaggtggtgttggtgcgttagccggatttgtcggcaaaaaaacaaagcaaactgattttgtatgcatgaactgtggaaaacaattcaagaaataaaaaagacccgcctattacagacgggtttaaaaagcactgcaaaagaacatatgtacgaaaggagatattatgaaagtagcattatatgtaagagtttcaacacttgagcaagcagaagaaggttactca

SEQ ID NO: 20259 - DNA, 260 bp, Unknown
  Description of Unknown: LeftRegion for integrase B7260 sequence
cgctcctgcgccaacaagaacggtttcctcataatccatatgaggtcgtatataacgtatatatccgaagagatacatacaatactcacaaaaatattgtatcatcttcggagcagctatgcaagcggaacacccgttctctcgctggctgttatttttgtactcatttttacatacaacaaaacaggaaggtgatatgtatggcaaagttaagaaatggcgccctctatatccgtgtcagcaccgccgatcagacggag

SEQ ID NO: 20260 - DNA, 260 bp, Unknown
  Description of Unknown: LeftRegion for integrase B7261 sequence
cgactgtatttactaaataccaaccgtcatctttaagccttttaattacttctcttgcagaataacttttcaaacaatctcctcctgacaattattattataacaaatatttttatatttgtcaataccttttaacaaatatttttatatttgttttaaaaaatcaactgtttttttaggaataaaaaggagtgtgcaatatgaatatagccgctgcatacattcgtgtatctgacgacagacaagacgaatacagtccc

SEQ ID NO: 20261 - DNA, 260 bp, Unknown
  Description of Unknown: LeftRegion for integrase B7262 sequence
cgggaaaaacctgattataacgtccattgtgtcgtttgtgctgtacgtgattgtcgtgtctgtaatctccaaccataaagcaaaaaaggcagaagaggaactgtcaagcttgtatgatagttatagctacagctataacattgatgattaaaaaagccgccctgcaaggaattgtggggcggtacaattaaggagcgattatgaaaagagcagtgttttatggtcgttattccagcgacagacagaccgaacagagcatt

SEQ ID NO: 20262 - DNA, 260 bp, Unknown
  Description of Unknown: LeftRegion for integrase B7263 sequence
tgacattgccacaggtgtcgtggaacagattcagtaaaataaaaaaccgccccggtgcgccaacaccaggacggctcagtaacattccgaagaatgataccagttcacaaaacatattgtatcatcttcggaagcgccagacaagcagaacgtttgttttggcgttttttctcatacttaaaattgaagaaggtgatattatgtcagcacttaaaaatggtgctctctacatccgcgtcagtaccgcggatcagacagaa

SEQ ID NO: 20263 - DNA, 260 bp, Unknown
  Description of Unknown: LeftRegion for integrase B7264 sequence
aatagtcaaaattaaattatatacaaaaaccgcccggtgctggtaacaccgaacggccttgcatagatttctcttaccggatgcccggaaagatatattcaaacctgaacactttgaattatatcattctttcgggcacctcgcaagaggtgtattttttatacccttttttaatatttttatacgaaaggatgatcgaaatgagaataggtgcagcttatatccgtgtcagcacggacgaccagctggatatcagcccg

SEQ ID NO: 20264 - DNA, 260 bp, Unknown
  Description of Unknown: LeftRegion for integrase B7265 sequence
agctatttaccaaaaagaaaaaccgctccagtgtgccaacaccggagcggctctgtaacattccgaagaatgatactacatgtccaactcatattgtatcatcttcgaccccgccaatcaatcagaacatttgttttggcgtttttcttacactccccaaacggggacgaaaacaacaacagaatagaaggtgatattacatgtcagcattaaaaaatggcgctttgtatatccgtgtcagcactgccgatcagacagag

SEQ ID NO: 20265 - DNA, 260 bp, Unknown
  Description of Unknown: LeftRegion for integrase B7266 sequence
gattttttctaaccctttagatagcaaaaccgcccggtgctggtaacaccgaacggccttgcatagatttctcttaccggatgcccggaaagatatattcaaacttgaacactttgaattatatcattctttcgggcacctcgcaagaggtgtattttttatacccttttttaatatttttatacgaaaggatgatcgaaatgagaataggtgcagcttatatccgtgtcagcacggacgaccagctggatatcagcccg

SEQ ID NO: 20266 - DNA, 260 bp, Unknown
  Description of Unknown: LeftRegion for integrase B7267 sequence
tattatataacagcacgaaattataatttgattgatgaaaaaatatattgttatatggttggctgtacaccagctgaattatatggatatgcataaagcctcaccgaaatccggcagggctaaggaaaggagtctatgatgaacaacgctgcaaaaacaccctgcaaggaattgtggggcggtacaattaaggagcgattatgaaaagagcagtgttttatggtcgttattccagcgaccgacagacagaacagagcatt

SEQ ID NO: 20267 - DNA, 260 bp, Unknown; identical to SEQ ID NO: 18819
  Description of Unknown: LeftRegion for integrase B7268 sequence

SEQ ID NO: 20268 - DNA, 260 bp, Unknown
  Description of Unknown: LeftRegion for integrase B7269 sequence
ccgaggaagccgattacgctatacagaatttaaactaaaataaaaaaccgccccggtgcgccaacaccaggacggctcagtaacattccgaagaatgataccagttcgcaaaacatattgtatcatcttcggaagcgccaatcaatcagaacgtttgttttggtgtttttcttatacccaaaattaaagaaggtgatattatgtcagcacttaaaaacggtgctctctacatccgcgtcagcaccgcggatcagacagaa

SEQ ID NO: 20269 - DNA, 260 bp, Unknown
  Description of Unknown: LeftRegion for integrase B7270 sequence
ccgattacgctatacagaatttagactaaaataaaaaaccgccccggtgcgccaacaccaggacggctcagtaacattccgaagaatgataccagttcgcaaaacatattgtatcatcttcggaaacgtcagacaagcagaacgtttgttttggcgttttttcttatattcaaaattgaaaacttaaagaaggtgatattatgtcagcacttaaaaatggtgctctctacatccgcgtcagcaccgcggatcagaccgaa

SEQ ID NO: 20270 - DNA, 260 bp, Unknown
  Description of Unknown: LeftRegion for integrase B7271 sequence
cgtgaattaactgcctaaataaaaaaccggctcctgacggcaatcaggaaccggcaagtaacattccgaagaatgataccctaactcgcaaaaatattgtatcatcttcggagcagctatgcaagcgaaacacccgttctctcgctggctgttatttttgtactcatttttacatacaacaaaacaggaaggtgatatgtatggcaaagttaagaaatggcgccctctatatccgtgtcagcaccgccgatcagacggag

SEQ ID NO: 20271 - DNA, 260 bp, Unknown; identical to SEQ ID NO: 20270
  Description of Unknown: LeftRegion for integrase B7272 sequence

SEQ ID NO: 20272 - DNA, 260 bp, Unknown
  Description of Unknown: LeftRegion for integrase B7273 sequence
aatagtcaaaattaaattatatacaaaaaccgcccggtgctggtaacaccgaacggccttgcatagatttctcttaccggatacccgaaaagatatattcaaacctgaacactttgaattatatcattctttcgggcacctcgcaagaggtgtattttttatacccttttttaatatttttatacgaaaggatgatcgaaatgagaataggtgcagcttatatccgtgtcagcacggacgaccagctggatatcagcccg

SEQ ID NO: 20273 - DNA, 260 bp, Unknown
  Description of Unknown: LeftRegion for integrase B7274 sequence
gattttttctaaccctttagatagcaaaaccgcccggtgctggtaacaccgaacggcttcacatagatttctcttaccggatgcccggaaagatatattcaaacctgaacactttgaattatatcattctttcgggcacctcgcaagaggtgtattttttatacccttttttaatatttttatacgaaaggatgatcgaaatgagaataggtgcagcttatatccgtgtcagcacggacgaccagctggatatcagcccg

SEQ ID NO: 20274 - DNA, 260 bp, Unknown
  Description of Unknown: LeftRegion for integrase B7275 sequence
aatgtttactaaaaatgtaaatattaaaaaaccggcccctgcgccaacaggaaccggcaagtaacattccgaagaatgataccctaactcgcaaaaatattgtatcatcttcggaacagcttcgcaagcggaacacctgttctcttgctggctgttatttttgtactcatttttacataaaataggaaggtgatatttatatggcaaagttaagaaatggtgccctctatatccgtgtcagcaccgccgatcagacggag

SEQ ID NO: 20275 - DNA, 260 bp, Unknown
  Description of Unknown: LeftRegion for integrase B7276 sequence
cgattacgctatacagaatttagactaaaataaaaaaccgccccagtgcgccaacaccaggacggctcagtaacattccgaagaatgataccagttcgacaaaacatattgtatcatcttcggaaacgtcagacaagcagaacgtttgttttggcgttttttcttatattcaaaattgaaaacttaaagaaggtgatattatgtcagcacttaaaaatggtgctctctacatccgcgtcagcaccgcggatcagaccgaa

SEQ ID NO: 20276 - DNA, 260 bp, Unknown
  Description of Unknown: LeftRegion for integrase B7277 sequence
caagatgaaaattaaaacttataaaactttgatttcaaaatatggaattttttcaggagctagaaaacctagtttctgggaaaaattaaaaagatggttatggaggtaaaaaatgactgatacagataatactaaacaaagaatatcactagctgttactaaaataaaaattcttgccaatgagttattaaataagaaaaatgcaagcacttcaagttaaaatagcagttaaatactcaagagtttctacaaataaacaa

SEQ ID NO: 20277 - DNA, 260 bp, Unknown; identical to SEQ ID NO: 20263
  Description of Unknown: LeftRegion for integrase B7278 sequence

SEQ ID NO: 20278 - DNA, 260 bp, Unknown
  Description of Unknown: LeftRegion for integrase B7279 sequence
aaatacagggtcttttccgtatttgattttcaaaaaagaaaaaccgccttggtgttcacagcaccaagacggctcagtaacattccgaagaatgataccgtttctcaacaaaacatattgtatcatcttcggaaacgccagacaagcagaacgtttgttttggtgtttttcttatacccaaaattaaagaaggtgatattatgtcagcacttaaaaatggtgctctctacatccgcgtcagcaccgcggatcagaccgaa

SEQ ID NO: 20279 - DNA, 260 bp, Unknown
  Description of Unknown: LeftRegion for integrase B7280 sequence
caatgcgaattggtggtaaaggatagaactcaattgtatgtatcatacaaagctgacatatgaatgaaaagaatcccatcgaagcggttaatgtacctgctccggtgggattttttcttgcttttcatgtgaatgtatggtacaataaataaaaatctgccttgcattttttgcagggcggtacaattaaggagcgattcatgaaaagagcagtgttttatggtcgttattccagcgaccgacagacagaacagagcatt

SEQ ID NO: 20280 - DNA, 260 bp, Unknown
  Description of Unknown: LeftRegion for integrase B7281 sequence
attcttggaataggatttcaattacatcaagtagaagaatactgtaaaactttaatcactaaaaaattaattaaagaaaatgaagataagtttataataataggaggttaagatgaacaatacagacaatacaaaccaaagaatatcactagctgttactaaaataaaaagccttgccaatgaattattaaataagaaaaatgcaagcacttccagttaaaatagcagttaaatactcaagagtttctactaacaaacaa

SEQ ID NO: 20281 - DNA, 260 bp, Unknown
  Description of Unknown: LeftRegion for integrase B7282 sequence
ttcaattatcagctgtgtgtttatgttgccacataacagaaggatgatacatgcaaacaatggtacaggcggaattttctgattagacaaaaatgaaaccgccccggtgctggaacaccgaggcggagattgtagacctgagcaagtgaaatgtaacagagctaccctttcatggtagcacatggaggcgaaaaaggcaagtgaagacagcattgtattgccgcgtttcgacggaagaacaagcgaggacaggggagagc

SEQ ID NO: 20282 - DNA, 260 bp, Unknown
  Description of Unknown: LeftRegion for integrase B7283 sequence
aagcaatcacaatgttgtatatgcgctcgttatgcttcccaatgccgccttagctgcaattggaatttcgattttggtgataatagcattgatattattccttcaactccgaaaaagaaatgtttccggaacgacggtagatgcagccgctctcgatgatgatatccgaagcgcatttgaaaaataaagaaggtgacccaatgaaaaccgctgcggcatatatccgcgtttctaccgacgatcaggtagaatactccccc

SEQ ID NO: 20283 - DNA, 260 bp, Unknown
  Description of Unknown: LeftRegion for integrase B7284 sequence
gatactcgctagctttatccaaatgccatatttttgatttctcatcctttgaagtatctgctaaatctaaatatttgagatacaacctataatacatttcattttcgctgtcaagtatttctaaagtctttttatattttttatcaaacatataaaccactcctttcataaaggagaatgtgaattacgcgaaggaggtgatgccaactttatcccttggcaagtacatcatagatataggaagtgactccatgacaaca

SEQ ID NO: 20284 - DNA, 260 bp, Unknown
  Description of Unknown: LeftRegion for integrase B7285 sequence
ttggggcggtggaagaccagatggaagaaacggcgaaagcgaaagaagaagcatcgtcctgacaagaattttgagaaaatagcggggaagagtgcttgtcgcccccttatgggggtgtggattgaaataacagtttatcaacaatcagtgaaaaaaccgccctgcaaggaattgtggggcggtacaattaaggagcgattatgaaaagagcagttttttatggtcgttattccagcgaccgacaaacagaacagagcatt

SEQ ID NO: 20285 - DNA, 260 bp, Unknown; identical to SEQ ID NO: 20278
  Description of Unknown: LeftRegion for integrase B7286 sequence

SEQ ID NO: 20286 - DNA, 260 bp, Unknown
  Description of Unknown: LeftRegion for integrase B7287 sequence
aggaaattgccgcactctgcaatgtgtccatgcaggcggcagaaattcgctccagaaggatgcaaatcttgcttgcaagaaataaatttttgacgcatccgctggaacgacaggtgtttgaacagtttcaacagtttatcaacaatcagtaaaaaaccgccctgcaaggaattgtggggcggtacaattaaggagcgattatgaaaagagcagtgttttatggtcgttattccagcgaccgacagacagaacagagcatt

SEQ ID NO: 20287 - DNA, 260 bp, Unknown
  Description of Unknown: LeftRegion for integrase B7288 sequence
tattcttccgatgacgacgaagaagatttaaacgaataaaagaaaaccgccccagtgcgccaacaccaggacggctcagtaacattccgaagaatgatacctgttcagcaaaacatattgtatcatcttcggaaacgccagacaagcagaacgtttgttttggtgtttttcttatacccaaaattaaagaaggtgatattatgtcagcacttaaaaacggtgctctctacatccgcgtcagcaccgcggatcagacagaa

SEQ ID NO: 20288 - DNA, 260 bp, Unknown
  Description of Unknown: LeftRegion for integrase B7289 sequence
gaggattttgacccttttaaatagcaaaaccgcccggtgctggtaacaccgaacggccttgcatagatttctcttaccggatgcccggaaagatatattcaaacctgaacactttgaattatatcattctttcgggcacctcgcaagaggtgtattttttatacccttttttaatatttttatacgaaaggatgatcgaaatgagaataggtgcagcttatattcgtgtcagcacggacgaccagctggatatcagcccg

SEQ ID NO: 20289 - DNA, 260 bp, Unknown
  Description of Unknown: LeftRegion for integrase B7290 sequence
aagcaatcacaatgttgtatatgcgctcgttatgcttcccaatgccgccttagctgcaattggaatttcgattttggtgataatagcattgatattattccttcaactccgaaaaagaaatgtttccggaacgacggtagatgcagccgctctcgatgatgatatccgaagcgcatttgaaaaattaagaaggtgacccaatgaaaaccgctgcggcatatatccgcgtttctaccgacgatcaggtagaatactccccc

SEQ ID NO: 20290 - DNA, 260 bp, Unknown
  Description of Unknown: LeftRegion for integrase B7291 sequence
aggaagccgattacgctatacagaatttaaactaaaataaaaaaccgccccggtgcgccaacaccaagacggctcagtaacattccgaagaatgataccgtttctcaacaaaacatattgtatcatcttcggaaacgccagacaagcagaacgtttgttttggtgtttttcttatacccaaaattaaagaaggtgatattatgtcagcacttaaaaatggtgctctctacatccgcgtcagcaccgcggatcagaccgaa

SEQ ID NO: 20291 - DNA, 260 bp, Unknown
  Description of Unknown: LeftRegion for integrase B7292 sequence
cgggaaaaacctgattataacgtccattgtgtcgtttgtgctgtacgtgattgtcgtgtctgtaatctccaaccataaagcaaaaaaggcagaagaggaactgtcaagcttgtatgatagttatagctacagctataacattgatgattaaaaaagccgccctgcaaggaattgtggggcggtacaattaaggagcgattatgaaaagagcagtgttttatggtcgttattccagcgaccggcagaccgaacagagcatt

SEQ ID NO: 20292 - DNA, 260 bp, Unknown
  Description of Unknown: LeftRegion for integrase B7293 sequence
gattttttctaaccctttagatagcaaaaccgcccggtgctggtaacaccgaacggcttcacatagatttctcttaccggatgcccggaaagatatattcaaacctgaacattttgaattatatcattctttcgggcacctcgcaagaggtgtattttttatacccttttttaatatttttatacgaaaggatgatcgaaatgagaataggtgcagcttatatccgtgtcagcacggacgaccagctggatatcagcccg

SEQ ID NO: 20293 - DNA, 260 bp, Unknown
  Description of Unknown: LeftRegion for integrase B7294 sequence
ggagttgttttgagtgtctccctctttacgagggagtggattgaaatgtgccagacggatgcaaatcttgcttgcaagaaataaatttttaacgcatccgctggaacgacaggtatttgaacagtttcaacagtttatcaacaatcagtaaaaaaaccgccctgcaaggaattgtggggcggtacaattaaggagcgattatgaaaagagcagtgttttatggtcgttattccagcgaccgacaaacagaacagagcatt

SEQ ID NO: 20294 - DNA, 260 bp, Unknown
  Description of Unknown: LeftRegion for integrase B7295 sequence
gtagataaataaggataaaaataaaaaccggctcctgacggcaatcaggaaccggtaagtaacattccgaagaatgataccctaattcgcaaaaatattgtatcatcttcgaagcagctatgcaagcggaacacccgttctcttgccggctgttatttttgtactcatttttacatacaacaaaacaggaaggtgatattatggcaaagttaagaaatggcgccctctatatccgtgtcagcaccgccgatcagacggag

SEQ ID NO: 20295 - DNA, 260 bp, Unknown
  Description of Unknown: LeftRegion for integrase B7296 sequence
cgattacgctatacagaatttaaactaaaataaaaaaccgccccggtgcgccaacaccaggacggctcagtaacattccgaagaatgatacctgttcagcaaaacatattgtatcatcttcggagacgccaatcaatcagaacgtttgttttggcgttttttctcatacccaaaattgaaaatttaaagaaggtgatattatgtcagcactaaaaaacggtgctctctacatccgcgtcagcaccgcggatcagacagaa

SEQ ID NO: 20296 - DNA, 260 bp, Unknown
  Description of Unknown: LeftRegion for integrase B7297 sequence
aatagtcaaaattaaattatatacaaaaaccgcccggtgctggtaacaccgaacggccttgcatagatttctcttaccggatgcccggaaagatatattcaaacctgaacactttgaattatatcattcttttgggcacctcgcaagaggtgtattttttatacccttttttaatatttttatacgaaaggatgatcgaaatgagaataggtgcagcttatatccgtgtcagcacggacgaccagctggatatcagcccg

SEQ ID NO: 20297 - DNA, 260 bp, Unknown
  Description of Unknown: LeftRegion for integrase B7298 sequence
aatagtcaaaattaaattatatacaaaaaccgcccggtgctggtaacaccgaacggccttgcatagatttctcttaccggatgcccggaaagatatattcaaacctgaacactttgaattatatcattctttcgggcacctcgcaagaggtgtattttttatacccttttttaatatttttatacgaaaggatgatcaaaatgagaataggtgcagcttatatccgtgtcagcacggacgaccagctggatatcagcccg

SEQ ID NO: 20298 - DNA, 260 bp, Unknown
  Description of Unknown: LeftRegion for integrase B7299 sequence
gtcttttacgttacataaatataaaaaaccggctcctgacgggaatcaggaaccggcaagtaacacatccgaagatgcatcacaaattcagcaaaaatattgtatcatcttcggagcagctatgcaagcggaacacccgttctctcgctggctgttatttttgtactcatttttacataaaataggaaggtgatatttatatggcaaagttaagaaatggcgccctctatatccgtgtcagcactgctgatcagacggag

SEQ ID NO: 20299 - DNA, 260 bp, Unknown
  Description of Unknown: LeftRegion for integrase B7300 sequence
aaccgctcctgcgccaacaagaacggtttcctcataatccatatgaggtcgtatataacgtatatatccgaagagatacatacaatactcacaaaaatattgtatcatcttcggagcagctatgcaagcggaacacccgttctctcgctggctgttatttttgtactcatttttacataaaataggaaggtgatatttatatggcaaagttaagaaatggcgccctctatatccgtgtcagcaccgccgatcagacggag

SEQ ID NO: 20300 - DNA, 260 bp, Unknown
  Description of Unknown: LeftRegion for integrase B7301 sequence
agggattttttctttatacaaataaaaaccggctcctgactgcaatcaggaaccggcaagtaacacatccgaagatgtatcacaaaatctgcaaaaatattgtatcatcttcggaggcagtctgcaagcggaacacccgttctcttgctggctgttatttttgtactcatttttacataaaataggaaggtgatatttatatggcaaagttaagaaatggtgccctctatatccgtgtcagcaccgccgatcagacggag

SEQ ID NO: 20301 - DNA, 260 bp, Unknown; identical to SEQ ID NO: 18341
  Description of Unknown: LeftRegion for integrase B7302 sequence

SEQ ID NO: 20302 - DNA, 260 bp, Unknown
  Description of Unknown: LeftRegion for integrase B7303 sequence
aatttttacagctaaaatctaaataaataataaaaaccgtcccagtattccccaacaccaggacggctcagtaacattccgaagaatgatacctgttcagcaaaacatattgtatcatcttcggaggcgccaaacaatcagaacgtttgttttggcgtttttttcatacccaaaattgaaaatttaaagaaggtgatattatgtcagcactaaaaaatggtgctctctacatccgcgtcagcaccgcggatcagaccgaa

SEQ ID NO: 20303 - DNA, 260 bp, Unknown
  Description of Unknown: LeftRegion for integrase B7304 sequence
ggacaatgaaaatccccctgtctaccaaagatatactctctttatatattttacaacacaaacacatgtttcgcaacaatcttttccaacaaaattccccctcatcgactggacctcgatgagggggcagggcagataattcttgtggtgcaaggtattattctgccctttcataatatcgtaatgaaagggtgatgtcaatgaaaatcgctgcagcctatgtgcgcgtcagcaccgatgaccagctggaatactctccg

SEQ ID NO: 20304 - DNA, 260 bp, Unknown
  Description of Unknown: LeftRegion for integrase B7305 sequence
tcgcggaatcactgaaaaacttcgaataaaagaaaaaccgccccggtgttggcgcaccaggacggctcagtaacattccgaagaatgataccagttcaacaaaacatattgtatcatcttcggaaacgtcagacaagcagaacgtttgttttggcgttttttctcatacccaaaatcgaaaatttaaagaaggtgatattatgtcagcactaaaaaacggtgctctctacatccgcgtcagcaccgcggatcagacagaa

SEQ ID NO: 20305 - DNA, 260 bp, Unknown
  Description of Unknown: LeftRegion for integrase B7306 sequence
aaccgctcctgcgccaacaagaacggtttcctcataatccatatgaggtcgtatataacgtatatatccgaagagatacatacaatactcgcaaaaatattgtatcatcttcggagcagctatgcaagcggaacacccgttctgcttctggctgttatttttgtactcatttttacataaaataggaaggtgatatttatatgacaaagttaagaaatggtgccctctatatccgtgtcagcaccgctgatcagacggag

SEQ ID NO: 20306 - DNA, 260 bp, Unknown
  Description of Unknown: LeftRegion for integrase B7307 sequence
agaaattgccgcactctgcaatgtttccatgcaggcggcagaaatccgttccagacgaatgcaaatcttgcttgcaagaaataaatttctgacgcatccgctggaacggcaggtatttgaacagtttcaacagtttatcaacaatcagtgaaaaaaccgccctgcaaggaattgtggggcggtacaattaaggagcgattatgaaaagagcagtgttttatggtcgttattccagcgaccggcagaccgaacagagcatt

SEQ ID NO: 20307 - DNA, 260 bp, Unknown; identical to SEQ ID NO: 20295
  Description of Unknown: LeftRegion for integrase B7308 sequence

SEQ ID NO: 20308 - DNA, 260 bp, Unknown
  Description of Unknown: LeftRegion for integrase B7309 sequence
gaagaagccgattacgctatacagaatttagactaaaataaaaaaccgccccagtgcgccaacaccaggacggctcagtaacattccgaagaatgataccagttcgacaaaacatattgtatcatcttcggaaacgtcagacaagcagaacgtttgttttggcgttttttcttatacccaaaattaaagaaggtgatattatgtcagcacttaaaaatggtgctctctacatccgcgtcagcaccgcggatcagacagaa

SEQ ID NO: 20309 - DNA, 260 bp, Unknown
  Description of Unknown: LeftRegion for integrase B7310 sequence
cacaggtgttgtagaacagattcagtaaactaaaaaaccgccccggtgcgccaacaccaggacggctcagtaacattccgaagaatgataccagttcgacaaaacatattgtatcatcttcggatacgtcagacaagcagaacgtttgttttggcgttttttcttatattcaaaattgaaaacttaaagaaggtgatattatgtcagcacttaaaaatggtgctctctacatccgcgtcagcaccgcggatcagaccgaa

SEQ ID NO: 20310 - DNA, 260 bp, Unknown; identical to SEQ ID NO: 20266
  Description of Unknown: LeftRegion for integrase B7311 sequence

SEQ ID NO: 20311 - DNA, 260 bp, Unknown
  Description of Unknown: LeftRegion for integrase B7312 sequence
caaagtgtttggggcaactagcgttctccgccagacgtttagaacactagagcgcagaggctacagagtgaaagtcaaatgcgagatggtcgggtggtttgctcctggcatacccgagatattgatgatgatccccgaccctgacgagatttttagatggatggatgattgcgagcgtatgggcaaggaggtgccgtttgatgaatggaaaacttgcaactaaaactgcagtgatttacgcacgcttctcgtgctctaag

SEQ ID NO: 20312 - DNA, 260 bp, Unknown
  Description of Unknown: LeftRegion for integrase B7313 sequence
aaccgctcctgcgccaacaagaacggtttcctcataatccatatgaggtcgtatataacgtatatatccgaagagatacatacaatactcacaaaaatattgtatcatcttcggagcagctatgcaagcggaacacccgttctctcgctggctgttatttttgtactcatttttacataaaataggaaggtgatatttatatgacaaagttaagaaatggtgccctctatatccgtgtcagcaccgccgaccagacggag

SEQ ID NO: 20313 - DNA, 260 bp, Unknown; identical to SEQ ID NO: 20256
  Description of Unknown: LeftRegion for integrase B7314 sequence

SEQ ID NO: 20314 - DNA, 260 bp, Unknown
  Description of Unknown: LeftRegion for integrase B7315 sequence
aaatacagggtcttttccgtatttgattttcaaaaaagaaaaaccgccttggtgttcgcagcaccaagacggctcagtaacattccgaagaatgataccgtttctcaacaaaacatattgtatcatcttcggagacaccaatcaatcagaacgtttgttttggtgtttttcttatacccaaaattaaagaaggtgatattatgtcagcacttaaaaatggtgctctctacatccgcgtcagcaccgcggatcagacagaa

SEQ ID NO: 20315 - DNA, 260 bp, Unknown; identical to SEQ ID NO: 20309
  Description of Unknown: LeftRegion for integrase B7316 sequence

SEQ ID NO: 20316 - DNA, 260 bp, Unknown
  Description of Unknown: LeftRegion for integrase B7317 sequence
cgcagcaaggagaaaaaacaaaaggtatatagtatggatcttaatgctttcgatagccttatcgaaaaggtggaagcagaaaaagaataaaaaaatccccctcatcgactggacctcgatgaaggggcagggcagataattcttgcggtgcaaggtattattctgccctttcataatatcgcagtgaaagggtggtgtcaatgaaaatcgctgcagcctatgtacgcgtcagcaccgatgaccagctggaatactctcca

SEQ ID NO: 20317 - DNA, 260 bp, Unknown
  Description of Unknown: LeftRegion for integrase B7318 sequence
atttttacagctaaaatctaaataaataataaaaaccgccccggtattccccaacaccaggacggctcagtaacattccgaagaatgataccagttcgacaaaacatattgtatcatcttcggaaacgtcagacaagcagaacgtttgttttggcgttttttcttatattcaaaattgaaaacttaaagaaggtgatattatgtcagcactaaaaaacggtgctctctacatccgcgtcagcaccgcggatcagaccgaa

SEQ ID NO: 20318 - DNA, 260 bp, Unknown
  Description of Unknown: LeftRegion for integrase B7319 sequence
aatagctaaatactattttatcggcgacgaaatggttaaaatggcattcggctttcccgactctccatcaacattcgaaacctacgatgtggaagtaacttataataatgtcgatgatgcctgctttgtagtgccgtcaaccgccgttattaatatttcatggctttcattcctgtttataaaatatagaaggtgacccaatgaaaacagcagcggcatatatccgcgtttctaccgacgaccaggtcgaatactccccc

SEQ ID NO: 20319 - DNA, 260 bp, Unknown
  Description of Unknown: LeftRegion for integrase B7320 sequence
ttctgttgtaaatttataattaatcaacatccccatcccctttacaataatttcaatactatttttatcatattcctatcaattacataagtaaacaattcgcaacaaaaatcgtcatttttttaaagtgacgatttttgttgcgaactcttgttctttttttaaattatgaaatatagtaaggagaggaggcgatttttatgattaaaaaacgtgtagggctttacattagagtttcaactgaagaacaagccatggaa

SEQ ID NO: 20320 - DNA, 260 bp, Unknown; identical to SEQ ID NO: 20311
  Description of Unknown: LeftRegion for integrase B7321 sequence

SEQ ID NO: 20321 - DNA, 260 bp, Unknown
  Description of Unknown: LeftRegion for integrase B7322 sequence
agggattttttctttatacaaataaaaaccggctcctgactgcaatcaggaaccggcaagtaacacatccgaagatgcatcacaaattcagcaaaaatattgtatcatcttcggagcagctatgcaagcggaacacccgttctcttgcaagctgttatttttgtactcatttttacataaaataggaaggtgatatttatatggcaaagttaagaaatggcgccctctatatccgtgtcagcactgctgatcagacggag

SEQ ID NO: 20322 - DNA, 260 bp, Unknown
  Description of Unknown: LeftRegion for integrase B7323 sequence
aaccgctcctgcgccaacaagaacggtttcctcataatccatatgaggtcgtatataacgtatatatccgaagagatacatacaatactcacaaaaatattgtatcatcttcggagcagctatgcaagcggaacacccgttctctcgctggctgttatttttgtactcatttttacataaaataggaaggtgatatttatatggcaaagttaagaaatggcgccctctatatccgtgtcagcactgctgatcagacggag

SEQ ID NO: 20323 - DNA, 260 bp, Unknown
  Description of Unknown: LeftRegion for integrase B7324 sequence
atttttacagctaaaatctaaataaataataaaaaccgtcccggtattccccaacaccaggacggctcagtaacattccgaagaatgatacctgttcagcaaaacatattgtatcatcttcggaggcgccaaacaatcagaacgtttgttttggcgttttttttcatacccaaaattgaaaatttaaagaaggtgatattatgtcagcactaaaaaatggtgctctctacatccgcgtcagcaccgcggatcagaccgaa

SEQ ID NO: 20324 - DNA, 260 bp, Unknown; identical to SEQ ID NO: 18952
  Description of Unknown: LeftRegion for integrase B7325 sequence

SEQ ID NO: 20325 - DNA, 260 bp, Unknown
  Description of Unknown: LeftRegion for integrase B7326 sequence
accgtgaagaattggagggggataaagaagttcctgcgaacggagaagatagtccccatagaattgctcatgcgtaaaaaggcgttggaggtgatactacgaaagcggtaatctatgccagatattcgagccatagccagcgggaagaatccatagagggacagcttcgggagtgtcacgactttgcgctgaaaaacggaatgaccatcatcggtgagtactgcgataaggcaatctcaggaaaaaccgacaatcgaccg

SEQ ID NO: 20326 - DNA, 260 bp, Unknown; identical to SEQ ID NO: 20268
  Description of Unknown: LeftRegion for integrase B7327 sequence

SEQ ID NO: 20327 - DNA, 260 bp, Unknown; identical to SEQ ID NO: 20309
  Description of Unknown: LeftRegion for integrase B7328 sequence

SEQ ID NO: 20328 - DNA, 260 bp, Unknown
  Description of Unknown: LeftRegion for integrase B7329 sequence
atttttacagctaaaatctaaataaataataaaaaccgccccggtattccccaacaccaggacggctcagtaacattccgaagaatgatacctgttcagcaaaacatattgtatcatcttcggaggcgccaaacaatcagaacgtttgttttggcgttttttttcatacccaaaattgaaaatttaaagaaggtgatattatgtcagcactaaaaaatggtgctctctacatccgcgtcagcaccgcggatcagaccgaa

SEQ ID NO: 20329 - DNA, 260 bp, Unknown
  Description of Unknown: LeftRegion for integrase B7330 sequence
agccgattacgctatacagaatttagactaaaataaaaaccgccccggtgcgccaacaccaggacggctcagtaacattccgaagaatgataccagttcgcaaaacatattgtatcatcttcggaaacgccagacaagcagaacgtttgttttggtgtttttctcatacccaaaattgaaaatttgaagaaggtgatattatgtcagcacttaaaaacggtgctctctacatccgcgtcagcaccgcggatcagacagaa

SEQ ID NO: 20330 - DNA, 260 bp, Unknown
  Description of Unknown: LeftRegion for integrase B7331 sequence
atcgcggaattactgaaaaacttcgaataaaagaaaaaccgccccggtgttggcgcaccaggacggctcagtaacattccgaagaatgataccagttcgacaaaacatattgtatcatcttcggaaacgtcagacaagcagaacgtttgttttggcgtttttctcatacccaaaattgaaaatttgaagaaggtgatattatgtcagcacttaaaaacggtgctctctacatccgcgtcagcaccgcggatcagaccgaa

SEQ ID NO: 20331 - DNA, 260 bp, Unknown
  Description of Unknown: LeftRegion for integrase B7332 sequence
cgattacgctatacagaatttagactaaaataaaaaaccgccccggtgcgccaacaccaggacggctcagtaacattccgaagaatgataccagttcgacaaaacatattgtatcatcttcggaaacgtcagacaagcagaacgtttgttttggcgttttttcttatattcaaaattgaaaacttaaagaaggtgatattatgtcagcacttaaaaatggtgctctctacatccgcgtcagcaccgcggatcagaccgaa

SEQ ID NO: 20332 - DNA, 260 bp, Unknown; identical to SEQ ID NO: 20272
  Description of Unknown: LeftRegion for integrase B7333 sequence

SEQ ID NO: 20333 - DNA, 260 bp, Unknown
  Description of Unknown: LeftRegion for integrase B7334 sequence
cgtagataaataaggataaaaataaaaaccggctcctgacggcaatcaggaaccggcaagtaacacatccgaagatgcatcacaaattcagcaaaaatattgtatcatctttggagcagctatgcaagcggaacgcctgttctctcgctggctgttatttttgtactcatttttacataaaataggaaggtgatatttatatggcaaagttaagaaatggtgccctctatatccgtgtcagcactgccgatcagacggag

SEQ ID NO: 20334 - DNA, 260 bp, Unknown
  Description of Unknown: LeftRegion for integrase B7335 sequence
tattcttccgatgacgacgaagaagatttaaacgaataaaagaaaaccgccccagtgcgccaacaccaggacggctcagtaacattccgaagaatgatacctgttcagcaaaacatattgtatcatcttcggaaacgccagacaagcagaacgtttgttttggtgtttttcttatacccaaaattaaagaaggtgatattatgtcagcacttaaaaatggtgctctctacatccgcgtcagcaccgcggatcagacagaa

SEQ ID NO: 20335 - DNA, 260 bp, Unknown
  Description of Unknown: LeftRegion for integrase B7336 sequence
aatagtcaaaattaaattatatacaaaaaccgcccggtgctggtaacaccgaacggccttgcatagatttctcttaccggatgcccggaaagatatattcaaaatcgaacactttgaattatatcattcttttgggcacctcgcaagaggtgtattttttatacccttttttaatatttttatacgaaaggatgatcgaaatgagaataggtgcagcttatatccgtgtcagcacggacgaccagctggatatcagcccg

SEQ ID NO: 20336 - DNA, 260 bp, Unknown
  Description of Unknown: LeftRegion for integrase B7337 sequence
acctggctaaatagtcctttacttcctctctagtttcaatcctacaattatccatcgcattgcctttcaagtatcatatgatacttatatcgtatcattttgcgctataaagtcaatagataatttgttaaaacaaaaattttctgcactttataaagtgagtgcctccagttctaaaaaagcgaaagggttgatcctaaatgaaaatagctgcagcctatgtgcgcgtcagcacagatgatcagcttgaatattccccg

SEQ ID NO: 20337 - DNA, 260 bp, Unknown; identical to SEQ ID NO: 20278
  Description of Unknown: LeftRegion for integrase B7338 sequence

SEQ ID NO: 20338 - DNA, 260 bp, Unknown
  Description of Unknown: LeftRegion for integrase B7339 sequence
gtttaagtgtctcttttgccgtatttctcttagcctgttccttagtgtcaaatcctgtacctcttgtttctattatgtaataattccagctttttggatagcctttactgctatctcggtaaaaaattattgcccatattacattatgacggtagacaagcgcccaaatgcatggtatctttgcccaagaggtggtttttatgaaaatagcagcggcgtatctgcgtgtctccactgaggagcaggacgagtattcgctt

SEQ ID NO: 20339 - DNA, 260 bp, Unknown
  Description of Unknown: LeftRegion for integrase B7340 sequence
atcaaagaaaccgaaaaaaaagcaaaaacagaagtaaagaagctaaaataaaaaacgccgcccggtgctggaacaccgaacggcaaaagatacaatccacacacatacacattaaaaaggagcagattgcgtaaatatattatcacatctgcttcgtttttgcaagtttaatttactcaaaaataaagcaggtgttttttatgacaacagcagctgcatatatcagagtttcctccgagcgtcaggacgaatattctccc

SEQ ID NO: 20340 - DNA, 260 bp, Unknown
  Description of Unknown: LeftRegion for integrase B7341 sequence
aggccaacgtagccttaattcttcaacaacacttaccgaaagagtaaaaacaactgtttctaaaatagatatagttgcaaacaaaaaagcctcacgctctcaaactttggcgagtctgagcgtgaggcagcagtatagtaataggcattaaatggcccgttttactatacccattttatcaaaaagggggtataaaagcaatgaaaacaacgaataaagtagctatatatgtcagggtttcaacctcttatcaagctgaa

SEQ ID NO: 20341 - DNA, 260 bp, Unknown
  Description of Unknown: LeftRegion for integrase B7342 sequence
taacaaaacataaaaccgcataataagaaaaaccgccccggtgttaccagcaccagagcggtcagcacatccgaagatgcacacaatttttcagcaaaaatattgtatcatcttcggggcagccatgcaagcggaacctttgttcgcgctggctgttatttttatacttatttttacataattataatcgaggtgataccatgaccgaacaaaaatctgatgatctgcgcatgggagcactgtatatccgagtcagcacc

SEQ ID NO: 20342 - DNA, 260 bp, Unknown
  Description of Unknown: LeftRegion for integrase B7343 sequence
ggagcaagaacgccctgcgccgatgttctacttgagctttgcgagctttacaatatccgctctgtcgggcaacttttcggaagcaccgagacggacgagaacgagatttcagaatctgaaaaatacctgctcaaactttacagagaagcagacagtgcggcgaaaacagccgttataaaactattaaggagttggaatatgtgaacgccgtaatatacgcacgatattcttccagcaaccaaagggaagaaagtatcgaa

SEQ ID NO: 20343 - DNA, 260 bp, Unknown
  Description of Unknown: LeftRegion for integrase B7344 sequence
ttgataagaaatattgaattaatataactaaaaaccgcccggtactccaataccgaacggtcttacatacacccgaagatgtacatccatattgcaagttatattgtatcatcttcggaaacacccgtcaacggaacatattttcgttgggtgttatttttatacatttttttaatataatttacgaaggagtgatataattggaagaattaaaatatgcttacggatacattcgtgtgtcaacagggaagcaagacgaa

SEQ ID NO: 20344 - DNA, 260 bp, Unknown
  Description of Unknown: LeftRegion for integrase B7345 sequence
ataactacccgaaagagtaattcgtgatttattttcacatcaatagatgtaaaaaatgccgccggtgctggaacaccgaacggcaaaagatacaatccacacacatacacattaaaaaggagcagattgcgtaaatatattatcacatctgcttcgtttttgcaagtttaatttactcaaaaataaagcaggtgttttttatgacaacagcagctgcatatatcagagtttcctccgagcgtcaggacgaatattctccc

SEQ ID NO: 20345 - DNA, 260 bp, Unknown
  Description of Unknown: LeftRegion for integrase B7346 sequence
gatgtgggcaaaaaggtcagagagactatccaagaacttggtggtacaatgcctgagaaccttcctacgcctaaaaaaggtatcaagcaattggaacgacttgagcaaaaaaaattaaaagacaagtagccatccctgaaaggcttcaaggtattttacacccgaacttccataatctatacagaaaggacaccgatgcaatgaaagtgggagctgcatacataagagtttcatccgacgaccaaactgaatacagtccc

SEQ ID NO: 20346 - DNA, 260 bp, Unknown
  Description of Unknown: LeftRegion for integrase B7347 sequence
aattgaatatcaaggaaaaacagtcgatcaaattgctgcatatctaaatgtgattccagaacttgtaaagcttaaatttctttagcttttttattttttacttctgaacagaacatgtgttctatataataaaatgaggtgatattatcaaaaaaaatatttttaaaattgttgctgcatacataagaataagcactcatatgcaagaagaattgtcccccgatgcccaattacgtcttattagagaatattgtgatcgc

SEQ ID NO: 20347 - DNA, 260 bp, Unknown
  Description of Unknown: LeftRegion for integrase B7348 sequence
caaacaaaacttgaacaaaatacataaaagaaaaaccggctcctgcgccaacaggaaccggcgagcacatccgaagatgtacgcaatttttcagcaaaaatattgtatcatcttcggggcagccatgcaagcggaacctttgttcgcgcaggctgttatttttatacttatttttacataattataatcgaggtgataccatgaccgaacaaaaatctgatgatctgcgcatgggagcactgtatatccgtgtcagtacc

SEQ ID NO: 20348 - DNA, 260 bp, Unknown
  Description of Unknown: LeftRegion for integrase B7349 sequence
ttaataagaaatattgaattaatataactaaaaaccgcccggtactccaataccgaacggtcttacatacacccgaagatgtacatccatattgcaagttatattgtatcatcttcggaaacacccgtcaacggaacatattttcgttgggtgttatttttatacatttttttaatataatttacgaaggagtgatataattggaagaattaaaatatgcttacggatacattcgtgtgtcaacagggaagcaagacgaa

SEQ ID NO: 20349 - DNA, 260 bp, Unknown
  Description of Unknown: LeftRegion for integrase B7350 sequence
aaaacgtcgcccgcatcgaagtgaaccacggccaaaagctggacgccctttttgacggatacaaaatgctgtctgaaaaaattgaccagctctctctcgccgaagcacaggaagatgatatggcagttatgaaagccgctattaaacacctttctagcaaaatagcagagctggaaaaggcgatataaaggtgataatacatgaaacttgcagccgcctatatccgcgtcagtacggacgaccaaattgaatacagtcca

SEQ ID NO: 20350 - DNA, 260 bp, Unknown
  Description of Unknown: LeftRegion for integrase B7351 sequence
ctttgcagtcggcaatctaattttataaaagaaaaaccggctcctgcgccaacaggaaccggccagcacatccgaagatgcaccttattttcagcaaaaatattgtatcatcttcggggcagccatgcaagcggaacctttgttcgcgccggctgttatttttatacttatttttacataattataatcgaggtgataccatgaccgaacaaaaatctgatgatctgtgcatgggagcactgtatatccgtgtcagcacc

SEQ ID NO: 20351 - DNA, 260 bp, Unknown
  Description of Unknown: LeftRegion for integrase B7352 sequence
caaagaaaccgaaaaaaaagcaaaaacagaagtaaagaagctaaaataaaaaacgccgcccggtgctaccaacaccgaacggcaaaagatacaatccacacacatacacattaaaaaggagcagattgcgtaaatatattatcatatctgtttcgtttttgcaagtttaatttactcaaaaataaagcaggtgtttttttatgacaacagcagctgcatatatcagagtttcctccgagcgtcaggacgaatattctccc

SEQ ID NO: 20352 - DNA, 260 bp, Unknown
  Description of Unknown: LeftRegion for integrase B7353 sequence
acctacccgaaagactgatttgtgatttattttcgcatcaatagaagtaaaaaaacgccgcccggcgctggaacaccgaacggcaaaagatacaatccacacacatacacattaaaaaggagcagattgcgtaaatatattatcatatctgcttcgtttttgcaagtttaatttactcaaaaataaggcaggtgttttttatgacaacagcagctgcatatatcagagtttcctccgagcgtcaggacgaatattccccc

SEQ ID NO: 20353 - DNA, 260 bp, Unknown
  Description of Unknown: LeftRegion for integrase B7354 sequence
tatgcatactcacattagtctttgcggcatttatgaattttctgccctatattttagtaatagctggatctattgctatttactgtgttgggtatcgaataatcaattttgctaaacataaaagataaaaaactaaaccggtcgatttcgaccggtttaaaaagaacgcaaaaagaacatacgtacgaaaggagaataacatgaaagtcgctctttacgtgagagtttcaaccctagaacaggctgaagaaggatactca

SEQ ID NO: 20354 - DNA, 260 bp, Unknown
  Description of Unknown: LeftRegion for integrase B7355 sequence
gaggattttgacccttttaaatagcaaaaccgcccggtgctaccaacaccgaacggcttcacatagatttctctcgccggatgcccggaaagatacattcaaaatcgaacactttgaattatatcattctttcgggcacctcgcaagaggtgtattttttatacccttttttaatatttttatacgaaaggatgatcgaaatgagaataggtgcagcttatatccgtgtcagcacggatgaccagctggatatcagcccg

SEQ ID NO: 20355 - DNA, 260 bp, Unknown
  Description of Unknown: LeftRegion for integrase B7356 sequence
gtatattatagcaaatatgctttaaatgtcaagaaccgcccctgcgccaacaggaacggcttaacatacaccagaagatgtacatacattctgaacaaatatattgtatcatcttcggaaacacccgtcaacggaacatattttcgttgggtgttatttttatacatttttttaatataatctacgaaggagtgatataattggaagaattaaaatatgcttatggatacattcgtgtgtcaacagggaagcaagacgaa

SEQ ID NO: 20356 - DNA, 260 bp, Unknown
  Description of Unknown: LeftRegion for integrase B7357 sequence
caaaacgacagtgctcccttgaaaggggcactgttgctttttctctatttcaaaaacaccgcccggagcggcaactccggacggttgaaatacaatccacacacatacacattaaaaaggagcagattgcgtaaatatattatcatatctgcttcgtttttgcaagtttaatttactcaaaaataaagcaggtgttttttatgacaatagcagctgcatatatcagagtttcctccgagcgtcaggacgaatattctccc

SEQ ID NO: 20357 - DNA, 260 bp, Unknown
  Description of Unknown: LeftRegion for integrase B7358 sequence
acacctacccgaaagactgatttgtgatttattttcacaataataaaaataaaaatgccgcccggtgctggcacaccgaacggcaaaagatacaatccacacacatacacattaaaaaggagcagattgcgtaaatatattatcacatctgcttcgtttttgcaagtttaatttactcaaaaataaagcaggtgttttttatgacaacagcagctgcatatatcagagtttcctccgagcgtcaggacgaatattccccc

SEQ ID NO: 20358 - DNA, 260 bp, Unknown
  Description of Unknown: LeftRegion for integrase B7359 sequence
acacctacccgaaagactgatttgtgatttattttcacaacaataaaaataaaaacgccgcccggtgctggaacaccgaacggcaaaagatacaatccacacacatacacattaaaaaggagcagattgcgtaaatatattatcacatctgcttcgtttttgcaagtttaatttactcaaaaataaagcaggtgttttttatgacaatagcagctgcatatatcagagtttcctccgagcgtcaggatgaatattccccc

SEQ ID NO: 20359 - DNA, 260 bp, Unknown
  Description of Unknown: LeftRegion for integrase B7360 sequence
aacaatcagacttgagaaagtaaaataattcagttgcagagcttataaataaaactgccgcccggtgctggaacaccgaacggcaaaagatacaatccacacacatacacattaaaaaggagcagattgcgtaaatatattatcacatctgcttcgtttttgcaagtttaatttactcaaaaataaagcaggtgttttttatgacaacagcagctgcatatatcagagtttcctccgagcgtcaggacgaatattccccc

SEQ ID NO: 20360 - DNA, 260 bp, Unknown
  Description of Unknown: LeftRegion for integrase B7361 sequence
gaattatataaacgtggattagttaaataaaaaatcgcggatctcccatcgacaagagtattggccggcttgatttgagaacattagaaaaatataaaaaaggcttcttaatatatgaccattttgccgacatcggcaaaatggttggcgcataagaagcttgaaaattacaagaaataatctcaaaggataatgttataatgaaaacaggtgctgcatacataagggtctcgtctgatgaccaaactgaatatagtccc

SEQ ID NO: 20361 - DNA, 260 bp, Unknown
  Description of Unknown: LeftRegion for integrase B7362 sequence
acaatgtaaattagaaaaagaataaagaaaaaccgccccggtgttaccagcaccagagcggccagcacatccgaagatgcacacaatttttcaacaaaaatattgtatcatcttcggggcagccatgcaagcggaacctttgttctggctggctgttatttttgtacttatttttacataattataatcgaggtgataccatgaccgaacaaaaatctgatgatctgcgcatgggagcactgtatatccgtgtcagcacc

SEQ ID NO: 20362 - DNA, 260 bp, Unknown
  Description of Unknown: LeftRegion for integrase B7363 sequence
taactacccgaaagagtagtttgtgatttattttcacaataataaaaataaaactgccgcccggtgctggcacaccgaacggcaaaagatacaatccacacacatacacattaaaaaggagcagattgcgtaaatatattatcatatctgcttcgtttttgcaagtttaatttactcaaaaataaggcaggtgtttttttatgacaacagcagctgcatatatcagagtttcctccgagcgtcaggacgaatattcccct

SEQ ID NO: 20363 - DNA, 260 bp, Unknown; identical to SEQ ID NO: 20273
  Description of Unknown: LeftRegion for integrase B7364 sequence

SEQ ID NO: 20364 - DNA, 260 bp, Unknown
  Description of Unknown: LeftRegion for integrase B7365 sequence
ctccacgctcacaaaatcgcaagtgcaatacataacctcgaaaactaaaataaaacgccgctcggcgctggaacaccgaacggcaaaagatacaatccacacacatacacattaaaaaggagcagattgcgtaaatatattatcacatctgcttcgtttttgcaagtttaatttactcaaaaataaagcaggtgttttttatgacaacagcagctgcatatatcagagtttcctccgagcgtcaggacgaatattctccc

SEQ ID NO: 20365 - DNA, 260 bp, Unknown
  Description of Unknown: LeftRegion for integrase B7366 sequence
gttggtaaaaaagggaaacacaactggcactgtcgaaactgcggatgcgtctttaaatctaagaaataaaaaaaaacccacgctctcaaagtttggcgactccgagcgtgaggcttacgacaagaaaggattttcatggagataacctcgcatgatgtcttttcttgtacctattttatcaaaaaaggggtacaaattcaatgaaaacaacgaataaagtggctatatatgtcagggtttcaacttcttatcaggctgaa

SEQ ID NO: 20366 - DNA, 260 bp, Unknown
  Description of Unknown: LeftRegion for integrase B7367 sequence
ctttacagtcagcaatctaattttataaaagaaaaaccggctcctgcgccaacaggaaccggcgagcacatccgaagatgcaccttattttcagcaaaaatattgtatcatcttcggagcagccatgcaagcggaacctttgttcgcgctggctgttatttttgtacttatttttacataattataatcgaggtgataccatgaccgaacaaaaatctgatgatctgcgcatgggagcactgtatatccgtgtcagcacc

SEQ ID NO: 20367 - DNA, 260 bp, Unknown
  Description of Unknown: LeftRegion for integrase B7368 sequence
caacagtacgagtgaataccgaaaactaacacctgctcagctccgattaaaattagcaaacgacaaacgagcagtaaatctaaatgcaacagacctcaaacctattggtaaagcaataaaatttgatatatctgagaatgaaaccttattagacataaaaaataaagtatcttttagacctgaaaataaggagtatgacgatgaataagaaaataatagcagatatttatataagattgtcaagtaaatctcaagaagat

SEQ ID NO: 20368 - DNA, 260 bp, Unknown
  Description of Unknown: LeftRegion for integrase B7369 sequence
gaacgcaattttgcgttttggctcatatcagacgggctcaattttgagccggttaaaagttggccacaattagacaacgcataatccaattttggattttgataaaagaattgagccgaatccaattttggattgggctccatatcacgagagcgcaaaattgcgctctcctccaaatcgttgatatgtcggaggtatttatgaagatagcagtttacgttcgcgtcagcactctagagcaagcggaaagcggctactca

SEQ ID NO: 20369 - DNA, 260 bp, Unknown
  Description of Unknown: LeftRegion for integrase B7370 sequence
catggtacgcattgcaaagaggcgtgtcgaggtctatctcatcagtttattaaaacgccgtccagtgctggcacaccgaacggcaaaagatacaatccacacacatacacattaaaaaggagcagattgcgtaaatatattatcacatctgcttcgtttttgcaagtttaatttactcaaaaataaagcaggtgttttttatgacaacagcagctgcatatatcagagtttcctccgagcgtcaggacgaatattccccc

SEQ ID NO: 20370 - DNA, 260 bp, Unknown
  Description of Unknown: LeftRegion for integrase B7371 sequence
gtcggcaatctaattttataaaagaaaaaccgccctagtgttggcgcaccagagcggcaaagactacattcccgaaggttgatgcagtacgttccgaaaatattgtatcatcttcggggcagccatgcaagcggaacctttgttcgcgccggctgttatttttatacttatttttacataattataatcgaggtgataccatgaccgaacaaaaatctgatgatctgcgcatgggagcactgtatatccgtgtcagtacc

SEQ ID NO: 20371 - DNA, 260 bp, Unknown
  Description of Unknown: LeftRegion for integrase B7372 sequence
aaaaagttaagataaaatagagcaaataaaaaccgccccggtgttaccagcaccagagcggcgagcacatccgaagatgcacacaatttttcagcaaaaatattgtatcatcttcggggcagccatgcaagcggaacctttgttcgcactggctgttatttttgtacttatttttacataattataatcgaggtgataccatgaccgaacaaaaatctaatgatctgcgcatgggagcactgtatatccgtgtcagcacc

SEQ ID NO: 20372 - DNA, 260 bp, Unknown
  Description of Unknown: LeftRegion for integrase B7373 sequence
ggtcttggtcattgtcttcatcctctttccccgctctaaaggcggattcattatccataatataccacatctttacaaattttccatcaccaaattttacaaaaccataccgaattttacaaaaccctgcccgtcttttaccagtttacggtttttgtttaatatgtaaagtcgaaaagacgtttttggaggtgaaccacatgcagatcgctgcggcgtatgtccgcgtatctgacgagcgtcaggacgaatattcgccc

SEQ ID NO: 20373 - DNA, 260 bp, Unknown
  Description of Unknown: LeftRegion for integrase B7374 sequence
acacgacagcgtatggaagaaaaagcaacacgctgggcagtacaagaattgattccggcggacaaactattggcagcatttgaaatgggatatactgaaatatggcagttagctgaatatttcaatgtcacggaagattttataaaaaatacaataagaatacatagagtaaagggcaatatttagggagtgatgcttttatgaaagtcggaatatattcaagagtttctacccaagagcaagcacgagagggttattcg

SEQ ID NO: 20374 - DNA, 260 bp, Unknown; identical to SEQ ID NO: 20373
  Description of Unknown: LeftRegion for integrase B7375 sequence

SEQ ID NO: 20375 - DNA, 260 bp, Unknown
  Description of Unknown: LeftRegion for integrase B7376 sequence
tgaaaagctgtgaaaagctgcaaaaagtcgataaaatataaaaaccatcatcttttttggcagttgtattttttcagaaaatagaatagaagaatttgctgattgttaccaattagtgatataaattttaccctttaaggctgttgaaaaaatgtttaaactaaaatacctgtgcataaaaattataatgggaggaaaaaatgaaaacagcggcggcatatattcgagtgtccacagaagatcaggttgaatattccccg

SEQ ID NO: 20376 - DNA, 260 bp, Unknown
  Description of Unknown: LeftRegion for integrase B7377 sequence
tctttttatatcgatttgtcaagaaatttccgtcgacaaaaaccggctcctgcgccaacaggaaccggcatgtagcttccgaagatgctactcatttcgcaaaaatattgtatcatcttcggagcggctgcacaatcagaacgtttgtgtggtcgttatttttgtacccatttttacataattttaaccgaggtgataaaatgcaaaaaagaatggctgctttatatgtccgtgtttccacggaggatcaggcagaattg

SEQ ID NO: 20377 - DNA, 260 bp, Unknown
  Description of Unknown: LeftRegion for integrase B7378 sequence
gcaggtaatagattaatgttgttaggtttaggtttacaaggttctgttgatagtttgactccatcttatttaacagctatcttagaacaaaattggattttaatcagacaaaacgaacaaatcattgagctgttaaaagataaagaataatctaaacccgtcgaatttgacgggttttaaatttaaggagcgattttattatgaaaatagcaatctatactagagtatctactatggaacaagcagaagaaggatactct

SEQ ID NO: 20378 - DNA, 260 bp, Unknown
  Description of Unknown: LeftRegion for integrase B7379 sequence
agcaggcaatagactaatgctattaggtttaggattacaaggatctgctcaatctctaactccttcttatttagctgctatcttagaacaaaattggattttaatcagacaaaatgaacaaatcattgagctattaaaagataagaaataatctaagcccgtcgatttcgacgggttttaatttaaggagtgatttaattgtgaaagtagcaatttatactagggtatctactatcgaacaagcagaagaaggatactca

SEQ ID NO: 20379 - DNA, 260 bp, Unknown
  Description of Unknown: LeftRegion for integrase B7380 sequence
ggtgggctttgtgccgataatattacgaaatctacaaattttttagtaactaatagtacagctatgaccggaaaaatgaaaaaagccttagattatcaagaaaaagggattgatatttcgatcataacagaagatgaactttacacgcttttggcatcaaaataatttattaaaaacaagtttgaaaggaattattcaatatgaaggtcggaatatattcaagagtttctacccaagaacaagcacgagagggttattcg

SEQ ID NO: 20380 - DNA, 260 bp, Unknown
  Description of Unknown: LeftRegion for integrase B7381 sequence
tgaaaagctgtgaaaagctgcaaaaagtcgataaaatataacaaccatcatcttttttggcagttgtattttttcagaaaatagaatagaagaatttgctgattgttaccaattagtgatataaattttaccctttaaggctgttgaaaaaatgtttaaactaaaatacctgtgcataaaaattataatgggaggaaaaaatgaaaacagcggcggcatatattcgagtgtccacagaagatcaggttgaatattccccg

SEQ ID NO: 20381 - DNA, 260 bp, Unknown
  Description of Unknown: LeftRegion for integrase B7382 sequence
aactttatctttaattgaatctgaatcaaaataaataaaaaccgccccagtacgccaataccgggacggtggtggatctccgaagagatacctcatttcgcaaaaatattgtatcatcttcggaaacagcatacaagcagaacgtttgtgcgctgttatttttgtacccttttttacataattttaaccgaggtgataaaatgcaaaaaagaatggctgctttatatgtccgtgtttccacagaagatcaggcggaattg

SEQ ID NO: 20382 - DNA, 260 bp, Unknown
  Description of Unknown: LeftRegion for integrase B7383 sequence
gcaggtaatagattaatgttattaggtttaggtttacaaggttctgttgatagtttgactccatcttatttagcagctatcttagaacaaaattggattttaatcagacaaaacgaacaaatcattgagctgttaaaagataaagaataatctaaacccgtcgaatttgacgggttttaaatttaaggagcgattttattatgaaaatagcaatctatactagagtatctactatggaacaagcagaagaaggatactct

SEQ ID NO: 20383 - DNA, 260 bp, Unknown
  Description of Unknown: LeftRegion for integrase B7384 sequence
gtgtacagataggttggctgccaaaaggcgaaaatttgcagcaagatatatcaagaagattaaatgagggacagaacgtgtatgcccgtgttaataaaatttatccattggactattatccgggtaactatggtttagtaattgatgttgcaagatattctaaaagataattgaattttacaaaaggagtttttcaatatatgaaggtcggaatatattcaagagtttctacccaagagcaagcacgagagggttattcg

SEQ ID NO: 20384 - DNA, 260 bp, Unknown
  Description of Unknown: LeftRegion for integrase B7385 sequence
tggactttgtgccgataatattacgaaatctacaaattttttagtaactaatagtacagttatgaccggaaaaatgaaaaaagccttagattatcaagaaaaagggattgatatttcgatcataacagaagatgaactttacacgcttttggcatcaaaataattgattaaaaacaagtttgaaaggagtttttcaatatatgaaggtcggaatatattcaagagtttctacccaagagcaagcacgagagggttattcg

SEQ ID NO: 20385 - DNA, 260 bp, Unknown
  Description of Unknown: LeftRegion for integrase B7386 sequence
cggtggactttgtgccgacaatattacgaaatctacaaattttttagtaactaatagcactgctatgaccggaaaaatgaaaaaagctttagattatcaagaaaaagggattgatatttcgatcataacagaagatgaactttacacgcttttggcatcaaaataatttattaaaaaaagtttgaaaggaattattcaatatgaaggtcggaatatattcaagagtttctacccaagagcaagcacgagagggttattcg

SEQ ID NO: 20386 - DNA, 260 bp, Unknown
  Description of Unknown: LeftRegion for integrase B7387 sequence
ctccggagccggggcgtgtacaagatcaagggcgttgttgtcggatttggtggggacgatgagccgctgatttatgcaacggactgggcagaaaagacacggatcagaacctacaacggactggaaaaggcagtcgcaaagaacgactaaaaaaaacagccggggagcaatccccggcaaaacctaaaggaggaaggcacatgcagacggcggcggcgtatgtccgggtgtcaacggaagagcaagtggaatattcaccg

SEQ ID NO: 20387 - DNA, 260 bp, Unknown
  Description of Unknown: LeftRegion for integrase B7388 sequence
ttcatttgtatgaaaaaatgaagattgaatgtaagcctttccggcaatcttacaatcaatgtttctttttcttcaaatctgtcataagtaaaatcaagcacagcctcacctcctacaacaatgtacttattcattattatataattagaatccactatttgtccatatttttcattgaataacctataaggagtgattttatgcaaagaacagttatctacgcgcgcttttcctcagatatgcagcgtgaagaaagcata

SEQ ID NO: 20388 - DNA, 260 bp, Unknown
  Description of Unknown: LeftRegion for integrase B7389 sequence
attagttgactttttttcattatatacgtgatttatatgactaaaaagcaacaagaaaacgaagtcaaatataggctttctataatgatgcttcttgatcttaagtgtaaaggtcaaattacaaatgaggaatttcaggaaatgaaaaaaaggcgcataagaaaatacaagcctataataggctgtttggaggtgagatattgaaaaagacagtaaccgagataaatccaaaatacgcaaagccgaaaaaagaaactgca

SEQ ID NO: 20389 - DNA, 260 bp, Unknown
  Description of Unknown: LeftRegion for integrase B7390 sequence
aaaaatgcattgcataaagctaaggaataccaagaagaacaaaatatgtcaccagatgcaatctacgaccaattaacttcagactacggcgaacaatttacaccagatgaagctaattatgcaattcagcatcttaaaaaataagaaacaatctaagcctgtcgatttcgacgggttttaatttaaggagcaattttattatgaaaatagcaatctatactagagtatctactatggaacaagcagaagaaggatactct

SEQ ID NO: 20390 - DNA, 260 bp, Unknown
  Description of Unknown: LeftRegion for integrase B7391 sequence
gaatcatgattacattttttattatactcatgaatttcaggattgcaatagtaatgtcacagatcgcaaaatctgacatattagtgtcataatgattacaaaaagattacaaaaagcaacgttttattagcaaaaaaggctgttgaaaaaaatgtttaaactaaaatacctgtgcataaaaattataatgggaggaaaaaatgaaaacagcggcggcatatattcgagtgtccacagaagatcaggttgaatactccccg

SEQ ID NO: 20391 - DNA, 260 bp, Unknown
  Description of Unknown: LeftRegion for integrase B7392 sequence
agcaggcaatagactaatgctattaggtttaggattacaaggatctgctcaatctctaactccttcttatttagctgctatcttagaacaaaattgaattttaatcagacaaaatgaacaaatcattgagctattaaaagataagaaataatctaagcccgtcgatttcgacgggttttaatttaaggagtgatttaattgtgaaagtagcaatttatactagggtatctactatcgaacaagcagaagaaggatactct

SEQ ID NO: 20392 - DNA, 260 bp, Unknown
  Description of Unknown: LeftRegion for integrase B7393 sequence
gcaattgcatgggtgtcttttactttataaatatatacaaaaaccggttcctgttggcgcaggaaccggcatgtagcttccgaagatgctactcatttcgcaaaaatattgtatcatcttcgaaaacagcatacaagcagaacgtttgtgcgctgttatttttgtacccatttttacataattttaaccgaggtgataaaatgcaaaaaagaatggcagctttatacgtccgtgtttccacggaggatcaggcggaattg

SEQ ID NO: 20393 - DNA, 260 bp, Unknown
  Description of Unknown: LeftRegion for integrase B7394 sequence
ggtgggctttgtgccgataatattacgaaatctacaaattttttagtaactaatagtacaactatgaccggaaaaatgaaaaaagccttagattatcaagaaaaaggtattgatatttcgatcataacagaagatgaactttacacgcttttggcatcaaaataatttattaaaaacaattttgaaaggaattattaaatatgaaggtcggaatatattcaagagtttctacccaagagcaagcacgagagggttattcg

SEQ ID NO: 20394 - DNA, 260 bp, Unknown; identical to SEQ ID NO: 20389
  Description of Unknown: LeftRegion for integrase B7395 sequence

SEQ ID NO: 20395 - DNA, 260 bp, Unknown
  Description of Unknown: LeftRegion for integrase B7396 sequence
agggacaattaatggaaaaagctatattgtatgccataaacgaaagaatgttctcgctcggtctgatagacgagaaaacaagagatagaattaaagctgaaatcagcattagaaagtaacgaaaatgtattgagtggagttatatgaggtgttatactttatatgattccactccctgtttattaagggagaaatgcactatgaatatttattatgtcagagaaaaattaagaaattgctctatttacgacattgaacta

SEQ ID NO: 20396 - DNA, 260 bp, Unknown
  Description of Unknown: LeftRegion for integrase B7397 sequence
gaatggcaaaatgcttggggacttttcttatagagggatgcccgaaaggattataccgagcagtgaaggtgagttgatttttaaggctatgaatcactacgacacgcataagtaaaaacagccgcttccaacatggtcgaaatcgactggtttagaagcggctattttcttgattttgcccaaacaaaggagatgttattatgttaaacgcagtaatctatgctcgcttctcgtctgatatgcagcgtgaagaaagcata

SEQ ID NO: 20397 - DNA, 260 bp, Unknown
  Description of Unknown: LeftRegion for integrase B7398 sequence
gaatataattataacaatcaaggtacatatagcaaacaatatttaactttcgtagaaagatatatttaatttttttacttttatttaaaactaaattgattctatttttggaggatttatgaaaagaaatgaaataagttataaagagagaatggaaaaagccgtggaacttattaaaaagctatatttggaggttcataatgaaaatagctgtggcgtatgtgagagtgtcaactaataaacaggatattagaggtagc

SEQ ID NO: 20398 - DNA, 260 bp, Unknown
  Description of Unknown: LeftRegion for integrase B7399 sequence
agcaggcaatagactaatgctattaggtttaggattacaaggatctgctcaatctctaaccccttcttatttagctgctatcttaaaataaaattggattttaatcagacaaaatgaacaaatcattgagctattaaaagataagaaataatctaagcccgtcgatttcgacgggttttaatttaaggagtgatttaattgtgaaagtagcaatttatactagggtatctactatcgaacaagcagaagaaggatactca

SEQ ID NO: 20399 - DNA, 260 bp, Unknown; identical to SEQ ID NO: 20263
  Description of Unknown: LeftRegion for integrase B7400 sequence

SEQ ID NO: 20400 - DNA, 260 bp, Unknown
  Description of Unknown: LeftRegion for integrase B7401 sequence
cgaaatgaagagtcactatcagatgatgaacgtcagatcgtagacaactaccgcgacagttcaccgcaatggcagaagaacatagcgatgaccgcaaaagcggcggcaagtgagtcaaagaaggaataaaaaagaaaaaagccctgcgcgaccgtccaaagcagcacagggcacctaacaaaaggcaaggtgataataccatgaccaaaggtagtcgtgcggctatctacgcacgctttagctcgcacaatcagcgagac

SEQ ID NO: 20401 - DNA, 260 bp, Unknown
  Description of Unknown: LeftRegion for integrase B7402 sequence
agctggtacgctagaggctctgaaaaggtaagtataacaatacttagaaagatagcgttatactttaacgtctcgttagaggtattaataaacggaaatactataacgtcggtctattttactgagtacgagtatactaaagaagagttagagctaatcgctaattttggtaaatttttaaaagaaagtaggttaaaataatgaaaaacgacgtagctatatatttacgtaaatcacgtgaggacgacgagctaaaagag

SEQ ID NO: 20402 - DNA, 260 bp, Unknown
  Description of Unknown: LeftRegion for integrase B7403 sequence
taacatacatattggtatgccgccggacgttaaaaagcaatttgaggatttaaaaaagtcgttatacaaaaggagtgatacatatgattaaaattactctaaacggaaaagaaataaacattatggatattcagcttgataagcaaacagttgcacttataatgtcgataattgacagttgaaaaggaaacttgtaaaatgtgtcgtataaaaacgtgatatgtacggcacatttttgttttagagaggggatattgatt

SEQ ID NO: 20403 - DNA, 260 bp, Unknown
  Description of Unknown: LeftRegion for integrase B7404 sequence
gaggattttgacccttttaaatagcaaaaccgcccggtgctggtaacaccgaacggccttgcatagatttctcttaccggatgcccggaaagatatattcaaacctgaacactttgaattatatcattctttcgggcacctcgcaagaggtgtattttttatacccttttttaatatttttatacgaaaggatgatcgaaatgagaataggtgcagcttatatccgtgtcagcacggacgaccagctggatatcagcccg

SEQ ID NO: 20404 - DNA, 260 bp, Unknown
  Description of Unknown: LeftRegion for integrase B7405 sequence
ctgtttcccaaattattgcggcggcaaaattcagtgatgatgagcgagaaatagccgagctgcttgacgttgatctgaacacgttgaaaggcgccgttcaatattataagagaaaagggctgatgtaaatattaaaaaatcttgacaccccgaatgttaagtagtacaatcaaaatacagatattggagagaacaagattttgaaagccgcatcgtacgtacgcgtttcgacgcttgaacaaaaaaagaacggatattcc

SEQ ID NO: 20405 - DNA, 260 bp, Unknown
  Description of Unknown: LeftRegion for integrase B7406 sequence
tgtttcccaaattattgcggcggcaaaattcagtgatgatgagcgagaaatagccgagctgcttgacgttgatctgaacacgttgaaaggcgccgttcaatattataagagaaaagggctgatgtaaatattaaaaaatcttgacacccccgaatgttaagtagtacaatcaaaatacagatattggagagaacaagattttgaaagccgcatcgtacgtacgcgtttcgacgcttgaacaaaaaaagaacggatattcc

SEQ ID NO: 20406 - DNA, 260 bp, Unknown
  Description of Unknown: LeftRegion for integrase B7407 sequence
tccattaagcggaaagctcatttgtccattctgtggaaaaacactccgcaggcggcaggtttacaacaagaagattcaatggctgtgcagcacatacattgaaaaaagaaagaaagcctgcaagggcatccgcattgatgatgtcgctcttgcaggattaaatatcacggaacagacagtagttgaggaggtaattcaaaatggcaagaagcattactgttatacccgcaagacagatttcgactgcggaattcggaaca

SEQ ID NO: 20407 - DNA, 260 bp, Unknown
  Description of Unknown: LeftRegion for integrase B7408 sequence
ccgcggaactaaaaaacaaaagcccccgtgcgggaacacggagacttttgcagattcttacccttccagagttttcagtccctgatgaagatgataagaaacaaaaagtatgcaactgcattatatcatctcagggacgttctggcaaggggcgtcttttttgtactcttttttcgtataatttgaggagatgattttaagtggtgaaaaaagtgcttcgatgtgcaatctatattcgtgtgtctactgcagagcaggcc

SEQ ID NO: 20408 - DNA, 260 bp, Unknown
  Description of Unknown: LeftRegion for integrase B7409 sequence
gaatgatatgggatataataaaaaaagaaatagtaatcaaaaagaaaaaacaaggtaattaatttccttgtttattttttaagtattcatataattttaaatattcttccaaaaagtagtcaatccccatcagcaccattccttgtcttttttttaagtttaacatatttaatttaaaatttcaaataaaaggtggtattatgtataaaatagctatttatgtccgaaaaagtgtgaaaagcgaaaaaaactctgtttct

SEQ ID NO: 20409 - DNA, 260 bp, Unknown
  Description of Unknown: LeftRegion for integrase B7410 sequence
gaagacgacatccgaactattggggaagttgtcagcgtatatagagagaaataaaccaactgtttccattttggaaacaactcaaaaaagccccacgctcagaagtttggcgaccgagagcgtgaggctagtggtaagaaaaaagcattaaaaagctctttttcttatacccattttatcaagaaatgaggtaaaaatcaatgcaaaataaagtagcaatctatgtcagggtttcgacttcatctcaggctgaagagggt

SEQ ID NO: 20410 - DNA, 260 bp, Unknown
  Description of Unknown: LeftRegion for integrase B7411 sequence
cacacaagtttttattgtcctgaccttgaggatgaaagcgacggttatactctaccaattaaagggcttaaaattaaagaagccaagaaaaggaaaatgggttattgctattattgtaaacaagatttgcacgatacgctaacttatggttattatcaagatgattatatgaacgattacgacgacgaggtagagcgagaatgaaagtagcattatattctagagtatcaacgcaggagcaagcaattaatggctattcg
